United States Patent Application Publication US 2006/0134663 A1 - sequence listing, part 15

SEQ ID NO: 25445 - DNA, 1500 bp, Homo Sapiens
agactgccgagcagccttgagccgttgagcagctgaacagaggccatgccggggcactccgaggcctgagacgaccacgcctgtgccgctgaggaccttcatcagggctccgtccacttggcccgcttggctgtccaatcacactccagtgtcaaccactggcacccagcagccaagagaggtgtggcgtggccctggggacgcatggctgaggcaggaacaggtgagccgtcccccagcgtggagggcgaacacgggacggagtatgacacgctgccttccgacacagtctccctcagtgactcggactctgacctcagcttgcccggtggtgctgaagtggaagcactgtccccgatggggctgcctggggaggaggattcaggtcctgatgagccgccctcacccccgtcaggcctcctcccagccacggtgcagccattccatctgagaggcatgagctccaccttctcccagcgcagccgtgacatctttgactgcctggagggggcggccagacgggctccatcctctgtggcccacaccagcatgagtgacaacggaggcttcaagcggcccctagcgccctcaggccggtctccagtggaaggcctgggcagggcccatcggagccctgcctcaccaagggtgcctccggtccccgactacgtggcacaccccgagcgctggaccaagtacagcctggaagatgtgaccgaggtcagcgagcagagcaatcaggccaccgccctggccttcctgggctcccagagcctggctgcccccactgactgcgtgtcctccttcaaccaggatccctccagctgtggggaggggagggtcatcttcaccaaaccagtccgaggggtcgaagccagacacgagaggaagagggtcctggggaaggtgggagagccaggcaggggcggccttgggaatcctgccacagacaggggcgagggccctgtggagctggcccatctggccgggcccgggagcccagaggctgaggagtggggcagcccccatggaggcctgcaggaggtggaggcactgtcagggtctgtccacagtgggtctgtgccaggtctcccgccggtggaaactgttggcttccatggcagcaggaagcggagtcgagaccacttccggaacaagagcagcagccccgaggacccaggtgctgaggtctgagagggagatggcccagcctgaccccactggccactgccatcctgctgccttcccagtggggctggtcagggggcagcctggccactgcctagctggaatgggaggaagcctgcaggtggcaccggtggccctggctgcagttctgggcagcatcctcccaagcagagaccttgctgaagctcctggggtgtggggtgtgggctggaagcactggctccctggtagggacaataaaggttttgggtctttcaaaaaaaaaaaaaaaaaaaaaaaaaaaaaaaaaaaaaaaaaaaaaaaaaaaaaaac

SEQ ID NO: 25446 - DNA, 1348 bp, Homo Sapiens
tgaactcattctgaagaggctgacgattttactgtctcatttttttcctttctccagaatgggttctgggtgggtcccctgggtggtggctctgctagtgaatctgacccgactggattcctccatgactcaaggcacagactctccagaagattttgtgattcaggcaaaggctgactgttacttcaccaacgggacagaaaaggtgcagtttgtggtcagattcatctttaacttggaggagtatgtacgtttcgacagtgatgtggggatgtttgtggcattgaccaagctggggcagccagatgctgagcagtggaacagccggctggatctcttggagaggagcagacaggccgtggatggggtctgtagacacaactacaggctgggcgcacccttcactgtggggagaaaagtgcaaccagaggtgacagtgtacccagagaggaccccactcctgcaccagcataatctgctgcactgctctgtgacaggcttctatccaggggatatcaagatcaagtggttcctgaatgggcaggaggagagagctggggtcatgtccactggccctatcaggaatggagactggacctttcagactgtggtgatgctagaaatgactcctgaacttggacatgtctacacctgccttgtcgatcactccagcctgctgagccctgtttctgtggagtggagagctcagtctgaatattcttggagaaagatgctgagtggcattgcagccttcctacttgggctaatcttccttctggtgggaatcgtcatccagctaagggctcagaaaggatatgtgaggacgcagatgtctggtaatgaggtctcaagagctgttctgctccctcagtcatgctaaggtcctcactgaagcttctctctctggagcctgaagtagtgatgagtagtctgggccctgggtgaggtaaaggacattcatgaggtcaatgttctgggaataactctcttccctgatccttggaggagcccgaactgattctggagctctgtgttctgagatcatgcatctcccacccatctgcccttctcccttctacgtgtacatcattaatccccattgccaagggcattgtccagaaactcccctgagaccttactccttccagccccaaatcatttacttttctgtggtccagccctactcctataagtcatgatctccaaagctttctgtcttccaactgcagtctccacagtcttcagaagacaaatgctcaggtagtcactgtttccttttcactttttaaaaaccttttattgtcaaataaaatggagatacaaaaaatgtaaaaaaaaaaaaaaaaaa

SEQ ID NO: 25447 - DNA, 1663 bp, Homo Sapiens
cgcggtcctcggagacacgcggcggtgtcctgtgttggccatggccgactacctgattagtgggggcacgtcctacgtgccagacgacggactcacagcacagcagctcttcaactgcggagacggcctcacctacaatgactttctcattctccctgggtacatcgacttcactgcagaccaggtggacctgacttctgctctgaccaagaaaatcactcttaagaccccactggtttcctctcccatggacacagtcacagaggctgggatggccatagcaatggcgcttacaggcggtattggcttcatccaccacaactgtacacctgaattccaggccaatgaagttcggaaagtgaagaaatatgaacagggattcatcacagaccctgtggtcctcagccccaaggatcgcgtgcgggatgtttttgaggccaaggcccggcatggtttctgcggtatcccaatcacagacacaggccggatggggagccgcttggtgggcatcatctcctccagggacattgattttctcaaagaggaggaacatgactgtttcttggaagagataatgacaaagagggaagacttggtggtagcccctgcaggcatcacactgaaggaggcaaatgaaattctgcagcgcagcaagaagggaaagttgcccattgtaaatgaagatgatgagcttgtggccatcattgcccggacagacctgaagaagaatcgggactacccactagcctccaaagatgccaagaaacagctgctgtgtggggcagccattggcactcatgaggatgacaagtataggctggacttgctcgcccaggctggtgtggatgtagtggttttggactcttcccagggaaattccatcttccagatcaatatgatcaagtacatcaaagacaaataccctaatctccaagtcattggaggcaatgtggtcactgctgcccaggccaagaacctcattgatgcaggtgtggatgccctgcgggtgggcatgggaagtggctccatctgcattacgcaggaagtgctggcctgtgggcggccccaagcaacagcagtgtacaaggtgtcagagtatgcacggcgctttggtgttccggtcattgctgatggaggaatccaaaatgtgggtcatattgcgaaagccttggcccttggggcctccacagtcatgatgggctctctcctggctgccaccactgaggcccctggtgaatacttcttttccgatgggatccggctaaagaaatatcgcggtatgggttctctcgatgccatggacaagcacctcagcagccagaacagatatttcagtgaagctgacaaaatcaaagtggcccagggagtgtctggtgctgtgcaggacaaagggtcaatccacaaatttgtcccttacctgattgctggcatccaacactcatgccaggacattggtgccaagagcttgacccaagtccgagccatgatgtactctggggagcttaagtttgagaagagaacgtcctcagcccaggtggaaggtggcgtccatagcctccattcgtatgagaagcggcttttctgaaaagggatccagcacacctcctcggtttttttttcaataaaagtttagaaagaaaaaaaaaaaaaaaaaaaaaaaaaa

SEQ ID NO: 25448 - DNA, 1125 bp, Homo Sapiens
ggcggctggtgagcgcccgctggaggctggagcttccgggccctggaaaggggtccccgcgcgccccgggtcggaggcagacccctgggtttgggggacatgggcatttggggcgcctgaacccaagacctctggatgagctgccccgttcagaccatggatcctgaggtgaccttgctgctgcagtgccctggcgggggcctgccccaggagcagatacaggccgagctgagccccgcccatgaccgtcgcccactgccaggtggggacgaggccatcactgccatctgggagacccggctaaaggcccaaccctggctcttcgacgcccccaagttccgcctgcactcagccaccctggcgcctattggctctcgggggccacagctgctcctgcgcctgggccttacttcctaccgagacttcctgggcaccaactggtccagctcagctgcctggctgcgacagcagggtgccaccgactggggtgacacgcaggcctatctggcggacccactgggggtgggcgctgcactagccacagccgatgacttccttgtcttcctgcgccgctcccggcaggtggctgaggcccctgggctggtggacgtacctggtgggcaccctgagcctcaggccctgtgccctggtggcagcccccagcaccaggacctcgctgggcagctggtggtacatgaactcttttccagtgtccttcaggagatctgtgatgaggtgaacctgccgctgctcaccctgagccagcccctgctgttgggcatcgcccgaaatgagaccagtgctggccgagccagtgccgagttctatgtccagtgcagcctgacttctgagcaggtgaggaagcactacctgagtgggggacccgaggcccacgagtctacaggaatcttctttgtggagacacagaacgtgcggagattgcccgagacggagatgtgggctgaactctgcccctcggccaaaggcgccatcatcctctacaaccgggttcagggaagtcccactggagcggccctagggtccccagccctactcccgccgctctgaaaataataaacgactttattcttggaaaaaaaaaaaaaaaaaaaaaaaaaaaaaaaa

SEQ ID NO: 25449 - DNA, 3275 bp, Homo Sapiens
ctgggaccctgaggcggccgtggttaggcggctccccggcggctcctccgcggcggtgacggcgaccgcactccccgcttcccgctccccgcgctcctccgcccgggtccgccagccgaggccgctcccgagcgtcggaagatgccggccgtgtccaagggggacgggatgcggggcctggcggtcttcatctcggatatccgcaactgtaaaagtaaagaagcagaaataaaaaggataaacaaggaactggcaaatatcagatcaaaatttaaaggtgacaaggctcttgatggctatagtaaaaaaaagtacgtctgcaagttgctcttcatctttctccttggtcatgacattgactttggacacatggaggctgtgaacctgctgagttcaaacagatacacggaaaagcagatcggctaccttttcatctctgtgttggtgaactcaaacagtgagctgatccgcctgatcaacaacgccatcaagaatgacctggccagccgcaaccccaccttcatgggcctggccctgcactgcatcgccagcgtgggcagccgggagatggccgaggccttcgccggggagatccctaaggtcctcgtagccggagacactatggacagcgtgaagcagagcgcggccctgtgcttgctgcgcctgtacaggacgtcccccgatcttgtccccatgggcgactggacatcccgagtggtgcacctgctcaatgaccagcacttgggtgtggtaactgcagccacaagtctgatcaccactttagcacagaagaacccagaagagtttaaaacctccgtgtctctggctgtctctaggctaagcagaatcgtgacgtctgcatccacagatctccaggattacacttactattttgtcccggctccctggctgtctgtcaaactgctgagactgctgcagtgctacccacccccagaccctgcagtgcgaggccgcctgactgagtgcctggagaccatcctgaacaaagcccaagaaccgcccaagtcgaagaaggtccagcactccaacgcgaagaatgccgtgctcttcgaggccatcagcttaatcattcaccatgacagtgagccgaacctgctcgtccgtgcctgcaaccagttgggccagtttctgcagcaccgcgagaccaacctgcgctacctggccctggagagcatgtgcacgctggccagctctgagttctcccatgaggctgtcaagacgcacatcgagacggtcatcaacgccctgaagactgagcgggacgtgagcgtgcggcagcgggccgtggacctcctctacgccatgtgcgaccgcagcaacgccccacagatcgtggccgagatgctgagctatctggagacagctgactactccatccgagaagagattgtgctgaaggtcgccatcctggctgagaagtacgcggtggactacacctggtatgtggataccatcttgaacttgatccgaattgctggtgattacgtgagtgaagaggtgtggtaccgagtcattcagatcgtcatcaaccgggacgacgtgcagggctacgcggccaagactgtgttcgaggctcttcaggctcccgcgtgccacgagaacctggtcaaagtgggcggctacatcctgggggagtttggaaacttgatagctggagacccgagatccagcccgctgatccagttccacctgctgcactccaagttccacctgtgcagcgtccccacccgcgcgctgctcctgtccacctacatcaagttcgtgaacctcttcccggaggtgaagcccaccatccaggacgtgctgcgcagcgacagccagctcaggaacgcagacgtggagctgcagcagcgtgctgtggagtacctgcggctcagcaccgtggccagcaccgacattctggcgaccgtgctggaggagatgcccccattcccggagcgggagtcctccatcttggcaaagctcaagaagaagaagggccccagcacggtgacagacctggaggacaccaagcgggacaggagtgtggacgtgaacgggggtcctgagcctgccccagccagtaccagcgccgtgtctacgccttctccgtcggcagacctgctgggtctcggggctgccccccctgcccccgcgggccccccaccctcctccggcggcagcgggctgctcgtggacgtgttctcagactcggcctctgtggtcgcgcctctcgctcctggctccgaagacaactttgccaggtttgtttgtaaaaacaatggtgtgttgtttgaaaaccagctgcttcaaattggacttaagtctgaatttcggcagaatttaggtcggatgtttatcttttatggtaataagacctccacgcagttcctaaactttaccccaacactaatctgttcagacgaccttcagcctaacctgaacctgcagaccaagcccgtggacccgaccgtggaggggggcgcgcaggtgcagcaggtggtcaacatagagtgcgtgtccgacttcacggaggcgccagtcctcaacattcagttcaggtatgggggcaccttccagaacgtgtctgtgcagctgcccatcactctcaacaaattcttccagccgacagaaatggcttctcaggatttctttcaacgttggaagcagttgagcaatccacagcaggaagtgcagaacatcttcaaagcaaagcacccaatggacacagaagtcaccaaagccaagatcattggatttggttctgcacttcttgaagaagttgatcctaatcctgcgaatttcgtgggagctggaatcatccacacgaaaaccacccagattggatgcctgctgcgcttggagccgaacctgcaagcccagatgtaccggctcacgctgcgcacaagtaaggaagccgtttctcagagattatgtgaattgctctcagcgcagttttagtcctgaggatggaagaccaggcttgtgtgtcttgtgttgtcttcgtctgtgccgtttgtcttcgtggccatcctgcagatgagcaccgtgtccagtgccacagcacaaggcgcctccccgccccgccgccccacacctctcccctttgggctggacgggaacacacgtgtgtggctcaggaggaaaagctcagcctggactgtggcagccacggcagaaggtggatcttgggatcaatttttataaaaatcgagacagttctgtggttaaatctacaaattaaagggaaattagaaaaaaaaaaaaaaaaaaaa

SEQ ID NO: 25450 - DNA, 2005 bp, Homo Sapiens
gttaccgctgctgcccctgctgtcgctcctggtcggcgcgtggctcaagctaggaaatggacaggctactagcatggtccaactgcagggtgggagattcctgatgggaacaaattctccagacagcagagatggtgaagggcctgtgcgggaggcgacagtgaaaccctttgccatcgacatatttcctgtcaccaacaaagatttcagggattttgtcagggagaaaaagtatcggacagaagctgagatgtttggatggagctttgtctttgaggactttgtctctgatgagctgagaaacaaagccacccagccaatgaagtctgtactctggtggcttccagtggaaaaggcattttggaggcagcctgcaggtcctggctctggcatccgagagagactggagcacccagtgttacacgtgagctggaatgacgcccgtgcctactgtgcttggcggggaaaacgactgcccacggaggaagagtgggagtttgccgcccgagggggcttgaagggtcaagtttacccatgggggaactggttccagccaaaccgcaccaacctgtggcagggaaagttccccaagggagacaaagctgaggatggcttccatggagtctccccagtgaatgctttccccgcccagaacaactacgggctctatgacctcctggggaacgtgtgggagtggacagcatcaccgtaccaggctgctgagcaggacatgcgcgtcctccggggggcatcctggatcgacacagctgatggctctgccaatcaccgggcccgggtcaccaccaggatgggcaacactccagattcagcctcagacaacctcggtttccgctgtgctgcagacgcaggccggccgccaggggagctgtaagcagccgggtggtgacaaggagaaaagccttctagggtcactgtcattccctggccatgttgcaaacagcgcaattccaagctcgagagcttcagcctcaggaaagaacttccccttccctgtctcccatccctctgtggcaggcgcctctcaccagggcaggagaggactcagcctcctgtgttttggagaaggggcccaatgtgtgttgacgatggctgggggccaggtgtttctgttagaggccaagtattattgacacaggattgcaaacacacaaacaattggaacagagcactctgaaaggccattttttaagcattttaaaatctattctctccccctttctccctggatgattcaggaagctgacattgtttcctcaaggcagaattttcctggttctgttttctcagccagttgctgtggaaggagaatgctttctttgtggcctcatctgtggtttcgtgtccctctgaaggaaactagtttccactgtgtaacaggcagacatgtaactatttaaagcacagttcagtcctaaaagggtctgggagaaccagatgatgtactaggtgaagcattgcattgtgggaatcacaaagcaaatagtactccagaaagacaaatatcagaagcttcctattcttttttttttttttttttttttgagacagggtctttctctgttgcccaggctagagtgcactggtgatcacggctcactctagccttgaattcctgggcccaagcaattctcccacctcagcctcctgagtagctgggactacaagtgtgcaccaccatgcctggctaattttttgaatttttgtagtgatgggatctcgctctgttgcccagggtggtctcgaactcctggcctcaagcgatcctcccacctcgacctcccaaagtgctgggattacaggtgtgagccacctcgcctgggcccccttctccatatgcctccaaaaacatgtccctggagagtagcctgctcccacactgtcactggatgtcatggggccaataaaatctcctgcaattgtgaaaaaaaaaaaaaaaaaaaaaaaaaaaaaaaaaaaaaaaaaaaaaaaaaaaaaaaaaaaaaaa

SEQ ID NO: 25451 - DNA, 2987 bp, Homo Sapiens
gcggagcgcggcgcgcgcggcggttgggccgttggctgttcggccctgggatccgccgccactccgcgatcagaccgctctgtgccgcgagccgccgtgagcactcggattcaagccggcgccaacgagtccgggggcatcgcccgcagcggccaagctcatggccggctgagcgggacgccgcctccgcctcagccaccgccgccgccgccgcctcctcctcctcagccggcggcggcccgggcccagcaaccatggctgaagactactgggacgggcgcctgcggcgaacaggaggagaaggaggtcgcgcggcctcatcccgggccgccgccccaggcgccgccgcgccggccccgcggctctgaggttgctcgcgcgcccccgccgatcgccatggatcggatgaagaagatcaaacggcagctgtcaatgacactcagctctgcaccagagattgtgcacgaggacttgaagatggggtctgatggggagagtgaccaggcttcagccacgtcctcggatgaggtgcagtctccagtgagagtgcgtatgcgcaaccatcccccacgcaagatctccactgaggacatcaacaagcgcctatcactaccagctgacatccggctgcctgagggctacctggagaagctgaccctcaatagccccatctttgacaagcccctcagccgccgcctccgtcgtgtcagcctatctgagattggctttgggaaactggagacctacattaagctggacaaactgggcgagggtacctatgccaccgtctacaaaggcaaaagcaagctcacagacaaccttgtggcactcaaggagatcagactggaacatgaagagggggcaccctgcaccgccatccgggaagtgtccctgctcaaggacctcaaacacgccaacatcgttacgctacatgacattatccacacggagaagtccctcacccttgtctttgagtacctggacaaggacctgaagcagtacctggatgactgtgggaacatcatcaacatgcacaacgtgaaactgttcctgttccagctgctccgtggcctggcctactgccaccggcagaaggtgctacaccgagacctcaagccccagaacctgctcatcaacgagaggggagagctcaagctggctgactttggcctggcccgagccaagtcaatcccaacaaagacatactccaatgaggtggtgacactgtggtaccggccccctgacatcctgcttgggtccacggactactccactcagattgacatgtggggtgtgggctgcatcttctatgagatggccacaggccgtcccctctttccgggctccacggtggaggaacagctacacttcatcttccgtatcttaggaaccccaactgaggagacgtggccaggcatcctgtccaacgaggagttcaagacatacaactaccccaagtaccgagccgaggcccttttgagccacgcaccccgacttgatagcgacggggccgacctcctcaccaagctgttgcagtttgagggtcgaaatcggatctccgcagaggatgccatgaaacatccattcttcctcagtctgggggagcggatccacaaacttcctgacactacttccatatttgcactaaaggagattcagctacaaaaggaggccagccttcggtcttcgtcgatgcctgactcaggcaggccagctttccgcgtggtggacaccgagttctaagccacagaccgaggccccagcaggcagcggctggagggatgccacacccctcacagggcagcccccaactacatcttccctgcttactctctgcctacctgcctgagccatgttcacctgcccacttgtcccctgctgcctgcccaaacaccccaccattggcctgtcaacccacccattggcctgtctgctgggtgctaacaaagctctcatcactccttcacttggtctgtctgtctctgtcttggtagttgccggtggacagcatggccgtgccagcctcccacactgaggccaggtctaccccccatcataccagcccccaggaccactaccccacggccagccaggggtccagagctagcccaggctggggatctcgactcagacaagatggtgacaatgccttgagtctgaggcatcctctgcctgctttcctgcctgccccacctgcctcatattgtgtgggcctttttttgtttgtttcattcattgttttttttttttttaattattttaaatgagatttttgttttttttaaatgcaatatctctgtatacagactggctgggccccaccccctgcgtgtggccctcccacagtattttgtgcaatgaagccctgctcccagcctttcagagacagggacacagcccctatttggaaccctgatcatcaccagaccctgggattggctatgggaaagcatgccacagccactcgccttcctacccccgcccgccatccccagttgcagggggatctggggactaccagagactctgggaaatggacaaggtggggggccccactctttctctcctgcagtcccgtagctggggcctccttccttctcagggtctccccagcccagtccccttgctcccatcccactcggtgctgttgggtaggggccctgccaggaactgaccagctcagcgaggagccataatgtgcatatgtgcacaagcagggttgggggaggggggtgtgaggggttgtgcccaggtgttgccccctatctcctggggagggtgaggcagggcagggacagtctccagggtcagtccctggatgggtggttacctccccttcctccaccctaagccctggggccctgaaatggggtgggagggcaggggtgggagccctcctagtgggtttggggggttgggttcctgaatgcaccataatcgctgtatgaaatattaaaaagtctaaagtgaaaaaaaaaaaaaaaaaa

SEQ ID NO: 25452 - DNA, 3267 bp, Homo Sapiens
ggcacgaggcaacctctccgcgatgactgtgagtggtccagggacccccgagccccggccggccacccccggggccagctcagtggagcagctgcggaaggagggcaatgagctgttcaaatgtggagactacgggggcgccctggcggcctacactcaggccctgggtctggacgcgacgccccaggaccaggccgttctgcaccggaaccgggccgcctgccacctcaagctggaagattacgacaaagcagaaacagaggcatccaaagccattgaaaaggatggtggggatgtcaaagcactctaccggcggagccaagccctagagaagctgggccgcctggaccaggctgtccttgacctgcagagatgtgtgagcttggagcccaagaacaaagttttccaggaggccttgcggaacatcgggggccagattcaggagaaggtgcgatacatgtcctcgacggatgccaaagtggaacagatgtttcagatactgttggacccagaagagaagggcactgagaaaaagcaaaaggcttctcagaacctggtggtgctggccagggaggatgctggagcggagaagatcttccggagtaatggggttcagctcttgcaacgtttactggacatgggagagactgacctcatgctggcggctctgcgtacgctggttggcatttgctctgagcatcagtcacggacagtggcaaccctgagcatactgggaactcggcgagtagtctccatcctgggcgtggaaagccaggctgtgtccctggctgcctgccacctgctgcaggttatgtttgatgccctcaaggaaggtgtcaaaaaaggcttccgaggcaaagaaggtgccatcattgtggatcctgcccgggagctgaaggtcctcatcagtaacctcttagatctgctgacagaggtgggggtctctggccaaggccgagacaatgccctgaccctcctgattaaagcggtgccccggaagtctctcaaggaccccaacaacagcctcaccctctgggtcatcgaccaaggtctgaaaaagattttggaagtggggggctctctacaggaccctcctggggagctcgcagtgaccgcaaacagccgcatgagcgcctctattctcctcagcaagctctttgatgacctcaagtgtgatgcggagagggagaatttccacagactttgtgaaaactacatcaagagctggtttgagggccaagggctggccgggaagctacgggccatccagacggtgtcctgcctcctgcagggcccatgtgacgctggcaaccgggccttggagctgagcggtgtcatggagagtgtgattgctctgtgtgcctctgagcaggaggaggagcagctggtggccgtggaggctctgatccatgcagccggcaaggctaagcgggcctcattcatcactgccaatggtgtctcgctgctgaaggacctatataagtgcagcgagaaggacagcatccgcatccgggcgctagtgggactctgtaagctcggttcggctggagggactgacttcagcatgaagcagtttgctgaaggctccactctcaaactggctaagcagtgtcgaaagtggctgtgcaatgaccagatcgacgcaggcactcggcgctgggcagtggagggcctggcttacctgacctttgatgccgacgtgaaggaagagtttgtggaggatgcggctgctctgaaagctctgttccagctcagcaggttggaggagaggtcagtgctctttgcggtggcctcagcgctggtgaactgcaccaacagctatgactacgaggagcccgaccccaagatggtggagctggccaagtatgccaagcagcatgtgcccgagcagcaccccaaggacaagccaagcttcgtgcgggctcgggtgaagaagctgctggcagcgggtgtggtgtcggccatggtgtgcatggtgaagacggagagccctgtgctgaccagttcctgcagagagctgctctccagggtcttcttggctttagtggaagaggtagaggaccgaggcactgtggttgcccagggaggcggcagggcgctgatcccgctggccctggaaggcacggacgtggggcagacaaaggcagcccaggcccttgccaagctcaccatcacctccaacccggagatgaccttccctggcgagcggatctatgaggtggtccggcccctcgtctccctgttgcacctcaactgctcaggcctgcagaacttcgaggcgctcatggccctaacaaacctggctgggatcagcgagaggctccggcagaagatcctgaaggagaaggctgtgcccatgatagaaggctacatgtttgaggagcatgagatgatccgccgggcagccacggagtgcatgtgtaacttggccatgagcaaggaggtgcaggacctcttcgaagcccagggcaatgaccgactgaagctgctggtgctgtacagtggagaggatgatgagctgctacagcgggcagctgccgggggcttggccatgcttacctccatgcggcccacgctctgcagccgcattccccaagtgaccacacactggctggagatcctgcaggccctgcttctgagctccaaccaggagctgcagcaccggggtgctgtggtggtgctgaacatggtggaggcctcgagggagattgccagcaccctgatggagagtgagatgatggagatcttgtcagtgctagctaagggtgaccacagccctgtcacaagggctgctgcagcctgcctggacaaagcagtggaatatgggcttatccaacccaaccaagatggagagtgagggggttgtccctgggcccaaggctcatgcacacgctacctattgtggcacggagagtaaggacggaagcagctttggctggtggtggctggcatgcccaatactcttgcccatcctcgcttgctgccctaggatgtcctctgttctgagtcagcggccacgttcagtcacacagccctgcttggccagcactgcctgcagcctcactcagaggggccctttttctgtactactgtagtcagctgggaatggggaaggtgcatcccaacacagcctgtggatcctggggcatctggaagggcgcacacatcagcagcctcaccagctgtgagcctgctatcaggcctgcccctccaataaaagtgtgtagaactccaaaaaaaaaaaaaaaaaaaaaaaaaaaaaaaaaa

SEQ ID NO: 25453 - DNA, 1905 bp, Homo Sapiens
cctcgtgccgccgggctcttggtacctcagcgcgagcgccaggcgtccggccgccgtggctatgttcgtgtccgatttccgcaaagagttctacgaggtggtccagagccagagggtccttctcttcgtggcctcggacgtggatgctctgtgtgcgtgcaagatccttcaggccttgttccagtgtgaccacgtgcaatatacgctggttccagtttctgggtggcaagaacttgaaactgcatttcttgagcataaagaacagtttcattattttattctcataaactgtggagctaatgtagacctattggatattcttcaacctgatgaagacactatattctttgtgtgtgacacccataggccagtcaatgtcgtcaatgtatacaacgatacccagatcaaattactcattaaacaagatgatgaccttgaagttcccgcctatgaagacatcttcagggatgaagaggaggatgaagagcattcaggaaatgacagtgatgggtcagagccttctgagaagcgcacacggttagaagaggagatagtggagcaaaccatgcggaggaggcagcggcgagagtgggaggcccggagaagagacatcctctttgactacgagcagtatgaatatcatgggacatcgtcagccatggtgatgtttgagctggcttggatgctgtccaaggacctgaatgacatgctgtggtgggccatcgttggactaacagaccagtgggtgcaagacaagatcactcaaatgaaatacgtgactgatgttggtgtcctgcagcgccacgtttcccgccacaaccaccggaacgaggatgaggagaacacactctccgtggactgcacacggatctcctttgagtatgacctccgcctggtgctctaccagcactggtccctccatgacagcctgtgcaacaccagctataccgcagccaggttcaagctgtggtctgtgcatggacagaagcggctccaggagttccttgcagacatgggtcttcccctgaagcaggtgaagcagaagttccaggccatggacatctccttgaaggagaatttgcgggaaatgattgaagagtctgcaaataaatttgggatgaaggacatgcgcgtgcagactttcagcattcattttgggttcaagcacaagtttctggccagcgacgtggtctttgccaccatgtctttgatggagagccccgagaaggatggctcagggacagatcacttcatccaggctctggacagcctctccaggagtaacctggacaagctgtaccatggcctggaactcgccaagaagcagctgcgagccacccagcagaccattgccagctgcctttgcaccaacctcgtcatctcccaggggcctttcctgtactgctctctcatggagggcactccagatgtcatgctgttctctaggccggcatccctaagcctgctcagcaaacacctgctcaagtcctttgtgtgttcgacaaagaaccggcgctgcaaactgctgcccctggtgatggctgcccccctgagcatggagcatggcacagtgaccgtggtgggcatccccccagagaccgacagctcggacaggaagaacttttttgggagggcgtttgagaaggcagcggaaagcaccagctcccggatgctgcacaaccattttgacctctcagtaattgagctgaaagctgaggatcggagcaagtttctggacgcacttatttccctcctgtcctaggaatttgattcttccagaatgaccttcttatttatgtaactggctttcatttagattgtaagttatggacatgatttgagatgtagaagccattttttattaaataaaatgcttattttaggctcaaaaaaaaaaaaaaaaaa

SEQ ID NO: 25454 - DNA, 1589 bp, Homo Sapiens
ctcgcgtgtcccgggtcgggagtcggagacgcaggtgcaggagagtgcggggcaagtagcgcattttctctttgcattctcgagatcgcttagccgcgctttaaaaaggtttgcatcagctgtgagtccatctgacaagcgaggaaactaaggctgagaagtgggaggcgttgccatctgcaggcccaggcaacctgctacgggaagaccggggaccaagacctctgggttggctttcctagacccgctcgggtcttcgggtgtcgcgaggaagggccctgctcctttcgttccctgcacccctggccgctgcaggtggctccctggaggaggagctcccacgcggaggaggagccagggcagctgggagcggggacaccatcctcctggataagaggcagaggccgggaggaaccccgtcagccgggcgggcaggaagctctgggagtagcctcatggaagagaagcagatcctgtgcgtggggctagtggtgctggacgtcatcagcctggtggacaagtaccctaaggaggactcggagataaggtgtttgtcccagagatggcagcgcggaggcaacgcgtccaactcctgcaccattctctccctgctcggagccccctgtgccttcatgggctcaatggctcctggccatgttgctgattttgtcctggatgacctccgccgttattctgtggacctacgctacacagtctttcagaccacaggctccgtccccatcgccacggtcatcatcaacgaggccagtggtagccgcaccatcctatactatgacaggagcctgccagatgtgtctgctacagactttgagaaggttgatctgacccagttcaagtggatccacattgagggccggaacgcatcggagcaggtgaagatgctgcagcggatagacgcacacaacaccaggcagcctccagagcagaagatccgggtgtccgtggaggtggagaagccacgagaggagctcttccagctgtttggctacggagacgtggtgtttgtcagcaaagatgtggccaagcacttggggttccagtcagcagaggaagccttgaggggcttgtatggtcgtgtgaggaaaggggctgtgcttgtctgtgcctgggctgaggagggcgccgacgccctgggccctgatggcaaattgctccactcggatgctttcccgccaccccgcgtggtggatacactgggagctggagacaccttcaatgcctccgtcatcttcagcctctcccaggggaggagcgtgcaggaagcactgagattcgggtgccaggtggccggcaagaagtgtggcctgcagggctttgatggcatcgtgtgagagcaggtgccggctcctcacacaccatggagactaccattgcggctgcatcgccttctcccctccatccagcctggcgtccaggttgccctgttcaggggacagatgcaagctgtggggaggactctgcctgtgtcctgtgttccccacagggagaggctctggggggatggctgggggatgcagagcctcagagcaaataaatcttcctcagagccaaaaaaaaaaaaaaaaaaa

SEQ ID NO: 25455 - DNA, 2662 bp, Homo Sapiens
acttaactagccgagagatgctgcctctaggcagagaggaggagaggtgttgccggctggagggccaaccagtgaacaccagctgtgaaggccttgggagaggaggaacaggcccttgggcagatgcaggcattaccagcagggagcagacttacctccgaagatggagacaggtgactgagagctgcaggcctcctctgctcttccaaacacgtagcatttgcacccctccaaagccatctttgtaaaggaaaacgtatttgtaattgaatccagaagaatttagttacacatagacataactcttcaaccttaactatggcaatacatttgtgctttaactgttacatagcagtatcaccacttaccaggatccaaatcgaaataataaaagctgtctccatagtttaaaatcgaatagtgccatcatcacagtatattagtcaaatagaagcttcatcagaaatgtatcccacatagagttttaagacttggattctcttctgcccttgttaatctccaactaattactacagattgacacgtttttaattagctgtcctttgtaagaagtcaggaaatctgatgctgtgtccaaaattatgcactgtttgttgaagtagaaccagaaatcctgacctcctgttaaatgacatcagtttccccctctgagcaacagactgcttgtcttgctaggagaggaggatggggggctgagcactcaggctgtccattgaaaccccttgtccatgaatagggtcatactcctaagactgatggggtgttgatcttctaggacatcacttgtttattcagtgccccaaacacagatttctcttctagcactttagagttgatccttgaagtctctcctggttcattcaaatacaagctgtgtgagtctggtggttttctgtgattggtctaatgtgaactctttgaacagacagatctgacagtgaatgactctcccctgcttctggcataactgctttgcctctgtctagtgtccaagcatcttagctgttcaagaggagagggcagcataacttcctgaccaccggtgtcagatatcagagcattctggactcctgagaggcagtggcctcttgagtgaacaggggaggccagtagatgccccagatccagagccgtggctgcaaatccagcaggaataaggagggacaaccacagcctcctcatccatgtgtcatttccaagggtttgccttgtgtctcagctcattctgggcagcacgtttgtcttctgtccctagagatttgaaggattttggactcttgtgaatgggtgactggacttggctttacagagttgggtgcttttttctctctgcaattacctgtcatagcattttgtgctcaccacgaaggatggtctctgccttctcttgtcggtgtatgccatctgaacctaggaacacaaagtatattggcctcaaacggagacccagggttgccagttttccgtgggccttcccctcccttgaaatgtctttaattacctccccttcatcgtcaggccacgtgtgacttctgttcttagcactgccagggtcattgacttccatctaagcttgcatcaggaagatgttccttctgtgatcattggtactgaagccagaaaagctctcattcaggaactctgaagagcaaaaagggacaaacactaactgctgagctgggccatttgatctcctttcaccttgcattgctgtcacagcaccttgtatgatggcaggacaggctccagcagagagaactgcacagtgaccactgtatttttcacgctcttccagggatccctgtcccccgacattgaagagatctcattcaggccagagacacagagaccacatagcccagtgattaaaccccggtttcactctggccccaggagtggagcctggccactcctgtttggttctcactgggaggcccactggccttggatcatctcctcatgcacacccggagttttacctgcttgcttgctttcctggactgctgtttgcaagaaagtaactaaaacatgaaaagtaaacctccagcttccacagtatattacctgccgttgcatgcatttgaaagttagcctcctcccttgccaccgtcttggtggcagtagcgatgcaagaatgatgggagctttccgagagcgttcagtgtttcactgaagacaggacccatagccttcatttctggctctgtgtctcctctggcatatggacacatttcctggcatttgcctgagtctacaccactttttgagaacctgaaatagaagggaatcttctgtggcccacagtctccatattggccctagaagactggcctggcggaggaatttgcgttggcttgctttcaggggttagctacaagattcagctttatatctctgttgcttcttggccagtgtagtcaataagggtcttctttaacatctaagatagaggtttggttggccgggcgtggtcgcttactcctgtaatcccagcactttgggaggcccagtgaggtgggagaattgcttgaacccaggaggcagaggttgcagtgagctgagattgcaccactgcactccagcctgggtaacagagtgagactcttgtctcaaaaaaaaaaaaaaaaaaaaaaaaaaaaaa

SEQ ID NO: 25456 - DNA, 1287 bp, Homo Sapiens
agcaagctcggtggctgggtgggttggggcgttccgcgcgcccttcattgaagcggcggtggccgggctgggcgccggtagtggaaagcgacggcgcggctggaaaatgccagtccattcccgaggggataagaaggagaccaaccatcacgatgagatggaggtggactacgccgaaaatgaggggagcagctccgaggacgaggacactgagagctcgtcggtctccgaggatggagatagctcagaaatggatgatgaagactgtgaaagaagaagaatggaatgtttggatgaaatgtccaatcttgaaaaacagtttaccgatctcaaagatcaactttataaagaacgattaagtcaggtggatgcaaaactacaagaagtcatagctggaaaagcaccagaatacttggaaccgctggcaactttacaggaaaatatgcaaattcgtacaaaggtagcaggaatctatagagagctctgcttagaatctgtaaagaacaaatatgaatgtgaaattcaagcttctcgccagcattgtgagagcgaaaagctgttgctatatgatacagtccagagtgaactagaggagaagataagaaggcttgaagaggataggcacagcattgatattacctcagagctgtggaatgatgagcttcagtcaagaaaaaagaggaaggatcctttcagtcctgacaaaaagaagccagttgttgtttcaggtccatatatagtttatatgctacaagatcttgatattcttgaagactggacaacaattaggaaggcaatggctacattggggccacacagagtgaaaacggaaccacctgtgaaactggaaaaacatctgcacagtgctagatctgaagagggaagactatattatgatggtgaatggtatatacgtggacaaacaatatgtattgataaaaaagatgaatgtcctacaagtgctgtaattacaacaattaaccatgatgaagtttggtttaagaggcctgatggaagcaaatctaagctttacatttcacagctacagaaaggaaaatattcaattaaacattcataatcatgatttaagtgttatctaaatttaccttattagtgttaccaaatgtaagtgccatgagagtaaaaaaatgtattcaataacttaatattctcactgaatcatgagagaatgtgtatttgtaggtagtactctaaatagatctcattgatatgttattaaaagaaacagtaataaaaattttatcacgaaaaaaaaaaaaaaaaaac

SEQ ID NO: 25457 - DNA, 1151 bp, Homo Sapiens
caccgctgcagcagagttctgtgctagccgggcataggggcgagagaaggcccagaggcgacgtcagagagaagcaactgcgccccggtgaagagaagctcgcccatcaccggctgggagccagctttcagtgaagatggcagggccagaactgttgcttgactccaacatctgcctctgggtggtcctacccatcgttatcactcttcgtagacatgatccgccactacgtgtccatcctgctggagagcgacaagaagctcacccaggaacaagtatctgacaggggacgaggcacccacagtccctctcccataagcctgccaagaagattgatgtggcccgtgtaacctttgacctgtacaagctgaacccacaggacttcattggctgcctgaacatgaaggcgactttttatgatacgtactccctttcctatgatctgcactgctgtggggccaaacgcatcatgaagtgagcaaattggggtttcctggggacaaggtgggtacgggcaatgggagagcccctgtctgttcacatggactcagccttctcagcacctgggtctggctttggtgctgacaaagcatagcctgtatcagacaacacggagcctgatgggctctcgaagtgctgtggacaacactggcgtgtgcccaggggtgcacatgttcctcctggtggaacctggatgcattttatttttatgactactttccactctagcaactacattttttcattgaaataggaagttttcctaagtagtcttctagtcagttttttaaaaatgaacatgtgttggccaggcatggtggctcacgcctctaatcccagcactttgggaggccaaggtgggtggatcacttgaggtcaggagtttgagaccagcctggccaacatggcaaaacccaatctctacaaaaattggctggacatggcagtgcatgcctgtaatcccaactactcaggagcctgaagcaggagaatcgtttgaacccaggaggtggaggtgacagtgaggcgagattgtgtcactgcactccagcctgggcaaaacagcaagtgtcttaccaaaaaaaaaaaaaaaaagtatgtgtcaaaaaaaaaaaaaaaaaaaaaaaaaaaaaaaaaaaaaaaaaaaaaaa

SEQ ID NO: 25458 - DNA, 1793 bp, Homo Sapiens
ggaaaagacacctcattgctttctgactgaccaaggcgcagcgcagtttgcagcagctatgggggttccagagattcctggagaaaaactggtgacagagagaaacaaaaagcgcctggaaaaagagaagcatgaaaaaggtgctcagaaaacagattgtcaaaaaaacttgggaaccgtgggtgctgttgccttggactgcaaagggaatgtagcctacgcaacctccacaggcggtatcgttaataaaatggtcggccgcgttggggactcaccgtgtctaggagctggaggttatgccgacaatgacatcggagccgtctcaaccacagggcatggggaaagcatcctgaaggtgaacctggctagactcaccctgttccacatagaacaaggaaagacggtagaagaggctgcggacctatcgttgggttatatgaagtcaagggttaaaggtttaggtggcctcatcgtggttagcaaaacaggagactgggtggcaaagtggacctccacctccatgccctgggcagccgccaaggacggcaagctgcacttcggaattgatcctgacgatactactatcaccgaccttccctaagccgctggaagattgtattccagatgctagcttagaggtcaagtacagtctcctcatgagacatagcctaatcaattagatctagaattggaaaaattgtcccgtctgtcacttgttttgttgccttaataagcatctgaatgtttggttgtggggcgggttctgaagcaatgagagaaatgcccgtattaggaggattacttgagccctggaggtcaaagctgaggtgagccatgattactccactgcactccagcctgggcaacagagccaggccctgttgcccatgattactccactgcactccagcctgggcaacagagccaggccctgtatcaaaaaaaaaagaaaagggaaaaaagaaagaaagcagcagcatgatcctgacatgacagatgtgggagacccacagcctgcagacactgtgggctggaaggtgggaagggaggggccggtggaggtggagctgtttgaaagtgacacagcagcagtagaagcagtggtgggcgaagcccaggtgaccctcagaacgttgcacaagaacatcagggaaaagaaccagaatcctttaaggaaaatgttcttcatgtatgagagactaaagtgatttttctaagaaagttcagcccttctctgacttacctggacatttctagatacttccaaaggaccctctgggaatccatagcttcctaatctggagatgggaggtcataagggagacgctgtggggttccttgaagtttcttgggttcacagaggagccccctcacttggtgttctcccgtgagccagcctccacctgccaaagacactctggtcctcgtatagtgagtaatggggctcagggcctctccaacaacagagaggagctgatgctgtagggctgaccccgtgacttcctgagtcctcaccctgtccagtgctttgagattcttcccacctccccatcctcaccagccggatcgggcgctgtgcagtgtggtcagcatggtgaagaaagtcatttccttggtggacagtattcctctttatctctcattacactggaaatgttatttctgctgtatcatccgtgctcaacgttttagtctgtcaggctcaccttctctctggaaagaatttgcttaacttgacattccatgtgccgctaataaaatatattttgaaagaaaaaaaaaaaaaaaaaaaa

SEQ ID NO: 25459 - DNA, 3036 bp, Homo Sapiens
gacctccttccggaagacgctggtgggcgagcccttggaccctgagcaagacctgcaggaagcggatatcctcacctacaattacgtcaagaagtttgagagcatcaatgatgagaccgagctggaggccctgtgcgctgagatcgcctcccagcacctggccacggagagccctgacagccccaacaagccctgctgcaggttcacctacctgaccatgacgggcgaggaggtggagctgtgcagccggggccggcacatccttgtggcgtgggagaacaaggacatctacgcggcagccatccggagcctgcggctgcgggagctgcagaatgtggagtgcgtgacggccgtgcgggccggcctgggctccatcatccccctgcagctgctgaccatgctcagcccactggagatggagctgcgcacctgcggcctcccctacatcaacctcgagttcctcaaggcccacaccatgtaccaagtggggctgatggagacggaccagcacatcgagttcttctggggggccctggagatgttcacccaggaggagctgtgcaagttcatcaagtttgcctgcaaccaggagcgcatcccgttcacctgcccctgcaaagatgggggtcccgacactgcccatgtgcccccgtaccccatgaagatcgcccccccagatggcacagcaggttccccagactctcgctacatccgcgtggagacctgcatgttcatgatcaagcttccccagtactcctctctggaaatcatgctggagaaacttcgttgtgccattcactaccgtgaagaccccctcagtggctgatgggagggagccccagaattaggctgtcactgaggcacccactctgctggcttgggaagccaccactgcggcccgtccctccagggccctgcgtgaggacttggcaacattttgcttttccaaactttcgtccacattccagggcctcctggaagacttaaccttttgtctttgtacgtttcgtgatgggttggttcttttgctgcctgtttgtggtctatttgtaggatagtttagttcccagacagtttgtgtctaatttgatcttcttggacattgtccctcatggccaccagattctaatgccataaggccccagctggttccccatcacagaaccacccagcaggaagccgggggtacaatgacctcggccacacagagcgctcgtgctttcagcagagcgcctccacagacaagcctgtggccagccctgccctccagcctcgagctggagttgctccagaggcagccccagcaggcctccctccacatagaggtggctgggccaattgcccaaacacgtgagacacacagggagctttatgtgttcatcttcctgctttagaacttgctcccggtcttggtttttctgaggaaaagcccacagtggttcccctgcccctcccatacctccctatctgccgtctgtctctttgggccctggtctgacagttttcatctgaggcctcctcgggagcaggagacttaagggttcatcccgaccttagttcacagagcctagctgggtgcatcccagccgcagggggtgagaagacacccagagatgggggacaatgctcaggtgggggcctcctccgagactctggttgagaggaaagcacatgattcaagcctaccccacaaaaaaggagcacaaaatgctcagaaatggcccttcctccctgcagtgacgtaggacaagggaaagggccacacccattttcaaaagagtggactgaggtgctctgctcaatttggggtctgctttagtgacccagacactcaagtccagatggagactccaggggggtccttctgcccctctggccagccccacccagcactccccatcaccccatgtaagtgtgtatgccagggctgagctgcctccaggctcacccactgcatctttgccccaaataggtctttgtccagtggtactttgttcatgagcagcacaggccatcttgttggacactgtcactttgggccttgccaggtctcacagaatcacatcgctgtatttattgtataatattgtgaatattggaagttttgagtgagtgctgtctagaaggttttggagtgtggatgctggtccaagaaagaagatgtgccctggcctgctggaaagattgtgaattctagagatagagccgttagcatccatctcctccctgtaactcttaggaaatgcatcaaggaccattatagaaaggatcccctgacctaaggatgaaatcgacctagggttaatcatgacagctgcatcagttgtattggatgcaagtcaactctggaggtgagtgcccgcaagcagttcccctgctttgaaagaagatggtcagcccgctgcctccccagcggccacagctcctttgagtgtggggggtcacagccaggatgtattcctgacaataaggatccttttattttcatttctgcataatgaaagagcctttcgatttattagaagtggtttttcctccctacatctttaaattcttggttctctttagtcctcatcccttgaatggacttgtcagctacctccccaggaggagttcagaagcttctgttggccatcacttgagtagatgacaagctgtaaggtatctgctgctaacgtggctgcttctccgagagcacattgaggtccagacagatccaaaccttggccctaaaaaatgtgtgctgtaaagttacttgatgtatatttattataattatttatggttgcatttaacaaacttttcattcaatctgatgctatttacaccatgctgtgtaaaggaagctcactaaaggaaaaaagtcacaccaataaataaccttcatctaattttgatttaccttaagagttgtgtgatcatctactcttgctgagcaagttcaaaggctggcatgcttggatggctctgatatttaagtgctgccaagtggctaggaattaaagtgtttctaattaaaaaaaaaaaaaaaaaaaa

SEQ ID NO: 25460 - DNA, 3570 bp, Homo Sapiens
ggcacgagggcagcagcctggagggccggcctggccaagtgcttgcaacgtgctgggcaggaagggccggtccggccataccctgatagctaagaggggcccctgtcctgggggcactgaggggttggaaggtggggctggaggcatgtgcacatgcgtgcacacacgtgcatgcacacacactcacccgggcatccacgtgcacacctggccccatgcacacgcctgcaggagcgctcgcatgcacacaacgcacgtggtctccgcgccatggcagtgatggagatgggtccctggccgccctcggggcacaggtggcccgcagggcccggcgggctcagcagagcacgggcacgccgtccgtggagaagatcatgcccgtggtgggctcgtaggtgcccgcgaggtagtacaggccctcgctgtcctggtacttcttggtcttcagcatctgctcatactgctccaggcccaccaccaggcacttgtgcgacaccgtctgcacgtcattttcgtccacatgcgaggactggtatagcgcgcgctccatgaagtccttcctctggctggagacccgcagggccgccgggaggctgcggctggacttctggtcccagtgctggccctggtggaactgcttgcccgggctggtctcctcggggtggtagaaccacttgacgcggaccaccatgttgttgccccacgactcccacatgctctggatgcggccgatgtagggcaggttggggcggccggcagagaggaacacggcacagtccccgatacggatcatctccttgccgcgcacgatggccttgtagaagagcttgcgggccttgcccttcatgccacgccgctgggtgggcttgccgaaccacttccagagctgccgggctggcaggaaggcggcgatcttgggccggttctccacggacggcaggcgctgccgcttggccagctccttggtggtggggaggtggacgccctctctcttcttgggtcggctcttggccccggcctgagccttgggctgcagaggctgtgtgggctgcggaggaggcgcctggggctggggcgcgggcgtcttcttgcctggggagtgggccgagggccgcgccttgccggcctgcttggtggccttggtggggagcgccgcctgcgcggaagggccagccgtgggggcgggggctgcctcatcgtccgagctgcaggaagagtcctcgtctgtggtggaggaagaagaggaggaagaggaggaggaggaggaggatgaggacgaggaagaggaggaggaggaagaggaggaagacgaagaggaagaggaggaggaggaagaggaggaggagggtgtattcgaaggctgccagtgtaccgaaagttgagactgtaaagtcagacaacaaggatgacgacatcgatattgatgccatttaaagggatggatgcaacctagcttaacagtataatgctgcaaattttcctccattatcagccagaagtgcaacatgtatgtgcaaaagctaaaatggcttaacatcatgctacactttacactaaaaatctattactgtgagtggtctgttattaagcccaatgagacatctagggagtccatacacatcagtgagcagatgtagtttgcttatttatagcatgtttctttttgaaaaactagtggtggacacatttggatcacatttatacagttataaaaataaaggtttgattttggtcgttcttcagatgtttggctctgaatgacttaagctgaagtaactggctccttactttaaatgttctgccatcatttcacctgatgagcattcttggagcctgccagatattgttaggtcctggggctgcaaagaggtcctcaacaggatgtaaagcaaacttaattgtaattaatttattcagcccattaagaaagtactaaagttttatctctgtagttcctcaaattggcatctggtaatgtacattgtgaggtagactgataatgaaatgacagtgcaacatcttaaccaagaagtaaatatgacctcagtgtcctataaataatgtaagagcaggatttgaaacttggagagctgttttctcatttcatgtacacttgccccaaattgtctttgaagtcgtgtgcattgcacgttggatgagccagggaaattattacattaacaagcattttgtgtgtacgtagtagttactttgtactgagagaacttgctttggggtgcaattaataaactgattttatttgggagaaacaaggaagggtgcacttaactagcaacctaagcatgatttttcagcttttgcccttagggtttaaattacaattccaaaatgttagacatactgtattttttcgttcagtgtggctttaattttcccctcttgcagtttgttctgtaatgccttttacatttggacacatagtttatgctttttagattttggttgctttcttgccaaaataagtgttaactgtgtttcaaacttgattttctttcctttttcttttttttttcttccagaatgtcttatttaaaaagaaagctaaaagcatacttctaagtcagagcctctattttggtgtaagacttgggatattttttacttcacattgaatatagccaggcacccaagaagtctgatggccacctgagtgcaggtgacaaggacctgacagagcccatgcagggctttagatttggacacacaagagttgataacttcctcatgaactccttgcctgatctaaactcatattatgggttctgactgtttgagtaatcatcttcaaggttaaacctcttggcagttacccttttcacaaagtgcacagtgggaatcgagaatcgatagggttaattttggagcagtggcttataccattcacctctgtttttttgtgattatttcacagataatgagaccttaataacaaataggcgtaaaaaaattttcacattgaaatgatagaaacatttgatgtaataaaacttggttggcttgatattttaaggaattgaaacctagcaatcttattggagagacaagaattggtctccagctgcctttgatcaagattcgggtgcaagtggagcaggagccatatacctggagggaatgtgctttgtcacaccaaagaggatttttttttcttcaaacttgtatgttgcctaggtttcaaattctttgccgcaaggctgatctgctttcattaactggaattctgtaggagatactggtgacctaagctaagttgcactcagcatactcagtgtcaagctaatgaggttctattataaaggttctacttttaatctgagggaaaacatgttcagggcttctagaacactaaaaaatttggcttaaaccagtgttcagtctggtgccaaacttcgaatggaatacaaattcacataatctgaactttgttcacaggttatcctaatagagtaattcttcactttgctctattgaactgtcttaaggatttgtttaaacagctaagttacttgattaaaataatgataaaattgtaaaaaaaaaaaaaaaaaa

SEQ ID NO: 25461 - DNA, 2252 bp, Homo Sapiens
cagaccatgaggtttaactgagtgaacaccgctgttccggggctctgcctctcgctgaacgctcctgctgggctggggcctcccgagtagctggaagtacagataatcacagctggcttatcaatattgctgtttgatgcgatcctgaccagtgcaaccacgggatgcctcctgctcggtgcgcttggagaggccttgctggttttctcagagcggaagagctcctgaacaagacggtcaagagaaagactcacaggctgctgcgggagaacagcttgtacacctgtgtacgagcccctggtctcatagctccctgttggatgtgtcagaaagaggaatgcaaggacagtgaggccaggtgggcagtgccatcaccctcacccaagtgaatgtggtggtggctgatgaggccgaggccctggtgcttcaaggagcaccctttctgggggtctgcaggtcactgcagaggagcggtctgttacatcttcccatttggagaacctctctcaaccgtgctgtagctggttctgcagaaacaggaagtacaggatttcatgggctggctctgctcgcctcgactgagcttcacacctctggatgccacatgctctctcccaaacactgctttcagtgcaaggtagtgggcctaaggggttttggttgtcttttttttttttcatttttaaaattttaaatttttatttattattattttttagagacaaggcctcgctctatcgcctaggctgaagcacagtggtgcgatcacagctcgctgcagccttgacctcctaggatcaagccatcctcctgcctcagcatccacagtagctgatgtgcaccaccagacccgtctcattttttctatttttattattttagagatggggatctcactgtgttggccaggctggtctcaaactcctgggctcaagcaatcctcccaccttggcctcaaagtattgagattacaggcatgagccactgcacccggcctttctcatttttatttttaaattgacagacgtaacagtgcgcatttatcacgcacaacacaatgctttgggaatggttaaatctagctcacaaatgcattacctcacacggttgtcatttttgtggtgaggcttggttgtatgttttgtttcattcatgtttttacatccttggagtctcctctgggtccgtcctttctttgctgtcatgctggcttgcctaaggcccaccgccacctgcgtacgagcattttaaactctagagtgagtgacagcctttttatggttggtgttactatttatttcctgcctctaaacttctcgtggtccttataaacttgtcaggatgtgtgttgcgttgaattctgcatgtcctttttttgcccaccctcaggttaagctggtactaacttatccccagaggaaacagggtttatgagcactgacagatgtcttccctgggcaaaaaaaaaaaaaaaatagtatatgtatacacacacacatacacatttatatttatatttcttaaagcttttaatccctttcattccctgatatctcagagatttcaaatcattgaacactgaagtatatttttcaggccagatgaaaaattgtattaaaaccctattcctggtcaggcgcagtggctcacgcctataatcccagcactttgggaggccgaagtaagcagatcacctgaggtcgggagttcaagacaaacctggccaacatggtgaaaccctgtctctactaaaactacaaaaaaattagcctgatgtggtgttgtgtgcctgtagtcccagctacttaggaggctgaggtaggagaattgcttgaacctgggaggcggaggttgcagtgagccaaaattacgccactgcactccagcctgggcaacagagcgagacagtctcaaaaacaacaacaacaacaaaaaccctattccttgcctttgtaggagtcaaaataaatgaacttcttttttcttttttttattattatactttaagttctggggtacacgtgcagaatgtgcaggtttgttacataggtatgcacgtgccatggtggtttgctgcacccatcaacctgtcacctacattaggtatttcccctaatgttatccctcccctagccctccatcccctgacaggccctggtgtgtgatgttcccctccctatgtccatgtgttctcattgctccaaaataaatgaatttacacaaaaaaaaaaaaaaaaaaaaaaaaaaaaaaa

SEQ ID NO: 25462 - DNA, 2865 bp, Homo Sapiens
gcccaaagcgggacaggtccagcggttgttctgtgtgaagtcgcgcggcttccacccacgcagtgttctaagtgaaggccagaaactcgctcgccatgtcggctgcagaggcggggggtgttttccacagagccaggggcaggaccctggacgcgtttcccgcagaaaaggaaagcgaatggaaaggcccattctacttcatcctgggcgcagacccacagtttgggctgatcaaggcctggtccactggggactgtgacaatggcggtgacgaatgggaacaggagatccgtctaactgagcaagccgtccaggccatcaacaagctgaaccccaaacccaaattcttcgttctgtgcggcgacctcatccacgccatgccagggaagccgtggcggacggagcagacggaggacctgaagcgagtgcttagggcagtggacagggccatcccactggtccttgtcagcggcaaccatgacattggcaacacccccacggccgagaccgtcgaggagttctgccggacttggggagatgactacttcagcttctgggtcgggggcgtcctgttcctggtcctcaactcccagttctacgagaacccctccaaatgccccagcctgaagcaggctcaggaccagtggctggacgagcagctgagcatcgcgaggcagcggcactgccagcatgccatcgtcttccagcacatcccgctgttcctggagagcatcgacgaggacgacgactactacttcaacctcagcaagtccactcggaagaagttggcagacaagttcatccacgcaggtgtcagagtcgtgttctcaggccactaccacaggaatgccgggggtacctaccagaacctcgacatggtggtgtcatctgccattggatgccagctgggcagagacccccacgggctccgagtcgtggtggtcaccgccgagaaaattgttcaccgatactacagtctagatgagctgagtgagaaaggaatagaagacgatctcatggatttgatcaagaaaaaatgacgctccttcccgttcccgttcacttttcacttgcactatttttttattttgccagaaacagcagctgcacacaacctcttgctgaaatataaaaatagcccaggcaggtttgtgaatttatgtccttttgcataaatcagagagctggggccctgtcctgaattatattcaaaatagaactgcatttcctttaaaatggagcgaatgatcctggaaatcagtttttaaaatattagactatctctgcatggatgtttgaataaattctcctaatgctgtgtttctcaactccacttttgaattggattgtattctggttagcatatggtcaaagtctgcctatcgacctcaattccaatctgacagccaagtatgatctttgataattccttaaacaaactacacctgattgtattaaattgtggtcacgattcccaaaacgctaggcaaaacaaagttcatctcctttcctttccagcggaacgaacagctgtctgccttgttgtgagagccatgcagacttattttgacaaggagccaagtaggcaccatttactgttcaattctgagacttctgatgataggaacagaatgcagttgatacagctcggagcttaaatttgccttcctgggtgcctagaaaagtcacctttgcacataaattggccatttctgaaaatctcctccaagagactgaaaccaaagctctaaaacgccgcttcttcagtctctggggagcacgttgagttggttcacatccacattctggctgtgtagccactccacagatgggtggtctcttgggatcagaatgcccctccactcatgagactcttcattttgtccactttgacaggaaaagtgggaatgtatgcagagctctcaaaagaaacaaaaaaggccaaaacggtgccttcagccacatcctctgaattggccctgacttggactaaatgcactaatgcaaaatcccttgacaaaagcgcataggttatttcaaaccagcattgttttttatgtaacctgttttaccgcatcttctcagcagcttctgaccactgctcaattttctcctttacagccattgttctggtggacaaataacctaggtactccaaatcctggcaggaaaaatatacagcattatgaaacagcactcagtaatcctaaaatgatttccaaagctggttacacatgacctgcaaagtctattaaattaaaagactttctcattacagagtttagtcaacgtagcaaaaccatgggaaattaaatggaaagataattaaatatgtaaattcataaggaacaaaagacgagaagttaattatacaataggctggtgacaccagagttcattgttatgtgccacaagaaaattaaattttttaaaaaactagaacgctcttcttttagtgttttgctgaaatcctgttttgtatttgtttctttacaacaggtgtaggtataggaggtcaagaaaaggagttcggtaaagggcatagctaataacaaccacacattgggccaggcgcagtggcttacgcctgtaatcccagcactttgggaggctgagacgggcagatcacctgagatcaggagtttgagaacagcctggccaacatggtgaaactccatctctactaaaaatacaaaaattagccaggcatgctggtgcacacctgtaatcccagctactcgggaggctgaggcaggagatcgctggaactcaggaggcagaggttgcagtgagccaagatcatgccactgcactccagcctgggcaacagagcaagactctgtctcaaaaaaaaaaaaaaaaaaa

SEQ ID NO: 25463 - DNA, 2589 bp, Homo Sapiens
caaggagcctgcacactgatggaggaggtacagccgtggaggagaaccagagtctggaggggaggcacagtcctcaggagcccccaggctgacaggggaaacaaaacacacaataaaccccaaacttgcaaggttctggggcaggcaccgaggtccgagtggcaaggagacaggatccagccctgtgcagtggtgaggaggcccctggggctgctgtgatcggcctggaatgtcaggctgtgagctcagccctctcggcctgcgtgtcgggctgtcagcagggccggtgcacgggagaagatttccagccccctctgggccatggacaggcctaaatttagctagtagacaaggggctggccccaagcccagggacagtcggccttataaagcggccgcagtcggagcctggcacgctcgcccagaggcctgcgcccacaccctctcctgtccagccttcgcccgcctgggcagggcccggcgccgtccgtggatgagccacagaacctcttccaccttccgagcggagagaagtttccattcctcttcttcttcctcctcctcttccacctcctcctcggcctcccgtgccctcccggcccaggacccgcccatggagaaggccctgagcatgttttccgatgactttggcagcttcatgcggccccactcggagcccctggccttcccagcccgccccggtggggcaggcaacatcaagaccctaggagacgcctatgagtttgcggtggacgtgagagacttctcacctgaagacatcattgtcaccacctccaacaaccacatcgaggtgcgggctgagaagctggcggctgacggcaccgtcatgaacaccttcgctcacaagtgccagctgccggaggacgtggacccgacgtcggtgacctcggctctgcgggaggacggcagcctcactatccgggcacggcgtcacccgcatacagaacacgtccagcagaccttccggacggagatcaaaatctgagtgcctctcccttccctttccctgtccccccgccccacgcctgccagcaaagcctcgctaaccccattacaacagctccaggacatctcagcccaggttctagcccccacgcaccccagaccccaggtggaccatcctcccaaactagggccctccactctatccagggcaggccagggactccctggcctgacacatgatgcccagatttcagatttggcctccgtcacttaatccagagtacaggggctggggtcagggaaggaagatctaaagaacccactgtgggtcaggggaatgggaccagcaggacatatgggcaagctctgcaggacagacaggcagacaaaccctctgatctatgaagtctctgcagggcaaggggaccagggacctggaaccctcttggccaaggggagtgggaacgacagagggaaggtcacaggcaagggtgcctatctaagtggaactaattgcccgagggctcagcaaggccaagaggagacagccgtgacggtaaacttcccctctaccagcctccaagccccacgccagcgagcaggctgcctgcccaccccgtgcccccagccagctggctgtgccagggcagagccatgccacatctgtatatagatggggtttttccaatacagctggttcgtgataaactgcatgaaactcctgccgtcctgcgcctgctggggcctccaggcaaggccacgtggggttgggggtggggctggtccttctccctcccacaggcctgtgttcttggggctgctcccatgcagacaggatcacctaacagagatggaagccagggcatggatggggctttgggtcctcgaggttggaccccagcttcttgccaccttcccctccgggcagtcagctctccatccatccccctctttaatctatgaatctataggctcggtgtgtgtaacacacacacccctatcgttgtccttcaaatactcagcattaccattggttgaggccaaattcagagctttctcaaatcagatttacaatctccattttcattaacggggaaacatccccgagccactgagtgctgtgctttgtcactgaaggttagatctgaacccagggtgtcaacagctgctctcaactccccacctctgggcactgaggagtatttcccctcattctacctctctaaggctatgcacccctccccacgtcttccagctgggggatggggggagtcataggaaaagcccccatctcccatctgggatagggaccttccatcagccttaaccctgggaaatgcctgctgcccccagtgactcttggtttcgtctcccacatacagaagcagggtggaggggaagggtgggtctcagttagcaggggtccccagggcaagtcagcctcctccctccatgcctctctggtcagtgtgccttagggtggcctctcactcccaccactctgggccccttgggggaggactggggagggggccgtgggagagccctgacgctggaacctgtatacacaataaaggacagtctcacagaaaaaaaaaaaaaaaaaaaaaaaaaaaaaaaaaa

SEQ ID NO: 25464 - DNA, 1937 bp, Homo Sapiens
ctgggacgcccctccggaccggtttcgcctcgcggagccggtaggtccaggtgcagcggccgcagtgctgcgtccgtgcgccgcgggctggggcggtctcaggtgtgccgaagctctggtcagtgccatgatccggcaggagcgctccacatcctaccaggagctgagtgaggagttggtccaggtggttgagaactcagagctggcagacgagcaggacaaggagacggtcagagtccaaggtccgggtatcttaccaggcctggacagcgagtccgcctccagcagcatccgcttcagcaaggcctgcctgaagaacgtcttctcggtcctactcatcttcatctacctgctgctcatggctgtggccgtcttcctggtctaccggaccatcacagactttcgtgagaaactcaagcaccctgtcatgtctgtgtcttacaaggaagtggatcgctatgatgccccaggtattgccttgtaccccggtcaggcccagttgctcagctgtaagcaccattacgaggtcattcctcctctgacaagccctggccagccgggtgacatgaattgcaccacccagaggatcaactacacggaccccttctccaatcagactgtgaaatctgccctgattgtccaggggccccgggaagtgaaaaagcgggagctggtcttcctccagttccgcctgaacaagagtagtgaggacttcagcgccattgattacctcctcttctcttctttccaggagttcctgcaaagcccaaacagggtaggcttcatgcaggcctgtgagagtgcctattccagctggaagttctctgggggcttccgcacctgggtcaagatgtcactggtaaagaccaaggaggaggatgggcgggaagcagtggagttccggcaggagacaagtgtggttaactacattgaccagaggccagctgccaaaaaaagtgctcaattgttttttgtggtctttgaatggaaagatcctttcatccagaaagtccaagatatagtcactgccaatccttggaacacaattgctcttctctgtggcgccttcttggcattatttaaagcagcagagtttgccaaactgagtataaaatggatgatcaaaattagaaagagataccttaaaagaagaggtcaggcaacgagccacataagctgaagtcacctcgcgttgtttagagaactgtccacatcaatgggagctgtcatcacttccactttgtaaacggagctatcaacaatcctgtactcacttgaagaaatggggccttgctgggaggaacagcatgtaaaactggaacttctaaccccgtcccaaaagaggcggtgtagagcctaatagaagagactaatggataaacctacaagttatttaaatatttaaattattaataaactttttaaagagctggccaatgacttttgaatagggtttgtagaagatgcctttcttcctgtttggttcattgtattgtattaggttaagctctactagggtaatgaaggctctacttttcactttttaaaagtggacaaaagagtgtgattttctttttccaaaaattcctgagtatcaagacgtgcaggtcatgctttggagcctatgcactgtacacaaaggcaaaaccctatgactttggcatcatctgccattgatgtccagcctctgacatgctctttgatttgttaaatgttaaatgagactttaaggctactagaaactagtaattaagtttcttaatggactgagtagccacctacttgtccggctagaatgtttgttgatgtatgagtttagattaacactcaaaagcactaggacagatgtacatagaaggtgcctactcattgtattttgatgatttcattaacaggtaaataaaagttaatacaaaaggaaaaaaaaaaaaaaaaaa

SEQ ID NO: 25465 - DNA, 1936 bp, Homo Sapiens
ggcctcagaaagatggcgtcctcggagcaggcagagcagccgagccagccaagctctactccaggaagtgaaaatgtgctgcctcgagagccgctgattgccacggcagtgaagtttctacagaattcccgggtccgccagagcccacttgcaaccaggagagcattcctaaagaagaaagggctgacagatgaagagattgatatggccttccagcagtcgggcactgctgccgatgagccttcgtccttgggcccagccacacaggtggttcctgtccagccccctcacctcatatctcagccatacagtcccgcaggctcccgatggcgagattacggcgccctggccatcatcatggcaggcattgcatttggctttcaccagctctacaagaaatacctgctccccctcatcctgggcggccgagaggacagaaagcagctggagaggatggaggccggtctctctgagctgagtggcagcgtggcccagacagtgactcagttacagacgaccctcgcctccgtccaggagctgctgattcagcagcagcagaagatccaggagcttgcccacgagctggccgctgccaaggccaccacatccaccaactggatcctggagtcccagaatatcaacgaactcaagtccgaaattaactccttgaaagggcttcttttaaatcggaggcagttccctccatccccatcagccccgaagatcccctcctggcagatcccagtcaagtcaccgtcaccctccagccctgcggccgtgaaccaccacagcagcagcgacatctcacctgtcagcaacgagtccacgtcgtcctcgcctgggaaggagggccacagccccgagggctccacggtcacctaccacttgctgggcccccaggaggaaggcgagggggtggtggacgtcaagggccaggtgcggatggaggtgcaaggcgaggaggagaagagggaggacaaggaggacgaggaggatgaggaggatgatgatgtgagccatgtggacgaggaggactgcctgggggtgcagagggaggaccgccggggcggggatgggcagatcaacgagcaggtggagaagctgcggcggcccgagggcgccagcaacgagagtgagcgggactagggctgcgcctgctgcctccagccctgaggatggcatctagtgtgcccgtgcgtggccataccctgcctccctctctggccctgggagggcagcttggagcccaggtagggggcagagctgtcctcagctgcactgcggcctggtggcagtgtggggagtcacacttctgtccacctggcctcctctcgcctggccgccagccccagccccagccccagccccaggcccagctgcctttggctttgatctcaagtcaggctgaaggcagcgaagcctcggggcccaagcccctccccagccccctctcccggacagacgccttgcccagggtgtgtttgctgagtgtcttgactaccgtgacaccacgcatggccagagctagcgtccctactgcctcccgactcctcagtggaggaggagctgcggtccctctggtgtctgccatccccctccctccctgggcccggccctggacccgtcaggtgcctgtccccagccccaaccccactcatgccccgtcgtcctcccagacaaatgaaaccacgctgcgcttccgatgcccccgcttgccgtgtaatggttcagctaatcccatggcgagatgggggctcactccggaggaggagccaggcagcagggccttcctgaccaacagccagctctgtccttccccccaggaaacacatgttcatttgtgtgatcatgtatagacctcagaacggaagataggactgtatataattgtaataaataccagttgccactatttaaaaaaaaaaaaaaaaaaaaa

SEQ ID NO: 25466 - DNA, 1789 bp, Homo Sapiens
cggaggaggtggagatgaatggcgggcgcggcgaccgggagccggacccctgggaggtcggagcttgtcgagggatgcggctggcgctgcccggagcatggcgaccgcgtggctgagctcttctgtcgccgctgccgccgctgcgtgtgcgcgctttgcccggtgctgggcgcgcaccgtggccaccctgtgggcctggcgctggaggcagcggtgcacgtgcagaaactcagccaagaatgtttaaagcagctggcaatcaagaagcagcagcacattgacaacataacccagatagaagatgccaccgagaagctcaaggctaatgcagagtcaagtaaaacctggctgaaggggaaattcactgaactcagattactacttgacgaagaggaagcgctggccaagaaattcattgataaaaacacgcagcttaccctccaggtgtacagggaacaagctgactcttgcagagagcaacttgacatcatgaatgatctctccaacagggtctggagtatcagccaggagcccgatcctgtccagaggcttcaggcatacacggccaccgagcaggagatgcagcagcagatgagcctcggggagctgtgccatcccgtgcccctctcctttgagcccgtcaagagcttctttaagggcctcgtggaagccgtggagagtacattacagacgccattggacattcgccttaaggaaagcataaactgccagctctcagacccttccagcaccaagccaggtaccttgttgaaaaccagcccctcaccagagcgatcgctattgctgaaatacgcgcgcacgcccacgctggatcctgacacgatgcacgcgcgcctgcgcctgtccgccgatcgcctgacggtgcgctgcggcctgctgggcagcctggggcccgtgcccgtgctgcggttcgacgcgctctggcaagtgctggctcgtgactgcttcgccaccggccgccactactgggaggttgacgtgcaggaggcgggcgccggctggtgggtgggcgcggcctacgcctcccttcggcgccgcggggcctcggccgccgcccgcctgggctgcaaccgccagtcctggtgcctcaagcgctacgaccttgagtactgggccttccacgacggccagcgcagccgcctgcggccccgcgacgacctcgaccggctcggcgtcttcctggactacgaggccggcgtcctcgccttctacgacgtgacgggcggcatgagccacctgcataccttccgcgccacgttccaggagccgctctacccggccctgcggctctgggagggggccatcagcatcccccggctgccctaggggccaggaccggcgtgacagcctccagaatgtcatggaagcagaatcgtacagtatgttcccttctgcatatgctgctttctcactcagcatcatttccttgagatgcatccaggctgctgcacgcatcaatagttcattcctggctgggcgcggtggctcacgcctgtaatcccagcgctttgggaggccgatgtgggtggatcacaaggtcaggagtttgagactagcctggccaagatggtgaaaccccatctctgcaaaaaatacaaaaattagccgggcaccatggcatgtgcctgtaatccctgctactcaggaggctgaggaaggagaatcacttgaacccgggcagcggaggttgcagtgagccgagatcacaccactgcactccagcctgggcaatagagtgagactccgtttcaaaaaaaaaaaaaaaaaa

SEQ ID NO: 25467 - DNA, 1297 bp, Homo Sapiens
ccgaggtcgggatgtgacttgtctgcggtgggtctacatcccctttcagcagccccatcacctccgacgaggaatacctgagccccccagaggagttcccagagcctggggagacctggccgcgaacccccaccatgaagcccagtcccagccagaaccgccgttcttctgacactggctccaaggcaccccccaccttcaaggtctcacttatggaccagtcagtaagagaaggccaagatgtcatcatgagcatccgcgtgcagggggagcccaagcctgtggtctcctggctgagaaaccgccagcccgtgcgcccagaccagcggcgctttgcggaggaggctgagggtgggctgtgccggctgcggatcctggctgcagagcgtggcgatgctggtttctacacttgcaaagcggtcaatgagtatggtgctcggcagtgcgaggcccgcttggaggtccgaggcgagtgagctcagggggccacctgcgctccccccgctaccctccgagccgcgcccctgtctcaggcacctctcggacctcgctgtgtttcactgcctcctgcccacagacccaggcctgccggcccggacccgtcccagcctcccctccccaccccatgcagcccccagggggatagcccatgggcccctgtggaccctccctccccaagtggacacatggctgtgcaggccaggaggcccacagatggactgagtgctgggaaggggcggctgcgaggggtatcaaccccccgagtctctccctgaaggggagcaccgggcgagtgcatgtgctactgctgctacaggcctgtctatctgtttgtctgtctgtgtgtctgtgacagtcagggaaggatgcctcggagctgaggtggggtgagacagagtgggagagattacggcatggcatggaggggcccaaggagcaggggctgttgacaaaggccttaccaggaagggttaggacactgaccattctagaaatgggtttcgaatggcacaacactttctatttcacaaaagaccaaaagccagaggccccaggctctgtgctgatgaacagcctggctgagccctggccctggcaggtttagggcccatttggggccccctccttctctgtcagggctggggtgctctgtctgggaatgagggagttaaccaagtttggtgcaggagcaggggcagggggccactgtagtgagcgtggagaaatttggaaacacctatttcttaactcaaataaagtccagtttgtacctaaaaaaaaaaaaaaaaaaaaaaaa

SEQ ID NO: 25468 - DNA, 1757 bp, Homo Sapiens
ggagcacaaaggatccaggtctcccgacgggaggttaataccaagaaccatgtgtgccgagcggctgggccagttcatgaccctggctttggtgttggccacctttgacccggcgcgggggaccgacgccaccaacccacccgagggtccccaagacaggagctcccagcagaaaggccgcctgtccctgcagaatacagcggagatccagcactgtttggtcaacgctggcgatgtggggtgtggcgtgtttgaatgtttcgagaacaactcttgtgagattcggggcttacatgggatttgcatgacttttctgcacaacgctggaaaatttgatgcccagggcaagtcattcatcaaagacgccttgaaatgtaaggcccacgctctgcggcacaggttcggctgcataagccggaagtgcccggccatcagggaaatggtgtcccagttgcagcgggaatgctacctcaagcacgacctgtgcgcggctgcccaggagaacacccgggtgatagtggagatgatccatttcaaggacttgctgctgcacgaaccctacgtggacctcgtgaacttgctgctgacctgtggggaggaggtgaaggaggccatcacccacagcgtgcaggttcagtgtgagcagaactggggaagcctgtgctccatcttgagcttctgcacctcggccatccagaagcctcccacggcgccccccgagcgccagccccaggtggacagaaccaagctctccagggcccaccacggggaagcaggacatcacctcccagagcccagcagtagggagactggccgaggtgccaagggtgagcgaggtagcaagagccacccaaacgcccatgcccgaggcagagtcgggggccttggggctcagggaccttccggaagcagcgagtgggaagacgaacagtctgagtattctgatatccggaggtgaaatgaaaggcctggccacgaaatctttcctccacgccgtccattttcttatctatggacattccaaaacatttaccattagagaggggggatgtcacacgcaggattctgtggggactgtggacttcatcgaggtgtgtgttcgcggaacggacaggtgagatggagacccctggggccgtggggtctcaggggtgcctggtgaattctgcacttacacgtactcaagggagcgcgcccgcgttatcctcgtacctttgtcttctttccatctgtggagtcagtgggtgtcggccgctctgttgtgggggaggtgaaccagggaggggcagggcaaggcagggcccccagagctgggccacacagtgggtgctgggcctcgccccgaagcttctggtgcagcagcctctggtgctgtctccgcggaagtcagggcggctggattccaggacaggagtgaatgtaaaaataaatatcgcttagaatgcaggagaagggtggagaggaggcaggggccgagggggtgcttggtgccaaactgaaattcagtttcttgtgtggggccttgcggttcagagctcttggcgagggtggagggaggagtgtcatttctatgtgtaatttctgagccattgtactgtctgggctgggggggacactgtccaagggagtggcccctatgagtttatattttaaccactgcttcaaatctcgatttcactttttttatttatccagttatatctacatatctgtcatctaaataaatggctttcaaacaaaaaaaaaaaaaaaaaaaa

SEQ ID NO: 25469 - DNA, 3232 bp, Homo Sapiens
cactaactcttctggaaacgtgtcagtgaaacagagatcgttttgtggaatagcaacccatggttatggcgagtgacccgacgtgatctggggggcaggctgcagaggactcatgacaggctataccatgctgcggaatgggggcgcggggaacggaggtcagacctgcatgctgcgctggtccaaccgcatccgcctcacgtggctcagcttcacgctctttgtcatcctggtcttcttcccgctcatcgcccactattacctcaccactctggatgaggctgatgaggcaggcaagcggatttttggtccccgggtggggaacgagctgtgcgaggtgaagcacgtgctggatctgtgccgcatccgggagtcggtgagtgaagagctcctgcagctggaggccaagcgccaagagctgaacagcgagatcgccaagctgaatctgaagatcgaagcctgtaagaagagcattgagaacgccaagcaggacctgctccagctcaagaatgtcatcagccagaccgagcattcctacaaggagctcatggcccagaaccagcccaagctgtccctgcccatccgactgctcccagagaaggacgatgccggcctccctcccccgaaggccactcggggctgccggctacacaactgctttgattattctcgttgccctctcacctctggcttcccggtctacgtctatgacagtgaccagtttgtctttggcagctacctggatcccttggtcaagcaggcttttcaggcgacagcacgagctaacgtttatgttacagaaaatgcagacatcgcctgcctttacgtgatactagtgggagagatgcaggagccggtggtgctgcggcctgctgagctggagaagcagttgtattccctgccacactggcggacggatggacacaaccatgtcatcatcaatctgtcacgtaagtcagatacacagaaccttctctataacgtcagtactggccgtgccatggtggcccagtccaccttctacactgtccagtacagacctggctttgacttggtcgtatcaccgctggtccatgccatgtctgagcccaacttcatggaaatcccaccacaggtgccggtgaagcggaaatatctcttcaccttccagggcgagaagattgagtctctgaggtctagccttcaggaggcccgctccttcgaagaggaaatggagggcgaccctcccgccgactacgatgaccggatcattgccaccctgaaggcggtgcaggacagcaagctggatcaggtcctggtggaattcacctgcaaaaaccagcccaaacccagcctgccaactgagtgggcactgtgtggagagcgggaggaccgcttggaattgctgaagctctccaccttcgccctcatcattacccccggggaccctcgcttggttatttcctctgggtgtgcaacacggctcttcgaagccctggaagtcggtgccgtcccggtggtgctgggggagcaggtccagcttccctaccaggacatgctgcagtggaacgaggcggccctggtggtgccaaagcctcgtgttaccgaggttcatttcctgctcagaagcctctccgatagtgacctcctggctatgaggcggcaaggccgctttctctgggagacttacttctccactgctgacagtatttttaataccgtgctggctatgattaggactcgcatccagatcccagccgctcccatccgggaagaggcggcagctgagatcccccaccgttcaggcaaggcggctggaactgaccccaacatggctgacaacggggacctggacctggggccagtggagacggagccgccctacgcctcacccagatacctccgcaatttcactctgactgtcactgacttttaccgcagctggaactgtgctccagggcctttccatcttttcccccacactccctttgaccctgtgttgccctcagaggccaaattcttgggctcagggactggctttcggcctattggtggtggagctgggggttctggcaaggaatttcaggcagcgcttggaggcaatgttccccgagagcagttcacggtggtgatgttgacttatgagcgggaggaagtgcttatgaactctttagagaggctgaatggcctcccttacctgaacaaggtcgtggtggtgtggaattctcccaagctgccatcagaggaccttctgtggcctgacattggcgtccccatcatggtggtccgtactgagaagaacagtttgaacaaccgattcttaccctggaatgaaattgagacagaggccatcctgtccattgatgacgatgctcacctccgccatgacgaaatcatgtttgggttccgggtgtggagagaagctcgggaccgcatcgtgggcttccctggccgttaccacgcatgggacatcccccatcagtcctggctctacaactccaactactcctgtgagctgtccatggtgctgacaggtgctgccttctttcacaagtattatgcctacctgtattcttatgtgatgccccaggccatccgggacatggtggatgaatacatcaactgtgaggacattgccatgaacttccttgtctcccacatcactcggaagccccccatcaaggtgacctcacggtggacattccgatgcccaggatgccctcaggccctgtctcatgatgactcccacttccacgagcggcacaagtgcatcaacttcttcgtgaaggtgtacggctacatgcccctcctgtacacgcagttcagggtggattctgtgctcttcaagacacgcctgccccatgacaagaccaagtgcttcaagttcatctaggggcagcgcacggtctggggaagaggatgagcagagggaggaagatggctcccaaggttcctaggcattgcaggaccttgggcacatctgctggtgggtggcccagagcctctgctggaaggggcagcaggaggagtggaaggaaaccgctgcctttatcttgaagtcagccacactgggcctggagccctgggcggagtccccggggttccccacacagggcactgactgatagcttacactgaggactgtggcgactctgcagagtcactcacaccgttcgtacgcccaggacagctggttcgtggtttttacattcaataacaactattatgattatttaaaaaaaaaaaaaaaaaa

SEQ ID NO: 25470 - DNA, 2864 bp, Homo Sapiens
gtctgcccgggcccgcccatcggggtccccaaccccatccggaccccgccgcccgagcgcgcggccccggaagcacccgcctcccggcatggtgctcaaggccttcttccccacgtgctgcgtctcgacggacagcgggctgctggtgggacggtgggtgccggagcagagcagcgccgtggtcctggcggtcctgcactttcccttcatccccatccaggtcaagcagctcctggcccaggtgcggcaggccagccaggtgggcgtggccgtgctgggcacctggtgccactgccggcaggagcccgaggagagcctgggccgcttcctggagagcctgggtgctgtcttcccccatgagccctggctgcggctgtgccgggagagaggcggcacgttctggagctgcgaggccacccaccggcaagcgcccactgcccccggtgcccctggtgaggaccaggtcatgctcatcttctatgaccagcgccaggtgttgctgtcacagctacacctgcccaccgtcttgcccgaccgccaggctggagccaccactgccagcacggggggcctggctgccgtcttcgacacggtagcacgcagtgaggtgctcttccgcagtgaccgctttgatgagggccccgtgcggctgagccactggcagtcggagggcgtggaggccagcatcctcgcggagctggccaggcgagcctcgggacccatttgcctgctgttggccagcctgctgtcgctggtctcagctgtcagtgcctgccgagtgttcaagctctggcccctgtccttcctcgggagcaaactctccacgtgcgaacagctccggcaccggctggagcacctcacgctaatcttcagtacacggaaggcggagaaccctgcccagctgatgaggaaggccaacacggtggcctctgtgctgctggacgtggccctgggcctcatgctgctgtcctggctccacgggagaagccgcatcgggcatctggccgacgccctcgttcctgtggctgaccacgtggccgaggagctccagcatctgctgcagtggctgatgggtgctcccgccgggctcaagatgaaccgtgcactggaccaggtgctgggccgcttcttcctctaccacatccacctgtggatcagctacatccacctcatgtcccccttcgtggagcacatcctttggcacgtgggcctctcggcctgcctgggcctgacggtggccctgtccctcctctcggacattatcgccctcctcaccttccacatctactgcttttacgtctatggagccaggctgtactgcctgaagatccatggcctgtcctcactgtggcgtctgttccgggggaagaagtggaacgttctgcgccagcgcgtggactcctgttcctatgacctggaccagctgttcatcgggactctgctcttcaccatcctgctcttcctcctgcctaccacagccctgtactacctggtgttcaccctgctccggctcctggtggtcgccgtgcagggcctgatccatctgctcgtggacctcatcaactccctgccgctgtactcactgggtcttcggctctgccggccctacaggctggcggataaacccactgccctacagccgcgtggtgcacacctaccgcctccccagctgtggctgccaccccaagcactcctggggcgccctgtgccgcaagctgttccttggggagctcatctacccctggaggcagagaggggacaagcaggactgagggaactgctggctcgcctggcaccaccacacggccacagccagccatctgctctgccagggtggcaccagctcagctggcgcatgtcctgtgctttgtggacgctgctgtgtgctcctgaacacggcaggccctgctatcacaccttgggcttggaggtcattgggagtgagcagatgtgggggtggccagccaggctggccgcactccatcactggcactgcctgccttgggacccgcttcccacctgctgcggtcaccatggtggcgagcacagcaaccccaggtgtccagagcactgccccatgcccaccctgtgtacccaggtccagagggtccgtccaccacagcagccccaggtggagggctggtctccctgggggctccccagtggctctgccctggctgtgggggtggagggaccttgccaggatgaaccccccagtcccaggcaccctctagctccctcagccgaacagcaccctgcatctgggggattgaagcagtcgctgacccccgtccccagcgggcccgggccctcactccctgaaccacacggggtttatttgcggatgttccctggagaggtcgctttgtgaagaaaccatcagcaggctgtgagcatcgccaggctgctgtgggggcgggagcagcctcagtgtcaagggcccgcccactgacccagccgtacctattcgtccacggtgccccgtagcagcaggtcctgcggccaaatctgtctcccttcatgggcctcccagggaaggaggaagccctgctgtgcagacacctctgtggccccccaggagtgtgagtggcctggggagggggccgtggcactgaggccgaaagtgcctgccagacggcacggtctgggtgcgggtgttccctgtgagcccgagtccgcttcaggaggggagcctgcaggtgccggctggtgaggggatgacgcgctgtgggtgggaggaggcagcgcccatctcagcagcaccaggactgcctgggactccctggcaacccagcaccggggaagccgtcagctgctgtgacaataaaacctgccccgtgtctggaaaaaaaaaaaaaaaaaaa

SEQ ID NO: 25471 - DNA, 3274 bp, Homo Sapiens
ggctacagcagggcactggcccctactgtcaccgccacctacacaaagaccctatctctgagcgctgcagcctactgttcagccccaggtttgaggatggatgccctggacgcttcgaagctactggatgaggagctgtattcaagacagctgtatgtgctgggctcacctgccatgcagaggattcagggagccagggtcctggtgtcaggcctgcagggcctgggggccgaggtggccaagaacttggttctgatgggtgtgggcagcctcactctgcatgatccccaccccacctgctggtccgacctggctgcccagtttctcctctcagagcaggacttggaaaggagcagagccgaggcctctcaagagctcttggctcagctcaacagagctgtccaggtcgtcgtgcacacgggtgacatcactgaggacctgctgttggacttccaggtggtggtgctgactgctgcaaagctggaggagcagctgaaggtgggcaccttgtgtcataagcatggagtttgctttctggcggctgacacccggggcctcgtggggcagttgttctgtgactttggtgaggacttcactgtgcaggaccccacagaggcagaacccctgacagctgccatccagcacatctcccagggctcccctggcattctcactctgaggaaaggggccaatacccactacttccgtgatggagacttggtgactttctcgggaattgagggaatggttgagctcaacgactgtgatccccggtctatccacgtgcgggaggatgggtccctggagattggagacacaacaactttctctcggtacttgcgtggtggggctatcactgaagtcaagagacccaagactgtgagacataagtccctggacacagccctgctccagccccatgtggtggcccagagctcccaggaagttcaccatgcccactgcctgcatcaggccttctgtgcactgcacaagttccagcacctccatggccggccaccccagccctgggatcctgttgatgcagagactgtggtgggcctggcccgggacctggaaccactgaagcggacagaggaagagccactggaagagccactggatgaggccctagtgcggacagtcgccctaagcagtgcaggtgtcttgagccctatggtggccatgctgggtgcagtagctgcccaggaagtgctgaaggcaatctccaggaagttcatgcctctggaccagtggctttactttgatgccctcgattgtcttccggaagatggggagctccttcccagtcctgaggactgtgccctgagaggcagccgctatgatgggcaaattgcagtgtttggggctggttttcaggagaaactgagacgccagcactacctcctggtgggcgctggtgccattggttgtgagctgctcaaagtctttgccctagtgggactgggggccgggaacagcgggggcttgactgttgttgacatggaccacatagagcgctccaatctcagccgtcagttcctcttcaggtcccaggacgttggtagacccaaggcagaggtggctgcagcagctgcccggggcctgaacccagacttacaggtgatcccgctcacctacccactggatcccaccacagagcacatctatggggataactttttctcccgtgtggatggtgtggctgctgccctggacagtttccaggcccggcgctatgtggctgctcgttgcacccactatctgaagccactgctggaggcaggcacatcgggcacctggggcagtgctacagtattcatgccacatgtgactgaggcctacagagcccctgcctcagctgcagcttctgaggatgccccctaccctgtctgtaccgtgcggtacttccctagcacagccgagcacaccctgcagtgggcccggcatgagtttgaagaactcttccgactgtctgcagagaccatcaaccaccaccaacaggcacacacttccctggcagacatggatgagccacagacactcaccttactgaagccagtgcttggggtcctgagagtgcgtccacagaactggcaagactgtgtggcgtgggctcttggccactggaaactctgctttcattatggcatcaaacagctgctgaggcacttcccacctaataaagtgcttgaggatggaactcccttctggtcaggtcccaaacagtgtccccagcccttggagtttgacaccaaccaagacacacacctcctctacgtactggcagctgccaacctgtatgcccagatgcatgggctgcctggctcacaggactggactgcactcagggagctgctgaagctgctgccacagcctgacccccaacagatggcccccatctttgctagtaatctagagctggcttcggcttctgctgagtttggccctgagcagcagaaggaactgaacaaagccctggaagtctggagtgtgggccctcccctgaagcctctgatgtttgagaaggatgatgacagcaacttccatgtggactttgtggtagcggcagctagcctgagatgtcagaactacgggattccaccggtcaaccgtgcccagagcaagcgaattgtgggccagattatcccagccattgccaccactacagcagctgtggcaggcctgttgggcctggagctgtataaggtggtgagtgggccacggcctcgtagtgcctttcgccacagctacctacatctggctgaaaactacctcatccgctatatgccttttgccccagccatccagacgttccatcacctgaagtggacctcttgggaccgtctgaaggtaccagctgggcagcctgagaggaccctggagtcgctgctggctcatcttcaggagcagcacgggttgagggtgaggatcctgctgcacggctcagccctgctctatgcggccggatggtcacctgaaaagcaggcccagcacctgcccctcagggtgacagaactggttcagcagctgacaggccaggcacctgctcctgggcagcgggtgttggtgctagagctgagctgtgagggtgacgacgaggacactgccttcccacctctgcactatgagctgtgacaaggcagccaccctgtcacctagctcaatggagccccggatcccaagccctgcattgtaagcccacagtaggcactcaataaatgcttgttaaaggaaaaaaaaaaaaaaaaaaaaaaaaaaaaaaaaaaaaaaaaaa

SEQ ID NO: 25472 - DNA, 1929 bp, Homo Sapiens
cggggcagttgcgggttgtcataacggtccccgccggagtgaggcgaggccgcgtcgctcagttctggccgtctagggcccctgtaaggatgagagcgcagaggacgcagggccgctggaggcgcaggtaacgaagctagggtgcggttgggaccgcggctgagctttttccgggacccgtggtgctgaatggagaggacggagacgaagccgagccgcggctcctagcggcggcgccgacgctcgagctgtagctgccaggcgaggatgtgtggagcgcaggcggcgcggggtaaatgagaggtctcgggccccaggacccccggggcccgggatgagttagcgagggcagccgcgggggccagttccgaccgtgacaggccaaggcgacggccgccgcccgcccgccccttccgtgcagaagcagctgctcctttccgcgcccgcccgcctgcgctcccggccctggagaccatgaggttccgcatctacaaacggaaggtgctaatcctgacgctcgtggtggccgcctgcggcttcgtcctctggagcagcaatgggcgacaaaggaagaacgaggccctcgccccaccgttgctggacgccgaacccgcgcggggtgccggcggccgcggtggggaccacccctctgtggctgtgggcatccgcagggtctccaacgtgtcggcggcttccctggtcccggcggtcccccagcccgaggcggacaacctgacgctgcggtaccggtccctggtgtaccagctgaactttgatcagaccctgaggaatgtagataaggctggcacctgggccccccgggagctggtgctggtggtccaggtgcataaccggcccgaatacctcagactgctgctggactcacttcgaaaagcccagggaattgacaacgtcctcgtcatctttagccatgacttctggtcgaccgagatcaatcagctgatcgccggggtgaatttctgtccggttctgcaggtgttctttcctttcagcattcagttgtaccctaacgagtttccaggtagtgaccctagagattgtcccagagacctgccgaagaatgccgctttgaaattggggtgcatcaatgctgagtatcccgactccttcggccattatagagaggccaaattctcccagaccaaacatcactggtggtggaagctgcattttgtgtgggaaagagtgaaaattcttcgagattatgctggccttatacttttcctagaagaggatcactacttagccccagacttttaccatgtcttcaaaaagatgtggaaactgaagcagcaagagtgccctgaatgtgatgttctctccctggggacctatagtgccagtcgcagtttctatggcatggctgacaaggtagatgtgaaaacttggaaatccacagagcacaatatgggtctagccttgacccggaatgcctatcagaagctgatcgagtgcacagacactttctgtacttatgatgattataactgggactggactcttcaatacttgactgtatcttgtcttccaaaattctggaaagtgctggttcctcaaattcctaggatctttcatgctggagactgtggtatgcatcacaagaaaacctgtagaccatccactcagagtgcccaaattgagtcactcttaaataataacaaacaatacatgtttccagaaactctaactatcagtgaaaagtttactgtggtagccatttccccacctagaaaaaatggagggtggggagatattagggaccatgaactctgtaaaagttatagaagactgcagtgaaaatcacagttacaaaagcgacagtcttctatttttgatatttgtccaaacaggacatacaattgaataaaagagtttaggaactggaaaaaaaaaaaaaaaaaaaaaaaa

SEQ ID NO: 25473 - DNA, 2644 bp, Homo Sapiens
ctcgggttgtgccaccgctggactcccgtgtccctccgcgcaggcgggcggccccggagcgctggtgccggcagaggcggcgacggtggcgcccctcctcatcatgaacagaggcttctcccgaaaaagccacacattcctgcccaagatcttcttccgcaagatgtcatcctcaggggccaaggacaagcctgagctgcagtttcccttccttcaggatgaggacacagtggccacgctgctagagtgcaagacgctcttcatcttgcgcggcctgccaggaagcggcaagtccacgctggcacgggtcatcgtggacaagtaccgtgatggcaccaagatggtgtcggctgacgcttacaagatcacccccggcgctcgaggagccttctccgaggagtacaagcggctcgatgaggacctggctgcctactgccgccgccgggacatcagaattcttgtgcttgatgacaccaaccacgaacgggaacggctggagcagctctttgaaatggccgaccagtaccagtaccaggtggtgctggtggagcccaagacggcgtggcggctggactgtgcccagctcaaggagaagaaccagtggcagctgtcggctgatgacctgaagaagctgaagcctgggctggagaaggacttcctgccgctctacttcggctggttcctgaccaagaagagctctgagaccctccgcaaagccggccaggtcttcctggaagagctggggaaccacaaggccttcaagaaggagctgcgacaattcgtccctggggatgagcccagggagaagatggacttggtcacctactttggaaagagacccccaggcgtgctgcattgcacaaccaagttttgtgactacgggaaggctcccggggcagaggagtacgctcaacaagatgtgttaaagaaatcttactccaaggccttcacgctgaccatctctgccctctttgtgacacccaagacgactggggcccgggtggagttaagcgagcagcaactgcagttgtggccgagtgatgtggacaagctgtcacccactgacaacctgccgcgggggagccgcgcccacatcaccctcggctgtgcagctgacgtagaggccgtgcagacgggccttgacctcttagagattctgcggcaggagaaggggggcagccgaggcgaggaggtgggcgagctaagccggggcaagctctattccttgggcaatgggcgctggatgctgaccctggccaagaacatggaggtcagggccatcttcacgggatactacgggaaaggcaaacctgtgcccacgcaaggtagccggaaggggggcgccttgcagtcctgcaccatcatatgagtgttctcaccaccacttatgcccctagaagggaaggggagagggaaacgtgccctctgtttgatccttgttttgtgacattttttttttttttttttttactcaaagttaacctacctgtaactttttaaaaacttgtaaaataactgaccctcccttcctgtccgccctcttcccctctaatgctcacgctcccaacacaaggtgggcagggaggcaccattcaggaacctggaccaaagctgacgaggctgggccaagccagggatggggccacagccagaaccccgagccctacttccaggttctggttagctcagccccagcccagcccagctgctctgcccagagctgggtgagtggggagacacctcagagccccgcaaaacccactgaccggaggcaaaaggcagtggggctgggggtagttttccatggtcacagagaactagtggtggctctgagaaggggaggacctctgggctttgattccatctccttgtcttttttctttgtttttagagacagggtcctgctatttcccaagctggagtgcagtggtgcgatcatggctcactgcagcctcgaactcctgggctcaagcaatcctcctgagtgatcccatttcttaatcagtgtagccccaagaaggctggggctatttaccagggtagaaaaaggagcttacctcccacctttggtcctaagtccctgccccctccccttcacaccataactaggtaacagtttgataactagggaagaaagcagaacagttaagcagccgccacatccccgctggctgggggcctcactccaggaaggggctggactggctgtcctttccagtggcctggctccgctgtgtggatggggagatcggggccagaggcagaaccctggtgaggaagctccagtcctgctctctacccagcccatcttgcctccatggtgcctctggaggcctctgggcctcctctaacaggggctggtgggcaccaagagccaatggagtagacccctggctggtaagggccaagtcccaccggttgcttctgggaaggggtttctaacactagtctgtgtgctgtggttcctggggtgccctccactgccctctgttcagtaacagggccttgctaatcgggttgtcactcaacaaaagtgctttggatttaagttactatcctggctttgcccaacctcagcaacctgtaagactgataatgaaataaatcatgttaatcctaaaaaaaaaaaaaaaaaaaaaaaaaa

SEQ ID NO: 25474 - DNA, 2974 bp, Homo Sapiens
cagccagctgtgccggcgtttgttggctgccctgcgcccggccctccagccagccttctgccggccctgccgcgatggaggtgccccagccggagcccgcgccaggctcggctctcagtccagcaggcgtgtgcggtggcgcccagcgtccgggccacctcccgggcctcctgctgggatctcatggcctcctggggtccccggtgcgggcggccgcttcctcgccggtcaccaccctcacccagaccatgcacgacctcgccgggctcggcagcgaaaccccaaagagtcaggtagggaccctgctcttccgcagccgcagccgcctgacgcacctatccctgtctcgacgggcatccgaatcctccctgtcgtctgaatcctccgaatcttctgatgcaggtctctgcatggattcccccagccctatggacccccacatggcggagcagacgtttgaacaggccatccaggcagccagccggatcattcgaaacgagcagtttgccatcagacgcttccagtctatgccggtgaggctgctgggccacagccccgtgcttcggaacatcaccaactcccaggcgcccgacggccggaggaagagcgaggcgggcagtggagctgccagcagctctggggaagacaaggagaatgatggatttgtcttcaagatgccatggaagcccacacatcccagctccacccatgctctggcagagtgggccagccgcagggaagcctttgcccagagacccagctcggcccccgacctgatgtgtctcagtcctgaccggaagatggaagtggaggagctcagccccctggccctaggtcgcttctctctgacccctgcagagggggatactgaggaagatgatggatttgtggacatcctagagagtgacttaaaggatgatgatgcagttcccccaggcatggagagtctcattagtgccccactggtcaagaccttggaaaaggaagaggaaaaggacctcgtcatgtacagcaagtgccagcggctcttccgctctccgtccatgccctgcagcgtgatccggcccatcctcaagaggctggagcggccccaggacagggacacgcccgtgcagaataagcggaggcggagcgtgacccctcctgaggagcagcaggaggctgaggaacctaaagcccgcgtcctccgctcaaaatcactgtgtcacgatgagatcgagaacctcctggacagtgaccaccgagagctgattggagattactctaaggccttcctcctacagacagtagacggaaagcaccaagacctcaagtacatctcaccagaaacgatggtggccttattgacgggcaagttcagcaacatcgtggataagtttgtgattgtagactgcagatacccctatgaatatgaaggcgggcacatcaagactgcggtgaacttgcccctggaacgcgacgccgagagcttcctactgaagagccccatcgcgccctgtagcctggacaagagagtcatcctcattttccactgtgaattctcatctgagcgtgggccccgcatgtgccgtttcatcagggaacgagaccgtgctgtcaacgactaccccagcctctactaccctgagatgtatatcctgaaaggcggctacaaggagttcttccctcagcacccgaacttctgtgaaccccaggactaccggcccatgaaccacgaggccttcaaggatgagctaaagaccttccgcctcaagactcgcagctgggctggggagcggagccggcgggagctctgtagccggctgcaggaccagtgaggggcctgcgccagtcctgctacctcccttgcctttcgaggcctgaagccagctgccctatgggcctgccgggctgagggcctgctggaggcctcaggtgctgtccatgggaaagatggtgtgggtgtcctgcctgtctgccccagcccagattcccctgtgtcatcccatcattttccatatcctggtgccccccacccctggaagagcccagtctgttgagttagttaagttgggttaataccagcttaaaggcagtattttgtgtcctccaggagcttcttgtttccttgttagggttaacccttcatcttcctgtgtcctgaaacgctcctttgtgtgtgtgtcagctgaggctgggggagagccatggtctctgaggatgggtcagagctaaactccttcctggcctgagagtcagctctctgccctgtgtacttcccgggccagggctgcccctaatctctgtaggaaccgtggtatgtctgccatgttgcccctttctcttttcccctttcctgtcccaccatacgagcacctccagcctgaacagaagctcttactctttcctatttcagtgttacctgtgtgcttggtctgtttgactttacgcccatctcaggacacttccgtagactgtttaggttcccctgtcaaatatcagttacccactcggtcccagttttgttgccccagaaagggatgttattatccttgggggctcccagggcaagggttaaggcctgaatcatgagcctgctggaagcccagcccctactgctgtgaaccctggggcctgactgctcagaacttgctgctgtcttgttgcggatggatggaaggttggatggatgggtggatggccgtggatggccgtggatgcgcagtgccttgcatacccaaaccaggtgggagcgttttgttgagcatgacagcctgcagcaggaatatatgtgtgcctatttgtgtggacaaaaatatttacacttagggtttggagctattcaagaggaaatgtcacagaagcacctaaaccaaggactgagcaccctctggattctgaatctcaagatgggggcagggctgtgcttgaaggccctgctgagtcatctgttagggccttggttcaataaagcactgagcaagttgagaaaaaa

SEQ ID NO: 25475 - DNA, 1883 bp, Homo Sapiens
gtacacaaaactgggggttaccttacagaaagtggttatgtcaatctgcaaagagtacagatgatcatgttagcagttggtgaagttgaggatagcatttttaaaaagagaaaggatgatgaggacagttttagaagacgacagaaagaaaaaagaaagagaatgaagagagatcaaccagctttcactcctagtggaatattaactcctcatgccttgggttcaagaaattcaccaggttctcaagtagccagtaatccgagacaagcagcctatgaaatgaggatgcagaataactctagtccttcgatatctcctaatacgagtttcacatctgatggctccccgtctccattaggaggaattaagcgaaaagcagaagacagtgacagtgaacctgagccagaggataatgtcaggttatgggaagctggctggaagcagcggtactacaagaacaaatttgatgtggatgcagctgatgagaaattccgtcggaaagttgtgcagtcgtacgttgaaggactttgctgggttcttagatattattaccagggctgtgcttcctggaagtggtattatccatttcattatgcaccatttgcttcagactttgaaggcattgcagacatgccatctgattttgagaagggtacgaaaccgtttaaaccactagaacaacttatgggggtatttccagctgcaagtggtaattttctacctccatcatggcggaagctcatgagtgatcctgattctagtataattgacttctatcctgaagattttgctattgatttgaatgggaagaaatatgcatggcaaggtgttgctctcttgccattcgtggatgagcgaaggctacgagctgccctagaagaggtatacccagacctcactccagaagagaccagaagaaacagccttggaggtgatgtcttatttgtggggaaacatcacccactccatgacttcattttagagctgtaccagacaggttccacagagccagtggaggtaccccctgaactatgtcatgggattcaaggaaagttttctttggatgaagaagccattcttccagatcaaatagtatgttctcctgttcctatgttaagggatctgacacagaacactgtagtcagtattaattttaaagacccacagtttgctgaagattacatttttaaagctgtaatgcttccaggagcaagaaagccagcagcagtactgaaacctagtgactgggaaaaatccagcaatggacggcagtggaagcctcagcttggctttaaccgtgaccggaggcctgtgcacctggatcaggcagccttcaggactttgggccatgtgatgccaagaggctcaggaactggcatttacagcaatgctgcaccaccacctgtgacttaccagggaaacttatacaggccgcttttgagaggacaagcccagattccaaaacttatgtcaaatatgaggccccaggattcctggcgaggtcctcctccccttttccagcagcaaaggtttgacagaggcgttggggctgaacctctgctcccatggaaccggatgctgcaaacccagaatgcagccttccagccaaaccagtaccagatgctagctgggcctggtgggtatccacccagacgagatgatcgtggagggagacagggatatcccagagaaggaaggaaataccctttgccaccaccctcaggaagatacaattggaattaagcttttgtaaagctttcccaaatcctttcatcattctacagttttatgctatttgtggaaagatttctttctcaagtagtagtttttaataaaactacagtactttgtgtaaaaaaaaaaaaaaaaaaaaaaaaaaaaaa

SEQ ID NO: 25476 - DNA, 1460 bp, Homo Sapiens
ccagatctggaggtgtgtccatggcggcgcttgacctgcgagcggagctggattcgctggtcctgcagctgcttggggacctggaggagctggaggggaaacgaacggtgttgaacgcccgggtggaggagggctggctctcgctcgccaaggctcgctacgcgatgggcgccaagtcggtagggcccctgcagtatgcttcccacatggagccccaggtctgcctccacgccagcgaggcccaggagggactccagaagttcaaggtggtgagagctggtgtccacgccccagaggaggtggggcctcgcgaagcaggtctgcggaggcgcaagggccccactaagaccccagaaccggagtcctctgaggcccctcaggaccccctgaactggtttggaatcctagttcctcacagtctacgtcaggctcaagcaagcttccgggatggcctgcagctggccgcagacatagccagcctccagaaccgcattgactggggtcgaagccagctccggggactccaagagaaactcaagcagctggagcctggggctgcctgacatgcgcgcaaagaggcagggcagcgagcacagctgttctccgacatggctacgtgatctcaggccttcttccttcacaattagctcttgcccctaccccacgccagctaatgccccttctgtgtccctgctctgcatgtttccattttccttaggtgtgaagtttgaagaggcaaacagtaattttgaaagccactactttgaaaccattctaaggcctgagttcccataggacacactcacataggcaggtacacgttagtcaacaattggaactgcctcttggatcactcagctgtgctttcatggctggatgatggaacactgtgcgaagagagatgggggccaggaagtagcgcttcatgcttagtacatcctccaaattgtctttgctggaggagaaaaccgtactcagccaaaagatcaggacaatatgacttgagtccacaaggacacaaacacctgagtagctgggcagcccttggcagggtctaagccaggaagtaaaaatgatctggcctagatatttaagggaactctaggaagaggcctaggtttttaaaatcctgtctctttgtcttaccataagaggctgagcctctcttcatttttttgaagggccacttgtgttttctgttctgggaacttcattcatttttctactgggttgttgatctttgcagtaatttctaggagctgtttatgtttggaggtaattggtcctttgtccatatatatgagatgtaagtcttattttccagtttatctttttgcttattttttttgactttttattgtaaaataaaacatcaaactgcacagaacagttgaatagcttaatgaataactacagtaaaagctatggtaaccactacccaaaaaaaaaaaaaaaaaaaa

SEQ ID NO: 25477 - DNA, 3059 bp, Homo Sapiens
gttcggtggtgtcccggtgcagccacgcgagagtagaagggtggaaaggggaggtgcccagtgaaatggagcctgtcccgtgcactttcgggcatttcgagcatcttgtgggctctcccaagtcgcggcccctcctctgagagccacagtcaggtctgtcctcaggggtcgaggcggctgcgctggggcctcggcccgggaggaggcggggggcacggcctttccattttccctgctcccctctgcagaagcctcatagggcccggcgcggcggctcacgcctgtcattcccagcgctttgggcggattgggtaggaggattacttgaggccaggagttcaagaccaggcagggcaacatagggagaccccccccccaaccatctctaatggaaaaaaaaaaaaaagtctccacatccagcgttgtgccttttctctataaggaacagcatctctgccttcctgttcacggtgaccttcgcttggtgtcctcctggcctcagcaacctgacaattctgtcgtgtcccgagagatggctaatgaatggcgcttgatgacagatgagtaatgcctgttgctgaaagattgacgatcatctttctcaagatgttttctgtcttcatgagtcaaaatttgaagaggaaaggatggtggctgggtggttgacaaattactctcaggactcagtgacctttgaggatgtggctgtggacttcacccaggaggagtggactttgctggatcaaactcagagaaacttatacagagatgtgatgctggagaactataagaatctagttgcagtagattgggagagtcatattaataccaaatggtcagcacctcagcagaattttttgcaggggaaaacatccagtgtggtggaaatggagagaaaccattttggagaggaactgtttgactttaaccaatgtgaaaaagccttgagtgaacactcatgccttaagactcacaggagaacttactttagaaagaaaacctgtgagtgtaatcaatgtgaaaaagccttcagaaaaccctctatctttactttacacaagaaaactgatatcggagaggaacttcctaactgtaatcaatgtgaaacagccttcagccaacatctacatcttgtttgcaagaaaactagccaaaatctacatcttgtttgcaagaaaactcacactcaagagaaaccatataaatgcagtgactgtgaaaaaggcttaccttcctcctcacacctcagagaatgtgtaagaatttatggtggagagagaccatatactcataaggagtatgtcgaaaccttttctcattctacagccctttttgtacacatgcaaactcaagatggagaaaaattctatgaatgtaaagcatgtgggaaacccttcactgagtcgtcatatcttactcaacatttaagaactcatagtagagtgttacctatagaacataagaaatttggcaaagcctttgctttttccccagatcttgctaaacatataagacttagaactagaggaaaacactatgtttgtaatgaatgtggcaaagaatttacttgtttctcaaaactcaacattcacataagggttcacactggagaaaaaccgtatgagtgcaacaaatgtgggaaagccttcactgattcatcaggtcttataaaacacaggcgaactcacactggagaaaagccttatgaatgtaaggaatgtgggaaagcttttgctaactcttcacatcttactgtacatatgagaactcacactggtgagaagccttatcaatgtaaggaatgtggaaaagcctttattaattcctcttcctttaaaagtcacatgcagactcatcctggtgtaaaaccctatgactgtcaacagtgtgggaaagccttcattcgatcctcatttcttattcgacatttgagaagtcacagtgcagaaaggccttttgaatgtgaggaatgtgggaaagcctttagatactcctcgcaccttagtcaacataaaagaatacatacaggggagaggccatataaatgtcaaaagtgtgggcaagccttcagtatctcatcaggccttacagtacacatgagaactcacactggtgaacggccctttgaatgtcaggaatgtgggaaagcctttactcggtccacatatcttattcgacatctaagaagtcatagtgtggagaaaccatataaggaatgtgggcaaacctttagtaattcctcatgccttactgaatgtgtgtgaattggggctgatacttggaaagaatgtggtaaagccactacttcctcacacttactgaacatgtactcattcatagtggcaatgtacacagtcataaggaatgtgggaagccttccttggtgtctcagatcttaacaattccaatagaagagaagacatatgaatgtaaggaatgtgggaaaatcttggctccttccataggccttactattcatgtgtctgtgcatcctaggaaacaaactgaacgtaggaaacctgtcgatgcttacatcttactgagtctgtttgaactcatgctggagagaaatgctatgaatgtgaggaaggtggaaaagctttcattattttcctcgggccttactgagcttgtgagcacattggatataaatgcacgtcctctggctgtaaggaatgtgttgaaacctttcactctgccttataccttaatattcagctgtgatctcacaagtgtgaaaaatcttatgaatgtaaaatgtgtggagattcttctttgtttttagcttccactttgggaacatgtcaaagcacacattgagaagtcccatgagtgaaagagatgttggaaagcccttgaacttggtcgttaggaaacatccacactgaagaggaacctgactgtatggaaggtcaaaaaggctgtattaatttacatgcaaaaagtcacactagaggaatgccatatcagaatgcttttggtaaatatacatgttttaaagaggttatatatcattaataaaaatatctagctggtctgaaaaaaaaaaaaaaaaaaaa

SEQ ID NO: 25478 - DNA, 2312 bp, Homo Sapiens
cagcagcagcagcagcagcagcaggcagccctaccccagatgccgctctttgagaacttctattccatgccgcagcaaccctcgcagcaaccccaggactttggcctgcagccagctgggccactgggacagtcccacctggctcaccacagcatggcaccctaccccttcccccccaacccagatatgaacccagaactgcgcaaggcccttctgcaggactcagccccgcagccagcgctacctcaggtccagatccccttcccccgccgctcccgccgcctctctaaggagggtatcctgcctcccagcgccctggatggggctggcacccagcctgggcaggaggccactggcaacctgttcctacatcactggcccctgcagcagccgccacctggctccctggggcagccccatcctgaagctctgggattcccgctggagctgagggagtcgcagctactgcctgatggggagagactagcacccaatggccgggagcgagaggctcctgccatgggcagcgaggagggcatgagggcagtgagcacaggggactgtgggcaggtgctacggggcggagtgatccagagcacgcgacggaggcgccgggcatcccaggaggccaatttgctgaccctggcccagaaggctgtggagctggcctcactgcagaatgcaaaggatggcagtggttctgaagagaagcggaaaagtgtattggcctcaactaccaagtgtggggtggagttttctgagccttccttagccaccaagcgagcacgagaagacagtgggatggtacccctcatcatcccagtgtctgtgcctgtgcgaactgtggacccaactgaggcagcccaggctggaggtcttgatgaggacgggaagggtcctgaacagaaccctgctgagcacaagccatcagtcatcgtcacccgcaggcggtccacccgaatccccgggacagatgctcaagctcaggcggaggacatgaatgtcaagttggagggggagccttccgtgcggaaaccaaagcagcggcccaggcccgagcccctcatcatccccaccaaggcgggcactttcatcgcccctcccgtctactccaacatcaccccataccagagccacctgcgctctcccgtgcgcctagctgaccacccctctgagcggagctttgagctacctccctacacgccgccccccatcctcagccctgtgcgggaaggctctggcctctacttcaatgccatcatatcaaccagcaccatccctgcccctcctcccatcacgcctaagagtgcccatcgcacgctgctccggactaacagtgctgaagtaaccccgcctgtcctctctgtgatgggggaggccaccccagtgagcatcgagccacggatcaacgtgggctcccggttccaggcagaaatccccttgatgagggaccgtgccctggcagctgcagatccccacaaggctgacttggtgtggcagccatgggaggacctagagagcagccgggagaagcagaggcaagtggaagacctgctgacagccgcctgctccagcattttccctggtgctggcaccaaccaggagctggccctgcactgtctgcacgaatccagaggagacatcctggaaacgctgaataagctgctgctgaagaagcccctgcggccccacaaccatccgctggcaacttatcactacacaggctctgaccagtggaagatggccgagaggaagctgttcaacaaaggcattgccatctacaagaaggatttcttcctggtgcagaagctgatccagaccaagaccgtggcccagtgcgtggagttctactacacctacaagaagcaggtgaaaatcggccgcaatgggactctaacctttggggatgtggatacgagcgatgagaagtcggcccaggaagaggttgaagtggatattaagacttcccaaaagttcccaagggtgcctcttcccagaagagagtccccaagtgaagagaggctggagcccaagagggaggtgaaggagcccaggaaggagggggaggaggaggtgccagagatccaagagaaggaggagcaggaagaggggcgagagcgcagcaggcgggcagcggcagtcaaagccacgcagacactacaggccaatgagtcggccagtgacatcctcatcctccggagccacgagtccaacgcccctgggtctgccggtggccaggcctcggagaagccaagggaagggacagggaagtcacgaagggcactacctttttcaaaaaaaaaaaaaaaaaa

SEQ ID NO: 25479 - DNA, 2729 bp, Homo Sapiens
atggcctggagcacagggagctgggccatgggcagcctgaggccagaggccccgctcctctccagcagcaccctcaggtgttgctctgggaacagcagcgactggctgggcggctcccccggggcagcaccggggacactgtgctgcttcctctggcccagggtgggcaccggcctctgtcccgggctcagtcttccccagccgcacctgcctcactgtcagccccagagcctgccagccaggcccgagtcctctccagctcagagacccctgccaggaccctgcccttcaccacagggctgatctatgactcggtcatgctgaagcaccagtgctcctgcggtgacaacagcaggcacccggagcacgccggccgcatccagagcatctggtcccggctgcaggagcgggggctccggagccagtgtgagtgtctccgaggccggaaggcctccctggaagagctgcagtcggtccactctgagcggcacgtgctcctctacggcaccaacccgctcagccgcctcaaactggacaacgggaagctggcagggctcctggcacagcggatgtttgtgatgctgccctgtggtggggttggggtggacactgacaccatctggaatgagcttcattcctccaatgcagcccgctgggccgctggcagtgtcactgacctcgccttcaaagtggcttctcgtgagctaaagaatggtttcgctgtggtgcggcccccaggacaccatgcagatcattcaacagccatgggcttctgcttcttcaactcagtggccatcgcctgccggcagctgcaacagcagagcaaggccagcaagatcctcattgtagactgggacgtgcaccatggcaacggcacccagcaaaccttctaccaagaccccagtgtgctctacatctccctgcatcgccatgacgacggcaacttcttcccggggagtggggctgtggatgaggtaggggctggcagcggtgagggcttcaatgtcaatgtggcctgggctggaggtctggacccccccatgggggatcctgagtacctggctgctttcaggatagtcgtgatgcccatcgcccgagagttctctccagacctagtcctggtgtctgctggatttgatgctgctgagggtcacccggccccactgggtggctaccatgtttctgccaaatgttttggatacatgacgcagcaactgatgaacctggcaggaggcgcagtggtgctggccttggagggtggccatgacctcacagccatctgtgacgcctctgaggcctgtgtggctgctcttctgggtaacagggtggatcccctttcagaagaaggctggaaacagaaacccaacctcaatgccatccgctctctggaggccgtgatccgggtgcacagtaaatactggggctgcatgcagcgcctggcctcctgtccagactcctgggtgcctagagtgccaggggctgacaaagaagaagtggaggcagtgaccgcactggcgtccctctctgtgggcatcctggctgaagataggccctcggagcagctggtggaggaggaagaacctatgaatctctaaggctctggaaccatctgcccgcccaccatgcccttgggacctggttctcttctaacccctggcaatagcccccattcctgggtctttagagatcctgtgggcaagtagttggaaccagagaacagcctgcctgctttgacagttatcccagggagcgtgagaaaatccctgggtctagaatgggaactggagaggaccctgagaggagacgggctgggcggcgacccccacagggctctcgagaacagattctcccctccagtatgggccctggctgtggcccccattcctcaggactgcacagaggaggactggctccggctccgtcgggctcacccttaaccactattcctggctctgcaaaccccagactttgcacacagccccaggctccacacagaaatgtgaacttggcctcagacaggctggcccttcctaggctctaggggctaggggggagtggggagccaagaggtcccatattcctgagtgcaggggtagtccctctcacctgcttcctcagacgactctggaagcttccctctaccaccgggcactgagacgaagctccctgacagccgagactggcagccctccatctggtccgtaccctcgccagaggcccccctacatcaacctcctggcgatgccctggtggagcagatgggtgctctgggagtcctgtgcttcctgatccaatggtgccaaacccttcatctcccccagaagcgcagcatacccctgggacccctcggccactgcccactcggggagccttctctgtttctggggcctcccccaccatagctctgattcccaccccacataggaatagcctgactgagggggaaggggtgggagagaagatacagacatggaggaggggaggctgctctggcaaagtcttcaaggcttttgggggtccaggcctggggtcaagaaggaaaatgtgtgtgagcatgtgtgtgagtgaggcgtgtgtgtgagcgtgtgtgtgagtgaggcgtgtgtgtgtgtctttcctaggacccaccataccctgtgtatgtatgcatgtttttgtaaaaaggaagaaaatggaaaaaaatctgaacaataaatgttttatttgctttaaaaaaaaaaaaaaaaaaa

SEQ ID NO: 25480 - DNA, 3556 bp, Homo Sapiens
agaaacattgcatctggaaagtccagaacaagttgttaatttcccagcaagcactggagcggatttggaaggaactatgcaatgtagtgggttctttgtgaaagaacagcaatgagcaaagccacaggaacctccgctggggtgcccagaacactggccctgggctagcgacttgcctcagccccatttcccggagaggctgccatgaagaggaagccggcggagtcttggtgctgagtctgagggcttcaggcaggacccaagactctcctctgaggtagcagcccccagagaaggttagctgttctctgatgaagcctggaatggtcccccctccgccgggagaagaaagccagacggtcatccttccacctggctggcagagctacctgtcgcctcagggccggcggtactatgtcaacacgaccaccaatgagaccacctgggaacgtcccagcagttctcctgggattccagccagccctggctctcacaggagctctctgcctccaacagtgaatggataccacgcatcagggaccccagcgcaccctccagagactgcccacatgagtgtccgaaaatccaccggtgattcccagaacctgggatcctcatcgccaagcaaaaagcagagcaaggaaaacaccatcacaataaactgtgtgacgttccctcacccagacacgatgccggaacagcagctgctgaaaccaaccgagtggagctactgcgactacttctgggctgataagaaggacccccaaggcaacggcaccgtggctgggtttgaactactgctccagaaacagctgaagggcaaacaaatgcagaaggaaatgtcagaattcatccgggaaaggataaagattgaagaagactatgcgaagaacttagctaagctctctcagaactccttggcttcacaggaggaaggctccttgggagaggcgtgggcccaggtgaagaagagcctggcggacgaagcagaagttcacctcaagttctctgccaagcttcacagcgaggtggagaagcccctgatgaacttccgtgagaacttcaagaaagacatgaagaagtgcgaccaccacattgccgaccttcgcaagcagctcgccagccgctatgcctcggtggagaaggcccggaaagccctcacagagcggcagagagacctggagatgaagacccagcagctggagatcaagctgagcaacaagacagaggaggacatcaagaaggcgcggagaaagtccacacaggctggagacgacctcatgcgctgtgtggatctctacaaccaggcccagtccaaatggtttgaagagatggtgaccaccacattggagctagagcggctggaggtggagagggtagagatgatccggcagcacctgtgccagtacacgcagctgcggcatgaaacagacatgttcaaccaaagcacagtcgagcccgtggatcagctgcttcgaaaagtggacccggccaaagacagggagctgtgggtcagagagcacaagacgggcaacatccgccctgtggacatggagatctagatgggcctgtgcagcttcggggggtcctgctggggaggggggctgggctcccaccatggggcccatgccgagtggatgccccccaccctctctcctgggccactgaggagaggggagagagctggtgattccagaagggtgacccggacagcctagctgggggctcccccatattcccaggcccagaagacagacccacagccctgcccttgtctctgaggctgaagaccccctgactcccatgctgtgcttgccgctctgaaacaaacagaggctggaactttgtggtccttgccgagttttgtaggggtcactgtcacatgcttgtgccctggaagccccaaggctcttcctccagctggctcccttgtctccagggctttggaggatcagggtagggagggctctgtctctaagccaggtgtcaggatcagaatcatgggtagaaggtgccattcagctcacagccgcacccagaatcctttgcagccctccttctttatttttttcccattgcattctgggagtccacatctggctttctcagccactgttcatcaccaggggttttaggaggaaggcttggctcctgtcttcccagacccaccatgcctggagaggtcaggatggaactacctcattcggcaaattagccccaaattgagcgctgaatcgtgtcccatgagatcaggcgccatctgtaaagtctcctctggaaatgccaatccatccttcccccagctgcttcctcggggaggcccctgcccccaccctgccagcccttcccagtctcattagaggaagctttccaaagttctcagttatcaagacctcatccagctcgtccaaaggcttcagggatggaaacaaaccagctcgtctcagaggccagcaagctggggcctgtccgccacggtgccctgtgcacctttgggctgccctggcccccactctcccgggccgcccaccacaggctcttaatggggccgggtcagtcctacatgtgagatgggttagggcaagtctttgccatcccccagatggctctgtcttcttgtgtatggcagggctgggactgctgtcccttgtacagttttctgtcactggtgggcactggacaggcatagcagactctcttgtggccacactaggttgtcgcctttcaggcagtgtcccgccacctttgcttcccgctccttctggacattccagagccctgcaccaaacccttacttggtgtctgcacctcctttccctctctccatcttccaatccctggaaaagtctggtctgagtgtgacttgggaagctttcagtgctgctgtttggcccagctcattactttctccctttctctaccacagcaaacacattctccaccatgtcagtctaaagagtctaaaggggccgggagaagcatgagcgaggggcagattctagtcgggagcccatgccctggaaatccatctttcttcatctttcccattgaccactttgggtttgacctgcacatctgcagtgagggcagaattcaacaagcacaactcactggtctttcagtcaacgtgctagaaaccgatgacttattaatctctaattttttggcgcctctttcattgaatgagaattgctttcgtatagttcacattagaaaaatgcctaatatactaaagtaaaccaaacgttgtcacttttctcttgttcttgaaacattgcaaccaaaaaggtcagcacaaaggccttcacctacgtgaagacctcctggtaggatctgtccatgggatggagaaccactctgtccagatctggggttgggtcatgacaccagctaccaattttagaatattatttcttggtttctttatgaaaaatgggtgctagtggtaattgctttgtggcttagtaaactactctgtggatgatttccaaacattcaaagccaatagccttgttattaacaagatattttgagtacaaaaaaaaaaaaaaaaaaa

SEQ ID NO: 25481 - DNA, 2008 bp, Homo Sapiens
ctgccactgcagtgctcgagccccgtgcaggggagcttgcgggaggatcgaccgacagacggacgcacgccgaggcactgcgcccccagccccgcgccggtgccaccgcagcccgaccccggccgccagtccagccgcccctcgcccggtgcctaggtgcccggccccacaccgccagctgctcggcgcccgggtccgccatgcgctccgccgctgtcctggctcttctgctctgcgccgggcaagtcactgcgctccctgtgaacagccctatgaataaaggggataccgaggtgatgaaatgcatcgttgaggtcatctccgacacactttccaagcccagccccatgcctgtcagccaggaatgttttgagacactccgaggagatgaacggatcctttccattctgagacatcagaatttactgaaggagctccaagacctcgctctccaaggcgccaaggagagggcacatcagcagaagaaacacagcggttttgaagatgaactctcagaggttcttgagaaccagagcagccaggccgagctgaaagaggcggtggaagagccatcatccaaggatgttatggagaaaagagaggattccaaggaggcagagaaaagtggtgaagccacagacggagccaggccccaggccctcccggagcccatgcaggagtccaaggctgaggggaacaatcaggcccctggggaggaagaggaggaggaggaggaggccaccaacacccaccctccagccagcctccccagccagaaatacccaggcccacaggccgagggggacagtgagggcctctctcagggtctggtggacagagagaagggcctgagtgcagagccagggtggcaggcaaagagagaagaggaggaggaggaggaggaggaggctgaggctggagaggaggctgtccccgaggaagaaggccccactgtagtgctgaacccccacccgagccttggctacaaggagatccggaaaggcgagagtcggtcggaggctctggctgtggatggagctgggaagcctggggctgaggaggctcaggaccccgaagggaagggagaacaggagcactcccagcagaaagaggaggaggaggagatggcagtggtcccgcaaggcctcttccggggtgggaagagcggagagctggagcaggaggaggagcggctctccaaggagtgggaggactccaaacgctggagcaagatggaccagctggccaaggagctgacggctgagaagcggctggaggggcaggaggaggaggaggacaaccgggacagttccatgaagctctccttccgggcccgggcctacggcttcaggggccctgggccgcagctgcgacgaggctggaggccatcctcccgggaggacagccttgaggcgggcctgcccctccaggtccgaggctaccccgaggagaagaaagaggaggagggcagcgcaaaccgcagaccagaggaccaggagctggagagcctgtcggccattgaggcagagctggagaaagtggcccaccagctgcaggcactacggcggggctgagacaccggctggcagggctggccccagggcaccctgtggccctggctctgctgtccccttggcaggtcctggccagatggcccggacgctgcttccggtagggaggcagcctccagcctgcccaagcccaggccaccctatcgccccctacgcgccttgtctcctactcctgactcctacctgccctggaacatcctttgcagggcagccccacaactttaaacattgacgattccttctctgaacacaggcagctttctagaagtttcccttcctccatcctatccactgggcacaactgcaataacttctgaccttttggtgaaagctgagaactcctgactgtaacatattctgtatgaactttatctaaagaaaaataaatctgttctgggctcaaaaaaaaaaaaaaaaaaaaaaaaaaaaaaaaaaaa

SEQ ID NO: 25482 - DNA, 2086 bp, Homo Sapiens
ggcggaggagaactgagcagagcagagcatcgagccaaaggggagatgagtttgtctgtcctctgctgaggctacggccgggcctagggaactgggagcttgggtggaagcgacacccgtggaagtgggaggaggtggcgccgggactttaaccccttgtgggctctgcggcaggggatttaaccctttgtggatctggcccctcggaggcagcgtcatcggtagttttaaccccttcggggctgggtttcacgcactggacttaccctcatcaccttgctcaccaactcctttattggggtgctccgcttggaggtttgaggcccacctccgcccattacgtactgttcctgccgctgcacccccttggacccgctagctggccgcactgtgggcgcttaaccctttactgacttgagctccccagattgcagttggagtttgctgatagaaggactagctaaaggcgtcactgcaggaattacaaactgagtaggactctgttggactgttttttttttcttttttttttttaagaaaaacccatttttttccttaaggacttactagccaaaatttcttaaacttcgaggactctactagccatggccgagccattcttgtcagaatatcaacaccagcctcaaactagcaactgtacaggtgctgctgctgtccaggaagagctgaaccctgagcgccccccaggcgcggaggagcgggtgcccgaggaggacagtaggtggcaatcgagagcgttcccccagttgggtggccgtccggggccggagggggaagggagcctggaatcccaaccacctcccttgcagacccaggcctgtccagaatctagctgcctgagagagggcgagaagggccagaatggggacgactcgtccgctggcggcgacttcccgccgccggcagaagtggagccgacgcccgaggccgagctgctcgcccagccttgtcatgactccgaggccagtaagttgggggctcctgccgcagggggcgaagaggagtggggacagcagcagagacagctggggaagaaaaaacataggagacgcccgtccaagaagaagcggcattggaaaccgtactacaagctgacctgggaagagaagaaaaagttcgacgagaaacagagccttcgagcttcaaggatccgagccgagatgttcgccaagggccagccggtcgcgccctataacaccacgcagttcctcatggatgatcacgaccaggaggagccggacctcaaaaccggcctgtactccaagcgggccgccgccaaatccgacgacaccagcgatgacgacttcatggaagaagggggtgaggaggatgggggcagcgatgggatgggaggggacggcagcgagtttctgcagcgggacttctcggagacgtacgagcggtaccacacggagagcctgcagaacatgagcaagcaggagctcatcaaggagtacctggaactggagaagtgcctctcgcgcatggaggacgagaacaaccggctgcggctggagagcaagcggctgggtggcgacgacgcgcgtgtgcgggagctggagctggagctggaccggctgcgcgccgagaacctccagctgctgaccgagaacgaactgcaccggcagcaggagcgagcgccgctttccaagtttggagactagactgaaacttttttgggggagggggcaaaggggactttttacagtgatggaatgtaacattatatacatgtgtatataagacagtggacctttttatgacacataatcagaagagaaatccccctggctttggttggtttcgtaaatttagctatatgtagcttgcgtgctttctcctgttcttttaattatgtgaaactgaagagttgcttttcttgttttcctttttagaagtttttttccttaatgtgaaagtaatttgaccaagttataatgcatttttgtttttaacaaatcccctccttaaacggagctataaggtggccaaatctgagaacaattaaattcattttagttataataaatttaatatttgtaaatgtaaaaaaaaaaaaaaaaaa

SEQ ID NO: 25483 - DNA, 1779 bp, Homo Sapiens
ctctggaggaacgctgagctgagcagcaccgaggacagcgcccggcagcgcccgcgcccaggtctccctccgcagccctgactcgcgcacacgctgagcttttgctcactccccttcgcgcggacacagacacacgcatattcacacacccagacacacaccccgctgtacaatggcagaatcccacctgcagtcatccctcatcacagcctcacagtttttcgagatctggctccatttcgacgctgacggaagtggttacctggaaggaaaggagctgcagaacttgatccaggagctccagcaggcgcgaaagaaggctggattggagttatcacctgaaatgaaaacttttgtggatcagtatgggcaaagagatgatggaaaaataggaattgtagagttggctcacgtattacccacagaagagaatttcctgctgctcttccgatgccagcagctgaagtcctgtgaggaattcatgaagacatggagaaaatatgatactgaccacagtggcttcatagaaactgaggagcttaagaactttctaaaggacctgctagaaaaagcaaacaagactgttgatgacacaaaattagccgagtatacagacctaatgctgaaactatttgattcaaataatgatgggaagctggaattaactgagatggccaggttactaccagtgcaggagaattttcttcttaaattccagggaatcaaaatgtgtgggaaagagttcaataaggcttttgagctgtatgatcaggacggcaatggatacatagatgaaaatgaactggatgctttactgaaggatctgtgcgagaagaataaacaggatctggatattaataatattacaacatacaagaagaacataatggctttgtcggatggagggaagctgtaccgaacggatcttgctcttattctctgtgctggggataactagagttggtggccgcaaccacttgctagtgatacactgtatctaaaaaataactgtgcactataagggagtaggctgtattttcttttatatctgtaaatttaactgcatatagataattatccaggatgtgtggctcattcttttcagcttgtttctatactgtttgtaatatacagtttttgtaaccatatgattgaaaagaagaaagtctatgcttaggccagtcagtacacccaattttaaaaaataacatattcttgctttcacaaatatagttgaacaagatttccctaaaaattccaccaggattaatctctaaaattctagtctctgatttgcaaatgcacatttgtcactgaataatggaattatgtataacaagccaaacattcttattttagacaaccatagaactgtcccacaaaatatttctaagcttatttctaactattaggaggaatgtgcttttccatctaaaatactcaccaaaatatagttaattgtggctttatgaagttaacagtctcattacagatttagtttaccaatcaacagcatgtctactgcttggatccatacaaaactatcggttcaagttgatgtgacaagggaagggagcaccagatgacacataaatctgtctgattctatgcctgtatttccaacaaacttactgtcagagaatatgacctaaatccattttctaaactgttttcatgtgttgcaaattattctagtcaactgctgttttatgtcatactctgtgtaatctctgattaaatttaatatactgcaaaaaaaaaaaaaaaaaaaaaaaaaaa

SEQ ID NO: 25484 - DNA, 1662 bp, Homo Sapiens
gtccacgatctctttcgccggctcggcgcgggggccaaattcgacacgagacgcttctcggcagacgcagctcgattccagataggaaaaaggaaatatgactttgattcttcggaggtgcttcagggactggacttttttggaaacaagaagtctgtcccaggtgtgtgtggagcatcacaaacacatcagaagccccaaaatggagagaaaaaagaagagagcctaactgaaaggaagagggagcagagcaagaaaaaaaggaagacgatgacttcagaaattgcttcccaagaagaaggtgctactatacagtggatgtcatctgtagaagcaaagattgaagacaaaaaagttcagagagaaagtaaactaacttccggaaagttggagaatctcagaaaagaaaagataaacttcttgcggaataaacacaaaattcacgtccaaggaaccgatcttcctgacccaattgctacatttcagcaacttgaccaggaatataaaatcaattctcgactacttcagaacattctagatgcaggtttccaaatgcctacgccaatccaaatgcaagccatcccagttatgctgcatggtcgggaacttctggcttctgctccaactggatctggaaaaacattagcttttagcattcctattttaatgcagctgaaacaacccgcaaataaaggcttcagagccctgattatatcaccaacacgagaacttgccagccagattcacagagagttaataaaaatttctgagggaacaggattcagaatacacatgatccacaaagcagcagtggcagccaagaaatttggacctaaatcatctaaaaagtttgatattcttgtgactactccaaatcgactaatctatttattaaagcaagatccccccggaatcgacctagcaagtgttgagtggcttgtagtagacgaatcagataaactgtttgaagatggcaaaactgggttcagagaccagctggcttccattttcctggcctgcacatcccacaaggtccgaagagctatgttcagtgcaacttttgcatatgatgttgaacagtggtgcaaactcaacctggacaatgtcatcagtgtgtccattggagcaaggaattctgcagtagaaactgtagaacaagagcttctctttgttggatctgagaccggaaaacttctggccgtgagagaacttgttaaaaagggtttcaatccacctgttcttgtttttgttcagtccattgaaagggctaaagaactttttcatgagctcatatatgaaggtattaatgtggatgttattcatgcagagagaacacaacaacagagagataacacagtccacagtttcagagcaggaaaaatctgggttctgatttgtacagccttgctagcaagagggattgattttaaaggtgtgaacttggtgatcaactatgactttccaactagctcagtggaatatatccacaggataggtcgaactggaagagcagggaataagggaaaagcaattacatttttcactgaggatgataagccattattaagaagcgttgctaatgttatacagcaggctgggtgtcctgtaccagaatacataaaaggttttcagaaactactaagcaaaaaaaaaaaaaaaaaa

SEQ ID NO: 25485 - DNA, 1818 bp, Homo Sapiens
gtcatggcggatggtcaggtggcggaactgctgctccggcggctggaggcgtctgatggcggcctggacagcgccgagttggcggctgagctgggcatggagcaccaggcggtggtgggcgccgtgaagagccttcaggcgctgggcgaggtcatcgaggctgaacttcggtccaccaagcactgggagcttactgcggagggcgaggagattgcccgggagggcagccatgaggcccgtgtgtttcgaagcattcccccagagggcctggcccagagcgagcttatgcgactgcccagtggcaaagtgggcttcagcaaggccatgtccaacaagtggattcgggtggacaagagtgcggctgacgggccccgggtgttccgagtggtggacagcatggaggatgaggtgcagcggcggctccagctggtccgggggggacaggctgagaagctgggggagaaggagaggagcgagctgaggaagaggaagctgttggctgaagtgactctgaagacctactgggtgagcaaaggcagtgcctttagtaccagcatctccaagcaagagacagagctgagcccagagatgatctccagtggctcttggcgggaccggcccttcaagccctacaacttcttggcccacggtgtcctccccgacagcggccaccttcacccgctgctcaaggtccgctcccagttccgacagatcttcctggagatggggttcaccgagatgccgactgataacttcattgagagctccttctggaactttgacgccctcttccagccccagcagcacccagcccgtgaccagcacgacaccttcttccttcgagatccagcggaggccctgcagctcccaatggactatgtccagcgggtcaagcggacccactctcagggcggctacggctcacaggggtacaagtataactggaagctggacgaggcccggaaaaacctactgcgaacccacaccacatcagccagcgcccgtgcgctctaccgccttgcccagaagaagcccttcactccggtcaagtacttctccatcgaccgcgtattccggaatgagaccctggacgccacgcacctggctgagttccaccagatcgagggcgtggtggcggatcatggtctcaccttgggccacctcatgggcgttctgcgggagttcttcaccaagctgggtatcacgcaactccgcttcaagccagcctacaacccatacacagagcccagcatggaggtgttcagctaccaccaaggcctgaagaagtgggtggaggtcggaaactcgggggtcttccgtccagagatgctgctgcccatggggcttcccgagaacgtgtcggtcattgcctggggcctctccctggagcgcccaacgatgatcaaatatggcatcaacaatatccgggagctggtgggccacaaggtgaacctgcagatggtgtatgacagtcccctgtgccgcctggatgccgagccgaggccccctcccacacaggaggctgcgtgacatgggccactctaggacaggtcatcctccccgagtccctgctgctgcgctcctttgcatccctggccagtgaccttgtatttatgaggcctctgtgaggccagcccccaccttcctctttcccacctgtcccaggaccagaatcccagggacagaggactgggtagcaggttccttctgttgtcctgtgtggtgtgtctactgtgagggtgggccctgaggagacctgtgggccacctattgtctaataaagtgggcagttgcccccaaaaaaaaaaaaaaaaaaaa

SEQ ID NO: 25486 - DNA, 1904 bp, Homo Sapiens
cagcgtgaagcgtgatctgctcttccaagccctgggccgcacctacactgacgaagaatttgatgaactatgttttgaatttggtctggagcttgatgaaattacatctgagaaggaaataataagtaaagaacaaggtaatgtaaaggcagcaggagcctctgatgttgttctttacaaaattgacgtccctgccaatagatatgatctcctgtgtctggaaggattggttcgaggacttcaggtcttcaaagaaaggataaaggctccagtgtataaacgggtaatgcctgatggaaaaatccagaaattgattatcacagaagagacagctaagatacgtccttttgcggtagcagcagttctccgtaatataaagtttactaaagatcgatatgacagcttcattgaacttcaggagaaattacatcagaatatttgcaggaaaagagcactggttgccattggtacccatgatttggacactttgtcgggcccatttacttatactgcaaagcgtccttcagatatcaaattcaagcctctaaataagaccaaggagtatacagcctgtgaactgatgaacatatacaagactgacaatcacctgaaacattatttacatatcattgaaaacaaacccctgtatccagttatctatgatagcaatggtgtcgtcctttcaatgcctcccatcatcaatggggatcattccagaataacagtaaatactagaaatatttttattgaatgcacgggaactgactttactaaggcaaaaatagttcttgatattattgtcaccatgttcagtgaatattgtgagaatcaatttacggtcgaagctgctgaagtggtttttcctaatggaaaatcacatacctttccagaattagcttaccgaaaggagatggtgagagctgacctaattaacaaaaaagttggaatcagagaaactccagaaaatcttgccaaacttctgaccaggatgtatttaaaatcagaagtcataggtgatgggaatcagattgagattgaaatccctccaaccagagctgacattatccatgcatgtgatattgtagaagatgcagctattgcttatggatataacaacattcagatgactctcccgaaaacttacaccatagctaatcaatttcctcttaataagctcactgaacttctccgacatgacatggcagccgctggcttcactgaagcacttacctttgccctgtgctcccaagaagatattgctgataaactaggtgtggatatctctgcaacaaaggcagtccacataagtaatcctaaaacagctgaatttcaggtggcacgcactacccttcttcctggcctcctgaagaccatagcagcaaatcgtaagatgccccttccactgaaactgtttgaaatctctgacattgtaataaaagattctaatacagatgtaggtgcaaaaaactacagacatctctgtgctgtttattacaacaagaatcctgggtttgagatcattcatgggctgctggacagaattatgcagttgctcgatgtgcctcctggtgaagacaaggggggatatgtgatcaaagcatcagaagggcctgctttcttccccgggcgatgtgcagagatctttgccaggggtcaaagcgtcgggaagcttggggtccttcatcctgacgttatcaccaaatttgagctgaccatgccctgctcctccctagaaatcaatattggaccctttttgtgaagattggtctctgtggtgtgattctcttcccaggtgtccctttctcctcccctagtgtccttaagtcctcctccacagggaacatctatttgggctttgatgtttaataaagtagaaagcactgtcaaaaaaaaaaaaaaaaaaa

SEQ ID NO: 25487 - DNA, 2516 bp, Homo Sapiens
agatggcggcggcctcgagcacccttctcttcttgccgccggggacttcagattgatccttcccgggaagagtagggactgctggtgccctgcgtcccgggatcccgagccaacttgtttcctccgttagtggtggggaagggcttatccttttgtggcggatctagcttctcctcgccttcaggatgaaagctcagggggaaaccgaggagtcagaaaagctgagtaagatgagttctctcctggaacggctccatgcaaaatttaaccaaaatagaccctggagtgaaaccattaagcttgtgcgtcaagtcatggagaagagggttgtgatgagttctggagggcatcaacatttggtcagctgtttggagacattgcagaaggctctcaaagtaacatctttaccagcaatgactgatcgtttggagtccatagcaagacagaatggactgggctctcatctcagtgccagtggcactgaatgttacatcacgtcagatatgttctatgtggaagtgcagttagatcctgcaggacagctttgtgatgtaaaagtggctcaccatggggagaatcctgtgagctgtccggagcttgtacagcagctaagggaaaaaaattttgatgaattttctaagcaccttaagggccttgttaatctgtataaccttccaggggacaacaaactgaagactaaaatgtacttggctctccaatccttagaacaagatctttctaaaatggcaattatgtactggaaagcaactaatgctggtcccttggataagattcttcatggaagtgttggctatctcacaccaaggagtgggggtcatttaatgaacctgaagtactatgtctctccttctgacctactggatgacaagactgcatctcccatcattttgcatgagaataatgtttctcgatctttgggcatgaatgcatcagtgacaattgaaggaacatctgctgtgtacaaactcccaattgcaccattaattatggggtcacatccagttgacaataaatggaccccttccttctcctcaatcaccagtgccaacagtgttgatcttcctgcctgtttcttcttgaaatttccccagccaatcccagtatctagagcatttgttcagaaactgcagaactgcacaggaattccattgtttgaaactcaaccaacttatgcacccctgtatgaactgatcactcagtttgagctatcaaaggaccctgaccccatacctttgaatcacaacatgagattttatgctgctcttcctggtcagcagcactgctatttcctcaacaaggatgctcctcttccagatggccgaagtctacagggaacccttgttagcaaaatcacctttcagcaccctggccgagttcctcttatcctaaatctgatcagacaccaagtggcctataacaccctcattggaagctgtgtcaaaagaactattctgaaagaagattctcctgggcttctccaatttgaagtgtgtcctctctcagagtctcgtttcagcgtatcttttcagcaccctgtgaatgactccctggtgtgtgtggtaatggatgtgcaggactcaacacatgtgagctgtaaactctacaaagggctgtcggatgcactgatctgcacagatgacttcattgccaaagttgttcaaagatgtatgtccatccctgtgacgatgagggctattcggaggaaagctgaaaccattcaagccgacaccccagcactgtccctcattgcagagacagttgaagacatggtgaaaaagaacctgcccccggctagcagcccagggtatggcatgaccacaggcaacaacccaatgagtggtaccactacaccaaccaacacctttccggggggtcccattaccaccttgtttaatatgagcatgagcatcaaagatcggcatgagtcggtgggccatggggaggacttcagcaaggtgtctcagaacccaattcttaccagtttgttgcaaatcacagggaacggggggtctaccattggctcgagtccgacccctcctcatcacacgccgccacctgtctcttcgatggccggcaacaccaagaaccacccgatgctcatgaaccttcttaaaaataatcctgcccaggatttctcaaccctttatggaagcagccctttagaaaggcagaactcctcttccggctcaccccgcatggaaatatgctcggggagcaacaagaccaagaaaaagaagtcatcaagattaccacctgagaaaccaaagcaccagactgaagatgactttcagagggagctattttcaatggatgttgactcacagaaccctatctttgatgtcaacatgacagctgacacactggatacgccacacatcactccagctccaagccagtgtagcactcccccaacaacttacccacaaccattttacctcaccccccaaaaaaaaaaaaaaaaaaaaaaaaaaaaaaaaaaaaaaaaaaaaaaaaaa

SEQ ID NO: 25488 - DNA, 2352 bp, Homo Sapiens
gcctccagtcagaaggaccatgaagagagagaagagggcagagccgtgcatggggctgctccccaggacctgagcaggaacctggagttttcagagctgcctgatcattgctacagaatgaactctagcccagctgggaccccaagtccacagccctccagggccaatgggaacatcaacctggggccttcagccaacccaaatgcccagcccacggacttcgacttcctcaaagtcatcggcaaagggaactacgggaaggtcctactggccaagcgcaagtctgatggggcgttctatgcagtgaaggtactacagaaaaagtccatcttaaagaagaaagagcagagccacatcatggcagagcgcagtgtgcttctgaagaacgtgcggcaccccttcctcgtgggcctgcgctactccttccagacacctgagaagctctacttcgtgctcgactatgtcaacgggggagagctcttcttccacctgcagcgggagcgccggttcctggagccccgggccaggttctacgctgctgaggtggccagcgccattggctacctgcactccctcaacatcatttacagggatctgaaaccagagaacattctcttggactgccagggacacgtggtgctgacggattttggcctctgcaaggaaggtgtagagcctgaagacaccacatccacattctgtggtacccctgagtacttggcacctgaagtgcttcggaaagagccttatgatcgagcagtggactggtggtgcttgggggcagtcctctacgagatgctccatggcctgccgcccttctacagccaagatgtatcccagatgtatgagaacattctgcaccagccgctacagatccccggaggccggacagtggccgcctgtgacctcctgcaaagccttctccacaaggaccagaggcagcggctgggctccaaagcagactttgtagcttgagattaagaaccatgtattcttcagccccataaactgggatgacctgtaccacaagaggctaactccacccttcaacccaaatgtgacaggacctgctgacttgaagcattttgacccagagttcacccaggaagctgtgtccaagtccattggctgtacccctgacactgtggccagcagctctggggcctcaagtgcattcctgggattttcttatgcgccagaggatgatgacatcttggattgctagaagagaaggacctgtgaaactactgaggccagctggtattagtaaggaattaccttcagctgctaggaagagcgactcaaactaacaatggcttcaacgagaagcaggtttattttttccagcacataaaagaaaaataatgtttcggagtccaggactggcaggacaggtcatcagatactcagaggctgtatctctgccctgccaaccttgacaaatggcttccaatgttaggtttgctacaagatggttactggagctctagctgcctattttgtgtttagggaagggaaaatggaggaaaggggagaagagcaaagggcgcttttaaagagctttcccaaaagctccacccaatgacttctgcttccatctcactaaccacccacccctacctggaatggaggctgggagatgtggcttatttgctgggtacgtgactatccctaataacaaaggggttctgacactaagacattaggggagaatgttgggtaggcagccagcactcttttaccagagggcctcctggtgtttggattttgatctcaataataaataaataaatacgaaaagtggtttgtttttttacaaatgtgtggttcatactcctgggtggccttattagcttttttggttgggagacaagggaaggaactttcttggatcagtgtgtgctggtgattttattgccttttcctcttaattcaatcccactctttcccttcctcaagtcttgttcacccagcctcctgccccaggaatcacggggaagaagtctgggagaccacagaaaaaacaccaatgacactgagctattagagatcaaaactgggtcaggaagagttcatgttaagctttcacatgtgctaagaacgctgaaagatacacactgatttccatcttaatagtgccggataattgacaaatttgggacaagatgagggagaggtcaaaatccccctaacttcccaaagcaaaaaaacaggagtataatgatcagaaacgtaatagtagtgtcagaagcacacaatcagctgtggacggtgaaacatataatggttctatctgttctgagattgtaaaagcacaattattttcatcaggataaaaaaaaaaaaaaaaaa

SEQ ID NO: 25489 - DNA, 1484 bp, Homo Sapiens
gccccggcgccccgaagcgggaaaaaggctgggtgccgccgtcccccagctgcgcaaccctaggaactctcgggaacttggctgtgttgtcctgcctcagagacaaattcatctattgtaggcctagcccctgcctttgaaaacaaggaaaggttggtagaacatcaacacagcatggaatttccagggaggtctcatttcaaaacttcataaagaacaagaaccacctggacttctgtgagggcgatgattaaactggcctgagtttgaatgaaaggataatgtatgctcaacctgtgactaacaccaaggaggtcaagtggcagaaggtcttgtatgagcgacagccctttcctgataactatgtggaccggcgattcctggaagagctccggaaaaacatccatgctcggaaataccaatattgggctgtggtatttgagtccagtgtggtgatccagcagctgtgcagtgtttgtgtttttgtggttatctggtggtatatggatgagggtcttctggccccccattggcttttagggactggtctggcttcttcactgattgggtatgttttgtttgatctcattgatggaggtgaagggcggaagaagagtgggcagacccggtgggctgacctgaagagtgccctagtcttcattactttcacttatgggttttcaccagtgctgaagacccttacagagtctgtcagcactgacaccatctatgccatgtcagtcttcatgctgttaggccatctcatcttttttgactatggtgccaatgctgccattgtatccagcacactatccttgaacatggccatctttgcttctgtatgcttggcatcacgtcttccccggtccctgcatgccttcatcatggtgacatttgccattcagatttttgccctgtggcccatgttgcagaagaaactaaaggcatgtactccccggagctatgtgggggtcacactgctttttgcattttcagccgtgggaggcctactgtccattagtgctgtgggagccgtactctttgcccttctgctgatgtctatctcatgtctgtgtccattctacctcattcgcttgcagctttttaaagaaaacattcatgggccttgggatgaagctgaaatcaaggaagacttgtccaggttcctcagttaaattaggacatccattacattattaaagcaagctgatagattagcctcctaactagtatagaacttaaagacagagttccattctggaagcagcatgtcattgtggtaagagaatagagatcaaaaccaaaaaaaatgaaccaaaggcttgggtggtgagggtgcttatcctttctgttattttgtagatgaaaaaactttctggggacctcttgaattacatgctgtaacatatgaagtgatgtggtttctattaaaaaaataacacatccaaaaaaaaaaaaaaaaaaaaaaaaaaaaaaaaaaaaaa

SEQ ID NO: 25490 - DNA, 2846 bp, Homo Sapiens
agatggcggtgcaggtggtgcaggcggtgcaggcggttcatctcgagtctgacgctttcctcgtttgtctcaaccacgctctgagcacagagaaggaggaagtaatggggctgtgcataggggagttgaacgatgatacaaggagtgactccaaatttgcatatactggaactgaaatgcgcacagttgctgaaaaggttgatgccgtcagaattgttcacattcattctgtcatcatcttacgacgttctgataagaggaaggaccgagtagaaatttctccagagcagctgtctgcagcttcaacagaggcagagaggttggctgaactgacaggccgccccatgagagttgtgggctggtatcattcccatcctcatataactgtttggccttcacatgttgatgttcgcacacaagccatgtaccagatgatggatcaaggctttgtaggacttattttttcctgtttcatagaagataagaacacaaagactggccgggtactctacacttgcttccaatccatacaggcccaaaagagttcagagtcccttcatggtccacgagacttctggagctccagccagcacatctccattgagggccagaaggaagaggaaaggtatgagagaatcgaaatcccaatccatattgtacctcatgtcactatcgggaaagtgtgccttgaatcagcagtagagctgcccaagatcctgtgccaggaggagcaggatgcgtataggaggatccacagccttacacatctggactcagtaaccaagatccataatggctcagtgtttaccaagaatctgtgcagtcagatgtcggcagtcagcgggcctctcctacagtggttggaggacagactggagcaaaaccaacagcatttgcaggaattacaacaagaaaaggaagagcttatgcaagaactttcttctctagaataaatcaggagacaaaatggggaaagatgaaaatatccagtgtaaagttacttaagctaaatcaatttcaaagaagaaaaacttggaggactcattttacctgacttcaagacttactataaagctatagtaatcaagatagatggtattggcagaggaacagacacatacgtcaatggaacagatgagagaacccagaaataaacccatataaatatgctcagctgattttgaaaaagtgaaaaagcaattcaatggaggaagaatagcctttctgacaaattatgctagagcaattagacacccatggcgaggagaaaaaagaacctctacttaaacctcacatcttatataaaatttaactcaaaatgtataacggacttaaatgtgatacataaaactagataactttgaaaaaagccacaggagaaaaatcttcaggatcttgggctaggtggcaagttcttggactttgccccgaaagcacatccataaaagacaaaatctgatatattggacttcttcaaaatttaaaaacttgtgatttaagaagaggaaaagataagctacagattgagatgaatttgcaaaccatatatctgatcaatttggaatatataaagtgtactaaaaactcaactgaagtcaggcatggtagctcatgcttgtaatctcaccactttgggaggccaagatgggaggagtgcttgaggttaggcgttccagaccagcctgggcaacatagtgagactcttgtctctacaaaaagtttttttaaaaaattaactgggcaccatgacacacaccagtagtcccagctactagggaggcaggaggatcacttgagcccaggagtttgaggctgcggtgagctgtgatcacaccaccacactccaacctgtgtaacagagtgaggcctcatctcaaaaaaaaaaaaaggccacaaaactcaacaataaaaacaaacagtccaattagaaaatgggcaaaagacatgaatagatgtttcactgaagaggatctatagatggcaagtaagcatatgaaaagctgttaaactccataagtcatcagggaatgcaaattgaaaccacagcgaggctatgacttacttatctcaatggctaaagaaaaaatagtgaaaataccaaatactgatgaggatacaaactggatattttatacattgctgacaggaatgtaaaatggtacagccactctgggaaagagtttatgaatttcttatcaagttaaacataattttttaatcaagttaaacataagacccagcagttgtgctcctggacattcattccagagaaatgaaaacctatattgtacttgtactcaaatattcataggagctttatttgtaatagccccaaactggaaacaacccagatgtcctacaacaggtacatggttaaacaaaccatccataacttggaatactgctctggaatgaaaaggaactaactgttgatacaagaacttggttgtacctcaggggtattatggtgaacaaaaaaaaaaccagtctcaaatggtcacatactgtatgatcgcatttatataacattcttgaggtgacaaaattattgaaatgaagaacagattaatggttgccagggatagggactggagggggtgtggggtatgtatgactataaagggatgacgcaaggagttcctttgtgctgatggaacagttctatatgattatgatgattacgatgttgattataacatttgattatgaggttaagcacatgaatctttacctgtgctgaagttgtatggacctacatacacacaaatgaatgcatgtaaaatctggtgatactgaataaagtctgtagtctagatagcagtaaaaaaaaaaaaaaaaaaaaaaaa

SEQ ID NO: 25491 - DNA, 2918 bp, Homo Sapiens
cgaggttagggcccgcgttgcgacgtggtgcagcgcatattttcacaagtgggtctcccttgtccgggactatggccaccgactcgtgggccctggcggtggacgagcaggaagcggctgtcaagtcgatgaccaatttgcagatcaaggaagagaaagtcaaagcagataccaatggtattatcaaaaccagtaccactgccgagaaaacagatgaagaggagaaagaggacagagctgcccagtccttactcaacaagctgatcagaagcaaccttgttgataacacaaaccaagtggaagtcctgcaacgggatccaaactcccctctgtactcggtgaagtcgtttgaagagcttcggctgaaaccacagcttctccagggagtctatgccatgggcttcaatcgaccctccaagatacaagagaacgcattacccatgatgcttgctgaacccccacagaatctgattgcccagtctcagtctggcactggtaaaacagctgcctttgtcttagccatgctcagccgagtggagccatcagacagatacccccagtgtctgtgcctctccccaacatatgagctggcgcttcaaacaggaaaagtgattgagcagatgggcaaattttacccagaactgaagcttgcctatgccgttcgaggcaataaattggaaagaggccagaagatcagtgagcagattgtcattggcacccctgggaccgtgctggactggtgctccaagctcaagttcattgatcccaagaaaatcaaggtgtttgttctggatgaggctgatgtcatgatagccactcagggccaccaagatcagagcatccgcatccagaggatgctgcccaggaactgccagatgctgcttttctccgccacctttgaagactctgtgtggaagtttgcccagaaagtggtcccagacccaaatgttatcaaactgaagcgtgaggaagagaccctggataccatcaagcagtactatgtcctgtgcagcagcagagacgagaagttccaggccttgtgtaacctctacggggccatcaccattgctcaagccatgatcttctgccatactcgcaaaacagctagttggctggcagcagagctctcaaaagaaggccaccaggtggctctgctgagtggggagatgatggtggagcagagggctgcggtgattgagcgcttccgagagggcaaagagaaggttttggtgaccaccaacgtgtgtgcccgcggcattgatgttgaacaagtgtctgtcgtcatcaactttgatcttcccgtggacaaggacgggaatcctgacaatgagacctacctgcaccggatcgggcgcacgggccgctttggcaagaggggcctggcagtgaacatggtggacagcaagcacagcatgaacatcctgaacagaatccaggagcattttaataagaagatagaaagattggacacagatgatttggacgagattgagaaaatagccaactgagaagctccaccagccactgatgccagccctggcactgcccctgcacaggagacaagtgcatttagggcacaggccccgacatcaccccaaggacaacggcagaagtagagagaaactacctacctcacttcaaattatgtttggacttgacaaaaataggtgcaaatgatggggggcaatagaagaaaaaatttgcattttggaaaattgggtcctttccccacttttttaaagccacattcccccatctttataataatctggtcacagtggtagtcgctggccccaggaccccctcctgattttggctaggcatcgtggaaccagctccagcccctgaagaaacgatagatgtgcaggttgtgcggaagaggctgagtggaaaatggtgtgagccccaccgctgtgcatcgaatgagggaagtggcagcagagaggccagagctgccccctctctgtctcttcaatggacccttcacaagtgtttctcctgcccttggggctgtcttccttctcctgaaatccagagactttcttgctcatcccttctccctttcacttctgttctctgctgcagaaagcagacttgcatatccctgatgagcagctcggctacttttgtaaacttcagatttggagagaaacacgaaagtctgaatcctgaccccttgagagagagtgatctggcgagggccgatgaaggggctgggcctggtcttgccttctcttctctcggttgctccctctgcctaggcccctggtactcagtcacggcagccaggagaccccaggtgagtttctgagcgcatacgtagttggttcttacccccaggtgtcacacggggccgagagctgagcaagaatttggaatggaagttatgaccaagggaattatgctgttcatttataatagtggacattatggagagctctgattcctacataatatgaataaggatggataggccgggcgtggtggctcatgcctataatcccagcacgttgggaggctgaggcgggcggatcggttgagctcaggcgttcgggaccagcctggccaacatgatgaaaccccgtctctaccaaaaatagaaaaaaatatagccgggcctggtggcgcacgcctgtagtcccagctactcgggaggctgaggtaggaggatcgcttgagcctgggtagaggctgctgtgagctgaaatggcgccactgcactccagcctgggtaacagagcgagaccccgactcaataaataaataaggatggataaattgtagcgtatgcaccattcattatgctaagacattttaaagtaattatgagaaacgctctactaatgatttgtttttatttgtatttttctgcttattagacaaatatatactcattttaaaaaaaaaaaaaaaaaaaa

SEQ ID NO: 25492 - DNA, 2070 bp, Homo Sapiens
gttcgatgctggtttagggtttcaggcgtggaggttccaaaatccgaggtttgatttcagcctgcccttgccagtgcctgggccgctgggagccgttattggctgccgttaaggaccgttacgtttcccgggtccttctggcactcctctggtggaccgcccccatcggccacacttgccctgctctccagtgattctgtagctcctggctccgtagtctcgcggacagctctctttcctggaagatgtttctggtgggcctgacagggggcattgcctcaggcaagagctcagtgatccaggtgttccagcagctgggctgtgcggtgattgacgtggacgtgatggcccggcacgtcgtgcagccaggataccctgcccaccggcgcatcgtagaggtcttcggcactgaggtcttgctggagaatggcgacataaatcgcaaggtcctgggggacctgatctttaaccagcctgaccggcggcagctgctcatcgccatcacccaccccgagattcgcaaggagatgatgaaggagacgttcaagtacttcctccggggataccgctacgtgattctggatatccccctgctgtttgagaccaagaagttgctcaagtacatgaagcacaccgtggtagtatactgcgaccgggacacacagctggcacggctgatgcggcggaacagcctgaaccgcaaggacgcagaggcccgcatcaatgcccagctgcccctgacagacaaggcccgcatggcccgccatgtcctagacaactcgggcgagtggagtgtcaccaaacgccaggtcatcctcttgcacactgagctggagcgctccctggagtacctgccgctgaggtttggggtcctcacagggctcgctgccattgccagcctcctctacctgctcacccactaccttctgccttacgcctagtggggcactcaaggcagggagccccaggcctccatctatctccttggaggctgaagccaggtaacacatcctgtttcctctcagccccctccacacacacacacacacacacacacacacacacacacacacacacggactctccgaatcagggctgggcctctgtgccaggccatcccgtctttggagtgtatcctatttgaggtcaagaaatagcctgctgtccttcccaccttccctgagcagcacctacagaacagcaaccgtgatggtgtgtgaaagcaacagtcagagactgctatacatttctgtgggtgggggtagggaatactggctctgtggccctcctcagagctgggaggccaagggttcactgggcttgaatcctctctaagcacctaccccattatggcctaaacctcctcagtggaccacgggaaatcatgttggaccaagggtttccatgttcaaacagtcaacaaggccctcccctaggttgagatatttttgatactgaaggcccaggccccccagtatggcttgctgccagcaagcagcaaggattctctcgtgggtaacgctgtagccaggcaggaccagcctcttctgggagacccctctccccacgtagggtttgtgtagtgctcccacatcctgcttattgcctgccacccctgcttctcgcctggacctcttggtattccgtgtacaccatccttgctgtttcttgcctctgtgccttcaacctgctgctcctggcctgggataccttttattttcttttatttcttcttccttttttttttttttttttttttttaacctacaactagctctcagttcaggcactgtctaaagccccaggctgggttaggtggtctaggataccaactccccctcaacattttaccttaatccaacagtacagtaattagccgaaacttgcctggtttttcctactagactgtaagccctctagggacagggacagtgtcttattcatctctgtgttcttagtgcagagcctggcccgctgttggtgtttaataaagtgtgttgatctgaaatgccccagaccaaaaaaaaaaaaaaaaaaaaaaaaaaaaaaaaaaaaaaaaaaaaaaaaaaa

SEQ ID NO: 25493 - DNA, 2026 bp, Homo Sapiens
cagtagtgctagcggcttcgcggttcggtcctcgcacccggcagccgccactggtgctgagctgctaggaagcccctatcgccgagctcgttggagcttgaacccattgtcacccctccgactcaccggcccaaaaaaaaaaaaaaatggttgaagcagatcgcccaggaaagctcttcattggtgggcttaatacggaaacaaatgagaaagctcttgaagcagtatttggcaaatatggacgaatagtggaagtactcttgatgaaagaccgtgaaaccaacaaatcaagaggatttgcttttgtcacctttgaaagcccagcagacgctaaggatgcagccagagacatgaatggaaagtcattagatggaaaagccatcaaggtggaacaagccaccaaaccatcatttgaaagtggtagacgtggaccgcctccacctccaagaagtagaggccctccaagaggtcttagaggtggaagaggaggaagtggaggaaccaggggacctccctcacggggaggacacatggatgacggtggatattccatgaattttaacatgagttcttccaggggaccactcccagtaaaaagaggaccaccaccaagaagtgggggtcctcctcctaagagatctgcaccttcaggaccagttcgcagtagcagtggaatgggaggaagagctcctgtatcacgtggaagagatagttatggaggtccacctcgaagggaaccgctgccctctcgtagagatgtttatttgtccccaagagatgatgggtattctactaaagacagctattcaagcagagattacccaagttctcgtgatactagagattatgcaccaccaccacgagattatacttaccgtgattatggtcattccagttcacgtgatgactatccatcaagaggatatagcgatagagatggatatggtcgtgatcgtgactattcagatcatccaagtggaggttcctacagagattcatatgagagttatggtaactcacgtagtgctccacctacacgagggcccccgccatcttatggtggaagcagtcgctatgatgattacagcagctcacgtgacggatatggtggaagtcgagacagttactcaagcagccgaagtgatctctactcaagtggtcgtgatcgggttggcagacaagaaagagggcttcccccttctatggaaagggggtaccctcctccacgtgattcctacagcagttcaagccgcggagcaccaagaggtggtggccgtggaggaagccgatctgatagagggggaggcagaagcagatactagaaacaaacaaaactttggaccaaaatcccagttcaaagaaacaaaaagtggaaactattctatcataactacccaaggactactaaaaggaaaaattgtgttactttttttaaattccctgttaagttcccctccataatttttatgttcttgtgaggaaaaaagtaaaacatgtttaattttatttgactttcgcattgcttttcaacaagcaaatgttaaatgtgttaagacttgtactagtgttgtaactttccaagtaaaagtatcccctaaaggccacttcctatctgatttttcccagcaaatgaggcaggcaattctaagatcttccacaaaacatctagccatctaaaatggagagatgaatcattctacctatacaaacaagctagctattagagggtggttggggtatgctactcataagatttcagggtgtcttccaactgaaatctcaatgttctcagtacgaaaaacctgaaatcacatgcctatgtaaggaaagtgctattcacccagtaaacccaaaaaagcaaatggataatgctggccattttgcctttctgacatttccttgggaatctgcaagaacctcccctttcccttcccccaataagaccatttaagtgtgtgttaaacaactacagaatactaaataaaaagtttggccaaaaccaaaaaaaaaaaaaaaaaaaaaaaaa

SEQ ID NO: 25494 - DNA, 3916 bp, Homo Sapiens
cagtttttcactcaagaggaggggccgggcatcgatggcatgaccacctcagagagggtggtggatcttctgaaccaggcggcgctgatcaccaatgactcaaagatcacagtgctcaaacaggtccaggagctgatcatcaacaaagaccccacactactggacaacttcctggatgagatcatcgcattccaagcagacaagtcaatcgaagtgcgaaaatttgtcatcggcttcatcgaggaggcatgcaagcgagacatcgagttgctgctgaaactcattgcaaacctcaacatgctcttgagggacgagaatgtgaacgtggtgaagaaggctatcctcaccatgacccagctctacaaggtggccctgcagtggatggtaaagtcacgggtcattagcgagctacaggaggcctgctgggacatggtatctgccatggcgggggacatcatcctgctattggactctgacaatgacggcatccgcacccacgccatcaagtttgtggagggcctcattgtcaccctgtcaccccgcatggctgactcagagataccccgacgccaggagcatgatatcagcctggaccgcatccctcgtgaccacccctacatccagtacaacgtgctatgggaagagggcaaggcagccttggagcagctgcttaagttcatggtgcaccctgccatctcctccatcaacctgaccacagcgctgggctcccttgccaatatcgcccgccagagacccatgttcatgtctgaggtgatccaggcctatgaaactctgcatgccaacctgcccccgacgctggccaaatcgcaggtgagcagtgtgcgtaagaatctgaagctgcacctgttgagtgtgctgaagcacccggcttccttggagttccaggcccagatcaccaccctgctggtggacctgggcacacctcaggccgagatcgcccgcaacatgccgagcagcaaggacacccgcaagcggccccgcgatgactcggactccacactcaagaagatgaagctggagcccaacctgggggaggacgatgaggacaaagacttggagccaggcccatcggggacctcgaaggcctcagcgcagatctccggccagtcagacacggacatcacagctgagttcctgcagcctctgctgacgcctgataatgtggctaatctggtcctcatcagcatggtgtacctacccgaggccatgccagcctccttccaggccatctacacccccgtggagtcagcaggcacggaagcccagatcaagcacctggctcggctcatggccacacagatgacagctgccggactgggaccaggtgtagagcagaccaaacagtgcaaggaggagcccaaggaggagaaggtggtgaagacagagagcgtcctgatcaagcggcgcctgtcagcccagggccaagccatctcggtggtgggttccctgagctccatgtcccccctggaggaagaggcaccgcaggccaagaggaggccagagcccattatccctgtcactcagccccggctggcaggcgctggtgggcgcaagaaaattttccgtctcagcgacgtgctgaagccccttaccgatgcccaggtggaagccatgaagctgggcgctgtgaagcggatcctgcgggctgagaaggctgtggcctgcagcggggcagcccaggtccgcataaagatcctggccagcctggtgacacagttcaactcgggcctgaaggcggaggtcctgtccttcatcctggaggatgtgcgggcccgcctggacctggccttcgcctggctctaccaggagtacaacgcctacctggccgcaggtgcctcgggctccctggacaagtatgaggactgcctcatccgcctgttgtctggcctgcaggagaaaccagaccagaaggatgggatcttcaccaaggttgtgctggaggcgccactcatcacagagagtgccctggaggtggtccgcaagtactgcgaggatgagagtcgcacctatctgggcatgtccacacttcgagacctgatcttcaagcgcccgtcccgccagttccagtacctgcatgtcctcctcgacctcagctcccatgagaaggacaaggtgcgctcccaggccctgctgttcatcaaacgcatgtatgagaaggagcagctgcgggagtatgtggagaaatttgccctcaactacctgcagctcctggtgcaccccaacccaccgtctgtgctgtttggagctgacaaggacacagaggtggcagcaccctggacggaggagacagtgaagcagtgtctgtacctctacctggccctcctgcctcagaaccacaagctgatccacgaactggcggccgtgtacactgaagccatcgccgacatcaagcggacggtgctgagggtcattgagcagccgatccgaggaatgggcatgaactccccggagctgctcctgctggtggaaaattgtcccaagggagcagagacactggtcacgagatgtctgcacagcctcacagacaaagtcccaccctccccagagctggtgaagcgggtccgggatctctaccacaagcgactgccagacgtccgcttcctcatcccggtgctcaatgggctggagaagaaagaggtgatccaggccctgcctaaactcatcaaactcaaccccatcgtggtgaaggaagtcttcaaccgcctgctgggcacccagcatggtgagggaaactcagccttgtccccgctgaaccctggagagctcctgatcgcattacacaacattgactccgtgaagtgcgacatgaaatccatcatcaaagccaccaacctgtgctttgcggagcggaacgtgtacacgtcagaggtgctggccgtggtgatgcagcagctgatggagcagagccccctgcccatgctgctcatgaggaccgtcatccagtccctgaccatgtacccccgcctggggggcttcgtcatgaacatcctgtcccgcctcatcatgaagcaggtgtggaagtaccccaaggtgtgggagggcttcatcaagtgctgccagcgcacaaagccccagagcttccaggtcatcctgcagctgccgccccagcagctgggagccgtctttgacaagtgcccagagctccgggagcccctgctggcccatgtccgctccttcaccccccaccagcaagctcacatccctaactccatcatgaccatcttggaggccagcggcaagcaggagccagaggccaaggaggcgcctgcggggcccttggaggaggatgatctggagcccctgaccttggccccggccccagcaccccggccccctcaggacctcatcggcctgcgactggcccaggagaaggccttaaagcggcagctggaggaggaacagaagctgaagccgggaggagtgggagccccctcctcttcctccccctctccctctccgtcggcccggccaggcccgcccccgtctgaggaagccatggatttccgggaggaggggcctgagtgcgagaccccgggcatcttcatcagcatggatgacgactcggggctgaccgaggccgcgctgttggactctagtctcgagggccccctacccaaggagacggcagcgggcgggctgaccttgaaggaggagcggagcccccagaccctcgcacctgttggagaagatgctatgaagactcccagcccggctgccgaggacgccagggaacccgaggccaaggggaacagctgacggggctcgagggggaaagggggtgggacagggactcggggctgggggacggggcggggcttgacctgcgggtgctttgccttaaaaagaaataaaagatgtgaacttggaaaaaaaaaaaaaaaaaaaaaaaaaaaaa

SEQ ID NO: 25495 - DNA, 877 bp, Homo Sapiens
cgcagtggtcgcttcttctccttggatttgttaaggattccaagtaactcttatttggagagaagacgatctgcacttcgcattttggcattgacatttaattttagggtcctttatatagaagggagagtaggtaaactgatttttttttttaacagggagggtttgacaatctttggcagacttggagcaaaagattgaggtgcatttcatgcctccttttgagagtcttgctctgtcgcccaggctgtagtgcagtggcgcaatcttggctgcaacctcagcctcccaagtagctgggattacaaacataagccaccacgcccagccctcatacctcttttaaaagtcgacctgttttgcagaaagtctgctgtttttgtactaaaggctttggaatttggcatttagctaggaatgcacattctttcacctcattcatactttaagaaccacagaagtgactctgcttggccagaaggcacactgtgttggtggttatattaaaagtccttgagtattttgtttttcatgatcttgctcactgcaacttccgcctcccaggttcaggcgattctcctgcctcagcctcccaagtagctgcgactacaggcgtgtagcaccacacctggctaatttttgtatttttagtagagatgaggtttcaccatattggccaggctgttctcaactcctgacctcgtgatccgcccacctcagcctcctaaagtgctgggattacagctgtgagccaccctgcccggccacttttgtatgatttctaatgtatttgtaatttacctaacaaattgcctaatctgctatgttaatgtatttatgaattaaaataaatacgactgcaaaaaaaaaaaaaaaa

SEQ ID NO: 25496 - DNA, 974 bp, Homo Sapiens
atggttcccagcctaggtttcagacttttgcttaaggccagttttagaaacccgtgaattcagaaaagttaattcagaaatttgataaacagaattgttatttaaaaactaactggaaagattgttaagttctttctgaattattcagaaattatgcatcattttccttcaagaatgacagggtcagcatgtggaattccaagatacctcttgacttcctctcaagctccgtgtttggtcagtggaggcccatccgagctcagcactgagaagtgttagtttctttgggacccatctaccctgaccacatcatgatgttcatctgcagctgttgcaaggtgttcagattgtataaacataaatgtcacaaaaactttaaaagaagtgcaattctcaaaaggttaggtggactaaagcattctgtaaagcaactgctaataatgagcttacagtggatttgaatttgaaaaatatagtaacaagcctgtcaaatatctgcaagaactatggaataaaactactgatgcagtgaagacagttgaaaagatcaaacaaatgccaagctatatttataatgaacaaattcaagaaaaaggactacggaaagttcaggacatcaaagaagtcaggcaaaactcatcttgacccctgttgcaggcaaaggaacgcagctggaagaaaagatgatataacagttaacaggatgcagacatggcagaggtttcctaaaaatctcattatctataaccatttctatatttacatttgaaaatctcctttggagacttagaacctctaaattattgacttattttttatataaggtcactccgatgaaaggtgattacaaaatcatctacattgctgtctacaaaacatcagataatatggatgtttgatcgcatctcattgttaactctttactgatatgtttgtaaatacagaagtgaaatgtggaaaaaaaaaaaaaaaaa

SEQ ID NO: 25497 - DNA, 1181 bp, Homo Sapiens
gattaaacaccgaattcagccactggacttttaaaagtacttaagatggtttatctcgggttttttcttcagttaacaaaatcataaatatggtgccttataacatgaaaggaaaattagttgtgtatttcacgacgaaagcgacggaccaaaagaaatttcctgccccaagaagcatgggatccaggaaggggcgcgtagatgcttaacggtctcttcggaaatcctgcaaatagaaagataattctagatccggaatacctgtatctggtggaaaccatggatttctacaagctcgaattattcctcattgtatagcctgctttgtaaactagtttacaatttgcaggctgatcttaagatttttttatatctaattgctgctgccttcattttaggttcagcagttacttttaactaccttaatttattgccagaaggtatgagcctaacattctgatgagtccagaaaactacgttttgtcagtagcaatacactaggaagtaaaatatatttagaatttaaacattgtgtgccagtggtcctcgcgcttgactgcacatcagttacttgaagagccacacctcagatcaatgcagtcagaacctgggaagtaggtcccagacatcaggacctttttaaagctccccaagtgattctacgttccccaagtttgaggaccacttttctgtgcattggcttgcacaatttgaaaataatgcttttcctgagctggatcccagtgttgccttaacagggtgtctgtcgtgccgcagtagagcactgctgcttcctccaaccccaaaatttatgttcctaagtaagtcaggtccctaagccccgtcccaagaagtgacacaagtggccaacatccacactgtaggcttgcaggctacccgccctgagatttggtaaagaacactgccttgttccccatcagtaaacaaggttacctacctcaggaggctgcttgtgagagagcaaatgcagtatcttcagaatgatttatttttttaattaattgtaaagacttgtgccattggctgctctttctagtcccctaaatttctgttctagttttaaatttctctagaacttgcaatagttgggggttttataatgatgttttacaatgtttatttcttaaataaaaacttaaaaattcaaaaaaaaaaaaaaa

SEQ ID NO: 25498 - DNA, 1117 bp, Homo Sapiens
agaagcctgggggcggtgggtgaaccctggctctgagctctcctcccatctgtccccatcttcctccccacacctacccacccagtgggccctgaagcagggccaaaccctcttccttgtctcccctctccccacttattctcctctttggaatcttcaacttctgaagtgaatgtggatacagcgccactcctgccccctcttggccccatccatggactcttgcctcggtgcagtctccactcttgacccccacctcctactgtcttgtctgtgggacagttgcctccccctcatctccagtgactcagcctacacaagggaggggaacattccatccccagtggagtctcttcctatgtggtcttctctacccctctaccccacattggccagtggactcatccattctttggaacaaatcccccccactccaaagtccatggattcaatggactcatccatttgtgaggaggacttctcgccctctggctggaagctgatacctgaagcactcccaggctcatcatgggagctttcctcagcaccttcaccttccctcccagtgtagcctcctgtcagtgggggctggacccttctaattcagaggtctcatgcctgcccttgcccagatgcccagggtcgtgcactctctgggataccagttcagtctccacatttctggttttctgtccccatagtacagttcttcagtggacatgaccccacccagccccctgcagccctgctgcaccatctcaccagacacaaggggaagaagcagacatcaggtgctgcactcacttctgccccctggggagttggggaaaggaacgaaccctggctggaggggataggagggcttttaatttatttctttttctgttgaggcttccccctctctgagccagttttcatttcttcctggtggcattagccactccctgcctctcactccagacctgttcccacaactggggaggtaggctgggagcaaaaggagagggtgggacccagttttgcgtggttggtttttattaattatctggataacagcaaaaaaactgaaaataaagagagagagagaaaaaaaaaaaaaaaaaaaaaaaaaaaaaaa

SEQ ID NO: 25499 - DNA, 1614 bp, Homo Sapiens
tgaagagtggcgggactggcttcacttcctccgcggttcctcggagccgcctcgctcctcttcagggactttgctgagaagggctctcgggcgtccagaccccaccgcaaaggtgtttggcgatccgccgagaagttgttggccccaggagcatccctcggggccgaatgcgcagtggacgatgccccttctgacccaacagatccaagacgaggatgatcagtacagccttgtggccagccttgacaacgttaggaatctctccactatcttgaaagctattcatttccgagaacatgccacgtgtttcgcaactaaaaatggtatcaaagtaacagtggaaaatgcaaagtgtgtgcaagcaaatgcttttattcaggctggaatatttcaggagtttaaagttcaggaagagtctgttacttttcgaattaatttaactgtccttttagactgtttatctatttttggatcaagtcctatgccagggactttaactgcacttcgaatgtgttaccaaggttatggttaccctttgatgctgttcctggaagaaggaggagtggtgacagtctgcaaaatcaatacacaggaacctgaggagaccctggactttgatttctgcagcaccaatgttattaataaaattattctgcagtcagaggggctccgtgaagcattttctgaattggatatgacgagtgaagtcctacaaattaccatgtctcctgacaagccttatttcaggttatctacttttggaaatgcaggaagttcccaccttgactatcccaaagattctgatttgatggaagcatttcattgtaatcagacccaagtcaacagatacaagatttccttactgaaaccctctacaaaggcattagtcctatcttgtaaggtatctattcggacagataacagaggcttcctttcattacagtatatgattagaaatgaagatggacaaatatgttttgtggaatattactgctgccctgatgaagaagttcctgaatctgagtcttgagtatgacaattcactgatatttatgtgtacatttatgatagatgaagttcttattctgagtacagtactctttgtcatttcatattggattttctatagagaagaagcacaatggggaagataggagcaaggtcatgtaccctaatagttactatgttttgtaaatccattttgtagagggcatgtaaataaatgttttcctgtagtcatagattattcaggactgtcctttagttctgtcttttgaactcatgggaataattgtgagtcagcgtaacatttcaagagtctaaaggtggccgggtgtggtggctttaatcccagcactttgggaagccgaggtgggcggatcacctgaggtcaggagttcgagaccagcctgaccaacgtggagaaaccccatctctactaaaaatacaaaaaattggccggacgtggtggcacatgcctgtaatgccagctactcgggaggctgaggcaggagaattgcttgaacccgggaggtggaggttgtggtgagctgagatgacgccattgcactccagcctaggcaataagagcaaaactctgctcaaaaaaaaaaa

SEQ ID NO: 25500 - DNA, 1378 bp, Homo Sapiens
gtttctaggctggtcactactccgagcctgtgacgtttgcggcagccaggccgtcgacgatgcccagtgaaactctctgggaaattgcaaaagctgaagtggaaaaaaggggaattaatggaagtgaaggtgatggagctgaaattgcagaaaaatttgttttcttcattggcagtaaaaatgggggaaagactactattattctaaggtgtcttgacagagatgaaccaccaaaaccaaccttagctttggaatatacatatggaagaagagcaaaagggcacaacacaccaaaagatatcgctcacttttgggaactcggtggaggaacctctttattggacttaatcagcatacccatcacaggtgacaccttacggacgttttctcttgttctcgttctggatctttcaaaacctaatgatctctggcccaccatggaaaatctcttgcaagccacaaaaagccatgtagacaaagtgataatgaaactgggaaagacaaatgctaaagcagtttctgaaatgagacagaagatctggaataatatgccgaaggatcatcctcaggatcatgaattaattgacccatttccggtacctctggtcataattggaagtaaatatgatgtttttcaggattttgagtctgagaagagaaaggtaatatgcaagacacttcgatttgttgcacattattatggagcatcattaatgtttaccagtaaatcagaagctctattactaaaaatacgtggagttatcaaccagttggcatttggcattgacaaaagcaaatcaatatgtgtggatcagaataaaccgctgtttatcacagcaggattggattctttcggtcaaataggatctcctcctgttcctgaaaatgacattggaaagcttcatgcccactcacctatggagttgtggaaaaaagtgtatgaaaagctctttccaccaaagagtattaacacgctgaaagatatcaaggaccctgcgagagatcctcagtatgctgaaaatgaagtcgatgagatgagaattcagaaggatctggaactggaacagtacaaaagaagttcttccaagtcttggaaacaaatcgagcttgattcttgaacctatttcaattattgtatatttatttcttcttttccaaatacaaataagattatactgtgaattaactattgtggcaatatgtgaagaaagttaaactgtataatttgttaaaggacaagctggatttcttggactagtgcatctccctgtatatcttgaagctttttaaaaggaaaaattattgtagaaccacgtgtaattttttttaaaataaaagaatcttctacaaaaaaaaaaaaaaaaaaaaaaaaaaaaaa

SEQ ID NO: 25501 - DNA, 1647 bp, Homo Sapiens
gctgagcttaaactgaagcaagttcggtggacgccggcggcgccctgatctaaagaaacgactcagggactgcggcgcttgcacgtcaacgggaggtgtgagcccaaagaaatgggacgtcggtcatcagatactgaagaagaaagcagaagcaagagaaaaaagaaacaccgtagacggtcctcctcgagcagttcttcagatagtagaacatacagccgaaagaaaggaggaaggaaatcaagatcaaagtcaagatcttggtccagagatcttcagcctcgttcacattcttatgatagaagacgcaggcatcgatcaagcagtagctcttcttatggctccagaaggaaacgaagtcgaagtcgttcaaggggtcgagggaaatcctatagagttcagaggtctaggtcaaaaagcagaacaagaaggtccaggtcaagacctcgtctccgttctcatagtcgtagcagtgaaaggtccagtcacagaagaacgcgtagtcggtctcgggatagagaacgacgtaagggcagagataaagagaaaagagaaaaggagaaggataaagggaaggacaaggaattacataacatcaaacgtggggaatctggaaacatcaaagctggattagaacatctgccaccagctgaacaggccaaagccagactacagctggttcttgaagctgctgcaaaagctgatgaagcattgaaagccaaagaaagaaatgaggaagaagcaaagagaagaaaggaggaagaccaagccaccctggtagaacaagtaaaaagagtaaaagaaattgaagctattgaaagtgattcttttgttcagcagacattcagatcaagtaaagaagtcaaaaagtcagtggaacctagtgaagtgaaacaagcaacttcaacatcaggaccagcatcagcagttgctgatccacccagtactgaaaaagaaatagatcctaccagcatccctactgctatcaagtaccaagatgacaattccctggcccatccaaatttatttatcgagaaagctgatgctgaggaaaaatggttcaagagattaattgctctccgacaagaaagactaatgggcagtcctgtggcctaagtaatatacatatagttggattggattgtcagcagtaacattggaaatttaggtttttaaatcccaatattaactttttactcttaaaaagaattttgctgattatatataaaggtagtctcatttcatttgtctctcatgtaggcttgaatatttgttaatttgaattaaatcaaacattgtaaaaattaaaacaaaatttaagattgcatgaaaatgttatactgttaataaagctaaacataaataagtctgttaaaatgaatggtagacactagtgtttcttagtgcaattcaaaaaatgtcaagatgtcatttaaagacacaattttgattaattatgcatacatgagaattgaattacatgctataaatatgagatttcatcttccgtatggtattcaaccatttttaaatattttatttcaccatattgcaaatttttaggcacaataaaaagcaccctaaacaatgtaagcagaatgtgcatgttaaagaacatatttatggaaaaaaaaaaaaaaaaaaaaa

SEQ ID NO: 25502 - DNA, 1590 bp, Homo Sapiens
ccggctccggtgtcatggccggctcctaccctgaaggtgcacctgcagtcctcgccgataagaggcagcagttcggaagccggttcctgagagatccggcgcgcgtcttccaccataatgcctggtaatcactctgccccttcgcccggcctgtcgctgaccctctgtcccgccgcctcggagcactccgaaaagcccctgaccgccggccacgagtcaagctgccctacccgaggcactctccaaggggagagaaactcctaggccagcgactcaccctgcccgcagccaggacgtgaggcccctaagctgcccgtttgattttctcagggacaatgtggagtggtcggaagagcaagccgcggtggcggagagaaaagtccaggagaacagtatccagcgggtgtgccaggagaaacaagttgattatgagatcaatgcccacaaatactggaatgacttctacaaaatccacgaaaatgggtttttcaaggatagacattggctttttaccgaattccctgagctggcacctagccaaaatcaaaatcatttgaaggactggttcttggagaacaagagtgaagtacctgaatgtagaaacaatgaggatggacctggtttaataatggaagaacagcacaagtgttcttcgaagagccttgaacataaaacacagacacctcctgtggaggagaatgtaactcagaaaattagtgacctggaaatttgtgctgatgagtttcctggatcctcagccacctaccgaatactggaggttggctgtggtgtgggaaacacagtctttccaattttacaaacgaacaatgacccaggactctttgtttattgctgtgatttttcttccacagctatagaactggtccagacaaattcagaatatgatccttctcggtgttttgcctttgttcacgacctgtgtgatgaagagaagagttacccagtgcccaagggcagtcttgatattatcattctcatatttgttctttcagcaattgttccagacaagatgcagaaggctatcaacaggctgagcaggcttctgaaacctggcgggatgatgcttctgcgagattacggccgctatgacatggctcagcttcggtttaaaaaaggtcagtgtctatctggaaatttctacgtgagaggtgatggaaccagagtttacttcttcacacaagaggaactggacacgcttttcaccactgctggactggaaaaagttcagaacctggtggatcgccgactgcaggtgaaccgaggaaagcaactgacaatgtaccgggtttggattcagtgcaaatactgcaagccccttctgtccagcaccagctgagaggcacctgctgccaacacgatgcaagcccattgtgtttccgggcttttttaaaaaaaaaattgtagcactgggcgtggtgcatgcctgtaatcccagccactcaggaggctgaggcggggaggatccattgagcccagcagtccaacctgggcaaaatagtgagagaccctgtatctgaaagtaataataaaaataaaaaatattaaaaaaaaaaaaaaaaaaaaaaaaaa

SEQ ID NO: 25503 - DNA, 1936 bp, Homo Sapiens
aggaagtggtgagttcggagtagagatggccgcgcttgcaccgctgcccccgctccccgcacagttcaagagcatacagcatcatctgaggacggctcaggagcatgacaagcgagaccctgtggtggcttattactgtcgtttatacgcaatgcagactggaatgaagatcgatagtaaaactcctgaatgtcgcaaatttttatcaaagttaatggatcagttagaagctctaaagaagcagttgggtgataatgaagctattactcaagaaatagtgggctgtgcccatttggagaattatgctttgaaaatgtttttgtatgcagacaatgaagatcgtgctggacgatttcacaaaaacatgatcaagtccttctatactgcaagtcttttgatagatgtcataacagtatttggagaactcactgatgaaaatgtgaaacacaggaagtatgccagatggaaggcaacatacatccataattgtttaaagaatggggagactcctcaagcaggccctgttggaattgaagaagataatgatattgaagaaaatgaagatgctggagcagcctctctgcccactcagccaactcagccatcatcatcttcaacttatgacccaagcaacatgccatcaggcaactatactggaatacagattcctccgggtgcacacgctccagctaatacaccagcagaagtgcctcacagcacaggtgtagcaagtaatactatccaacctactccacagactatacctgccattgatcccgcacttttcaatacaatttcccagggggatgttcgtctaaccccagaagactttgctagagctcagaagtactgcaaatatgctggcagtgctttgcagtatgaagatgtaagcactgctgtccagaatctacaaaaggctctcaagttactgacgacaggcagagaatgaagcctttgtatgacagacccatgtatttttggcatgaggaactaacagtccattactctatcttcagcctatcaggatcacagttttaaggaagacttggttttgttgaatatgacaatgaaatctgtgtgtatcagatttttattgaagcattcatcagcagcctcaaccagttttcattgtccatttactagattcaatcgtctctgagtatatagggctgatgttagcaagaccctaaaaatgtccattgaaccctgcttcaaaaaatgaaaacacacctctataaaatgtgtactgggaataagctttgtatttacatacattaggggaattttttaaaatctgtaatgtttggacaaacagatgatattactttgctataaaattataaatgtaacttttaataaagatagccagaatattctaaattagaaattacgtttttgtttccctcaagacataaaacaaatataaacattctaaactgctggatgaatctgaaaagacattaagttcaaattttaatttattctcatattaaatataactccattaaaagtttaaaatttcatgggagaaaatataataaggtaaagaggtagaatcactttcagacttaagaataatgttgatttcccaagtgctttaccttatctgttaaagcgtaagatgaattggtatttgcttcataggcagtttgactgcatgtattagagaatgaaaagaagatatttgtagtaatgcctggaaacttggtgctttaaattaaggtactcctctgctgctgtagaatggattccacacagtggatagctatgggtgattcagaatattatgtttagattcccatttgttaagtttataagttttgtggggaattatgaacttactgtgtactacctgcatttgtgctgtgtgaaaaataaatacaaggattcgtttagctaattcaacaaaaaaaaaaaaaaaaaaaaaaaaaaaaaa

SEQ ID NO: 25504 - DNA, 1602 bp, Homo Sapiens
gacttaggctgtgacccacagaaggacgccagaaagtactcaagacattcacggtgccccggtcagcactcgccatgacgaagacttctacatgcatataccacttccttgttctgagctggtatactttcctcaattattacatctcacaggaaggaaaagacgaggtgaaacccaaaatcttggcaaatggtgcaaggtggaaatatatgacgctgcttaatctgctcttgcagaccattttctacggggtcacctgcctggatgatgtgctgaaaagaaccaaagggggaaaagacattaagttcctaactgccttcagagacctgcttttcaccactctggcttttcctgtatccacgtttgtatttttggcattctggatcctctttctctacaatcgagatctcatttaccccaaggtcctagatactgtcatccccgtgtggctgaatcatgcaatgcacactttcatattccccatcacattggctgaagtcgtcctcaggcctcactcctatccatcaaagaagacaggactcaccttgctggctgctgccagcattgcttacatcagccgcatcctatggctctactttgagacgggtacctgggtgtatcctgtgtttgccaaactcagcctcttgggtctagcagctttcttctctctcagctacgtcttcatcgccagcatctacctacttggagagaagctcaaccactggaaatggggtgacatgaggcagccacggaagaagaggaagtaattgcacaccattttccaagaaccaagaaagaagaaaacacaagagatttttctcatcttttttttttttttttctggtggagggaggtggtggaggaacatagcaaagtaggagggacagagagtgatacttaaatttaataagaggttcgtgaaggtagcttaacttgagaactcttggttttttgaaaggttgactgcacatgccaaaaacaactcctgctatctcagaattaattatctttgaccttcgtggaggatggtctctggttaaaatctgaccaaagaaactcacataaacttggtgttagagaacatctagagagagagagaggaacttagagtcatttaaactcttcagtttacagagaaggatgctgaggacctagatgagaagttacctgcaaaaggcaaaagggttacttagtgtcagaaccaaggcaatgacttctctctcccagatctcctagctactggtcctgggccatttttttttttttaaataatcccaacttttctttaaaagacaagcatttcagtaagctagttattttcatgggttgctcatccatttttttcagtgatctaaaaatgtagggagatggctactactgaagttgtctgtctacttgggataatagcaaattaattgaagacaatgggaaagtaagttataaaaaatactgggaaatctgtttctcttctgagcaagcattcagggcaggtataaacatcaaacatagtgacattgtcaaaacctcttccatttgaacattgattaattcatcaaataaatggtatagtaacaaaaaaaaaaaaaaaaaaaaaaaaaaaaa

SEQ ID NO: 25505 - DNA, 1102 bp, Homo Sapiens
gccgcggctgcgccatccgcggccatgaagtttcgggccaagatcgtggacggggcctgtctgaaccacttcacacgaatcagtaacatgatagccaagcttgccaaaacctgcaccctccgcatcagccctgataagcttaacttcatcctttgtgacaagctggctaatggaggagtgagcatgtggtgtgagctggaacaggagaacttcttcaacgaatttcaaatggagggtgtctctgcagaaaacaatgagatttatttagagctaacatcggaaaacttatctcgagccttgaagactgcccagaatgccagggctttgaaaatcaaactgactaataaacactttccctgcctcacggtctccgtggagctgttatctatgtcaagcagtagccgcattgtgacccatgacatccccataaaggtgattcctaggaaattgtggaaggacttacaagaaccggtggtcccagatcctgatgttagtatttatttaccagtcttgaagactatgaagagtgttgtggaaaaaatgaaaaacatcagcaatcaccttgttattgaagcaaacctagatggagaattgaatttgaaaatagaaactgaattagtatgtgttacaactcattttaaagatcttggaaatcctccattagcctctgaaagcacccatgaggacagaaacgtggaacacatggctgaagtgcacatagatattaggaagctcctacagtttcttgctggacaacaagtaaatcccacaaaggccttatgcaatattgtgaataacaagatggtgcattttgatctgcttcatgaagacgtgtcccttcagtatttcatccctgcgctgtcctagcaccctgtcgctggagttggcatgcagagactttgtcaggatgggagaggccgcaggtgttgtgttctgatcactggtctgtgccctcacagcaccgcacatcgacacactgtacttatttgtccctctctaacattttaactaaaagttgattcaacaacacacagttggataaacatatcacttcatgttaaaaaaaaaaaataaaaaaaaaaaaaaaaaaaaaaaaaaaaaa

SEQ ID NO: 25506 - DNA, 1828 bp, Homo Sapiens
tgggagcggcggccgtccctctcctggaggtcgtctcctggcatcctcggggccgcaggaaggaagaggaggcagcggccggagccctggtgggcggcctgaggtgagagcccgaccggcccctttgggaatatggcgaccggtggctaccggaccagcagcggcctcggcggcagcaccacagacttcctggaggagtggaaggcgaaacgcgagaagatgcgcgccaagcagaaccccccgggcccggcccccccgggagggggcagcagcgacgccgctgggaagccccccgcgggggctctgggcaccccggcggccgccgctgccaacgagctcaacaacaacctcccgggcggcgcgccggccgcacctgccgtccccggtcccgggggcgtgaactgcgcggtcggctccgccatgctgacgcgggcggcccccggcccgcggcggtcggaggacgagcccccagccgcctctgcctcggctgcaccgccgccccagcgtgacgaggaggagccggacggcgtcccagagaagggcaagagctcgggccccagtgccaggaaaggcaaggggcagatcgagaagaggaagctgcgggagaagcggcgctccaccggcgtggtcaacatccctgccgcagagtgcttagatgagtacgaagatgatgaagcagggcagaaagagcggaaacgagaagatgcaattacacaacagaacactatacagaatgaagctgtaaacttactagatccaggcagttcctatctgctacaggagccacctagaacagtttcaggcagatataaaagcacaaccagtgtctctgaagaagatgtctcaagtagatattctcgaacagatagaagtgggttccctagatataacagggatgcaaatgtttcaggtactctggtttcaagtagcacactggaaaagaaaattgaagatcttgaaaaggaagtagtaagagaaagacaagaaaacctaagacttgtgagactgatgcaagataaagaggaaatgattggaaaactcaaagaagaaattgatttattaaatagagacctagatgacatagaagatgaaaatgaacagctaaagcaggaaaataaaactcttttgaaagttgtgggtcagctgaccaggtagaggattcaagactcaatgtggaaaaaatattttaaactactgattgaatgttaatggtcaatgctagcacaatattcctatgctgcaatacattaaaataactaagcaagtatatttatttctagcaaacagatgtttgttttcaaaatacttctttttcattattggttttaaaaaagcattatccttttatctcacaaataagtaatatctttcagttattaaatgatagataatgcctttttggttttgtgtggtattcaactaatacatggtttaaagtcacagccgtttgaatatattttatcttggtagtacattttctcccttaggaatatacatagtctttgttttacatgagttcaaatacttttgggatgttaccttcacatgtcctattactgatgtgtgcaaccttttatgtgttgatgactcactcataaaggtttttgtctactgtcatttgttctttccacttattctaagcatttagagtaatagagtcatacttttttataacagcaaccttttaaaaggaaagctcttataaagtcactgtcatgttttagttgactaaatataaatttaagagaatacttgaattgtgctatagtaaataaaaatttactattttgtgtttgataaaaaaaaaaaaaaaaaaaaaaaaaaaaaa

SEQ ID NO: 25507 - DNA, 2731 bp, Homo Sapiens
ggatatataatggagagactctggtatttgaggagagcaactggttcataattaacgtgattaaattagtttggcgctatggatttcaatccctccgtatgcacatgtgggtagaggacgtgttagacaagttcatgaggatctaccgctaccagtctcatgactatgccttcagtagtgtcgaaaaattacttcatgctctaggaggagatgacttccttggaatgcttaatcgaacacttcttgaaaccttgcaaaaggccggcttttctgagaagttcctcaatgaaatgattgctcctgttatgagggtcaattatggccaaagcacggacatcaatgcctttgtgggggcggtgtcactgtcctgttctgattctggcctttgggcagtagaaggtggcaataaacttgtttgctcagggcttctgcaggcatccaaaagcaatcttatatctggctcagtaatgtacatcgaggagaaaacaaagaccaagtacacaggaaatccaacaaagatgtatgaagtggtctaccaaattggaactgagactcgttcagacttctatgacatcgtcttggtggccactccgttgaatcgaaaaatgtcgaatattacttttctcaactttgatcctccaattgaggaattccatcaatattatcaacatatagtgacaactttagttaagggggaattgaatacatctatctttagctctagacccatagataaatttggccttaatacagttttaaccactgataattcagatttgttcattaacagtattgggattgtgccctctgtgagagaaaaggaagatcctgagccatcaacagatggaacatatgtttggaagatcttttcccaagaaactcttactaaagcacaaattttaaagctctttctgtcctatgattatgctgtgaagaagccatggcttgcatatcctcactataagcccccggagaaatgcccctctatcattctccatgatcgactttattacctcaatggcatagagtgtgcagcaagtgccatggagatgagtgccattgcagcccacaacgctgcactccttgcctatcaccgctggaacgggcacacagacatgattgatcaggatggcttatatgagaaacttaaaactgaactatgaagtgacacactcctttttcccctcctagttccaaatgactatcagtggcaaaaaagaacaaaatctgagcagagatgattttgaaccagatattttgccattatcattgtttaataaaagtaatccctgctggtcataggaaaacacacggttctaattaagtgtgaaggtatagctattgcacttatgccatctccaaaatttcttaagtattctttcactatccattaggagtttttcttaaacttgtctgataataagaatcacctggagttaggaggtggtggttgcagtgagccaatctcaccattgcacttcagcctgagcaacacgagcaaaactccgtctcaaaagtaaataaaaataatcacctggagtttgttaaaccatatggattctcaggctcctctcttgaagattctgattcagtaggtctgggagtggcgccctggattttgatcaaaattgtagagcattttaaggtgagtacctgagggagaacttaaagacatcttagttggggagtagtccttttgaattttacagctagatataatcttcagtcagataaaatttatgggagctggtgtcttatgcctgactcttagtaatttcataccggtttgaagtacgtgtgcccatgcctaaagccttgactttcagaatgttgtcttttgattcttctgtcttgatttgattaggggtgaaatttagaagtcttagtaatgtaacttgaagatgttaaacaaaaatctcaagtaaaatgaaaagcaaatatgggctactgaattaagaaactggcattctagtattaaatcctcacttcaggagcttttaaaaatactgagacccccccataaccagagattcagattcaaagactgaggataggaccttagcattgtagctatttaaagtttctaatgtgcacccagggttgggaatcaccaatgtgggtgtgaaaatgcctacaaagggttttagtgccttagaagtcctaagaagcccaatctgtatcaaagcagatccattttgcaaggatctttcttttagaactttctcagttctcttagtaagaactttagaagtaatcttgataataagcacagacagcctaacagcagaggcaacttaaataactcctgagcagttggcactagaacagaatacttggaatgacaccaaagttaaccaagtccagcatatgtccaaagagttaagtgtttcatttactgtagcattctgggtgagaaattggttgctgaaatcttaagacagtggtctcaaccttggctgcacattggaatcacctgtagggttttaaagcatccaaatggtaattaacaggcagcaaaacttcagaactagttctgcatctactgtgcaaagatcatgattaactgtcaagacactggtagaacagaacaagcaaaagattaagagttcaaaagtaaatgcaaccaatttaacatgtagtgttattaaaaaattacaaaggcctagaccagcctgggcaacatggtgaaaccccatctctacaaaaaaaaaaaaaaaaaaaaaaaaaaaaa

SEQ ID NO: 25508 - DNA, 1121 bp, Homo Sapiens
gctgagagtgggggtggctgggagcagcgcagcctccggaggaggaggcggaggccgaggaccaggaatcaccttcaagcctatgtcgtgaggctttggcagaaattaagaaggaaatatctccattattcattggcatggaaaaatgttcagtgggaggattagagttgactgaacagactcctgctttattagggaatatggccatggcaactagtctcatggacataggggattcatttggtcatccagcttgtcctttagtcagtagatctaggaactcaccagtggaagatgatgatgatgatgatgatgttgtgtttattgaatctatacaacctccttcaatttctgctccagcaatagctgatcaaagaaacttcatatttgcatcatcaaaaaatgaaaagcctcaaggaaattattctgtaattcctccttcttcaagagatttggcatctcagaagggaaatataagtgagacaattgttattgatgatgaagaggacgtagaaacaaatggaggagcagagaaaaagtcttccttttttatcgaatggggacttcctggaactaaaaacaaaaccaacgatttggatttctccacttccagtctttcaagaagtaagaccaagactggagtaagaccttttaaccctggtagaatgaatgtggcaggagacttatttcagaatggagaatttgcaactcatcatagtcctgagatgcatctacaaagaaggctaatgtcattcttccagtagaatcaagcaaatccttccaagaattttatagtacatcttgtttgtctccctgtgaaaacaactggaatcttaaaaaaggagtttttaataagtcaagatgtacaatttgtagtaaattagcagaggtctggatttttatacctaagttgttgtttaggctaacagtgataattttaacttttaagtgctattatgtactctttcatctacataatgcacatgttctggatgtataacatgaagctgaaaggaagaataaggatatgttagaactatcttatgggatattttataaataaaattccatttgcatagcatggaaagtacaaaaaaaaaaaaaaaaaaaaaaaaaaaaaa

SEQ ID NO: 25509 - DNA, 2171 bp, Homo Sapiens
cttctctgctgaccctctctcgtcgccgctgccgccgccgcagctgccaaaatgtctacaggtccaactgctgccactggcagtaatcgaagacttcagcagacacaaaatcaagtagatgaggtggtggacataatgcgagttaacgtggacaaggttctggaaagagaccagaagctctctgagttagacgaccgtgcagacgcactgcaggcaggcgcttctcaatttgaaacgagcgcagccaagttgaagaggaaatattggtggaagaattgcaagatgtgggcaatcgggattactgttctggttatcttcatcatcatcatcatcgtgtgggttgtctcttcatgaagaaccagcggaactcaaaactgctgttcaagaaacctcttcaagacttttgacttagaacctgctatattatcaagcttacctactgttatctctaaaattttttttgtgttaatgtaaagttgaatttctaggaaacgtgcctttgttttttaatatgcactccaaattagaaggccggccccgtccacattttgcacagtgcctttacagatttacgtatgggctgatgaagaggccttcttaagttccagagtgctataatctagatgtaatgttgtcactaattaattgccattactcccagttagttacccttgtcatttggcattattttcagaaccacattttaaacctttgggtaatcagatttccaacttatgccttccagaaaaaaacactactgcctaacacaaatctgtgataacaacaggctgtgccttattttgataattttctgattccctagaagagaaccctctactttttgtaagcactactgactctcgctgtatttaagatgctggtgaagagcttttgctcctgcattagatttgaagatgtttacattgttgttattgttatgtatcacttgctaaaaatattgttttaatcagagataacctctttaaaaaaatttttaaagaactatggctatgaccaaagcttctattttgccaaaaagttaaataccgataaaatggccttaagtgtattcctgacagttaaattcagaaacgtgccaaatggaactcaaggtgccccttcagaattaaaatcattaccttgtgtgtgaaccttctacatcttcataggcctttcttccttttgaaaggctgtagacagtgtggctccccttctgattcagtattttgcatgggggttagagaaggtttgaggtagactctgaccgtctcataaaagagttctacccagcagttggcagattatcagctgtggactccagcatgtttctgataattatgcaagcaacaattctgtagcctcaagtaagaccacctgtgaacttgatcattatctggcccaaatatgaagataaactataactttggagtttgtttcctatttgtattcacattctgcttcctaaatcagttttctaaattatgcctgcaattaggcattggtcaggggtgaatggctcttttcacagagagtagccaaccagagacctttgctttgatatcatcaactgcagacaatgctgttgatgggaatgctggaagcagaaactttgtcatcggaaaaacttttcttgtatgcatgagactcaacatcaggatccacagcttaaagatgggaattcaggtatgaaagaaaacaggcaaggaggcactgagggagaaagacacagactttatcgctctgtggctcattgttactggaatattctaaaactcttgttcacatgctattatgacttataaagcagcaacagctgaggcgcaccaggacacagcttccatttctttaacgtctgttcccttaacatcgctgaaatgatttactgttgaagagatgccttgcggtgtggccagctgtgaggagaaagcagctggcagtgttaggacattagtccaccttcagcgcagggtctctggccgggtctgactcagaaaccttggtactcgccccttggccacagtgcccagacccatgtaacccactggctcctgcattaacccagaaatacctcgcttctatctgtgcacttagctgggaacttacccactgtaatcacctaaataaagtgtttataaacatgcaaaaaaaaaaaaaaaaaaaaaaaaaaaaaa

SEQ ID NO: 25510 - DNA, 2617 bp, Homo Sapiens
acttcggctgtctccgctgccctccagcggagacgcagctcctcaggcgcccggcggtatttgttgggtcggcggcgtcagggattcgcagtggcctgtggtcggcgtcgtccggccactggtgcgcccccgcgacaggcagagctcacgctcctgtcccccggctggtccggggtctgggcgccgcgtcgacggcggctccgcaggacgcgcagaccgggccgcagcccatgccccgagcggactgcattatgaggcacctgccttacttctgccggggtcaagtggtgcggggcttcggccgcggctccaagcagctgggcatccccacagctaattttcctgagcaagtggtagataatcttccagctgatatatccactggtatttactatggttgggccagtgttggaagtggagatgtccataagatggtggtgagcataggatggaacccatattacaagaatacgaagaagtctatggaaacacatatcatgcataccttcaaagaggacttctatggggaaatcctcaatgtcgccattgttggctacctgagaccagaaaagaactttgattctttagagtcacttatttcagcaattcaaggtgatattgaagaagctaagaaacgactagagttaccagaacatttgaaaatcaaagaagacaatttcttccaggtttctaaaagcaaaataatgaatggccactgatgaaaaattgtattatttattcattcactgttttctagtgtttctgtgtttattactgttcagcatcatcttggttatatactgaaaatcaaacactttactacagttgtgaattagtttaaaccgtacaatgttgttatcatatcatgcttcaactattaaattaagcccatcatatcatagcactaaaaagattgagttaaaaataagatttaaaaaatatatattgattaaaatgtaccactagaaaggtgttacatgtgtataagtatgggtaaaaaggcaagtcactagtttgagatgaaaactaaaattttcatggtaaaatgccagcatgtatgtacttgtgtagtgtgtacttctaaacagagaaggcttataaaagtaaatgcattaaggccaagtgcagttgctcacaccggtaatcccagcactttgggaggccgaggtgggaggattgcttgagctcatgagttcaagaccagtctgggcaacatagcgagactccatctctataaataaaaaaaaaggaaatgcattaaatagaaggttgatagtttatcataaacctgcggggaagaaactcagactttctatttttgatattttgtgcattaatacattacaaacatgaagatgtttgtaaagttttgttttagtcattttctttgcagtcacatcattgtaccaccttcattattgtatagagctgcttcaattctgagtcctctggacttcccctgcctatctgtttgttgttgttgttgaagacagtaaaataagtgttttcaaatctatatgtctcctttttgttggataatgtttcttctttttaatggtaaatattcttgttcttcaacatttttctttggttcttttttccttttttaggaaaaacaaaacaacagacttcatccttaggttttctcaagatttaagtgaacacatttacacatatcaatttcttaaagaacacaaaatgtttcctccctagcaaaactatttaagagccaattaaactatgaaatagttataaaattatttttaatatttaaggccttgaaattatattccaaggcaaatctaaatgggtgtagttgtatatgcacgatgtaatttaatgctaaagagtacttacagcttgagggaaaagcataaagttttagttaaatagccttcatactgtggatttttcctcctactaactaatatgtgggaaattaagattacagatgctttgggccccctcaaacagtacattgctacagttcactgtagcaacagatttggtggtgatggggggatagaggtagaagcagatagaaggtaattttaaagttaatttattatgaatcattttcccctaatctgcataaatgaattagaactgattttaataaaaatattctgtgtaaaaagtactcagaaaaacatctaaagctgttggagaagagggactcatataaatagttggattgcgttttgctttttatttctttataaaaatatgtcaaaaacagtttttaattttagaaatcttatacttgaaagaaacctcaattatcagtggctttatgaagtaaagttaaaaacaaacataggaaatgtgaaaatatttgtgtttgttttgtctgactaacttgctgctaaatgctatctttaggtgtgtgaaagttctttgatatgttattgtccttttacatcttgttaaatagccattgcttttgagaatcagatagtgtgttgtttaggggttaattgtgtctatatctttcaaaaacttttatattatgtattataagaagttacagtagtaccattttgattagtctgaatgttttcaggccttgaaataaattttgactaagtaaaaaaaaaaaaaaaaaaaaaaaaaaaaa

SEQ ID NO: 25511 - DNA, 1792 bp, Homo Sapiens
cctgtccgggggtgggggctaggggagggataacattacatgtatacctatgtaacaaacccgcatgttctgcacatgtaccccagaacttaaagtataatttaaaaaaagaagtatttccagaatctcatataaaaaaagaaaattaaaaatgcagtttatttatgtaaaagatcagtggaacttaaagataatcactgagtgacttacagtaaaaattaaaaaatgaaaaagactagtgtactacaaaagagactatctgaaaaaaaagaaatatcacagaatatcaaaaactcgaatgggaacaagaactctgcagtttgagatttctgatagtcatgaaaaagaagaagacctgttgcataaaaaccatttgatgcaagatgaaattgccaggctcaggctggaaatacacacaataaaaaatcaaatcctggaaaagaaatacttaaaagacattgaaattataaaaagaaagcatgaagaccttcaaaaggctctaaaacagaatggggaaaaatcaacaaaaacgatagcccattatagtggacagcttactgctctgacagatgagaacacaatgctccgttctaaactggagaaggaaaaacaaagcaggcaaagactgacgaaatggaatcataccatcgtagactgaatgttgctctacatgatcatgatcaaagtcactcaacagaaagagaccaagagcttgatttccagggcacagtagataaattgcgtcatttacaggaaaatttgaattctcatgttctgattctttctcagcaactttctaaagctgagagtaagtccaggtgcctcaaaactgagctccataacacaagagaggctctgaaagaaaacgctttggtttttgaacacatacaaagagagctaaaccaaacggtgtcaaatgaaggacattgaaaaaatgtacacaagtggccaagataaagtagaaaaatgcacagaaaagcaagtaagattatgtcaactacgaagacaaaatatgttgcttcaacagcaactggatgatgttcacaacaaagctgacaatcaagaaaaaacagtaactgatattcaagccaaatgtgatgctacagcacaaaatcttcaagctgagtgcataaagcaccgtcttttgctagaagaacaagaggatgatcaataaagttaatcatttgaaagaaaaacaatgtcaatatgaaagagagaaagcagaaagagaagtagttgtgagacaacttcaacaaaaacagggtgacgtcctaaacaatcaacaacaaaagctttgctggatgcttcattgcgtcactgcgtccattgagaaagtgagatgtaggattcaaggaagaaattaggtcagatgagaattcaatttcaagaaaaatggaatcaacttacagcgactataaaatgtactaaggagacgcaaggccacgtacaaaaacttgaaatagaaaattctagtgttaagaaatacaattaaaaagcaagatggccaaattgagcagcttcagaaaatcctgcgaagttcaagtttgatgcagcagttattgcaagaaaatgaaactacagaaatagatgaagcttcttctgaatttaaatctggatcctctgtagcagaggttcccaacctacaggccatggacaggtccatgacctgttaggaaccagctgcacagcaggagagttactgtggatcttctagatcatctgcatgccatgtgaatcttaaaaccagtttttaatttctacaaaaaaaaaaaaaaaaaaaaaaaaaaaaaaa

SEQ ID NO: 25512 - DNA, 3506 bp, Homo Sapiens
ggcagctgctggagctggcggcgcggcccgggcggctgcgggagcgggtgctggagctggcgcgcggcggcggcgacccctacagcgatctcagcaagggcgtgctgcgctgccggaccgtggaggacgtgctcacgcccctcgaagactgcttcatgctggacgccagcaccgtgctggacttcggcgtcctggccagcatcatgcagagcggccacacgcgcatcccggtgtacgaggaggagcgctccaacatcgtggacatgctctacctcaaggacttggccttcgtggatcccgaagactgcacgccgctcagcaccatcactcgtttctacaaccatccgctccacttcgtcttcaacgacaccaagctggacgctgtcctggaggaattcaagcgaggagacaccgtggtgaagaggaagcctgcttctctgatggcccctctgaagcggaaggaggagttctccttgttcaaggtgtctgatgatgaatataaagtaacaatctcgcctcagctgctcttggccacccagcgcttcctgtcccgagaagtggatgtattcagcccgctgcgcatctctgagaaggtcctgctgcacctgttgaagcatcccagtgtcaaccaggaagtgaggtttgacgagagcaaccggctggccacacaccactacctgtaccagcgcagccagccggtggattacttcattctcatcctgcagggcagggttgaagtggagatcgggaaagagggtctgaagtttgagaatggggccttcacgtactatggagtgtcggccctaactgtgccatcctcggttcaccagtccccggtgtcctcgctccagcccatccgccatgacctgcagcccgacccaggtgacggcacgcattcatctgcgtattgtcccgactacaccgtgagggcgctctctgatctgcagctcatcaaggttacgcgactgcagtacctcaatgcactcctggctacccgagcccagaacctgccacagtcccctgagaacaccgacctgcaggttattccaggcagccagaccaggctccttggtgagaagaccaccacagcggcagggtccagccacagcaggcccagccttccccttctcccccggggcagggacagtgcggcatattcagattcagacctctttgggctgagccaccttgtgagtgcagttactgcctttgtgtggccgtgacctctatttgtttgcttttaatttgccaacctatcgctgctggcagcactttttgagcaagccgagagcacccattttggctgggggttcagatcgatggccttgtccatgttgtcctttctggcttccctgatggtgtcatgtttcagcgcatgcgccccagcctttcccatgtgccaaaccagaagctccactgcccgtaggctgtccctgtagccctgctccctccctggaggctgctcttctgattctgagagctggcctagtggtgctgagggcccctttctgcttctctgcccacctgctgagttgccactcgcagtgttgtcagttcccgtgttctgagaagaggtcatgcctgggaggaagggatcgtcatgctgcatcgaatcctctctccgccgtgtggcccccaggagagtagctgcctgttgcacctgctccacacctccccacagcctccctgcaggtgctgtgtggccgtgatgtgcagagagcagtgagggagggttcatgaaccaggtggatcctctttaaaaaaaaaaaagtttttgttatatctctagaacatttcaagtcttttcctttttttctgttcctagctatggggttttagagaagtgggaacaggaaggcatttgtctttttcttctagtttactacattttccttccgtagttcttcagctgtgtggaaacgggcatcacaaggacataggatcatagattgggtagggagggaggaggatttctggaacttttctcaaaggaatttggacccttataaatgggactgaaggtcaaaacaacagtgatatccttgcttagaaattgtcctcaaggaataaactctgagagcaagcccgggttggaaacagatgctttaaaatcctctctccagaacagtggttttttgtttgtttatttgagatggagtctcactctgtcacccaggctggagtgcagtggtgagatcttggctcactgcaacctccacctcccaggttcaagccattctcctgtctcagccccctgagtagctgggattacaggtgcccaccaccacacccggctaatttttgtatttttagtagagatggggtttcaccatgttggccaggctgatcttgaactcctgacctcaggtgatctgcctgccttggcctcccaaagtgctgggattataggtgtgagctaagatcagggattcttaaccttggctgcacaccagaatcacctggcaaattaaaaatacgtggacctgccaccagagcttgtgatttaatcagagtcggcatcagagttttcaattttttatttatttattattattattattattattattattattgagacaagatcttgctctgtcgcccagactggagtgcagtggtgtgatcacggcttgctgcagcctcgacctccctggttcaggccatcctgccacctcagcctcctgagtagtagggactacaggtaggcaccaccacacccagctaatacttttaatttttttttgtagagatagggtctcattatgttgcctggggtagtctcgaactcctaggctcaagcgatcctcctgcctcggcctcccaaagtgttgagattataggcgtgagccaccgtgcccagattcacagaagagtttcatacacctttcacccaggttcccctaatgttaacagcttacatataaccttggtacatttatcaaaactaaaggtgcaatcatactaatagctagagtttatttggattttaccatttttcccaatgtcccttttctgctgcagcagccaatccaggatgccatactgcacttagagctgttgctttcttttttcctaactttatattttgaaataatttcagatgataggaagttgtaaaggtaagggccccacgcacccttcatctagtttccctccatggttacatcttatatggttgtaatgcagtattccaacaaagactctgacactggtgcgatgtgggtggacagtccaaatcatttgtcacatgtacatctgtgtaactaccactgcaatcaggataaagaagtcccatccccacaaggatctccctccccaccttccctaactcctggtaaccactaatcgttcatctcttcttattttgtcatttcaagaatgttgtataaatgggagcatagtgaaaaaaaaaaaaaaaaaaaaaaaaaaaaaaaaaaaaaaaaaaaaaaaaaaaaaaaaaaaaaaaaaaaaaaaaaaaaaaaaaaaaaaaaaaaaaaaaatctggg

SEQ ID NO: 25513 - DNA, 1835 bp, Homo Sapiens
ctatcctctgccttcctctcctcccctactcccccagagaaccaaggcgtctgggggattgactggggggcagagggggtttccccagcaaaatcaaacacctgtctccagagtagccactcaaaaactggtggtctctatgtgtctaactttttaaatgagagtgtttatgaacaaaaaaatttaccaacgtgtgagggagttgctgagttgaagaatgctcgcttgaggagcttcagaggaatcttagcaaagccaagttcagttccccaaagcctcctagagcctctggtaagacttctgggttcatgaagtttcggcgagccgtggtcagagagggcgcggtggcctggccaagactttacctccaagcgagagagtgatttcttccaaggcccgcacgggttgatacgttttggttggttttttgttgttgtttttcttgcgtacaaagttggtcaaaaccatctttcaaagcaacagtgttttgtagtaccaggctgtggcttgagggctcacctaggagatcataggcagagggcccctttcccctataggtggttcaacgtggagaaaggttgggtgtggagattgcttgctgtggccccaagctcagccagcaggacacccagttgttgccaatcaggtgtgaaggtgaggcgccctgccttgatcccatgggcccagcagaaggaaacttaccccaggccaaggcaagggccctgctcaccccaaggtaggctgggaagagcatctctttccatatcatcacctccccttctccaagattgccgggggccctgattttgttctctctttgaaagaaaccctccaccgaaacaatggtccccatctccccagaagcctttttttttttcatttttctctaattagtctatgcatttctctctctcaaaccatcttctgcctcttcccttgagaaaacgggcatctcacgtacccccatctgagacctcttggaaaaaaaaaatcccgtgtattctggagatgtgagaattcacccaaaattcttaaaacattggagaatagcttgttataaaataaaagtgggggtaaaaagaaggtggttttccccacatccctttgcattgaataagagacctagttctttgcgtttgtgcaataactctttgctgcttgccttgagagcgggtagcaccacgctcctgtccagactactaacagcacaagacgcactcacagggtggcggaatcttccggaaaactctctataagctcagctccccccaccccacccccactctagcgttttgtcacgtcttacattttagcagtattttatattttctgtaacgcaccaagtcttagatctttctagagcttgtttgttcatcctcacaatcacagatttttttctccaatcctcacagagacccaattgaccaaaaaagaaaaaaggaaaaaaaaaaagtcgtcttttttttttttttttgtacaaatcgctttgagatgcctctggtgtgttgctgtgtgacatctctctggtaacattttatttcttgctatttgtttttctacattaagagtcaaagttgacctggctggcgtgggggtgggggaggcacccgtcggccccttggtgttgtccctctgtctttggttagccatacgatgtttgttctcagcactgtacaacggtccctatataatacggagaagcaatatcactgtatgagactcacaccatgtattattattcactagcaccctaggtgtgataattgaagtaaatatcttttatacaaacaaaaaaaaaaaaaaaaaaaaaaaaaaaaaaaaaaaaaaaaaaaaaa

SEQ ID NO: 25514 - DNA, 1131 bp, Homo Sapiens
ctttggcctttgctggctgtgtggcggctccgcggttcgcaggtcgttcgctgagcgtctctgcttagccgcggtcatgagccggcacagccggctgcagaggcaggttctgagcctgtaccgcgatctgctgcgcgccgggcgtgggaagccgggcgccgaggcgcgagtgcgggcagagttccggcagcatgcgggcctgccgcggtccgacgtgctgcgcatcgagtacctgtaccgccgcgggcggcgccagctgcagctgctacgctcgggccacgccaccgccatgggcgccttcgtacgcccgcgggccccgaccggggagcctggcggcgtgggttcccagcctgacgacggcgacagtccaaggaacccccacgacagcacgggggcaccggagacccgccccgacggacggtgacaggcgaagagccgaactcgctcgatggcgtggtggagccaggaggctcgcctgactgcatggggggactggggaacccgcctaaggtgagaggtcttaagagactagcttgacgaattggggatgtcagagactcctccttggcgacgcagggggcctagagagccccgtgatggacggcaagggaggcccgccttttccgatgcttggagacaggtcggtgctcctcccccatgagggcttggggcggcctgggacgctggcgggctggacagtgtcaagccaagagctacttgcccgaaggtacggggagccaggacgacccccggtggacagggagagcctgagacgcccttctcttgacccctgagaacatacccacttctggctcctcaaggagtctcccctctcctgtatttaactctgagaagtgcagactttttgctgagaacgttttgggaaggtgccctgatgagcggtgagaagcccggaatccccttctggaaaactttcccccattaattgtgacaagccaggaccatgaggaaggggtaggggtctatcaccctggttgatcaactgaagacccccaaaggcccctacttgatggttttgaggggcaacattgactcatttgccccttccctctcggaatgttggacaaagggaataaaattggggatatgtctaaaaaaaaaaaaaaaaaa

SEQ ID NO: 25515 - DNA, 3014 bp, Homo Sapiens
gcagctctgtaatgagatcaccatggccagcctcccacccgagcaaaaacaaggttagcctgcagcagagccgcagcagcaacagccaccaaagcgggggctgaaagggaagagaacttagatttgacctgtgcaaggacctcagcagcttggacacagcccactgcagagatgaaaggagaagctggacatatgctacacaatgaaaagtcaaagcaggagggacacatctggggctctatgaggaggacagctttcatcctgggctctggacttctctcatttgtggccttctggaactcagtgacatggcatcttcagagattttggggtgcttctggctacttttggcaagcccagtgggagaggctgctgactacatttgaagggaaggagtggatcctcttctttataggtgccatccaagtgccttgtctcttcttctggagcttcaatgggcttctattggtggttgacacaacaggaaaacctaacttcatctctcgctaccgaattcaggtcggcaagaatgaacctgtggatcctgtgaaactgcgccagtctatccgcacagttcttttcaaccagtgcatgatatctttccccatggtggtcttcctctatcccttcctcaaatggtggagagacccctgccgccgtgagctacccaccttccactggttcctcctggagctggccatcttcacgctgatcgaggaagtcttgttctactattcacaccggctccttcaccacccaacattctacaagaaaatccacaagaaacaccatgagtggacagctcccattggcgtgatctctctctatgcccaccctatagagcatgcagtctccaacatgctaccggtgatagtgggcccattagtaatgggctcccacttgtcctccatcaccatgtggttttccttggccctcatcatcaccaccatctcccactgtggctaccaccttcccttcctgccttcgcctgaattccacgactaccaccatctcaagttcaaccagtgctatggggtgctgggtgtgctggaccacctccatgggactgacaccatgttcaagcagaccaaggcctacgagagacatgtcctcctgctgggcttcaccccgctctctgagagcatcccagactccccaaagaggatggagtgagagacagcctaagtgtcatcctggctgtccctcagccatgggatgcagacacggcttcctgattgcacctaacaatttgcctccttcggccacacgccctaatgatggcaccaccagggtagagggaaggtcggcttcccggaaaagcagggccaaggatgaggctttcttcaaactactgcccttgatgtccctcaatgggatcaggagttagcttaagaaaaaggaaaacacagctccccagactggaggctggtcagagggaggagacccctggtcctctgctgtggaaggagaggggttcagccccagataactcctttgtggcctgggcaggatgcagagaatgacaaggctgaaaggagggggactggaggctgcctggctccagcgagagctccttctgggaccagagggtgggacggccaggtatcactttgccccttcctgccccaaaaggctttcacatacccgactcaggccagagccaagacaccctggcaaatcattataggtctcaattcatgacataccagatgccagtcgccacttcacccaacacacacacaaacatacacacaccaaacactctgagtgagtggtaaaggccccgttttaactctggcccaccgcaaacaaaaggtttccctctgtgggggagaaaaagaaatccaggagctcctccctggattaaaaccaacgaggtgcagaccaaactttaacacctttagccttatgtggaaaccaaaaaccaactgctgggaaactgtgaaaagcccttttacccacaaggggaggggtcaaagttgctgccctttggggacacccgagacccctaattagcctatctgaatgaggaccaaaggttagagccctctttctccccgaagaaagagcccggaaaaacatggcagagcaaagagcaaaatcctttctcccccgaatgctttaccagtttctcagcaacatttattcaagatgatttttaccaggaaccttatcaaaggcaaaaccacagctgcttgggttgaagtccccatcctggcctcctctcagccgccagacatggccaggaaccctgtggttcccaagaacaatttaaagatcactctttgatttgaaagaccaccattatcattttactaaattcttatatatacttgtgccttttccaactttcagttctcttaagaaaaacatccactgtagctttataaaataccttagtatcagctaggtccaagtctccaggcaggactatcaaaatggactccttcttcctatcagctctagaaccccagaggacttgcccagtaggccagctgagcacttaccaggcagcatctccctggccttccacagtctcgcctgtctgtctctggccttggtggacctggctccctccctaggaggcttttgccctcagcttgaatacagttcctggtgcatcaaagctgtaagttctcagctgctggcctgcactcatcacctcttcctacaaataaacatttggaaaaaagtccatcttcaatatgcttaaagagaagggtaggagataaggagaaagaacagatacggtttttttcccctttaaggcctttagattttgaggtactgtaaggggcctagaaggacaaaaggctttcattccctcttccttttggcaggcaggttatcagtccttggcagaagggcccagccctatccttttctgtatcaaacaaaatccttgaggttggtatacaagttaaggctgaaaaaaggccttaaattcccagtaaagaatgtgaaagcaagcatgtaaaataaactggtcttcatgaaaaaaaaaaaaaaaaaaa

SEQ ID NO: 25516 - DNA, 2481 bp, Homo Sapiens
cccgccattgtgcgaagtgaaggctaggggcccgtacgcgcccgcctgactgtcgccagcagctcctcggcggccccaccgcagccgccgctccctgaggcgcgggaggcccgcgccccgcggctcgctgtgcgtgggagggcgcgagcgaacgcgggcgaggagcggccgagccgctgaagaggagctgggcgccggccgcccggccgcgctcggcccgcggatcgcctccgcccggtcttcgccggccccggcccctggcgagatgccgtgtggggaggattggctcagccacccgctgggaatcgtgcagggattcttcgcccaaaatggagttaatcctgactgggagaagaaagtaattgagtattttaaggaaaagctgaaggaaaataatgctcctaagtgggtaccatcactgaacgaagttccccttcattatttgaaacctaatagttttgtgaaatttcgttgcatgattcaggatatgtttgaccctgagttttacatgggagtttatgaaacggttaaccaaaacacaaaagcacatgttcttcattttggaaaatatagagatgtagcagagtgtgggcctcaacaagaacttgatttaaactctccacgaaataccactttggaaagacagactttctattgtgttccggtgcctggggaatctacgtgggtaaaagaagcctatgttaatgcaaaccaagctcgagtcagtccctcaacatcctacactcctagtcgccacaagaggagttatgaagatgatgacgatatggacctacagcccaataagcagaaagaccaacatgcaggtgccagacaagcagggagtgttggtggtcttcaatggtgtggagagccaaaacgtttagaaactgaagcttctactgggcaacagctgaactctctgaacttgtcttctccttttgatttgaattttccattgccaggagagaagggccctgcatgccttgtgaaggtttatgaagattgggattgtttcaaagtaaatgacattcttgagctatatggcatactgtctgtggatcctgtgctgagtatactgaataatgatgaaagggatgcctctgcactgctggatccgatggagtgcacagacacagcagaggagcagagagtacacagtcctcctgcttcattagtgccgagaattcatgtgatcttagcccagaagttgcaacacatcaacccattattgcctgcctgccttaacaaagaggagagcaaaacctttgtttcaagtttcatgtccgaattgtctccagtcagagcagaacttcttgggttccttactcatgcccttctgggggatagtttggctgctgaataccttatattacatctcatctccacagtatatacaagaagagatgtccttccactaggaaaatttacagttaacttgagtggttgcccacggaatagtaccttcacagaacacttgtatcgaattattcaacatcttgttccagcatcttttcgtctgcagatgactatagagaacatgaaccatttgaaattcattccccacaaagactacacagccaatcgcttggtcagtgggctcctccagctgcccagcaatacttcccttgtaatcgatgagactctcctggaacaggggcagctggataccccaggtgttcataatgtgacagccctgagcaacctcataacgtggcagaaggtggattatgacttcagctaccatcagatggaattcccctgcaatattaacgttttcattacttcggaggggaggtcactcctcccggcagactgccagattcacttacagccccagctaattccaccaaacatggaggagtacatgaacagccttctctcagcggtgctgccttccgtgctgaacaaattccgcatttatctaactcttttgagattcttggaatatagcatatctgatgaaataaccaaggcagttgaagatgactttgtggaaatgcggaagaacgaccctcagagcatcactgctgatgatcttcaccagctgctcgtggtggctcggtgtctgtctctcagtgctggtcagacaacgctgtcaagagaacgatggctgagagcaaagcagctagagtctttaagaagaacgaggcttcagcagcaaaaatgtgtgaatggaaatgaactttaaagatgtaatacctatgaagagtaatgggcaaactgtagccacataattgtaaaattcagatattcatttataccacattgttttataggtaatttctatcacaaaccagtgacatttcctgaaatcaagcctggtaacacctgatgtttatatgatattcagtaaggacttttaccttactgatttcatggagcttttgaagtttgttttataataattatataaattagtaatgatgtaaaaaaagtatttgatattaaaagtttaatattgataaaaaaaaaaaaaaaaaa

SEQ ID NO: 25517 - DNA, 1850 bp, Homo Sapiens
ggccgctgacatgttgaggactacgcgcggcccaggcctgggccccccgctgctccaggccgcgctgggccttgggcgggctgggtggcactggcctgcgggccgggcggcgagcggggggcgcgggcgggcctggctgcagcccacgggccgggagacgggtgtgcaggtgtacaacagcctcaccgggaggaaggaacccctaatcgtggcgcacgccgaagccgcctcctggtatagctgtggaccaactgtatatgatcatgcgcaccttggccatgcttgctcatatgttagatttgatatcattcgaaggatcctaaccaaggtttttggatgcagcatagtcatggtgatgggtattacagatgtagatgataaaatcatcaaaagagccaatgagatgaatatttcccccgcttccctcgccagtctttatgaggaagacttcaagcaggacatggcagccctgaaggttctcccacccacggtgtacctgagggtaaccgaaaatattcctcagataatttctttcattgaaggaatcattgctcgtgggaacgcttattcaacggcaaaaggcaatgtctacttcgatctgaagtctagaggagacaagtatggcaaattggtcggcgtggtccctggtccagtcggagagccagcggactctgacaagcgtcatgccagtgacttcgccctgtggaaggcggccaaaccccaggaggtgttctgggcctctccctggggacccgggaggccgggctggcacatcgagtgctctgccatcgctagtatggtatttggaagtcaactggatatccattcaggtgggatagatttagcttttccacatcatgagaacgaaattgcacagtgcgaagtctttcatcagtgcgagcagtggggaaattattttctgcattctgggcatttgcacgccaaaggcaaagaagaaaaaatgtccaaatcattaaagaactacattactattaaggactttctgaagaccttttcccccgatgtcttccggttcttctgcctgcggagcagctaccgctcagccatcgactacagtgacagcgccatgctccaagctcagcagctgctcctggggctgggctctttcctggaggacgcacgtgcctacatgaaggggcagctggcctgcggctccgtcagggaagcgatgctgtgggagaggctctccagcaccaagagggccgtgaaggcggccttggcagatgattttgacacacccagggtggttgatgccatcctgggccttgcacaccacgggaatggacagctcagggcgtccctgaaggaacctgaagggccgagaagtcctgctgtgtttggtgccatcatctcttactttgaacagttttttgaaactgttggaatttctctggcaaatcaacagtacgtttcaggagacggcagcgaggctaccttgcatggtgtggtggacgagctggtgcggttccggcagaaggtccggcagtttgcgctggccatgcccgaggccacgggggacgcccggcggcagcagctcctagaaaggcagcccctgctggaagcatgcgacaccctgcgccggggcctgactgcccacggcatcaacatcaaggacagaagcagtacaacatccacgtgggaactgctggatccaaggacaaaagaccaaaaatcagcgggctgaggatggagcacagccatgaacctgctcacgacaagatgcacccatgcttctcagggtcaaggctttatgttaaagcttcctgtcggggctgctaggtcagcattaaagtaaggcaaccaaaaaaaaaaaaaaaaaaaaaaaaaaa

SEQ ID NO: 25518 - DNA, 724 bp, Homo Sapiens
ctgaggaggagaagcaggggcaggagcggtgtggaagaggggcatttggtcgaggttgggtcaggtaaggacacggtggtaggcaaaggccagggggcaggtggggtgcctgggaggtccgtggtcagaggacgggtgctggtggggcctggagatggcggtgctgcctccaccctcctgagcctggaggcctgacaattgcatccgaaaaatccacagccaccatcgtgtcagcagcacgttgaccatggctcacgacatggggacgggcattcttgccgcttcctcagaatattaacgacagtcctcccgggagcccctagcaccttgggcctgcccccagctctctctcgtctttgggcagaactcgagtgctgctagacccttggccccgctcactgcgctgggccgcactgcacccatttcctcccagcaagggcggtccctggactcctctgacctgaactgcttccgagtttgcttctcagaaccaagaggggctggctctgcgccctgcctacctgtccaggggtgggggctgccctttgaagctatcaatctgggttttaagtgtggattcattattgacaacaccatgacattatgctgacatgaattatttgtatgtttttcaaattgtgctgtgataaccctggctgtcttcctgctcccatagtggataaaagcgtccgaaagaaaaaaaaagaaaaaaaaaaaaaaaaaa

SEQ ID NO: 25519 - DNA, 979 bp, Homo Sapiens
ctaaactctgggactggcgggcggtcaggcggcacagggggaatcccgggggcctaaggaggttgtcccagtttttgtcagcatctccaccccgaggtggtttgaactttgagccttttgtagtcctgatgaataatttcattttcctcaagtttatgacactcggaacgtcaagaactggaggtttgtgcaatttgagaccggtcggcactgtgcagagatcagagtactaagagacagagattaaaatggcttccagaggaaagacagagacaagcaaattaaagcagaatttagaagaacagttggatagactcatgcaacaattacaagatctggaggaatgcagagaggaacttgatacagatgaatatgaagaaaccaaaaaggaaactctggagcaactaagtgaatttaatgattcactaaagaaaattatgtctggaaatatgactttggtagatgaactaagtggaatgcagctggctattcaggcagctatcagccaggcctttaaaaccccagaggtcatcagattgtttgcaaagaaacaaccaggtcagcttcggacaaggttagcagagatggatagagatctgatggtaggaaagctggaaagagacctgtacactcaacagaaagtggagatactaacagctcttaggaaacttggagagaagctgactgcagatgatgaggccttcttgtcagcaaatgcaggtgctatactcagccagtttgagaaagtctctacagaccttggctctggagacaaaattcttgctctggcaagttttgaggttgaaaaaacaaaaaaatgacatggtgcagaagcttgtaacattgatcacattcttaatgtaaatggtgtctttcttctggggttttcagttattgcaaagaaatgaagagattctggaaatgcatcaataacctaagaaaaagcgacataaaaatataaaaaaaaaaaaaaaaaaaa

SEQ ID NO: 25520 - DNA, 1162 bp, Homo Sapiens
agctactgccttactgcccggagcgccgtcgtccccgaacctcccctgcttctccctttccttctgttccggtttctggtcgtaactcaagagcaaaccaccgtactgcaaaggaaccagatattgtgctcgcggttccaaaccgggcatgggcaccgaatgcttctcgataaatccccttatggtctctgagcattaaagaaagcaagggaggaaaacatgcgcccaagctcgttcgcaggaacatgttcgcgtgtctgcgcctgtgtgcgcagccagttttctggctgaggatcgctcgccaactacagacatcacccgcccaggacccggtgccacactcacccagaagacgaaactccacaggagcgagaagaggagtccatttctccgtcggctcggcacggcacggggatgcaggcccctgattcagtacgttctgtgaaagtggagcgagaagccaagacgtggatcgagaagccccgtggggcgggtctcagggtggcccaaaagacccctgttcacgccactaccagcctaactttaggaactgtcgtccacctggcttttattatactgccttaaacatattcacttttttgagactctagaaatttcacaagttttggggtagagcacactgggctttgggtgtgtttctcatgagggcactgacgctgaatggtgcagtgagaaaggacggtagaaaccactgcctttgcttttaccattgaagaaactgaggtcctgtgactttcccgaggtcatcggaatctgccttgcacaggagacttaaaatagttgccagcagataaaagaatgagcaaaaccacatctactccaatttgttaagtctgaaagaaagtaattgaggggggattcctctttggggaaatatttatttcctgcattgaaaatagtttaatgttagtaaacatataaaaagtattttaaattcaagttattctttatttcttatgttacataaggtactgaagttagccaaggttgcttttgtgttataatgatgcagctgctgccaaccagaagtacatttacggtctgtcagtaaagaaaacaaaaactgcctgttggtaaaaatctattagaaaatatttgtcagtaaatttgtccccataaaaaaaaaaaaaaaaaaaaaaaa

SEQ ID NO: 25521 - DNA, 2542 bp, Homo Sapiens
ggggaacgaaagatggcggcggaaacgctgctgtccagtttgttaggactgctgcttctgggactcctgttacccgcaagtctgaccggcggtgtcgggagcctgaacctggaggagctgagtgagatgcgttatgggatcgagatcctgccgttgcctgtcatgggagggcagagccaatcttcggacgtggtgattgtctcctctaagtacaaacagcgctatgagtgtcgcctgccagctggagctattcacttccagcgtgaaagggaggaggaaacacctgcttaccaagggcctgggatccctgagttgttgagcccaatgagagatgctccctgcttgctgaagacaaaggactggtggacatatgaattctgttatggacgccacatccagcaataccacatggaagattcagagatcaaaggtgaagtcctctatctcggctactaccaatcagccttcgactgggatgatgaaacagccaaggcctccaagcagcatcgtcttaaacgctaccacagccagacctatggcaatgggtccaagtgcgaccttaatgggaggccccgggaggccgaggttcggttcctctgtgacgagggtgcaggtatctctggggactacatcgatcgcgtggacgagcccttgtcctgctcttatgtgctgaccattcgcactcctcggctctgcccccaccctctcctccggcccccacccagtgctgcaccgcaggccatcctctgtcacccttccctacagcctgaggagtacatggcctacgttcagaggcaagccgactcaaagcagtatggagataaaatcatagaggagctgcaagatctaggcccccaagtgtggagtgagaccaagtctggggtggcaccccaaaagatggcaggtgcgagcccgaccaaggatgacagtaaggactcagatttctggaagatgcttaatgagccagaggaccaggccccaggaggggaggaggtgccggctgaggagcaggacccaagccctgaggcagcagattcagcttctggtgctcccaatgattttcagaataacgtgcaggtcaaagtcattcgaagccctgcggatttgattcgattcatagaggagctgaaaggtggaacaaaaaaggggaagccaaatataggccaagagcagcctgtggatgatgctgcagaagtccctcagagggaaccagagaaggaaaggggtgatccagaacggcagagagagatggaagaagaggaggatgaggatgaggatgaggatgaagatgaggatgaacggcagttactgggagaatttgagaaggaactggaagggatcctgcttccgtcagaccgagaccggctccgttcggaggtgaaggctggcatggagcgggaactggaaaacatcatccaggagacagagaaagagctggacccagatgggctgaagaaggagtcagagcgggatcgggcaatgctggctctcacatccactctcaacaaactcatcaaaagactggaggaaaaacagagtccagagctggtgaagaagcacaagaaaaagagggttgtccccaaaaagcctcccccatcaccccaacctacagggaaaattgagatcaaaattgtccgcccatgggctgaagggactgaagagggtgcacgttggctgactgatgaggacacgagaaacctcaaggagatcttcttcaatatcttggtgccgggagctgaagaggcccagaaggaacgccagcggcagaaagagctggagagcaattaccgccgggtgtggggctctccaggtggggagggcacaggggacctggacgaatttgacttctgagaccaacactacacttgacccttcacggaatccagactcttcctggactggcttgcctcctccccacctccccaccctggaacccctgagggccaaacagcagagtggagctgagctgtggacctctcgggcaactctgtgggtgtgggggccctgggtgaatgctgctgcccctgctggcagccaccttgagacctcaccgggcctgtgatatttgctctcctgaactctcactcaatcctcttcctctcctctgtggcttttcctgttattgtcccctaatgataggatattccctgctgcctacctggagattcagtaggatcttttgagtggaggtgggtagagagagcaaggagggcaggacacttagcaggcactgagcaagcaggcccccacctgcccttagtgatgtttggagtcgttttaccctcttctattgaattgccttgggatttccttctccctttccctgcccaccctgtcccctacaatttgtgcttctgagttgaggagccttcacctctgttgctgaggaaatggtagaatgctgcctatcacctccagcacaatcccagtgaaaaaggtgtgaagcacccaccatgttcttgaacaatcaggtttctaaataaacaactggaccatcaaaaaaaaaaaaaaaaaaaaaaaaaaaaaaaaaaaaaaaaaaaac

SEQ ID NO: 25522 - DNA, 2453 bp, Homo Sapiens
ggcccgcgcccggcctccgcggcgccgcctcccagcccagagcccagcgctcaggaaggtgcgggcgggggagaaagcaacaccattgtttttcaggcgcctccatttgcccccgagccgagccgtggctttccggatgatcgggagacgcggtctggacgggccgggaaaggagccgggcgcctgcggagaccccgcctcagcgagtacgcccggccgggcgggctgggaggatgaggacggctgccctggacttccgccgccacaggagggttttcggccggacgccgggagggagctccaggctgtgagctccatttgtaaaggtcttaataacaagaacagtgacttcggctccggagcttcaagatagtggcctgcttggcctgcccatctcggatctctccaggaggacccagccacccaagggtcgtcttctgctgctgacccccatcaaatcccatcatgcccacagccctgtgcccccgagtcttggctccgaaggaaagtgaggagcccaggaaaatgaggagcccacctggagagaaccctagcccccagggggagcttcccagccccgagtcctctcggcgtctcttccgccgtttccgctaccaggaggcggcgggcccccgggaggccctgcagcgcctctgggacctgtgcgggggctggctgcggcctgagaggcacaccaaggagcagattctggagctgctggtgctggagcagttcctggccatcctgccccgggagatccagagctgggtgcgggcgcaggagcctgagagcggagagcaggctgtggccgcggtggaggcactggaacgggagcccgggagaccctggcagtggctcaagcactgtgaagaccctgtggtgattgatgatggggacagccctctggaccaggagcaggagcagctgccggtagagccccacagcgaccttgcaaagaaccaggatgcccagcccataaccctggcacagtgcctggggctcccaagcagaccaccaagccagctcagcggggacccagttctgcaagatgctttccttcttcaggaagagaatgtgcgggacacacagcaggtgaccaccctccagctacccccgagtcgggtttctccattcaaggacatgattttatgcttctctgaagaggattggtcccttctagatcctgcccagactggcttctatggagagttcatcattggggaggattacggggtctcaatgcctccaaacgacctagctgcccagccagatctctcccagggagaggagaatgagccacgcgttccagagttgcaggatctccagggcaaagaagtgccccaggtctcctacttggactctccaagtctccagccattccaggtagaagaaagaaggaaacgtgaggagctgcaggtgccagagttccaggcctgcccacagacggtggtgcctcaaaacacctacccagctggcggcaacccgcgatctctagagaacagcctggatgaagaagtgaccatcgagatcgttctctccagctctggggacgaggactcccagcatggcccgtactgcacagaagagctggggagccccacagagaagcagcgcagcctccccgcctcccaccggagcagcaccgaggccggaggcgaggtgcagacctccaagaagtcctacgtgtgtccgaactgtgggaaaatcttccgctggagggtcaacttcatccggcatctgcggagccgcagggagcaggagaagccgcacgagtgctcggtgtgcggggagctgttcagcgacagcgaggacctggatgggcacctagagagccacgaggcccagaagccttaccggtgtggtgcctgcgggaagagcttccgcctgaactcccacctgctctcccaccggcggatacacctgcagccggacagactccagccggtggagaagagagagcaggcggcatccgaggacgcggacaagggtcccaaagagccgctggaaaacggcaaggccaaactgagcttccagtgctgtgagtgtgggaaggccttccagcggcacgaccacctggctcggcaccgcagccactttcacctgaaggacaaagcccggcccttccagtgccggtactgcgtcaagagcttcacgcagaactatgacctcctccgccacgagcgcctgcacatgaagcgccgttccaagcaggctctgaactcctactgagcctctccgcctggggcggcctcaccctggctggtgctgccccctcaccttggtactgatcagcgcccccacccaggacataccttccccaggatagagagcacacctccctcctgtccttgctctcaggtagtgagcgttcgggtggtgccatgggagcactctccctcccccaggtaatgaaagagtggccaagtgaaaaaaaaaaaaaaaaaaaaaaaaaa

SEQ ID NO: 25523 - DNA, 3619 bp, Homo Sapiens
gcaagctgtcccctgatgccatcccagggaagtggacctcccaggacagcctgctaggtatggagttctcgggccgagacgccagcggcaagcgtgtgatgggactggtgcctgccaagggcctggccacctctgtcctgctgtcaccggacttcctctgggatgtgccttccaactggacgctggaggaggcggcctcggtgcctgtcgtctacagcacggcctactacgcgctggtggtgcgtgggcgggtgcgccccggggagacgctgctcatccactcgggctcgggcggcgtgggccaggccgccatcgccatcgccctcagtctgggctgccgcgtcttcaccaccgtggggtcggctgagaagcgggcgtacctccaggccaggttcccccagctcgacagcaccagcttcgccaactcccgggacacatccttcgagcagcatgtgctgtggcacacgggcgggaagggcgttgacctggtcttgaactccttggcggaagagaagctgcaggccagcgtgaggtgcttggctacgcacggtcgcttcctggaaattggcaaattcgacctttctcagaaccacccgctcggcatggctatcttcctgaagaacgtgacattccacggggtcctactggatgcgttcttcaacgagagcagtgctgactggcgggaggtgtgggcgcttgtgcaggccggcatccgggatggggtggtacggcccctcaagtgcacggtgttccatggggcccaggtggaggacgccttccgctacatggcccaagggaagcacattggcaaagtcgtcgtgcaggtgcttgcggaggagccggaggcagtgctgaagggggccaaacccaagctgatgtcggccatctccaagaccttctgcccggcccacaagagctacatcatcgctggtggtctgggtggcttcggcctggagttggcgcagtggctgatacagcgtggggtgcagaagctcgtgttgacttctcgctccgggatccggacaggctaccaggccaagcaggtccgccggtggaggcgccagggcgtacaggtgcaggtgtccaccagcaacatcagctcactggagggggcccggggcctcattgccgaggcggcgcagcttgggcccgtgggcggcgtcttcaacctggccgtggtcttgagagatggcttgctggagaaccagaccccagagttcttccaggacgtctgcaagcccaagtacagcggcaccctgaacctggacagggtgacccgagaggcgtgccctgagctggactactttgtggtcttctcctctgtgagctgcgggcgtggcaatgcgggacagagcaactacggctttgccaattccgccatggagcgtatctgtgagaaacgccggcacgaaggcctcccaggcctggccgtgcagtggggcgccatcggcgacgtgggcattttggtggagacgatgagcaccaacgacacgatcgtcagtggcacgctgccccagcgcatggcgtcctgcctggaggtgctggacctcttcctgaaccagccccacatggtcctgagcagctttgtgctggctgagaaggctgcggcctatagggacagggacagccagcgggacctggtggaggccgtggcacacatcctgggcatccgcgacttggctgctgtcaacctggacagctcactggcggacctgggcctggactcgctcatgagcgtggaggtgcgccagacgctggagcgtgagctcaacctggtgctgtccgtgcgcgaggtgcggcaactcacgctccggaaactgcaggagctgtcctcaaaggcggatgaggccagcgagctggcatgccccacgcccaaggaggatggtctggcccagcagcagactcagctgaacctgcgctccctgctggtgaacccggagggccccaccctgatgcggctcaactccgtgcagagctcggagcggcccctgttcctggtgcacccaatcgagggctccaccaccgtgttccacagcctggcctcccggctcagcatccccacctatggcctgcagtgcacccgagctgcgccccttgacagcatccacagcctggctgcctactacatcgactgcatcaggcaggtgcagcccgagggcccctaccgcgtggccggctactcctacggggcctgcgtggcctttgaaatgtgctcccagctgcaggcccagcagagcccagcccccacccacaacagcctcttcctgttcgacggctcgcccacctacgtactggcctacacccagagctaccgggcaaagctgaccccaggctgtgaggctgaggctgagacggaggccatatgcttcttcgtgcagcagttcacggacatggagcacaacagggtgctggaggcgctgctgccgctgaagggcctagaggagcgtgtggcagccgccgtggacctgatcatcaagagccaccagggcctggaccgccaggagctgagctttgcggcccggtccttctactacaagctgcgtgccgctgagcagtacacacccaaggccaagtaccatggcaacgtgatgctactgcgcgccaagacgggtggcgcctacggcgaggacctgggcgcggactacaacctctcccaggtatgcgacgggaaagtatccgtccacgtcatcgagggtgaccaccgcacgctgctggagggcagcggcctggagtccatcatcagcatcatccacagctccctggctgagccacgcgtgagcgtgcgggagggctaggcccgtgcccccgcctgccaccggaggtcactccaccatccccaccccaccccaccccacccccgccatgcaacgggattgaagggtcctgccggtgggaccctgtccggcccagtgccactgccccccgaggctgctagacgtaggtgttaggcatgtcccacccacccgccgcctcccacggcacctcggggacaccagagctgccgacttggagactcctggtctgtgaagagccggtggtgcccgtgcccgcaggaactgggctgggcctcgtgcgcccgtggggtctgcgcttggtctttctgtgcttggatttgcatatttattgcattgctggtagagacccccaggcctgtccaccctgccaagactcctcaggcagcgtgtgggtcccgcactctgcccccatttccccgatgtcccctgcgggcgcgggcagccacccaagcctgctggctgcggccccctctcggccaggcattggctcagcccgctgagtggggggtcgtgggccagtccccgaggagctgggcccctgcacaggcacacagggcccggccacacccagcggccccccgcacagccacccgtggggtgctgcccttatgcccggcgccgggcaccaactccatgtttggtgtttgtctgtgtttgtttttcaagaaatgattcaaattgctgcttggattttgaaatttactgtaactgtcagtgtacacgtctggaccccgtttcatttttacaccaatttggtaaaaatgctgctctcagcctcccacaattaaaccgcatgtgatctccaaaaaaaaaaaaaaaaaaaa

SEQ ID NO: 25524 - DNA, 2103 bp, Homo Sapiens
ctcagactacaggtgtgagccaccatgcccggccttctcctttaagtattgttggcctcactttcccaactaaaatgggagctcactaagaacaaaggctgttccttcatcttatacttagtaccttgaaagggcctaccacacagtaggtggtcacgtgttagtctgttaggtcttttggattttctaggtagacaatcacatcgattgcaaataatagtctttctcttttcagtctttgtatttcttttttcttgttttattgcattgactgagctcatcagtgaaatgttgaatagtagcaatgatggagggcaccccaatcttattatgctcaatactcattaatttatgcaataggaatgtaaagtacctactgcaggtcaaatcctgtgcctggggataacagtgtaacacatttgagatcttttcctgtccactgaaatgcctgagcagtagcagtatttcagtaaacacgacaatgctgagaatatcaccaaattctccagacttgctgaagtgttcctttgggatcctggttcccaaaaagtatggacataggtccctgctggtggccccaggttccaggccatcagtaaggttgggggctgcagactggaccactgcaccgtggagcagaggtgaagaaaccaagacgcagagaggccaagccccttgccttgggtcacacagccaaaggaggcagagccagaactcacaaccagatccagaggcaacagggacatggccacctgggacgaaaaggcagtcacccgcagggccaaggtggctcccgctgagaggatgagcaagttcttaaggcacttcacggtcgtgggagacgactaccatgcctggaacatcaactacaagaaatgggagaatgaagaggaggaggaggaggaggagcagccaccacccacaccagtctcaggcgaggtcatcatcatctgcttggtggttctggatgccctcctggtgcttgctgagctcatcctggacctgaagatcatccagcccgacaagaataactatgctgccatggtattccactacatgagcatcaccatcttggtcttttttatgatggagatcatctttaaattatttgtcttccgcctggagttctttcaccacaagtttgagatcctggatgccgtcgtggtggtggtctcattcatcctcgacattgtcctcctgttccaggagcaccagtttgaggctctgggcctgctgattctgctccggctgtggcgggtggcccggatcatcaatgggattatcatctcagttaagacacgttcagaacggcaactcttaaggttaaaacagatgaatgtacaattggccgccaagattcaacaccttgagttcagctgctctgagaaggaacaagaaattgaaagacttaacaaactattgcgacagcatggacttcttggtgaagtgaactagacccggaccagctcccctcaaaaagaagacactgtctcatgggcctgtgctgtcacgagaggaacagctgcccctcctgggccgcttggtgagaggtttggtttgatacctctgcctccctcctgccagcatggattctgggtggacacagccttgtggaaggtccagtaccaccaagagctgcccatccactcccaccccacactgtatcaaatgtatcacattttctcatgttgaacactttagccttaattgaaaatgagcaacaaagctggacaattgctagttgtatataaaatttaatctcaccgaatgtacagttttcaaatttcacgtgtatattaaggaactgatgcatctgagcattctgaaagaaagaaaaagaagctactttagctgccaccccattctagaaaagtctcttattttcaagctgttctaaatagcttcgtctcagtttccccaaaaggggtacccaggcccctcctctgtgtgccccagctgcatcagccagcttctaggtggctccattgttttctgccacctgacaacatttttcctcaattactgtacaactactgtataaaataaaacaactactgtataaaataaactctctcttttccctggaaaaaaaaaaaaaaaaaa

SEQ ID NO: 25525 - DNA, 889 bp, Homo Sapiens
ggatgaggaggatgtgggccacgcaggggctggcggtggcgctggctctgagcgtgctgccgggcagccgggcgctgcggccgggcgactgcgaagtttgtatttcttatctgggaagattttaccaggacctcaaagacagagatgtcacattctcaccagccactattgaaaacgaacttataaagttctgccgggaagcaagaggcaaagagaatcggttgtgctactatatcggggccacagatgatgcagccaccaaaatcatcaatgaggtatcaaagcctctggcccaccacatccctgtggagaagatctgtgagaagcttaagaagaaggacagccagatatgtgagcttaagtatgacaagcagatcgacctgagcacagtggacctgaagaagctccgagttaaagagctgaagaagattctggatgactggggggagacatgcaaaggctgtgcagaaaagtctgactacatccggaagataaatgaactgatgcctaaatatgcccccaaggcagccagtgcacggaccgatttgtagtctgctcaatctctgttgcacctgagggggaaaaaacagttcaactgcttactcccaaaacagcctttttgtaatttattttttaagtgggctcctgacaatactgtatcagatgtgaagcctggagctttcctgatgatgctggccctacagtacccccatgaggggattcccttccttctgttgctggtgtactctaggacttcaaagtgtgtctgggatttttttattaaagaaaaaaaatttctagctgtccttgcagaattatagtgaataccaaaatggggttttgccccaggaggctcctaaaaaaaaaaaaaaaaaaaaaaaaaaaaaaa

SEQ ID NO: 25526 - DNA, 2308 bp, Homo Sapiens
ttagagacgagttttttttttttttctattacttttccccccccctaactaacggactattattgttgttgttttaaatttagctcttagggcttagctatttgggttttcttgcggtgtccggctcccgtctccctggctcccccgcccgccctgcggccccagcgcccctcgctctcatccagcccgcgaggagtgcgggcgccgcgccgcctttaaagcgaggccagggagcgaggcggtgaccggccgagatccggccctcgcctcctccctcggtggcgctagggctcccggcctctcttcctcagtgcgggcggagaagcgaaagcggatcgtcctcggctgccgccgccttctccgggactcgcgcgcccctccccgcgcgcccacccacccagtccggctggactgcggcagccgcgcggctcaccccggcaggatgttcgcagccgggctggctcccttctacgcctccaacttcagcctctggtcggccgcttactgctcctcggccggcccaggcggctgctccttccccttggaccccgccgccgtcaaaaagccctccttctgcatcgcagacattctgcacgccggcgtgggggatctgggggcggccccggagggcctggcaggggcctcggccgccgccctcaccgcgcacttgggctcggttcacccgcacgcctctttccaagcggcggccagatccccgcttcgacccaccccagtggtggcgccctccgaagtcccggctggcttcccgcagcggctgtctccgctctcagccgcctaccaccaccatcacccgcaacaacaacagcagcagcaacagccgcagcagcaacagcctccgcctccgccccgggctggcgccctgcagcccccggcctcggggacgcgagtggttccgaacccccaccacagtggctctgccccggccccctccagcaaagacctcaaatttggaattgaccgcattttatctgcagaatttgacccaaaagtcaaagaaggcaacacgctgagagatctcacttccctgctaaccggtgggcggcccgccggggtgcacctctcaggcctgcagccctcggccggccagttcttcgcatctctagatcccattaacgaggcttctgcaatcctgagtcccttaaactcgaacccaagaaattcagttcagcatcagttccaagacacgtttccaggtccctatgctgtgctcacgaaggacaccatgccgcagacgtacaaaaggaagcgttcatggtcgcgcgctgtgttctccaacctgcagaggaaaggcctggagaaaaggtttgagattcagaagtacgtgaccaagccggaccgaaagcagctggcggcgatgctgggcctcacggacgcacaggtgaaggtgtggttccagaaccggcggatgaagtggcggcactccaaggaggcccaggcccaaaaggacaaggacaaggaggctggcgagaagccatcaggtggagccccggctgcggatggcgagcaggacgagaggagccccagccgttctgaaggcgaggctgagagcgagagcagcgactccgagtccctggacatggcccccagcgacacggagcggactgaggggagtgagcgttctctgcaccaaacaacagttattaaggccccggtcactggcgccctcattaccgccagcagtgctgggagtggtgggagcagcggcggcggcggcaatagtttcagcttcagcagcgccagcagtcttagtagcagcagcaccagtgcgggttgcgccagcagccttggcggcggcggcgcctcggagcttctccctgcaacacagcccacagccagcagcgctcccaaaagccccgagccagcccaaggcgcgcttggctgcttatagactgtactagggcggaggggatccgggccttgcgtgcagcctcccaaccatgggctgggttttgtgcttactgtatgttggcgacttggtagggcaggagacgcagcgtggagcctacctcccgacattcacgcttcgccccacgctgctccgactggctgcagcggacactgcccaaagcagaggggagtctcagtgtcctgctagccagccgaacacttctctccggaagcaggctggttcgactgtgaggtgtttgactaaactgtttctctgactcgccccagaggtcgtggctcaaaggcacttaggacgccttaaatttgtaaataaaatgtttactacggttaaaaaaaaaaaaaaaaaaaaaaaaaaaaaaaaaaaaaaaaaaaaaaaaaa

SEQ ID NO: 25527 - DNA, 2362 bp, Homo Sapiens
tccagttccgcgactcgcgggcccctcctaatgtcagggacttaagattggggctcgctgggacctggtggtccggttatgggaaaagaagcctcgtgggagagcagagcctgaaaaaggactgcgcggactgacttcttggctactgaaagcaaagctccactgttccaggcacgattctgccttctctcaaatggcataactcaggactctgcaaattcccagaaacaggaggaaaaatgaccacattcaaggagggactgaccttcaaggatgtggctgtggtcttcactgaggaggagctggggctgctggaccctgtccagaggaatctgtaccaagatgtgatgctggagaacttcaggaacctgctgtcagtggggcatcaccccttcaaacatgatgtattccttttagaaaaggaaaaaaagcttgatataatgaagacagcaactcaaagaaaagggaaatcagcagacaagatccaaagtgaggtggagactgttccagaagcaggacgacatgaagagctttactgggggcaaatctggaaacagattgcaagtgatttaatcaagtatgaagactctatgataagtatttctcggttccccagacaaggtgatttgtcctgccaggttagggcaggactatatacaactcacacaggacagaaattttaccaatgtgatgagtacaaaaaatccttcactgatgtcttcaactttgatcttcatcaacagttacactcaggagagaagtctcatacatgtgatgagtgtggaaaaagcttctgttacatctcagcccttcatattcatcaaagagtccacatgggagagaaatgctataagtgtgacgtgtgtggtaaggaatttagtcagagctcacatcttcaaactcatcagagagtccacactgtagagaaaccattcaaatgtgtggaatgtgggaaaggcttcagtcgtagatcaacacttactgtacattgcaaattacactcaggagagaaaccttacaattgtgaggaatgtggaagggccttcatacatgcttcccatcttcaggaacatcagagaattcatactggggagaaaccattcaaatgtgatacatgtggtaagaacttccgtcgtagatcagcacttaataatcattgcatggtccacacaggagagaaaccatacaaatgtgaggactgtggtaagtgtttcacttgtagctcaaaccttcgtatccatcaaagggtccacacaggagagaaaccttacaagtgtgaagaatgtggtaagtgctttattcagccttcacaatttcaggcccatcggagaatccacactggagagaaaccatacgtatgtaaagtgtgtggtaagggtttcatttacagttcaagttttcaggcccatcagggagtccacactggagagaagccatacaaatgcaatgagtgtgggaagagcttcagaatgaaaattcattatcaagtgcatctggtagtccacacaggggaaaaaccctataaatgtgaagtatgtggtaaagccttccgtcagagttcatatcttaaaatccatctgaaagcacatagtgtacagaaaccttttaagtgtgaagagtgtgggcagggcttcaatcagagctcacgacttcagattcaccagctgatccataccggtgagaaaccatacaaatgtgaagagtgcggaaagggatttagtcgtagagcagatcttaaaattcattgtaggatccacacaggggagaaaccatataattgtgaggagtgtgggaaggtcttcagtcaggcctcgcatcttctaacccatcagagagttcacagtggggaaaaaccatttaaatgtgaagagtgtgggaagagcttcagtcggagtgcacaccttcaagcccatcaaaaagtccacactggagaaaagccatacaaatgtggggagtgtggaaagggcttcaagtggagcttgaaccttgacatgcatcagagggtgcacacaggagaaaaaccctatacatgtggggagtgtgggaagcacttcagtcaggcctcaagtctccaacttcatcagagtgtccacacaggagagaaaccatacaaatgtgatgtatgtggtaaagtcttcagtcggtcttcacaattacagtatcataggcgagttcacactggggaaaaaccttacaaatgtgagatatgtggtaagaggttcagctggcgatcaaatcttgtaagtcatcacaaaattcatgctgctggtacattttatgaaaatgatgagaatagtaagaacatcagagagttgtcagagggaggaagttctacaaggtgattaaaaaaaaaaaaaaaaaa

SEQ ID NO: 25528 - DNA, 1138 bp, Homo Sapiens
cccttccctgcccgacacccagaccgaccttgaccgcccacctggcaggagcaggacaggacggccggacgcggccatggccgagctcccggggccctttctctgcggggccctgctaggcttcctgtgcctgagtgggctggccgtggaggtgaaggtacccacagagccgctgagcacgcccctggggaagacagccgagctgacctgcacctacagcacgtcggtgggagacagcttcgccctggagtggagctttgtgcagcctgggaaacccatctctgagtcccatccaatcctgtacttcaccaatggccatctgtatccaactggttctaagtcaaagcgggtcagcctgcttcagaacccccccacagtgggggtggccacactgaaactgactgacgtccacccctcagatactggaacctacctctgccaagtcaacaacccaccagatttctacaccaatgggttggggctaatcaaccttactgtgctggttccccccagtaatcccttatgcagtcagagtggacaaacctctgtgggaggctctactgcactgagatgcagctcttccgagggggctcctaagccagtgtacaactgggtgcgtcttggaacttttcctacaccttctcctggcagcatggttcaagatgaggtgtctggccagctcattctcaccaacctctccctgacctcctcgggcacctaccgctgtgtggccaccaaccagatgggcagtgcatcctgtgagctgaccctctctgtgaccgaaccctcccaaggccgagtggccggagctctgattggggtgctcctgggcgtgctgttgctgtcagttgctgcgttctgcctggtcaggttccagaaagagagggggaagaagcccaaggagacatatgggggtagtgaccttcgggaggatgccatcgctcctgggatctctgagcacacttgtatgagggctgattctagcaaggggttcctggaaagaccctcgtctgccagcaccgtgacgaccaccaagtccaagctccctatggtcgtgtgacttctcccgatccctgagggcggtgagggggaatatcaataattaaagtctgtgggtaccaaaaaaaaaaaaaaaaaa

SEQ ID NO: 25529 - DNA, 1673 bp, Homo Sapiens
gcggagcgggaggcggaggcgccgcgtaggcccgggaggccgggccggccgggctgcgagcgcctgccccatgcgccgccgcctctccgcacgatgttcccctcgcggaggaaagcggcgcagctgccctgggaggacggcaggtccgggttgctctccggcggcctccctcggaagtgttccgtcttccacctgttcgtggcctgcctctcgctgggcttcttctccctactctggctgcagctcagctgctctggggacgtggcccgggcagtcaggggacaagggcaggagacctcgggccctccccgcgcctgccccccagagccgccccctgagcactgggaagaagacgcatcctggggcccccaccgcctggcagtgctggtgcccttccgcgaacgcttcgaggagctcctggtcttcgtgccccacatgcgccgcttcctgagcaggaagaagatccggcaccacatctacgtgctcaaccaggtggaccacttcaggttcaaccgggcagcgctcatcaacgtgggcttcctggagagcagcaacagcacggactacattgccatgcacgacgttgacctgctccctctcaacgaggagctggactatggctttcctgaggctgggcccttccacgtggcctccccggagctccaccctctctaccactacaagacctatgtcggcggcatcctgctgctctccaagcagcactaccggctgtgcaatgggatgtccaaccgcttctggggctggggccgcgaggacgacgagttctaccggcgcattaagggagctgggctccagcttttccgcccctcgggaatcacaactgggtacaagacatttcgccacctgcatgacccagcctggcggaagagggaccagaagcgcatcgcagctcaaaaacaggagcagttcaaggtggacagggagggaggcctgaacactgtgaagtaccatgtggcttcccgcactgccctgtctgtgggcggggccccctgcactgtcctcaacatcatgttggactgtgacaagaccgccacaccctggtgcacattcagctgagctggatggacagtgaggaagcctgtacctacaggccatattgctcaggctcaggacaaggcctcaggtcgtgggcccagctctgacaggatgtggagtggccaggaccaagacagcaagctacgcaattgcagccacccggccgccaaggcaggcttgggctgggccaggacacgtggggtgcctgggacgctgcttgccatgcacagtgatcagagagaggctggggtgtgtcctgtccgggaccccccctgccttcctgctcaccctactctgacctccttcacgtgcccaggcctgtgggtagtggggagggctgaacaggacaacctctcatcacccccacttttgttccttcctgctgggctgcctcgtgcagagacacagtgtaggggccatgcagctggcgtaggtggcagttgggcctggtgagggttaggacttcagaaaccagagcacaagccccacagagggggaacagccagcaccgctctagctggttgttgccatgccggaatgtgggcctagtgttgccagatcttctgatttttcgaaagaaactagaatgctggattcttaaaaaaaaaaaaaaaaaa

SEQ ID NO: 25530 - DNA, 2615 bp, Homo Sapiens
aggcagtgagcgagcaggcggcaggcacggtccgtgcggagcaggcgagcgagcgggaagacgcagccaccttcctcaccagccagcccacagcggtttgttccccttctcgggagtgcgccaatgcctgggccgacccaaaccctgtccccaaatggcgagaacaacaacgacatcatccaggataataacgggaccatcattcctttccggaagcacacagtgcgcggggagcgttcctacagttggggaatggcggtcaatgtgtattctacctcgataacccaagagactatgagcagacatgacatcattgcatgggttaatgacatagtatctttaaactacacaaaagtggaacagctttgttcaggagcggcctattgccaattcatggacatgctcttccctggctgcattagtttgaagaaagtaaaatttcaagcaaagctggaacatgaatatattcacaattttaaacttctgcaagcatcatttaagcgaatgaacgttgataaggtaattccagtggagaagctagtgaaaggacgtttccaggacaacctggattttattcaatggtttaagaaattctatgatgctaactacgatgggaaggagtatgatcctgtagaggcacgacaagggcaagatgcaattcctcctcctgaccctggtgaacagatcttcaacctgccaaaaaagtctcaccatgcaaactcccccacagcaggtgcagctaaatcaagtccagcagctaaaccaggatccacaccttctcgaccctcatcagccaaaagggcttcttccagtggctcagcatccaaatccgataaagatttagaaacgcaggtcatacagcttaatgaacaggtacattcattaaaacttgcccttgaaggcgtggaaaaggaaagggatttctactttgggaagttgagagagatcgagctactctgccaagaacacgggcaggaaaatgatgacctcgtgcagagactaatggacatcctgtatgcttcagaagaacacgagggccacacagaagagccggaagcagaggagcaagcccacgaacagcagcccccgcagcaggaagagtactgacccaccccggctgctcttgacacttccattgtgtgtgggaacgtttcttctggagaattggaacatgtgtggccccaagctcaacagaaaccagttgttcccaatctgccgttaccatcaacgcactgttgcatatgccagccactgcgcttggttcccattttctttgccaaggtgtattagcggacggccctctggccacctacccgagagatcgtagggtcacatacatccaacttcaccacttggctgcttgagattggttctgctcttttcttcatttctttccagaacaactctttcccaccccaacaccactgccaccacccctctttttatcctggtgtgaaacaatggtaatttgatatatggtatttatattggcatttttcaacccagtgtcactagatgtcacacacatttgtggtgctttgatgtttgcaagtctaacctctgaacataaatttggtcaaataattggaacaaagggaaacagatacttgatatgaaagccataatgacggtgacttgtgtcgtgggggaaaacataaggtcattttctccctctactcacaatactaaagggaaaaaatggattcaaagctaggatttcagggcccagcagtgttcctccatcagcatgttagacaactacacagtatgttgttagttttgaaagacattcactcaaggaaaacaccatctcaactttgcccgctcaccatgtcccttgcccccatgtagcccatttcccaggttatgctcttttctttctcagggtcctctttggtgggcagccactccccgagatgttgccatcagttttctgcagtccaaagagggtatggttaggtacgggtcttcctgcctcattcctcttcctctttgtgtaggtttcagccacaaaactgtcattcactctaggggacccctactaaagggtaacttcaggtgtgcagccctgagctccaaggctctgcaccatgccacacacttgctgtaaggctagaagtgaagaccttattaataggagcataattgcgagggagaatcatggttctgcagtctggtgtagacactggaataacagcacagaaaaatctatgactcccaatatcttctagaataaagaattttccctctttaacacaagggccctccttgtcattgaccttagctaaaccatggcaattcataaatagaggaaacattaatgaattaaaagcattccttattttttaactaatatttgtacattttcttagtctctttccaagtctttgcctcttttttttctttatttttattttttcctttgacagatggtatcccttcctggatcattcatttcaccttggtttctaactttaggtttactttcacttgttatttgacttagcaggtgcaacaaaaacaagaaacaaatgtgcccaccccactttccgcttaactgaaaagcttaaaataaatttctgaattatgtatcctgaaaaaaaaaaaaaaaaaaa

SEQ ID NO: 25531 - DNA, 1742 bp, Homo Sapiens
caccgcgcaagcgcatcctggcctttcttcagtccccacgtgcgatccttcccggcaactttttcgagaaaaatgcccaaattcaaggcggcccgtggggtggggggtcaggaaaaacatgcgcccctggccgatcagatcctggctgggaatgcggtgcgggcgggggtccgggagaagcggcggggtcgcgggacaggagaagcggaggaagagtatgtggggccccggctgagccgacggattttgcagcaagcacggcagcaacaggaggaactcgaggccgagcatgggactggggacaagcccgcggcgccgcgggaacgcaccacgcggctgggtccaagaatgcctcaggatggatcagatgacgaggacgaggagtggcccaccctggagaaggctgccacaatgacagcagcgggccatcatgcagaggtggttgtggaccctgaggatgagcgtgccatagagatgttcatgaacaagaaccctcctgccaggcgcaccctggctgacatcatcatggagaagctgactgagaagcagacagaggttgagacagtcatgtcagaggtgtcgggcttccctatgccccagctggacccccgggtcctagaagtgtacaggggggtccgggaggtattatctaagtaccgcagtggaaaactgcccaaggcatttaagatcatccctgcactctccaactgggatcaaatcctctacgtcacagagccggaggcctggactgcagctgccatgtaccaggccaccaggatttttgcctctaacctgaaggaacgcatggcccagcgcttctacaaccttgtcctgctccctcgagtacgagatgacgttgctgaatacaaacgactcaacttccatctctacatggctctcaagaaggcccttttcaaacctggagcctggttcaaagggatcctgattccactgtgcgagtctggcacttgtaccctccgggaagccatcattgtgggtagcatcatcaccaagtgctccatccctgtgttgcactccagtgcggccatgctgaaaattgctgagatggaatacagcggtgccaacagcatcttcctgcgactgctgctggataagaagtatgcactgccttaccgggtgctggatgccctagtcttccacttcctggggttccggacagagaagcgtgaactgcctgtgctgtggcaccagtgcctcctgactttggtccagcgctacaaggccgacttggccacagaccagaaagaggccctcttagaactgctccggctgcagccccatccacagctatcgcccgaaatcaggcgtgagcttcagagtgcagtcccccgcgatgtggaagatgttcccatcaccgtggagtgaggaaaacagtcagctgtcctggccaaaggggtttggaaggacaccaagacccccgttggtgactgaagatgacactgagctttaatggctgaagacccagatcagggcagtgacagatcacagggacatctgtggctcccagtccaggacaggaaggactgagggtctggctggttccctcttccattctaggcccttatccctgtttagttctgagagccaacttgagataccatatgctagcattcccagtccccagctggggcttggtgtgagtactttttctatggctattgtgtcaggtcactgtggataaaggcaaagacagatatttattgaaaaaaaaaaaaaaaaaa

SEQ ID NO: 25532 - DNA, 1546 bp, Homo Sapiens
ggcacgaggcaggagtttctcgggcccagctgtggctgctgccggggagccccaagccttggcgggtccttgcggcgaataggagtctggtcaggcgtcaggctagtccgacgaagagtgggtgtgatcagcactggaaaagatgcctgcccctgctgccacatatgaaagagtagtttacaaaaacccttccgagtaccactacatgaaagtctgcctagaatttcaagattgtggagttggactgaatgctgcacagttcaaacagctgcttatttcggctgtgaaggacctgtttggggaggttgatgccgccttacctttggacatcctaacctatgaagagaagaccttgtcagccatcttgagaatatgtagcagtggtcttgtcaaattgtggagctctttgaccctgttaggatcctataaaggcaaaaaatgtgctttccgggtgattcaggtttctccatttcttcttgcattatctggtaatagtagggaactagtattggattgaatgaatagtcttccattttggaaacgttcatccactctcatatttattttttggtgcctgcatgtttgaagactgaagcaggctaaaagctcttgatgaaatttgagggtgctgaagatgttcccactaatttccagccatcacctttggtggggtgggcttcggaggacagtctgtctgaacctgccagtgctgaccctgcagcactttcagcatatgcacatcaaagttggagaccgcgctgaacttaggagggccttcacacagactgatgtggctaccttctcagaattaacaggggatgtcaatcctttgcatttgaatgaagactttgcaaaacacaccaagtttggaaatacaattgtacatggagttttgatcaacggacttatctcagctctcctaggaactaaaatgccagggccaggctgtgtatttctttcccaggaaattagctttccagcccctttatatattggagaagttgttttagcttctgcagaagtgaaaaagctgaagcggttcattgctattattgcagtgtcatgttctgtaatagaaagtaaaaagactgttatggaaggctgggttaaagttatggttccagaagcttccaaatcctgaaatagatgttttaaagatgcaacctcaaacaccaatgctgttgttaaagagcctatggggaattgctgctctttaccaaagaatggttgataggcccagaagcccatcttagttaggggaagggagcaggaagagggttgttcaaatgcccactttccagtttggccttatgcttcatgcagacttgagtgtatgcaggatttcattatctgcctgggttttttgtttgttttttgttttttaattcaagaagtaggctgggcccggtggctcatgcctgtaatcctggcactttgggaggctgcggcaggcggatcacttgaggtcaggagtccaagaccagcctggccaacatggtgaaaccccatctctaccaaaaaaaaaaaaaaaaaaaaaaaaaaaaaa

SEQ ID NO: 25533 - DNA, 965 bp, Homo Sapiens
cacggttcagcagatggtttttatgcttctttcaaacctggccttgtcgcatgactgtaaaggagtaattcagaagagtaacttcttacagaacttcctctctctagcattgccaaaaggaggaaataaacatctaagtaatctgactattctttggttgaagttactcctgaatatatcatctggagaagatgggcaacaaatgattctgaggcttgatggctgtctagacttactaacagagatgagcaaatacaagcacaagagcagccctttattgcctcttcttatctttcataatgtttgcttcagtcctgcaaataaacccaagatcctggctaatgaaaaagtcattactgtgcttgctgcctgtctggaaagtgagaatcaaaatgctcagaggattggagcagctgccctttgggctctgatttacaattatcagaaggcaaaaacagctttgaaaagcccatcagtaaaaagaagagtggatgaagcatactccttagcaaagaaaactttcccaaactcagaagcaaaccctctaaatgcctattatttgaaatgtcttgaaaacctcgtgcagctccttaattcttcctgagtgccatgggatgctacaccttgaagctgacagtcatcaacaggggagctaaagttgaagccagctgtgtgtagcagctgttacctgaagacgtgctacctctctacaaagtgttgatccccttctttcccatgagagagagaactggtgatactccaacaccgtccagttgtggcagctctccagaagtaatagcagctgacaactttctgtgccttttcctttctgttgaaaaggcatagaaagttctgggaacataaacatttttacccttttctatgccatttattttgtaaaaatcctatttaacagttatttaataaaacaatatttttagaaactaaaaaaaaaaaaaaaaaaa

SEQ ID NO: 25534 - DNA, 2244 bp, Homo Sapiens
gctgcatctgaggcggacgccgcagtgtagggcacaccctgagggtagcgagagacgtgacaggaccgagcagctgggggctgcagcctgctctgtccccaccgatcccagagagaggctgtgagtctggatctgggcgttcgcaccctgagagagggggtcaaagctcccctgcggccccgaggaagaagagcaaggttgaggacagcctcgggtcaccagagtagtttggaggcaggcctgcaggcgcgtccccgctcctcagctccaagctgacgtatctacacctgccggcgggcattaagatggctggttatgccactactcccagccccatgcagacccttcaggaggaagcggtgtgtgccatctgcttggattacttcaaggaccccgtgtccatcagctgtgggcacaacttctgccgagggtgtgtgacccagctgtggagtaaggaggacgaggaggaccagaacgaggaggaagatgaatgggaggaggaggaggacgaggaagcggtgggggccatggatggatgggacggctccattcgagaggtgttgtatcgggggaatgctgacgaagagttgttccaagaccaagatgacgatgaactctggctcggtgacagtggtataactaattgggacaacgtagactatatgtgggacgaggaggaagaagaagaagaggaagatcaggactattacctaggaggcttgagacctgacctgagaattgatgtctaccgagaagaagaaatactggaagcatacgatgaggacgaagatgaagagctgtatcctgacatccacccgcctccttccttgccccttccagggcagttcacctgcccccagtgccgaaagagctttacacgtcgcagctttcgtcccaacttgcagctggccaacatggtccagataattcgccagatgtgccccactccttatcggggaaaccggagtaatgatcagggcatgtgctttaaacaccaggaagccctgaaactcttctgtgaggtggacaaagaggccatctgtgtggtgtgccgagaatccaggagccacaaacagcacagcgtgctgcctttggaggaggtggtgcaggagtaccaggaaataaagttggaaacaactctggtgggaatacttcagatagagcaagaaagcattcacagcaaggcctataatcagtaagatgtgtgaaaagttgggtagccacaggaggtgttcattaaggatatgattccatttatatagctatttctattgcataaccaggacagttttattgttttgaggtcaatgttcttttaaaatttgattttctgtaagaagaggctttttggcccagaaagccttacttattttacatcttccagtttgtccatcccatgagttagagttcgtcttgactctgcaagctagaatcaaagaattatgaaagtaagatcatttagatttgaccaagggcaccattaaatggtgtcaggttttaggaagcagacgggtgtataaaaagaaaatgaacaaagatttcacttattggggatcaggcataactggatgcctggattgtcctgccacccagctgccaccaataaaatcattcatcactctgcaagagggaccagatgcttccatcatcagtactccttgtttttctgttatctcctttgaggtagctaaaaatggcagccaaaaaaaaatgttgaggcttttctcaagtatatactcatgttattttgcagaagatagggtcaacttcttcagttgagttatctgaaagtgttgggcagtgacaccatgccaaacactgttaaattcatgccattaaaaacagtggagtgttctgcaaagcccgattctctgcagctttaagactggacagtattgaaatattcacaggaatcttccaagccgtgaaagcttaatattaaacagcccttttaattgcaaaggagaaaaaaatggagacacttgtgaaaccttgcattctgagtgctgccacaaataaattaaggaattccagaatttcttcatctacttctgcagtcttaactctgaattaatgactgtatatatcaaacttcagatcttaaaaaacatcagctcgcaagaggctgaggcaggagaatgacatgaacctgggaggcggagcttgcagtaagccgagactgagccactgcactccagcctgggcaatagagcaagactccatctcaaaaaaaaaaaaaaaaaa

SEQ ID NO: 25535 - DNA, 1003 bp, Homo Sapiens
cgcgcgcgctcgcgcaccacgcgccccgcgcggcccgcccggatcgtggcctctcgagagcaagacatgggaaagcggaaccaccaaaaggagtgatgatcaacgatctcatgataaatctggatgctagttctcatgcctcaggacatcctactgggaacgacacaccagctcctgggatcagactttcatctacttaggacccctctttgcccagactactaaagccagtcttcactagccacgaatggctacccaaaggaaacacttggtgaaagattttaatccttacattacctgctatatctgtaaagggtatctgatcaagccaacaacagtgacggaatgcctccatacatctgcagaatcctactggatgtccacttggatgtcctgaagccacctgaaactcagcatatctacgaatgatcaaatgggatgccagcactcagttatccaagcaagaaatatgctccatgcttgactctttaccctcactaacaaaactgggcaaagtcctgctggtctctctctttaatacttctcaaatctgtccctttagtttcatccctctgttactgttctcattcagattcttattacatctcaccaaagccactgcagcacattcttaactgtgtccaagtggtaataattaaaaacagcttactgtctttatcattatcactcttaacccaccctaaaatttcctaaaggtatcccgttgacctcaggatacattaaagctacttagtggtgactggtttctgcctaccacttcctcccctaccacctaacactcacacatacaaatacttggttcaactgtttgctctccttgaaatgaatgcctcctctgtgcccagctagcagttacccatcctttaaaactcatcccctctaagatgtgccctaccacctgcagatttgggttaagtgtctcaataaaatcttaaatgaataaatgcatggctaataagttaaaaaaaaaaaaaaaaaaaaa

SEQ ID NO: 25536 - DNA, 564 bp, Homo Sapiens
ggcacgaggctttttcttctggctccaggcagcacagacagggcctagcctggagagggtggacaagatgtcctctcagggtcttcaatggccaagtccaagcccactgcagaatctttctgtctacccgtaagtatcctttcctgagttccaggcaaagctggggatgttagcctatgactgtcatctgacttggaaggtacacctaggggccggggggaggtcagcaggggagtttgggagccacttctccccccacgtggcactggagtgtgaactggctcattctggacaccagcatggagccagcacgggaacaggggggcagcctagagcacaagctctatctgtgtccttcagagctcctgggaaacatgatgcgccctcatgggaatggcattttgcatatcacacaggctgtcctgggagtcaggcagactggattgtcacgtgcggtgtgcatgcagcagcttgtgcactgcagtggacctgtggaccatttctaaaggtgcacaacaaataataaatgtgtccttctttgttttttaaaaaaaaaaaaaaaaa

SEQ ID NO: 25537 - DNA, 2497 bp, Homo Sapiens
gtggggccatggtggtcttgcgggcggggaagaagacctttctccccgctctctgccgcgccttcgcctgccgcggctgtcaactcgctccggagcgcggcgccgagcgcagggatacggcgcccagcggggtctcaagattctgccctccaagaaagtcttgccatgattggataggacccccagataaatattcaaaccttcgacctgttcacttttacatacctgaaaatgaatctccattggaacaaaagcttagaaaattaagacaagaaacacaagaatggaatcaacagttctgggcaaaccagaatttgacttttagtaaggaaaaagaagaatttattcactcaagactaaaaactaaaggcctgggcctgagaactgaatcaggtcagaaagcaacattgaatgcagaagaaatggcggacttctacaaggaatttttaagtaaaaattttcagaagcacatgtattataacagagattggtacaagcgcaattttgccatcaccttcttcatgggaaaagtggccctggaaaggatttggaacaagcttaaacagaaacaaaagaagaggagcaactaggagtccactctgacccagccagagtccaggtttccacaggaagcagatggagctcctttcacaggggctctgagaaaaactggagctgatctcaagaagccccacatcttcctaaggggccccatggcctgtttgggggcagggtaggtcctggggcactgtgggccgcctgcctgctgatgtgggctctaggccagcttgttgtcacgtacgtggtgtgaaataaagcccaagcactgggtgcccgtttcctgtgtttcgaattataccaattcaaaacagaactatttaaaaatattggccaggcacggtggctcacacctgtaatcccagcactttgggaggccgaggcgggtggatcacttgagatcaggagttcaagatcagtctggacaacatggcaaaaccctgtctctacaaaaaattagctgggtgtggtggcacgcacctgtaatcccagctgctctggaggctgaggcatgcgacgcttgaacccaggaggcggaggttgcagtgatccaagatcgcaccactgcactccagcctggaagaccaaacgagactctgtatcaaaaaataataataattaataaagttttactggaaaaaagaagtctgctgacgggaatgatgtggaagctgactgccaagcgatcggtgtgctggccgtggagtcagcaccaccctcactgtgagtcgtcagctggtgggtcctcacaggctgcgtcctgaatgcagtgcggtgtgaggacatgaaagcaaatgcaattttattgcatgccaaaaagtttaacttgattcttggtgttaactatgttagtagattcttcaatgctataagcaaattaacaagaaacagcagcactattttcctcttttcttaaacacgaaggttaaatggccaggcatggtgactcatacctgtaatcccaacaatttgggaggccaaggcaagcaaatcacttgagctcaggagttcgaaccagtttgggcaacatggcgaaaccctgcctctacaaaacatgcaaaaattagctgggcatggtagcatgcgcctgtagtcccagctactcgggaggctgagcttcgaggattgattgagccagtgaggtccaggctgcactaagccaagatcctaccactaggcaacagagccagaccctgtctcaaataaaaatttaaaaaaataataaaaaaggccgggcgcactggctcacgcctgtaatctcagcactttgggtggccaaggtgggcggatcacctgaggtcagttcaagaccagcctggccaaacatggtgaaaccctgtctacaaaaattagccaggcatgatggagggtgcctttagtcccagctctttgggaagctgaggcgggagaatagcatgaaccagggaggtggagggtgcctgtaatcccagctccttgggaggctaaggcaggagaatagcatgaacccggtaggtggaggttgcagtgagccgagatcgcgccactgcactccagcctgggcgacagagcaatactcccgtctcaaaaaaaaaaaaaaattaaatgattgtgatatgtgttacttttggtcacaaataaattgtaattaagattattctggccaggtgcggtggctcacgcctataatcccagcactttgggaggccgaggtgggcagatcatgaggtcaggagatcgagaccatcctgcccaacatggtgaaaccccgtttctactaaaaatgcaaaaattagctgggtgtggtggcgtgtgcctgtaatgccagctactcgggaggctgaggcacgagaatcacttgaacccagcaggcagaggttgcagtgagccaagattgcgccactgcactccagcctgacgacaaagcgagactccgtctcaaaaaaaaaaaaaaaaaaaa

SEQ ID NO: 25538 - DNA, 3243 bp, Homo Sapiens
ggcaccgcggcgctcgggtgtttttgggggcccgggtggagggcccgggtgccggggcccaaggtgcggcctcgctagcgggagagggagcgggatcaccggcccggagagagctctcagggccagagcggggcaggaggatgctttcccagccccaccatggagctgcgctgtgggggattgctgttcagttctcgctttgattcagggaatctagcccacgtggagaaggtggaatctttgtccagtgatggggaaggggtaggaggtggggcgtcagccctgaccagtggcattgcctcttcccctgactatgaattcaacgtgtggacccgaccagactgtgctgaaacggaatttgagaatgggaacaggtcatggttctacttcagcgtccggggaggaatgccaggaaaactcatcaagatcaacattatgaacatgaacaagcagagcaagctgtattcccagggcatggccccctttgtgcgcacactgcccacccggccacgctgggaacgcattcgagaccggcccacctttgagatgacagagacgcagtttgtgttatcctttgttcatcgtttcgtggagggccgtggggccaccaccttcttcgccttctgctaccccttctcctacagtgactgccaggaactgctaaaccagctagaccagcgctttccggagaaccaccctacccatagcagccccctggataccatctattaccatcgggagctcctttgctattctctggatggacttcgtgtagatctgctgacgatcacttcctgccatgggcttcgagaagatcgagagccccgtctagagcagctatttcctgataccagcacccctcgaccattccgtttcgcaggcaagaggatattcttcttaagcagtagagtacacccaggggagactccatctagctttgtcttcaatggctttctggacttcatcctccgacctgatgatccccgggcccaaaccctccgtcgcctcttcgtctttaagctgattcccatgttgaaccccgatggtgtggtccggggacactaccgcacagactcacgtggagtgaatctgaaccgtcagtacctgaagcctgatgccgtcctgcacccggccatctatggggccaaagctgtgcttctctaccaccatgtgcactctcgtctgaactcccagagttcctctgagcaccagcccagttcctgtctccctcctgatgctcctgtttctgacctggagaaagccaacaatctccaaaatgaagctcagtgtgggcactcagctgacaggcataacgctgaagcctggaaacaaacagagccagcagaacagaagctcaacagtgtgtggattatgccacaacagtctgcggggcttgaagagtcagcccctgataccatcccccccaaagagagtggcgttgcttactatgtggacctgcatggacatgcttccaaaaggggctgcttcatgtacggaaacagctttagtgatgagagcacccaggtggaaaacatgctatatccaaagctcatctccttgaattcagcccacttcgacttccagggctgcaatttctcagagaagaatatgtatgcccgagaccgtagagatggccagtctaaagagggaagcggccgtgttgcaatctacaaagcctcagggataatccacagctacacacttgaatgcaactacaacactggacgctcagtaaacagcatccctgctgcctgccatgacaatgggcgtgccagcccccctcccccgccggctttcccctccagatacactgtggaactatttgagcaggtgggacgagctatggccattgcagccctggacatggcggaatgtaatccgtggccccgaattgtactgtcagagcacagcagccttactaatctacgggcctggatgctgaaacatgtacgcaacagccgaggcctaagcagcactctgaatgtgggtgtcaacaagaagaggggccttcgaactccacccaaaagtcacaatgggttgcctgtctcctgctccgaaaacaccttgagtcgggcacgaagttttagcaccggcacaagtgccggtggtagcagcagcagccaacaaaattctccacagatgaagaattcccccagctttccttttcatggcagtcggcctgcagggctgccaggcctgggctctagtacccaaaaggtcacccaccgggtgctgggccccgtcagagagccccgaagccaggacaggagacggcagcagcagcccctgaaccatcgtcctgcaggcagcctcgctccatccccagctcctactagttctggcccagcctcctcacacaagctgggctcctgtctactgcctgattcattcaacataccagggagcagttgctcactcttgtcctctggagacaaaccagaggctgtcatggtaatcgggaaaggtctgctagggactggagctcggatgccctgcatcaagactcgattgcagacctgtccgaggagagtttccgccaggaggggtcccggattccccaggctaggcccaggttgggccggggctcaccgccgactcgcagagggatgaaaggctcttcaggccccacatcccctaccccccggaccagggagagcagtgagctggagctgggatcctgctctgctacaccagggctgcctcaggccaggcccccacggccccgctctgcccctgccttttctcctatatcctgtagtctatctgactccccatcctggaattgttacagcaggggtcccttgggccaacctgaggtttgttttgtccctaaatctcccccactgactgtttctccccgggtctgataatgcctttatgttcaatcccaggatatagccccaagatggggtaacagtgggaaatatgctagttcccctccaggccgctgattccatgtgacagccgttaagtccttggaatgccagccacgctgtccaaggcattacagagtatcaccttgagacagaacaaaacagggacctgccaccccttccctccctccgcagcacaagattttgggaccacaaaaaaaagtctatatttttatattggggggagggagtagaaaagcaagcccctatactgggccctattcagtggcagcttcttgttccataggattaaggaagactctgaggaaataaaagttgtttggaaaaatccaaaaaaaaaaaaaaaaaa

SEQ ID NO: 25539 - DNA, 1724 bp, Homo Sapiens
attcgcgcctccatttttccaggagagagcgggataccaagagaaccggaccagctgctggcagggaaactgtcttccttttctccaagatgtacagaaccaaagtgggcttgaaggaccgccagcagctctacaagctgatcattagccagctgctatatgacggctacatcagcatcgccaatggcctcatcaatgaaatcaagcctcagtctgtgtgtgcaccctcggagcagctcctgcatctcatcaaactcggaatggaaaacgatgacaccgcagttcagtatgcaattggtcgttcagatactgttgcccctggcacagggattgacctggaatttgatgcagatgttcagactatgtccccagaggcttctgagtacgaaacatgctatgtcacatcacataaaggaccatgccgtgtagctacctatagtagagatggacagttaatagctactgggtctgctgatgcttcgataaagatacttgacacagagaggatgttggccaaaagtgccatgccaatagaggtcatgatgaatgagaccgcacaacaaaatatggaaaaccacccagtgattcgaactctttatgaccatgtggatgaagtcacgtgccttgctttccacccaacagaacagatcctggcttctggttcaagggattatactcttaaattatttgattattccaaaccatcagcaaaaagagccttcaaatacattcaggaagctgaaatgttacgttccatctcttttcatccttctggagactttatacttgtcggaactcagcatcctactcttcgcctttatgatatcaacacctttcaatgttttgtctcttgcaatcctcaagatcaacacaccgatgctatatgttccgttaattacaattctagtgccaatatgtacgtaactggaagcaaggacggctgcatcaaattatgggatggtgtttcaaatcgatgcatcacaacttttgagaaagcacatgacggtgctgaagtttgttctgccattttttccaaaaattctaaatacattctctcaagtggaaaagactctgtagctaaactttgggaaatatcaacgggacgaacactggtcagatacacgggcgcgggtttaagtggacgccaggtgcaccggacacaggctgtgtttaaccacaccgaggactatgtgttgctgcccgacgagaggacgatcagtctttgctgctgggactcgaggacagccgagcggagaaacctgctgtcgttggggcacaacaatattgtacgctgcatagtgcactcccccaccaaccccgggttcatgacgtgcagcgatgacttcagagcgcggttttggtaccggagatcgaccactgactgagccaccctctccgtagggttctttctcgaggactctaccctcctcccccacgtcctgtctcagctgcagtcgtaagtccgtgcaccatccttgacgttttgctgccacctctgtccacattcttcttggatttgtataaaagaatctttttttaccttgatgtagaatcatggtggaaaaagttggaaacacagatctgtgcagttctacattcactgattattacagtgtgattttcatcggttttgtaagtacaggacttgccgtttcttttgatctcttgattgaaggaggatagggcattaaagtgcttttgacatgaaaaaaaaaaaaaaaaaa

SEQ ID NO: 25540 - DNA, 1256 bp, Homo Sapiens
gaggaatgcggtcgcccccttgggaaagtacatatctgggagaagcaggcggctccgcgctcgcactcccgctcctccgcccgaccgcgcgctcgccccgccgctcctgctgcagccccagggcccctcgccgccgccaccatggacgccatcaagaagaagatgcagatgctgaagctcgacaaggagaacgccttggatcgagctgagcaggcggaggccgacaagaaggcggcggaagacaggagcaagcagctggaagatgagctggtgtcactgcaaaagaaactcaagggcaccgaagatgaactggacaaatattctgaggctctcaaagatgcccaggagaagctggagctggcagagaaaaaggccaccgatgctgaagccgacgtagcttctctgaacagacgcatccagctggttgaggaagagttggatcgtgcccaggagcgtctggcaacagctttgcagaagctggaggaagctgagaaggcagcagatgagagtgagagaggcatgaaagtcattgagagtcgagcccaaaaagatgaagaaaaaatggaaattcaggagatccaactgaaagaggcaaagcacattgctgaagatgccgaccgcaaatatgaagaggtggcccgtaagctggtcatcattgagagcgacctggaacgtgcagaggagcgggctgagctctcagaaggccaagtccgacagctggaagaacaattaagaataatggatcagaccttgaaagcattaatggctgcagaggataagtactcgcagaaggaagacagatatgaggaagagatcaaggtcctttccgacaagctgaaggaggctgagactcgggctgagtttgcggagaggtcagtaactaaattggagaaaagcattgatgacttagaagacgagctgtacgctcagaaactgaagtacaaagccatcagcgaggagctggaccacgctctcaacgatatgacttccatgtaaacgttcatccactctgcctgcttacaccctgccctcatgctaatataagtttctttgcttcacttctcccaagactccctcgtcgagctggatgtcccacctctctgagctctgcatttgtctattctccagctgaccctggttctctctcttagcatcctgccttagagccaggcacacactgtgctttctattgtacagaagctcttcgtttcagtgtcaaataaacactgtgtaagctaaaaaaaaaaaaaaaaaaa

SEQ ID NO: 25541 - DNA, 1407 bp, Homo Sapiens
ggaacgttgctaggcttagcgggtctggctgctgggggcccgagcagcacgctcggagccgccgcgcgccaaagcgggaatctgggaggcgagcagctctgcagttaatgcacgtattttaaactcccgggcctgcggacgctatgcacaggaagcacctccaggagattccagacctgagtagcaacgttgccaccagcttcacgtggggatgggattccagcaagacttctgaactgctgtcaggcatgggggtctccgccctggagaaagaggagcccgacagtgagaacatcccccaggaactgctctcaaacctgggccacccggagagccccccacggaaacggctgaagagcaaagggagtgacaaagactttgtgattgtccgcaggcctaagctaaatcgagagaactttccaggtgtttcatgggactcccttccggatgagctgctcttgggaatcttttcctgtctgtgcctccctgagctgctaaaggtctctggtgtttgtaagaggtggtatcgcctagcgtctgatgagtctctatggcagaccttagacctcacaggtaaaaatctgcacccggatgtgactggtcggttgctgtctcaaggggtgattgccttccgctgcccacgatcatttatggaccaaccattggctgaacatttcagcccttttcgtgtacagcacatggacctatcgaactcagttatagaagtgtccaccctccacggcatactgtctcagtgttccaagttgcagaatctaagcctggaaggcctgcggctttcggatcccattgtcaatactctcgcaaaaaactcaaatttagtgcgacttaacctttctgggtgttctggattctctgaatttgccctgcagactttgctaagcagctgttccagactggatgagctgaacctctcctggtgttttgatttcactgaaaagcatgtacaggtggctgttgcgcatgtgtcagagaccatcacccagctgaatcttagcggctacagaaagaatctccagaaatcagatctctctactttagttagaagatgccccaatcttgtccatctagacttaagtgatagtgtcatgctaaagaatgactgctttcaggaatttttccagctcaactacctccaacacctatcactcagtcggtgctatgatataatacctgaaactttactattagtgacaagagctggggttaggatccggttggactctgacatcggatgccctcaaacatacagaacttccaaactcaagtccagccataagctattttgccaacatgtcagagtaatctgtatttttgtatgtgatttctacttttatagacttgttttaaaacaataaaacacatttttataaaaaaaaaaaaaaaaaa

SEQ ID NO: 25542 - DNA, 2211 bp, Homo Sapiens
gcatcacctcccactacaaaccccctgactgctcagtgctgagtaagaagggagattacctcaaatatcactacaatgcctcacttctggatgggaccctgctggactccacgtggaatttaggcaaaacttacaatattgttctgggatctgggcaagttgtgttggggatggacatgggtctcagagagatgtgcgttggcgagaaacggacagtgatcattccgcctcacctgggctatggggaagctggcgtggatggagaagtgcccggcagtgccgtattagtgtttgacattgagctgctggagctggtggctggccttcctgaggggtacatgttcatatggaatggtgaggtgtcacccaacctctttgaagaaattgacaaggatggcaacggagaagtcctcctggaagagttctcagagtacattcacgcccaggtggcatctggcaaagggaaactcgctcctggctttgatgctgagctgattgtgaagaatatgttcaccaaccaggaccggaatggagatgggaaggtcacagccgaggaatttaaactcaaagaccaggaagccaaacacgatgaactctaaacctggcatgaaccagatggtgccagggagtacgtgacaccaagccacctgtgtggcaagacgtgcagtgagggtgcaagggtctctcagaagttgcatcattagccagtagtaggtgggtcacatagtacctggtgtacacatcggggtgggttgatatatggggtgagaagtttgggctgatcgccagtgatagtaaacaaaatctgtgcagagggccttagcatgggatgtgtccagtattgaaaaggctgcactgccaaccatgatttgtgagccttctgggaaattttgttattaaaggaatatatagtgtcagacagaagttataatcatcttggaggaaccataagaaaaggtgtccagggtatctatataaagagggttaaatttttttttaacttgctggttaaaacattttagaaatattcttgagatgggcaggagagtcaaagggcttgcttgccccagcagagttcccagcagacagccatggctcttcccagcagcctgtgcaaattctgatgatggccccacccccgcacacgcacacgcacatcatgcttttccagctcatcacaccccgccccactatgggcctaccattaatagtgtataacttggaggttaaaagagccttttggacagaaaactgggccaggaaaaggcatctcagaccacaaatagagaatttgattcctcatttgccacataagtcatctgcttagcttttcctttccttttttttttttttttttttttctggaggcagagtctccctttgtcgccaggctggagtgcagtggtgccatctcggctcactgcagcactgtctcggctcactgcagcctccgcctcccgtattcaagcgattctcctgtctcagcctcctgagtagctgggactacaggtgtgcaccaccacgcccggctaatttttgtatttttagtagagacggggtttcactgtgttggccaggatggtctcaatctcgacctcgtgatccgcccaccttggcctcccaaagtgttgggattacaggcgtgactcaccatgcccagccacttagttttttcttattcccacctttctatcccatagaacactcttttttatcttccctgaaccatattgatgagataaatagggctgggggctgggccccgctggtcactcaacagagtatttcccttggccgagatggaagttttgtcccaatagatgagctgctgagtatcaacaaggtgacatttttctgctgcccatttgtgtcctggagacggtggtaccctgaaggcagaggccagctgccgcaagacagcaatgacagtccacctgccgacctgattcctgcatcatggaataaccacatggctaccttctatcctctgttcccaaatggtggtggcacttatcctgaagtcgtcaatgatttccctttgaaactactttattttactaatttaaactattttgtactgatgtagccctgaggtagttcatgaaaatgctgtgcactcattccatggaataaatgttggaaagctgatcttttctgatataaaatgttgaatgataaaaaaaaaaaaaaaaaaaaaaaaaaaaaaaaaaa

SEQ ID NO: 25543 - DNA, 1534 bp, Homo Sapiens
gcccgggctacacgttaaaaacactaaggggagcgcgcgaagctgaacttggcgctcgatgggggccgttagccgccctagagcgcgcggagccgcagaggcgtagctggactacaacgcagtgcatctcgggaggccaactcgactggactgggtgagaggacagaggtggctcgatgggcggcccgaaggccggggatcatggcgggaaggcgggcccagccaggttcagccccgccccgacccgccgctccccacccccggccggcctcgcgtgccttcccgcagcactgccgtccccgggatgctgagcgcccaccgtctccccgcagccccctcatgcccggctgcgagctgcccgtgggcacctgcccggacatgtgcccggccgccgagcgcgcccagcgcgaaagggagcaccgcctgcaccgcttggaggtggtgccgggttgccgccaggacccgccccgcgcggatccgcagcgcgcggtgaaggagtacagccgacccgccgccggcaagccccggcccccgcccagccagttgcgtccgccctccgtgctgctggccaccgtgcgctacctggccggtgaggtggcggagagcgccgacatcgcccgcgccgaggtggccagcttcgtggcagaccgcttgcgagctgtgcgcctggacctggcgctgcagggagcgggcgacgccgaggcagcggtggtgctggaggcggcgctggccacgctgctggccgtagtggcgcggctcgggcccgacgcggcgcggggacccgcggacccggtgctgctgcaggcccaggtgcaggagggcttcggctcgctgcggcgctgctacgcgcggggcgccgggccgcacccccgccaacccgccttccagggcctctttctgctctataacctgggctcggtggaagccctgcatgaggttctacagctgcctgctgccctgcgcgcctgcccgcccctccgcaaggccttggcggtagatgctgccttccgagagggcaatgctgcccgcctgttccgtctgctccagaccctgccctacctgccaagttgcgctgtgcagtgccatgtgggccatgcccgccgggaagccctggcccgcttcgctcgtgcctttagcacccccaagggccagaccttgcctctgggcttcatggtcaacctcttggccctggatggactcagggaagcacgggacctgtgccaggcccacgggctgcccttggacggagaggagagagttgtgttcctgaggggtcgctacgtggaggaagggctaccgcctgccagtacgtgcaaggtgttagtggagagcaaacttcgaggacgtaccctggaggaggtggtcatggcagaggaggaagatgagggcacggacagacctgggtccccagcctgaggagggagcgtgagcctcccagagccccaggactgggccagagcacttaggtttctttttccatggtttccaggtaataaaaggaacttgttttgttggtaaaaaaaaaaaaaaaaaa

SEQ ID NO: 25544 - DNA, 1800 bp, Homo Sapiens
gaggaagatggcggcgtccgcagctgccgctgagctccaggcttctgggggtccgcggcacccagtgtgtctgttggtgttgggaatggcgggatccgggaaaaccacttttgtacagaggctcacaggacacctgcatgcccaaggcactccaccgtatgtgatcaacctggatccagcagtacatgaagttccctttcctgccaatattgatattcgtgatactgtaaagtataaagaagtaatgaaacaatatggacttggacccaatggcggcatagtgacctcactcaatctctttgctaccagatttgatcaggtgatgaaatttattgagaaggcccagaacatgtccaaatatgtgttgattgacacacctggacagattgaggtattcacctggtcagcttctgggacaattatcactgaagcccttgcatcctcatttccaacagttgtcatctatgtaatggacacatcgagaagtaccaacccagtgaccttcatgtccaacatgctctatgcctgcagcatcttatacaaaaccaagctgcctttcattgtggtcatgaataaaactgacatcattgaccacagctttgcagtggaatggatgcaggattttgaggctttccaagatgccttgaatcaagagactacatacgtcagtaacctgactcgttcaatgagcctggtgttagatgagttttacagctcactcagggtggtgggtgtctctgctgttctgggtactggattagatgaactctttgtgcaagttaccagtgctgccgaagaatatgaaagggagtatcgtcctgaatatgaacgtctgaaaaaatcactggccaacgcagagagccaacagcagagagaacaactggaacgccttcgaaaagatatgggttctgtagccttggatgcagggactgccaaagacagcttatctcctgtgctgcacccttctgatttgatcctgactcgaggaaccttggatgaagaggatgaggaagcagacagcgatactgatgacattgaccacagagttacagaggaaagccatgaagagccagcattccagaattttatgcaagaatcgatggcacaatactggaagagaaacaataaataggagactttagcacacttcacttgtttctagaagtccagaattttggacctccacgtgaaagaactgttcttacctctgaactgggggctcccataagggataattttcctcagagtagcaaagtttctcttattagagaaatcttgtgactcagatgaagtcagggatagaagacccttggacctggcaggttaatgctgattattccttggcctttcccttgtatttatgcaaggaaggatatactgagctgatactgttccaagcctacaacttcaagttttatcatttgaactcaagtacttttgctgctgaggaatggaatcaaaagaacgtagtctcctggtgaccacctcagatctctattattaggctagatgtatagcctctactcccccagcttcttgctcttgaccctgcactgtaagttgcccttctattagcagccaaggaaaagggaaacatgagcttatccagaacggtggcagagtctccttggcaatcaaccaacgttgctatgaaatatgcctcacactgtatagctcattataggacgtcaggtttgttgaaaaaagtgggcaagacatgattaatgaatcagaatcctgtttcattggtgacttggataaagactttttaattttaaaaaaaaaaaaaaaaaaaaaaaa

SEQ ID NO: 25545 - DNA, 920 bp, Homo Sapiens
gaaagatcggcgcgcaccgcaggagcaacggttggtcctgcggctgtgatgtcggtgttgaggcccctggacaagctgcccggcctgaacacggccaccatcttgctggtgggcacggaggatgctcttctgcagcagctggcggactcgatgctcaaagaggactgcgcctccgagctgaaggtccacttggcaaagtccctccctttgccctccagtgtgaatcggccccgaattgacctgatcgtgtttgtggttaatcttcacagcaaatacagtctccagaacacagaggagtccctgcgccatgtggatgccagcttcttcttggggaaggtgtgtttcctcgccacaggtgctgggcgggagagccactgcagcattcaccggcacaccgtggtgaagctggcccacacctatcaaagccccctgctctactgtgacctggaggtggaaggctttagggccaccatggcgcagcgcctggtgcgcgtgctgcagatctgtgctggccacgtgcccggtgtctcagctctgaacctgctgtccctgctgagaagctctgagggcccctccctggaggacctgtgagggtggctggcccctgggctgccccttctcatggcttcgtgctgactccataaacattctctgttgaggatgtccagtcagggcttgacaggcccaggctcagcccgccgtggctgggaaggttccctgcagtgccagtgctgcagcagggagagctgggcagaagcagcgagggggcccagctggcgagactgtagccccctcccactcccacactcactcttgcagagcctgtgtctttaagcagctggcgtgttacatctccatttaaggtttcctttgaacaaaaggtctgtggctaaaaaaaaaaaaaaaaaaaaaaaaaaaaa

SEQ ID NO: 25546 - DNA, 982 bp, Homo Sapiens
ggctcatccacctgcagacatggggcgcagaaagtcaaaacgaaagccgcctcccaagaagaagatgacaggcaccctcgagacccagttcacctgccccttctgcaaccacgagaaatcctgtgatgtgaaaatggaccgtgcccgcaacaccggagtcatctcttgtaccgtgtgcctagaggaattccagacgcccataacgtatctgtcagaacccgtggatgtgtacagtgattggatagacgcctgcgaggcggccaatcagtagcgacacagaggacccgccccctgagcagccccgcgtactgtggatccagctgttcggttctggtccagagacattccaggggtccagggtgtgggtcctgggctgtcacagccgtgtgtgtgtgtgtgtgtgtgtgtgtgtgtgtgtgtgtgtgtgtagtgggtgtgcgtgtgggtgtgggtgtgagtgagtgtgggtgtgtgtggctgcacgtgtcactggggtggccgtgagtgtgtgctcacaggtacgcggtggtgtcgggttcctgggcctgaggggcctgaactgatctcacttggctccgaaagcctttgctgtgttccctgcagcccctggccccccagccttggggctctggctccccccggcggaattgggggactgtttcctgacatcctggacaagggaagcccactagaggctggaacaggacctctccagcctcctcaccagcaccgtgcccatctcaactggacttcccgccctccttctccaccttctagtgcccgtggccggggattcaaagccgccgttccccaggtccctgggctgggccctgacagggagccgcccccctccccatggtaaccaggaagcccgtttcatgttcagttgcttttgtagaggaagcaagggctgggatggggacagctgtcaatcacaagcccttaaataaagcagccagcgcacaaaaaaaaaaaaaaaaaa

SEQ ID NO: 25547 - DNA, 1387 bp, Homo Sapiens
caaaaatttgagtccttcgccaatccggttactgttgggtaggccttcagcatacttttgtccaatcagcttcagactctcactataaataagcggctagctttctctttctcctgaagtgaatctagctctgaaggcatggcgcgtacgaagcagactgctcgcaagtccaccggcggcaaggctccgcgcaagcagctggccaccaaggcggctcggaagagcgctccggccaccggcggtgtcaagaagccccatcgctatcggcctggtacagtggctctccgcgagattcgccgctaccagaagtccaccgagctgctgatcagaaagctgccttttcagcgtctggtgcgtgagatcgcgcaggacttcaagaccgacttgcgcttccagagctccgcggtgatggcgctgcaagaggcatgcgaggcctacctggtggggctctttgaggacaccaacctgtgcgccatccacgccaagcgggtgactatcatgcccaaggacatccagctcgcacgtcgtatccgcggcgagagggcttgagtctcaaggactcactgattacatacccaaaggctcttttcagagccacccacatgcgcgctgaaaagatctgtttctctcaggaattcttcctggtacttgttttgcctgtagtagatagggcccatttccagacgttatacaatctgtttcgtaagactcagcctatccctttttgaatgctaattttgggagtcttaacatctaataatgtccggcatttttccgtaagcattgagtgtagccaaaagttccttcgtgtattgctctcccatctccgcagcccggttttgaccggatggtgcttctaattttctgctaacctgtactgtggtgtgtgtatatttcttgccaacacgccagaaataaaactaaggttgtactgaagttggaaaaattcaggttaatgtagctcatgctggctaaagtgaaacgttctctccccgccccccgttcctaagcagtgttaagttttctttgaattttttcaagccggattttgggcctgcttaaaccacttaaatgtagttaatgacagatggtttgaggtttaaaagtcttctggagaaagcccgccagagaacattccctttgaagccccatgtaaaaatacgtgtgggagagaaagtgttttctctgacttctgctgacagtggctaaaactctgaactgtcaggagtattcaaaataagactgccttgtaggtaagcctgtggtagtttttttgagcacaggataaaatacttgagtctttgcttaaatgttactttctcaatgaggctttgtatgactaaataaaatctgtataatccccacaaaaaaaaaaaaaaaaaaaaaa

SEQ ID NO: 25548 - DNA, 2275 bp, Homo Sapiens
ctccctctccgagtgctgctcctgtcattgtggccatggacgataccctgttccagttgaagttcacggcgaagcagctggagaagctggccaagaaggcggagaaggactccaaggcggagcaggccaaagtgaagaaggcccttctgcagaaaaatgtagagtgtgcccgtgtgtatgccgagaacgccatccgcaagaagaacgaaggtgtgaactggcttcggatggcgtcccgcgtagacgcagtggcctccaaggtgcagacagctgtgactatgaagggggtgaccaagaatatggcccaggtgaccaaagccctggacaaggccctgagcaccatggacctgcagaaggtctcctcagtgatggacaggttcgagcagcaggtgcagaacctggacgtccatacatcggtgatggaggactccatgagctcggccaccaccctgaccacgccgcaggagcaggtggacagcctcatcatgcagatcgccgaggagaatggcctggaggtgctggaccagctcagccagctgcccgagggcgcctctgccgtgggcgagagctctgtgcgcagccaggaggaccagctgtcacggaggttggccgccttgaggaactagccgtgccccgccggtgtgcaccgcctctgccccgtgatgtgctggaaggctcctgtcctctccccaccgcgtcttgcctttgtgctgaccccgcggggctgcggccggcagccactctgcgtctctcacctgccaggcctgcgtggccttagggttgttcctgttcttttaggttgggcggtgggtctgtgtcctggtgttgagtttctgcaaatttctgggggtgatttctgtgactctgggcccacagcggggaggccaagaggggccctgtggactttcacccagcactgtgggggccttcagactctggggcagcagacatgctgcttcccatcagccagagggggtcagggctgccctgttgccaaacaactccctgaggcctctccgcaccacctcagcgggcaggaggtcccaccatgtggacagacatagcccaaggaggcaccacaggtctatgtgtgctgggggatgtcaggtgccacccaacgctgtcctggtggtatttacaatgacatcctcctcctccatcactccaggggtggtgtctcggccgcccctaccagctggctgagccccctggcctcctgcgctccctcacttccctcagttcccaaagctgcccagtccatggggacagaaccgtcactcagatccacattcaagtgtgcccaccctgcagtcttcatcctcactcagctgctgcctctggaggtgcctttggccacatgtgctgtgctgtttgtctcctcgacagggagcctgtccaccagcaggctgcggtcccagcgggtgcgtctgcagctcctccccttgggcagcctggttctcccggaggacctttccttggggccctgcttcatgacgatgctgcctgtgtcaccctctaccatctgtaaacaactgggtgccttccccgaccacaccccaatgccttcccagcttggaagccaaggcagctgatgaagggagctcaggagagccgtcttcagctgggctggggttggggctgctgtgaggaaaacctgccattgtggccctggagagtcaccagcagctcttgggaaggacttgctgggaggctgagagaggctttgggcacagcctgctgtcttttccatttcctaaagtttacttcattgtcttgaggcttccaggttttgtttttgtttttgccaaagtagaaaaggcaggtggtgggcggctggcagggagtgcgggtccccgcccctcttcagtcctgccctcccctcctcagtcctgcccaccccgtgcagcccatgctgaggctgcagtggtgtcgtgggtgttacgtgcaggaacgtggagaccctgacgtgggctcactgcgtttggttttcttttcagaacttgggagcccccagggaggggctagtgttggtaggtcctagacgtggttccctccagcctccccaaaatcaaccctggtgttgagagaacgtccttctgtccatcgtgggtaacagccttggggagggtgcagagctctgcagagccatgggccaggtggggctgcctcagtcctgtccccttgggcactgaggagaggggcccattcacctttctcctagaatgctgttgtaaataaacaaatggatccctggaaaaaaaaaaaaaaaaaaaaa

SEQ ID NO: 25549 - DNA, 3285 bp, Homo Sapiens
agaagatgttattggcaaaaggatctcaaaaatcatgacttgaatgtgaaatatctgttggacagacaacacgagtttgtgtgtgtgtgttgatggagagtagcttagtagtatcttcatctttttttttggtcactgtccttttaaacttgatcaaataaaggacagtgggtcatataagttactgctttcagggtcccttatatctgaataaaggagtgtgggcagacactttttggaagagtctgtctgggtgatcctggtagaagccccattagggtcactgtccagtgcttagggttgttactgagaagcactgccgagcttgtgagaaggaagggatggatagtagcatccacctgagtagtctgatcagtcggcatgatgacgaagccacgagaacatcgacctcagaaggactggaggaaggtgaagtggagggagagacgctcctgatcgtcgaatccgaggatcaggcatcagtggacttatcgcacgaccagagtggggattccctcaacagtgatgaaggagacgtgtcttggatggaggagcagctgtcctacttctgtgacaagtgccaaaaatggataccagccagtcagctgagggaacagctcagttaccttaagggtgataatttttttaggtttacttgttcggattgctcagcagatggcaaggagcagtatgaaaggctgaagctgacatggcagcaagtcgtcatgttggcaatgtacaacttgtctctggaaggaagtggacgtcaaggttatttcaggtggaaagaagatatctgtgcttttattgagaaacattggacttttttactagggaataggaaaaagacgtctacctggtggagcaccgtggcaggttgcctcagcgtgggaagtcccatgtacttccgttcaggtgctcaggaatttggagagccaggatggtggaaacttgttcataacaagcccccaacgatgaaacctgaaggagagaagttgtctgcctctactttgaaaataaaagcagcctcaaaaccaactttagatcccatcattactgttgagggacttagaaaacgagcaagtcggaatcctgtggaatctgccatggaattaaaagagaaaaggtctcgaactcaggaagcaaaagacattagaagagcccagaaggaggccgctggctttcttgacaggagcacatcttctacccctgtaaaattcataagccgaggccgcaggccagatgtgattctggaaaaaggcgaagtgattgacttttcctccttgagctcctctgaccgcaccccgctgacaagcccatctccttctccttctctggatttctctgcccctggtacacctgcctctcattctgccacacctagcttgctttcagaagcagatctgattccagatgtgatgcccccacaagccttgtttcatgatgacgatgagatggaaggcgatggagtcatagacccagggatggagtacgtcccaccccctgctgggtcagtagcttctgggccagtggttgggggcagaaagaaggtcagaggccctgaacagataaagcaggaggtagagagtgaggaggaaaaacccgacaggatggatattgacagtgaagacacagattcaaacacatctttgcaaacaagggctagagaaaagaggaagcctcagctggagaaggacacaaagccgaaagagcccaggtatactcccgtgagcatctacgaggaaaagctgctgctcaagaggctggaagcttgtcccggtgctgttgccatgactccggaagctcggagactgaaacgcaaactgattgtcagacaagcgaaaagggataggggattaccactttttgacttggatcaagttgttaatgctgctcttttgttagttgacgggatttatggagccaaagaaggaggaatttccagacttccagctggacaagccacgtacagaaccacctgtcaggacttcagaatccttgaccgataccagacttccttgccgtccaggaagggatttcgacaccagaccaccaagtttttgtatcgcttggtaggatcagaagatatggctgtggaccagagtattgtcagcccttatacctctcggatcttgaaaccttatatcaggcgtgattatgaaacaaagccacccaaactgcagctcctgtcacagattcgttcccacctgcacaggagcgaccctcactggacgccggagcccgacgcacctctcgattactgttatgtgcggccaaatcacatcccaacgatcaactccatgtgtcaggagtttttttggcctggcattgacctgtctgagtgtctgcagtacccagacttcagtgttgttgttctttataaaaaagtcatcattgcctttggcttcatggttcctgatgtgaaatacaatgaagcttacatttcatttctgttcgtccaccctgaatggagaagagcagggattgcaactttcatgatctatcatctgattcagacctgcatgggcaaggacgtaacccttcacgtctcagcaagcaaccccgctatgctactgtaccagaagtttggattcaagactgaagaatatgtattagatttctatgataaatattacccattggagagtacagagtgtaaacacgcattctttctgaggctccggcgctgatgcgaatacagctcacagagaaacgcatgtgctattggagaacaggtctttgtggagatctaaaggcagtgattgatttcacagggagctctaatctctgtgattacatggtccttcaaactcccaaccaaagtgagaaaagcggcatgcagtgaaatgagcagtgagcagccctttagcaaaatcgccctccagtccttcctggagatgccttcagccagcatcccagactccacagttatttatgaacgatgtcgtgattctccctccacctgacagtttgtaagagtgaaagagcatctaacctgatgctcttggagagagataacctgtctgtcataacttaaaggatgagaaaatgtggtgtagctattaaagattcatgcagtcccaaaaggcactgtcctgggatgatgagagattataaggtgatttcataaaaggaatccaaccctgtgcccggccattgatgtgttgtcattgaatccaggaggatttctagggcactgaagttttgttgtttcttttgctgactttggttacagtcagaaaaaataaactagatgtttgtgtctaaaaaaaaaaaaaaaaaaaa

SEQ ID NO: 25550 - DNA, 2220 bp, Homo Sapiens
cccacttttcccaaacaaagctcccggcaactttctccctcgcagcgccccgcccgcccgcggctccccagccccaggccgggaggcccagatgggggaaccccgggctggggccgccctggacgatggcagcggctggacgggcagtgaggaaggcagtgaggagggtaccggcggcagtgagggggctgggggtgacgggggcccggatgcagagggggtgtggagcccagacattgagcagagcttccaggaggccctggccatctatccaccctgcggccgccggaaaataattttgtctgatgaaggcaagatgtatggtcggaatgaactgatcgcccgctacatcaagctgagaacggggaagacccgaactcgaaaacaggtttctagtcacatccaggttttggcccgaaggaaatcaagggaaatccagtccaagttgaaggaccaggtttccaaggacaaggctttccagacaatggcaaccatgtcctctgcccagctcatctccgcgccttctctgcaggccaaactgggtcccactggtcctcaggcctctgagcttttccagttttggtctggaggatctgggcccccctggaatgttccagatgtgaagccattctcacagacaccgttcaccttgtcactgactcccccatctactgacctcccagggtacgagcccccccaagccctctcacccctgcccccacctaccccatcgcccccagcctggcaggctcggggcctgggcaccgcccggttgcagctggtagagttctcagccttcgtggaaccgccagatgcagttgattcttaccagaggcacctgttcgtgcacatcagccagcactgccccagccccggagcgccgccgctcgagagtgtggacgtccggcagatctacgacaaattccctgagaaaaagggtggcctccgagagctatatgatcgtggccccccccatgccttcttcctggtcaagttctgggcggacctgaactggggcccaagtggtgaggaggcaggggccggtggcagcatcagcagtggtggcttctacggagtgagcagccagtatgagagcctggaacacatgaccctcacctgttcctccaaggtctgctcttttggcaagcaggtggtggagaaggtggagacggaacgggcccagctggaggacggcagatttgtgtaccgcctgctgcgctcgcccatgtgcgagtacctggtgaatttcttgcacaagttgcggcagctgcctgagcgatacatgatgaacagcgtcctggaaaacttcaccatcctccaggtggtgacaaacagagacacccaggaactgctgctctgcaccgcctatgtcttcgaggtctccaccagcgagcgtggggcccagcatcacatttaccgcctggtcagggactgaagggggaccccaaaactggctcaccccccagaacaccctcctcccagggagggtcctccagctcacctcatgcttcttatttggggagagggctgtgatgtaaaggggttgacctcagaggcctaagcaactggggccatcccccccattagaggggcccccaaaacttggttggagagctgaacaggctgggactgaggaaaggataaaccccgatattgggacctcacagtgggtgtctgaaaggacagatcactccggagtatcagggattgtggggacaggagtgagacaaccccccaggtacagcactggcttttcttttcagcccctgacaggccacccccactcctctgcatgtcttggagagcgctagttacacattggcttgtcccctttactttttcccagccacccctccccctgaaatttctgcccctctctaccaccctcactccatgacctgtgagatcacaaagtgaagatgaaccctttctgtgcaggagcagagccaggtgggccctggacattttttttttttttaatataacgagatatttataagtgggtgctagggtcttgactttatctccgctgcacaagcagtgtgttgaactttctaatctcatccctctcctaagtgagccctgagctagacggtttccttcctcccctctcaaagtttgtttgtttgtgttctgacagaggataaagctattttaccaaaaaaaaaaaaaaaaaaaaaaaaaaaaaaaaaaaaaaaaaaaaaaaaaaaaaaaaaaaaa

SEQ ID NO: 25551 - DNA, 1977 bp, Homo Sapiens
gttttggcaggagcgggagaattctgcggagcctgcgggacggcggcggtggcgccgtaggcagccgggacagtgttgtacagtgttttgggcatgcacgtgatactcacacagtggcttctgctcaccaacagatgaagacagatgcaccaacgaggctgatgggaaccatcctgtagaggtccatctgcgttcagacccagacgatgccagagctatgactgggcctgcaggtgtggcgccgaggggagatcagccatggagcagccacaggaggaagcccctgaggtccgggaagaggaggagaaagaggaagtggcagaggcagaaggagccccagagctcaatgggggaccacagcatgcacttccttccagcagctacacagacctctcccggagctcctcgccaccctcactgctggaccaactgcagatgggctgtgacggggcctcatgcggcagcctcaacatggagtgccgggtgtgcggggacaaggcatcgggcttccactacggtgttcatgcatgtgaggggtgcaagggcttcttccgtcgtacgatccgcatgaagctggagtacgagaagtgtgagcgcagctgcaagattcagaagaagaaccgcaacaagtgccagtactgccgcttccagaagtgcctggcactgggcatgtcacacaacgctatccgttttggtcggatgccggaggctgagaagaggaagctggtggcagggctgactgcaaatgaggggagccagtacaacccacaggtggccgacctgaaggccttctccaagcacatctacaatgcctacctgaaaaacttcaacatgaccaaaaagaaggcccgcagcatcctcaccggcaaagccagccacacggcgccctttgtgatccacgacatcgagacattgtggcaggcagagaaggggctggtgtggaagcagttggtgaatggcctgcctccctacaaggagatcagcgtgcacgtcttctaccgctgccagtgcaccacagtggagaccgtgcgggagctcactgagttcgccaagagcatccccagcttcagcagcctcttcctcaacgaccaggttacccttctcaagtatggcgtgcacgaggccatcttcgccatgctggcctctatcgtcaacaaggacgggctgctggtagccaacggcagtggctttgtcacccgtgagttcctgcgcagcctccgcaaacccttcagtgatatcattgagcctaagtttgaatttgctgtcaagttcaacgccctggaacttgatgacagtgacctggccctattcattgcggccatcattctgtgtggaggtgagtgagagtggggcaggtgggctggcctggcacacccagtcgtcctgggggttggccctcactgcagggcactgtgcctgagctctgacagtgtggggaagtgtccctgtgatcttggcagtggaacatgcaaggcactgactgagcatgcaggatcagctccatctcattatgtacgtagatagaggtggagacaggaaaaagactaagccagacgtggtggctcacacctgtaatcccagcactttggcaggccgaggcgggtggatcacttgaggtcaggagttcgaaaccagcctggccaacatggtgaaaccccgtctctactaaaaatacaaaaaattagccagatgtggtggcacgcgcctgtaatcccagctacttgggaggctgagccaggagaatcgcttgaacccgaaaggtggaggttgcagtgagccaaaatcccaccactgcactccagcctgggtgacagagtgagaccctgtctcaaaaaaaaggaaaaggactaacaggcagtatgctgtcatgttaatgtggggtggaaaaattgtctgcattttttctgcatttttaaaattccaacccaataaatacaataataactatgctaaaaaaaaaaaaaaaaaaaaaaaaaa

SEQ ID NO: 25552 - DNA, 3130 bp, Homo Sapiens
cccgagatgctgctgccggcgcccgcgctccgccgcgccctgctgtcccgcccctggaccggggccggcctgcggtggaagcacacctcctccctgaaggtggccaacgagcccgtcttagccttcacgcagggcagccctgagcgagatgccctgcaaaaggccttgaaggacctgaagggccggatggaagccatcccatgcgtggtgggggatgaggaggtgtggacgtcggacgtgcagtaccaagtgtcgccttttaaccatggacataaggtggccaagttctgttatgcagacaagagcctgctcaacaaagccattgaggctgccctggctgcccggaaagagtgggacctgaagcctattgcagaccgggcccagatcttcctgaaggcggcagacatgctgagtgggccgcgcagggctgagatcctcgccaagaccatggtgggacagggtaagaccgtgatccaagcggagattgacgctgcagcggaactcatcgacttcttccggttcaatgccaagtatgcggtggagctggaggggcagcagcccatcagcgtgcccccgagcaccaacagcacggtgtaccggggtctggagggcttcgtggcggccatctcgccctttaacttcactgcaatcggcggcaacctggcgggggcaccggccctgatgggcaacgtggtcctatggaagcccagtgacactgccatgctggccagctatgctgtctaccgcatccttcgggaggctggcctgccccccaacatcatccagtttgtgccagctgatgggcccctatttggggacactgtcaccagctcagagcacctctgtggcatcaacttcacaggcagtgtgcccaccttcaaacacctgtggaagcaggtggcccagaacctggaccggttccacaccttcccacgcctggctggagagtgcggcggaaagaacttccacttcgtgcaccgctcggccgacgtggagagcgtggtgagcgggaccctccgctcagccttcgagtacggtggccagaagtgttccgcctgctcgcgtctctacgtgccgcactcgctgtggccgcagatcaaagggcggctgctggaggagcacagtcggatcaaagtgggcgaccctgcagaggattttgggaccttcttctctgcagtgattgatgccaagtcctttgcccgtatcaagaagtggctggagcacgcacgctcctcacccagcctcaccatcctggccgggggcaagtgtgatgactccgtgggctactttgtggagccctgcatcgtggagagcaaggaccctcaggagcccatcatgaaggaggagatcttcgggcctgtactgtctgtgtacgtctacccggatgacaagtacaaggagacgctgcagctgattgacagcaccaccagctatggcctcacgggggcagtgttctcccaggataaggacgtcgtgcaggaggccacaaaggtgctgaggaatgctgccggcaacttctacatcaacgacaagtccactggctcgatagtgggccagcagccctttgggggggcccgagcctctggaaccaatgacaagccagggggcccacactacatcctgcgctggacgtcgccgcaggtcatcaaggagacacataagcccctgggggactggagctacgcgtacatgcagtgagcccctctcgggctccaccgtccagctgtctgtccgtccaggtggccgacctcactgcacagaccccactccagcccctccaccccttcttcatgcacagctgcctttctataatccgggcttgactcccttcttaccactgtattctggcctctcccatgcctcaggctctggtttgagatcgtgctggggaggaacatggccactaccccttatcccatcggccatgtgggaggtatgaccctggtgcctggcaggttctccctctgccctccactgggcccagtggctcagggacctggggaaaggagatggagcagctcttgggatcctttggggaaaaggaggccattctgggccccttggcaaacctcaccactcacagaggctcctggccttgatccctgcccctccaggtgtccagggtaaagtgtaactcagactgacctgtggggcacagggggcaccagctggccttgccctctctggtctgggctgtctaccttcctcactgtatctttgcccagacccacctgggccagtaggcccctgtccccagccacacaccttagatgctggcatgccttactccaggtgcctgtgtttggccgaggcctgtgtgattcccggtctgcaccacatggcggggttggggggccgctggaggccacctgccaaggcgtgggatgggatggtcctgccggtttaggccgtgattctggaaaaccttggatgggccttcgtcctatgtcagccttccctttgatcctcaggccctacctgtagagacctccactcctagagccagtctcagggtctgggatttccctgcaggagctcagccaccactgtgccatggtgacacaggccaaggcagacattggccctcccttctcccagcccccagaggcctggccttgggttcgtcagcatgggccgaggacgttgcctgtagaatcctcctctgcctgggagtggctctgtgtggaccagtccctcactggcccattctttttttgacgcagccaatctgtgaccacgattcctcccacagatgcctcctgcttggattctgagtggtcagagatctgtaaagcatgactttcaaggatggttcttaggggactgtgaaagtgttgggtcttcctccaggatgcctgcatgggaccccacccggagctggtgtggccattccccaagtgccactggcccatggatgggggtgggtgctggtgccagctgggctgggtgtgggttctgtgtccttccaggatatgtgtcatttcccatgaggggccggggcaggtggctgggtgggggcacaggctggagtattcttagttctactggttctacactgtgaggtggcaatgggatttgctcagatgccacccaataaaatgcctgttacttaaaaaaaaaaaaaaaaaaa

SEQ ID NO: 25553 - DNA, 1456 bp, Homo Sapiens
ctcaaaagatgatggccgagatccggggctccaaggagacagcaactcagcccttgcctctgtatgacacaccctatgagccagaggaggatggggccaccccggaaggtgagggggccccctggccccgggagtcccgcctgccagaggatgatgagaggccccctgaggagtatgaccagccctgggagtggaagaaggagcggatttccaaagcctttgcagcccagtttgaaggaccggagaagagctgcctgtcacctggccgggaggagaaggggcggctacctccccgactctctgcagggaaccccaagtcagccaaacccctaagcatggagcccagcagccccctgggggagtggacagatccagcactgcctctggaaaaccaggtctggtatcacggggccatcagccgaaccgacgccgagaacctgctccggctgtgcaaagaggccagctacctggtgcgcaacagtgagaccagcaagaatgacttctccctctccctcaagagcagccagggattcatgcacatgaagctgtcccgaaccaaggaacacaaatatgtgctgggccagaacagcccgcccttcagcagcgtccctgaaattgtgcaccactatgccagccgcaagctacccattaagggagccgaacacatgtccctgctctaccctgtggccatccggactctttagatgtgaagccagggcactgtgatagacctgtacccagccctgtgcccatcacctggctgagggctgtggctcttgccagggacgtgatctttcaaacctttcttctcctgggatccagtagaagctggagattccttaatttattctaaagggaaagggctcctggggccttggagtaaggggttgtctggagctggggaaagaggaatccctggagagaaaggatagcccctggaggaagggggttccagagctactgggatggtagggagtttcagactggcagctccggctcctttccgaccttagggcagaggtggtgacctccaccaccaccaccctctccccactgggtccgtgcgaggtagtgcagaattcggccccttggggcgccttaccacctctctgcctccgtccccgacttccaccccagaccgtcggagggctccgcccagagtctggtaagaggtttggggaagacaggcccctgggaagcagccggctttggggggtggggagagaaggggaggggctcgggcagagggaactgtgcagtccccaggccgccccggctccgggctagaggcaataaataaacccgatcctgccgggcacagccgcgcccgcgcctccggcgccgtccccgggctgacgggggagggagcggagaagcgagcgcagattctgcgtataaatcagctctggagcagacacagcccggctgtgaaaagcaaaaaaaaaaaaaaaaaaaa

SEQ ID NO: 25554 - DNA, 3349 bp, Homo Sapiens
tgtaccaccacgcacaggcccacaaagcgctcttcgggatcttcatcccctcacagcgcagggcgtccgtctttgtgctggacactgtgcgcagcaaccagatgcccagccttggcgccctgtactcagcagagcacggcctcctcctggagaaggtgggccctgagctcctgccaccccccaaacacaccttcgaagttcgggcagaaactgacctgaagaccatctgcagagccatccagcgattcctgctcgcctacaaggaggagcgccgggggcccacactcatcgctgttcagtccagctgggagctgaagaggctggccagtgaaattcctgtcttggaggaattcccactggtgcctatctgtgtggctgacaagatcaactatggggtcctggactggcagcgccatggagcccggcgcatgatccgtcactacctcaacctggacacctgcctgtcgcaggccttcgagatgagcaggtactttcacattcccattgggaacctaccagaggacatctccacattcggctccgacctcttctttgcccgccacctccagcgccacaaccacctgctctggctgtcccctacagcccgccctgacctgggtggaaaggaggctgatgacaactgtcttgtcatggagttcgatgaccaagccactgttgagatcaacagttcaggctgttactccacagtgtgtgtggagctggaccttcagaacctggccgtcaacaccattctccagtctcaccatgtcaacgacatggagggggccgacagcatggggatcagcttcgacgtgatccagcaggcctccctggaggacatgatcacgggtggtcaggctgccagtgccccggccagctacgatgagacagccctgtgctctaacaccttcaggatcctgaagagcatggtcgtgggctgggtgaaggagatcacccagtaccacaacatctatgcagacaaccaggtgatgcacttctaccgctggcttcggtcgccatcctctctgcttcatgaccctgccctgcaccgcacactccacaacatgatgaagaagctcttcctgcagctcatcgctgagttcaagcgcctggggtcatcagtcatctacgccaacttcaaccgcatcatcctctgtacaaagaagcgccgtgtggaagatgccatcgcttacgtggagtacatcaccagcagcatccattcaaaggagaccttccattctctgacaatttctttctctcgatgctgggaatttcttctctggatggatccatctaactatggcggaatcaaaggaaaagtttcatctcgtattcactgtggactgcaagactcccagaaagcagggggagcagaggatgagcaggaaaatgaggacgatgaggaggaaagagatggggaggaggaggaagaggcggaggaatccaacgtggaggatttactggaaaacaactggaacattttgcagtttttgccacaggcagcctcctgccagaactacttcctcatgattgtttcagcgtacatcgtggccgtgtaccactgcatgaaggacgggctgaggcgcagtgctccagggagcacccccgtgaggaggaggggggccagccagctctcccaggaggccgagggggcggtcggagcccttcccggaatgatcaccttctctcaggattatgtcgcaaatgagctcactcagagcttcttcaccatcactcagaagattcagaagaaagtcacaggctctcggaactccactgagctctcggagatgtttcctgtcctccccggttcccacttgctgctcaataaccctgccctggagttcatcaaatacgtgtgcaaggtgctgtccctggacaccaacatcacaaaccaggtgaataagctgaaccgagacctgcttcgcctggtggatgtcggcgagttctccgaggaggcccagttccgagacccctgccgctcctacgtgcttcctgaggtcatctgccgcagctgtaacttctgccgcgacctggacctgtgtaaagactcttccttctcagaggatggggcggtcctgcctcagtggctctgctccaactgtcaggcgccctacgactcctctgccatcgagatgacgctggtggaagttctacagaagaagctgatggccttcaccctgcaggacctggtctgcctgaagtgccgcggggtgaaggagaccagcatgcctgtgtactgcagctgcgcgggagacttcgccctcaccatccacacccaggtcttcatggaacagatcggaatattccggaacattgcccagcactacggcatgtcgtacctcctggagaccctggagtggctgctgcagaagaacccacagctgggccattagccagccccgggccccgggtgcctctgcgtccgtgccaggcctcctgatgccaaggccacatccccgtgcttccagtgaccagaccactgaccaccctgactgtccaaacctgtgaccccaggccagggaacggggaggaaaccaaagaaaaccattttcagggagctcagacgtcacaggagggagcgggagcaggatgtggccctggcctcgccagagcacctgaagaagcaggccgtgagcgaggctgcgagtgccctgggcgccgtttctcacgcagtgaatgcttttccaggcctctgttgcttcctgcaccacacctggtggggtgggagcgtcctctaggtgcccctagttctttgtcctgcctcccagagggaggaaaagcccctgggggcttctggctccctgagattgggctctgagacgagacgggttcccaaggccctggtggggctggagtctcacctgtttgcatggagaaatgggctggccccacagcctcacaggagcagtttgtgggctggtttccccgggaatccagaccctaacccgtgagaatctggattttggcttgtgagccctgcttatttggagccgggtctagagggaaccctctatcagcctcaggaaaacaagacctctgtgcacctcacttttggctcactgcagcccttgtccttcacctccacacaggaccagctggaagcagaaagaagaaaggccaatttcacagggcaccaaacaagtatgaaatgtaaatcagaaatgcagacaccccagacgagagcctcacaggagggagggggccccacaggctccccaggaggctcgtgtctttggcccagagccagccttagtttgtccctgccatctactgtctgaggccatcgctgctacactttgtttttatttgtatttcatactgaagtttcaaaaaaaaaaaaaaaaaa

SEQ ID NO: 25555 - DNA, 1974 bp, Homo Sapiens
gtctctcccgaccatggagggggtcgcggtggtgacggcgggcagcgtaggcgctgccaaaaccgagggagctgcagccttgccgcctccgcctccgcctcctgtctccccgcccgccctcacccctgcacccgcagcgggtgaggagggaccggcgcctctgtctgagacgggggctcccggctgctccggctcccggccccctgagctggagccggagcgcagcctgggccgcttcagaggccgcttcgaggacgaggacgaggagttggaagaagaagaggagctggaggaggaagaagaggaggaggaggaggacatgagtcacttctcgttgaggctggagggaggccggcaggactcggaggacgaggaggagcgcctgattaatctctctgagctgaccccatacatcttgtgttccatttgcaaaggttacttaatagatgcaactaccatcacagaatgtcttcataccttttgtaaaagctgcatcgtaagacatttttactacagcaacagatgtccaaaatgcaatatagtagtacatcagacacaacctctttataacataagtgctaatgaaggcacgggacattttaagccattggaaaagaagtttgttcgagtttcaggagaagcaactattggacatgtagaaaaattcctcagaagaaaaatgggtcttgatccagcttgtcaggtagatataatctgtggtgatcacctgttggagcagtatcaaactctaagggaaatccgacgtgcaataggtgatgcagcaatgcaggatggtctgcttgtccttcattatggtcttgtggtttctcctctgaagataacttgaagattctaggcacattatgaggagggaaacaaaggaggcttctgcaggactgcatctcaccaaagatttccatgaaatgtaattgctaccactttgctgttcaagacataacttacctatttttagcaccaagaattatagcgtttataagtacaacttggaacgatggaatgcatctgttactagagactgtatataaaaagcagccaaagctcaggggaaatttttcaaaaattgaattttaaaatttcttatgattttaaataccttgacattgattttgcttcccatctttgaagtaattggttagttttctttgttcagccatttcaagttggtggttgggatatctgctctctgggatggcatcagttgggcagtcatctttttggaagagaagtgtgcttttgagtggaagattcaaagccagtctttgttaaactgcagggtgtactctcaaagaccaaaactattggccacttttgtatgttgccagcatattttgaacttgtacctttttttatactagcaacactacaaaggagaagttactcatttcaaaatggatgaattgttattatgtgtgaagagactctgagtttatgatctgtgccataaaatttcagtgtaataagacttcttcaatacatcttccaataaggggtgcttctttgtgacagtatttttatttctgacattcattttatttgggtacatagtgtggttgttgataccttgcaatagtattgcttctgaaagtaataaaaaattttaggagaatttgagaagtttacagaattacttattcattgttttcttagtaagtcagtttaatgtttatttttctcattatttcatcactgcaataaagaataagggtgtttgagctcacctccatgcaaagacttcagttttaaaacattatttgcctaaaattagcattgtgatgctttctgaaagaaatattttataaatcctgtttaacagcagaatttctgaatgtgtagagactactacaaaattggaaaaagattggcaattctttgtaaagaatttgtgaattgtgtataaatttattctaacatttaataaaaatgtattttaacctaaaaaaaaaaaaaaaaaaa

SEQ ID NO: 25556 - DNA, 1446 bp, Homo Sapiens
caaggaagatgataggctccatcttgggccacctgagctatagggcaggctaatggaatcaaccatttctgagcactaaatgtatcatgaaaagttgaatggcctgctcataagtttagctcattcactggaaatgtagattgatgttcaatgttaaactggaaggagcttggtttgtgtgtcagtggttatattagtgggtagtgtaacattttatccaggttggggtgaggggagatggccacagtagcaagtggtgacactaaataccattttgaaggctgatgtgtatatacatcattactgtccgtagcaatgaaggatacagtactgtgttgtgggtgagtgttgctattgcccagcattaatatttgggtgtgtatgtttgaggctatgaaacacgcaggagtgtttttgtgctattaattttaagagaaagcagctttttcttaaaattcactgttgagaaacttgcatgtctggaggcggtgtcctctccgccctgtcgggtcctggatgagtacgagttatggtcacggtcacagcctgatctcttatgtgttcatagccattcgctctcccatcagaactgtttgtcctgaatgtgttcctctagttctagaaaatgaccactaatttaaaaaactcggttgtgaggtttgcccagaggcacttgttccagaatttcccctcctgcttcagccatgtccttgtcacttggcattctaagctaaagctttagcttcccaattcgtgatgtgctaggccaagattcgggagctgttgccagcctcgtcaaatatggaagagaaacaacctgcggtcaaaagggagtgatttgttaagtggtgcgcgtctatctcataactagatgtaccaaccagggaagggccaaggatggaaaggggtaacttttgtgcttccaaagtagctaagcagaagtgggggagcagtttagccagatgatctttgattaggcaaacattgagttttaaagaggctgtcaagttgaggccacttggtccattagctggggcagcaagatcactactcaacgttttcacactgtggcaagattgctcttctagtggaataatgccctagtttctctgagatgatgtaagtggcatgatgttacctaaggcttaggcttagcttgatttctgggcccactgtctgtgttcttaagatgccaacctgttgcttttttttttttttttcccccatttaaaaggatagtacctactccctctaaccacctcaccccattcttgaatgacattttatccttcggaaagaacaaggctgtgatgtagtgactattgtctgtgtctcctgtgtgtgtctgttcttgtcacaaatgtatttggggacgttggatgcattcattttctgtaataaagtttcttaatcactcttaaaaaaaaaaaaaaaaaaaaaaaaaaa

SEQ ID NO: 25557 - DNA, 3902 bp, Homo Sapiens
gtacactgcagttgtctccgaggtgaacctccggagccttggcacagctcgcttctaaagcttggaaatgacccgccacacctgaagcctgcaggtgctgaggccacattcgatcagacccaagctttgggagaccgctggggaaatttcccacttcctctcctgagaccaggaactcagcagagaaactttgtggaaaatgaactgaaggatgccacccagggagagtatctcctgagatcccatcatgcaggccttcccacaagggcccggcagcatgacaaggtgaaggcagagtatgtgcatctcaaccacccgctcaccctcgtgaccagagagcgcgatttggccgtgaaggagaaacaccagctccaagccaagctggagaacctagaacaggtcctgaagcatatgcgagaggcggctgaacggcggcagcagctgcagttggagcatgaccaggccctggctgttctcagtgccaagcagcaggaaattgaccttctgcagaagcctcagaaaaccaacctccagtgtccgcactttaggaagtgtcccatgctttcacagttgacgatgacgttcgttagcactcttggtttcaagcgacagaaaacccaaacaggaaattgtttttgtgcccatcactgaaaatgtggcttcagacatggctagatccagggctcaaatctgctggcctcagacccagtagaatccaaggcctccccgacatcaccaggacttggctgctctctgccctcctctggatcagcttcagccttggtttccctgtggagacccccagccactccagccctgaccctcctggtggcaaagtggctgcagcctcacctcctcccaagccaaagtccaatagaaaggggcttccctctcccgcagcattctcaggcagaggcccattgccctccgtaggccccacaccacccaggtcaccagtcgctgagggttcagactgtgcttggcacaggggaggtccagaccccagccagtccagaggttcttcccaggagaggagctcccgacgctggaggaagaggcctgaggaacaggcctgttacccagaggatccgctatccaggaggctcaggttgaggctaagaaggagcatgaaggcgcagtgcggctgctagagtccaaggttcgagagctggaagagaaatgccggactcaaagtgagcagttcaacctgctgtcccgggacctggagaagttccggcagcacgctggcaagattgacctgctgggtggcagcgcggtggcccccctggacatctccacggcccccagcaagcctttcccacagttcatgaatggcctagccacctccctcggcaaaggtcaggagagcgctattggaggcagctctgcgatcggtgaatatatccggccccttccgcagcctggtgacaggccggagcctctgtccgccaagcccaccttcctgtcgagatccggtagcgcaagatgcagatctgagtcagacatggagaatgaacggaattccaatacctccaagcagagatactcggggaaggtccacctctgtgttgcccgctatagttacaaccccttcgatggaccgaacgagaaccccgaagctgagctgcccctcacggcgggaaaatacctctacgtctatggagacatggatgaggatgggttctatgaaggagagctcctcgatggccagaggggtctggtgccctccaacttcgtggactttgtgcaggacaacgagtcgcggttggcaagcacgctggggaacgagcaggatcagaacttcatcaaccattccggcatcggcctggagggagagcacatcctggacctccactccccaacccacatagatgcgggcatcaccgacaacagtgccgggaccctggacgtgaacatcgacgacatcggagaagacatcgtgccttaccctagaaaaatcaccctcatcaaacaactcgccaaaagtgttattgtgggctgggagcccccggcggtgccaccaggatggggaacggtgagcagctacaacgtcctggtggacaaggagacacgcatgaacctcacgctggggagcagaactaaagccctcatcgagaagctcaacatggcagcctgcacctaccgcatctccgtgcagtgcgtcaccagcaggggcagctcagatgagctgcagtgcacgctgctggtgggcaaggacgtggtggtggccccctcccacctgcgggtggacaacatcacgcagatctccgcccagctctcctggctacccaccaacagcaactacagccacgtcatcttcctcaacgaggaggagttcgacatcgtcaaggccgccaggtacaagtaccagttcttcaatctcaggcccaacatggcctataaggtgaaggttctggccaaaccccaccagatgccgtggcagctcccgctggagcaaagggagaagaaggaggcctttgtggagttctccacgttgcctgcaggacccccagcacccccacaagatgttaccgtccaggctggggtgacccccgccaccatccgggtctcctggagaccacctgtgctgacgcccaccgggctgtccaatggcgcaaacgttaccggctacggcgtgtatgccaaagggcagagggtggctgaagtcatcttccccacggcagacagcacggccgtggagcttgtgcggctgcggagcctggaggccaagggcgtgaccgtgcggaccctctccgcccagggcgagtccgtggactctgcagttgctgccgttccccccgagctcctggtgcctcctaccccccacccgagacctgcaccccaatcaaagccattagcaagttctggagtccccgaaaccaaagacgagcacctgggtccccacgccaggatggatgaggcctgggagcagagccgtgcacctggccctgtgcatgggcacatgctggagccgcccgtgggccccggaaggcggtcgccctcacccagccgcatcctgccacagccacagggcaccccggtgtccaccaccgtcgccaaggccatggcccgggaggccgcgcagagggtggccgagagcagcaggttagagaaaaggagcgtcttcctagagagaagcagcgcggggcagtacgccgcctcagacgaggaggacgcctatgactctccagacttcaagaggaggggcgcctcggtggacgacttcctgaaaggctctgaacttggcaagcagatggtctcctaacagagctggaattagattgaaccgaggcctgaagaagacctgtttccacgcctttccccatgtgccacgttctcctcacctatccaggagtgaatcatcaccttccctgcaatctgctcaggttacaaacccggaggaaaggctggagcacttgttctctgggtgaaggacccatacccccactggtttttgagatcggcattcagcgctgtcttatggcagccacagccccaggtggccccagagcccttgacatgtggccacctggggctgagtgtgactgaggccctgaatttttacttctataaaattagttccagattagtttacattctaattagtttacatgtaaacagccacacgtggctggtggccaccagtgctgacgcccagctctggatgaccacacctgctacaagagatgacttttctagagaagagtagaaacacagcggcagaaacacagctctgcacttccgagggcctcccactccttctgatgagactgcagaggaagtctgtttggccaagcatgctattaacacgttttcctgcttgttttgttttttaacagagcaaacaggtctgtttctattaaaatttaaaaagcgttaaaaaaaaaaaaaaaaaaaaaaaa

SEQ ID NO: 25558 - DNA, 1793 bp, Homo Sapiens
atcagacctcaaccatgatcagagcaactgctaggtcggcgcccgatcggcaagaagagattagcaaattgatgcgaagtgcaagtttcaacacagatccatacgtccgtgaatttggaatcatggtcaaagatgagatgacagacgtgactgggcgggtgctgcagccgccctccatcctctacgggggcaggaataaagctattgcgacccctgtccagggcgtctgggacatgcggaacaagcagttccacacgggcatcgagatcaaggtgtgggccattgcgtgcttcgccccccagcgccagtgcacggaagtccatctgaagtccttcacagagcagctcagaaagatctcgagagacgctggcatgcccatccagggccagccgtgcttctgcaaatacgcgcagggggcggacagcgtggagcccatgttccggcacctgaagaacacgtatgcgggcctgcagctggtggtggtcatcctgcccggcaagacgcccgtgtacgccgaggtcaagcgcgtgggagacacggtgctggggatggccacgcagtgcgtgcagatgaagaacgtgcagaggaccacgccacagaccctgtccaacctctgcctgaagatcaacgtcaagctgggaggcgtgaacaacatcctgctgccccagggcaggccgccggtgttccagcagcccgtcatctttctgggagcagacgtcactcacccccccgccggggatgggaagaagccctccattgccgccgtggtgggcagcatggacgcccaccccaatcgctactgcgccaccgtgcgcgtgcagcagcaccggcaggagatcatacaagacctggccgccatggtccgcgagctcctcatccagttctacaagtccacgcgcttcaagcccacccgcatcatcttctaccgcgacggtgtctctgaaggccagttccagcaggttctccaccacgagttgctggccatccgtgaggcctgtatcaagctagaaaaagactaccagcccgggatcaccttcatcgtggtgcagaagaggcaccacacccggctcttctgcactgacaagaacgagcgggttgggaaaagtggaaacattccagcaggcacgactgtggacacgaaaatcacccaccccaccgagttcgacttctacctgtgtagtcacgctggcatccaggggacaagcaggccttcgcactatcacgtcctctgggacgacaatcgtttctcctctgatgagctgcagatcctaacctaccagctgtgtcacacctacgtgcgctgcacacgctccgtgtccatcccagcgccagcatactacgctcacctggtggccttccgggccaggtaccacctggtggataaggaacatgacagtgctgaaggaagccatacctctgggcagagtaacgggcgagaccaccaagcactggccaaggcggtccaggttcaccaagacactctgcgcaccatgtactttgcttgacatgttttagtgtttagcgattgtgtaccgagtgggattcacgagaccagctacactcagaccaacagatggccagcccttccgtgacagccagcatcgaacatgagacgtcattgattttattagattctccgttttccagaatgccttccgtcccagatttcaaacttggattttgaactgcagacctgtatgagaacccaatgtcataggaaatatggtttgctaaaatctataagctgcttattaaaacagagtcccgtgtgtcctaaaaaaaaaaaaaaaaaa

SEQ ID NO: 25559 - DNA, 2895 bp, Homo Sapiens
gagatgcctgaacccagccttggggaatctcacagccctcacctacctcaacctcagccgaaaccagctgtcgctgctgccaccctacatctgccagctgcccctgagggtcctcatcgtcagcaacaacaagctgggagccctgccccctgacatcggcaccctgggaagcctgcgacagcttgacgtgagcagcaacgagctccaatccctgccctcggaactgtgtggcctctcttccctgcgggacctcaatgtccggaggaaccagctcagtacgctgcccgaagagctgggggacctccctctggtccgcctggatttctcctgtaaccgcgtctcccgaatcccagtctccttctgccgcctgaggcacctgcaggtcattctgctggacagcaaccctctgcagagtccacctgcccaggtctgcctgaaggggaaacttcacatcttcaagtatttgtccacagaggccgggcagcgtgggtcggccctgggggacctggccccttctcggcccccgagtttcagtccctgccctgcagaggatctatttccgggacatcggtacgatggtgggctggactcaggcttccacagcgttgatagtggcagcaagaggtggtctggaaatgagtcaacagatgaattttcagagctgtcattccggatctcagagctggcccgggagccccgggggcccagagaacgcaaggaggatggctcagcggacggagaccctgtgcagattgacttcatcgacagccatgtccccggggaggatgaagagcgaggcactgtggaggagcagcgaccacccgaattaagccctggggcaggggacagggagagggcaccaagcagcaggcgggaggagccggcaggggaggagcggcggcgcccggacaccttgcagctgtggcaggagcgggaacggcggcagcagcagcagagcggggcgtggggggccccgaggaaggatagcctcttgaagccagggctcagggctgttgtgggaggggccgccgccgtgtccactcaagccatgcacaacggctcgcctaagtccagtgcctcccaagcaggggctgcagcggggcagggagcccccgcccctgcccctgcctcccaagagccccttcccatagctggaccagcgacagcacctgctccacggccacttggctccattcagagaccaaacagcttcctcttccgttcctcctctcagagtggctcaggcccttcctcaccagactctgtcctgagacctcggcggtacccccaggttccagatgagaaggacttaatgactcagctgcgccaggtccttgagtcccggctgcagcggcccctgcctgaggacctggccgaggctctggccagtggggtcatcctgtgccagctggccaaccagctacggccgcgctccgtgcccttcatccatgtgccctcccctgctgtgccaaaactcagtgccctcaaggctcggaagaatgtggagagttttctagaagcctgtcgaaaaatgggggtgcctgaggctgacctgtgctcgccctcggatctcctccagggcactgcccgggggctgcggaccgcgctggaggccatgaagcgggtggggggcaaggccctaccgcccctctggcccccctctggtctgggcggcttcgtcgtcttctacgtggtcctcatgctgctgctctatgtcacctacactcggctcctgggttcctaggccccaaaatcggccctccctcacccctttcccttcctctctatttataaggtccctgctccacccgaccccacctgcggtgccttcagccccaaccaaagacactagtgcacccccttcacagacactgacctcagaggccccactctggtgcccccagaccctgggcccccagcctctggcctccctccagtagccccacgagtccccacctctcagtgctgacggtgccttcatgtccccgccggccctgcccctgccctctgtaccccgtgaggggtggcaggagctggagtctcccccttcctcctgtgccctccccttccccccccaacagctgctatgggggggctaaattatctctattttgtagagaggatctatatttgtaggggttcggggcccaggccgggtccctatctctgtgtataaactgtacagaccgtggccgccctgcctgtgtgtgtgtgtgtgcgcgcgcgcgcgcgtctgctccgcgtgttggtggctgtggccatggctctgtgcccaccagcatctccctcctgagatgccggcctctcatgctcccggagcgtccgccaaccccccgtgtcacctcccttctgttatcgctgacagctttcttgcgtctcatttgtcgccgagccccgagcgcacggtgatgctcgggtctgcccccgaccccctgccacaggccggaagccgcagggggcaccgtggggaagctaacccggccccttcccccaggagtcactgtgccagccccaccacatcctggaagaggagggggccccgggaaggggcctcccctacatcgctgctgtcgtccacgccctgctggaccggccttaggggtgaaggtgggggcacagggcccaccccgcccgggaccccgggagcagaagacgcgcctgggctccgcgctctcagagaagcacgtggtgagggtggcctgggcctgggcacccttggcctgccggcctggctgcctctggggtcgagggtctgggtggaaggaccgcgggtgtcgcaggtgtcgtgtcagccgcaataaacagaagccagaagccctctgggtggccctcagaaaaaaaaaaaaaaaaaaaaaaaaaaaaaaaaaaaaaaaaaaaaaaaaaaaaaaaaaaaaa

SEQ ID NO: 25560 - DNA, 932 bp, Homo Sapiens
cgggaaccagtgggcactgagaatggtttatggcctgacattacttgcaaccaaagccaggcagcatttggattttcgcttttggaaaccaccttacctggtttgctccatgagggaggggcagcaacatcgctgggaaccctgaggtgtagatatgtataaatgagctgtgtgtgtatctgaagctcgggcacttgtggggttaccaggagtgtgcgtctcactcccaggcctcgttctggaaacgattctgtaggtctgtctgggaggccttaggcaagtttgatcaagaacagtcgagctggataaacaggctgttccttgtccagcactagtcatcccaggggggcgggggcggggctgcaactcctgtgcacaaaggaagggccctgggtaggggtcaggagctgccttgcccagagatgtgtctgggtcactttggaaacaggaatcctctccccaaaatgggtagcaatgggggtacagaggccaaagacgcagctgcatgtcctgcagtgcctgggacgccccgtagtgaagagtgatgtggcccaaatgtcagcagtgccagtgtcagactcctgctaagagacagtatcaagaaagataacttcaaaatacactttctggaggcctggcgcggtggctcaggcctgtaatcccagcactctgggaggccaatgcatgtggatcacctgaggtcaggagttcgagaccagcctggccaactgcctgaaaccccatctctactaaaaatacaaaaattagccaggtgtggtggcgcaagcctgtaatcccagctatttgggaggctgaggcaggagaatcgcttgaacccgggaggcagaggttgcagtgagccgagatcgcaccactgcactccagcctggacaacagagtgggactctgtctcaaaaaaaaaaaaaaaaaaa

SEQ ID NO: 25561 - DNA, 3119 bp, Homo Sapiens
ccgtcctggtgccttactgtgcatacagttctactcgtctcagaaacgtatgtcaaacgaggatacagtgtctggaactattggttctaagatataagtggaatgagcctggatcaggagaagtatgctgagctagagttgaaggaagcttctctttctaacaagagaaagcagagttaaattatggcagagacaagtctgttagaggctggggcctctgcagcctctacagctgcggctttggagaacttacaggtggaggcgagctgctctgtgtgcctggagtatctgaaggaacctgtcatcattgagtgtgggcacaacttctgcaaagcttgcatcacccgctggtgggaggacctagagagggacttcccttgtcctgtctgtcgaaagacatcccgctaccgcagtctccgacctaatcggcaactaggcagtatggtggaaattgccaagcagctccaggccgtcaagcggaagatccgggatgagagcctctgcccccaacaccatgaggccctcagccttttctgttatgaggaccaggaggctgtatgcttgatatgtgcaatttcccacacccaccgggcccacaccgttgtgccactggacgacgctacacaggagtacaaggaaaaactgcagaagtgtctggagcccctggaacagaagctgcaggagatcactcgctgcaagtcctctgaggagaagaagcctggtgagctcaagagactagtggaaagtcgccgacagcagatcttgagggagtttgaagagcttcataggcggctggatgaagagcagcaggtgttgctttcacgactggaagaagaggaacaggacattctgcagcgactccgagaaaatgctgctcaccttggggacaagcgccgggacctggcccacttggctgccgaggtggagggcaagtgcttacagtcaggcttcgagatgcttaaggatgtcaaaagtaccctggaaaaatgtgaaaaggtgaagaccatggaggtgacttcagtatccatagagctggaaaagaacttcagcaattttccccgacagtactttgccctaaggaaaatccttaaacagctaattgcggatgtgaccctggaccccgagacagctcatcctaacctagtcctgtcagaggatcgtaagagcgtcaagttcgtggagacaagactccgggatctccctgacacaccaaggcgtttcaccttctacccttgcgtcctggctactgagggtttcacctcaggtcgacactactgggaggtggaggtgggcgacaagacccactgggcagtgggtgtatgccgggactccgtgagccgaaagggcgagttgactccactccctgagactggctactggcgggtgcggctatggaatggggacaaatatgcagccaccaccacaccttttacccctttgcacatcaaggtgaaacccaagcgggtaggcatattcctagactatgaggccggcacactgtctttctacaatgtcacagaccgctctcatatctacaccttcactgatacttttactgagaaactttggcccctcttctacccaggcatccgggctggacggaagaatgctgcaccacttaccatcaggcccccaacagattgggagtgacaggttgggatgtgggaatgactggggtgaggcagggtcaagtgctacgggcctccttcccgtgtcctgctggaacgtcttcgtgtccacctgggtccagtcctgaatcatcttggagaaacaccttggtttctaggatggttttgtgtggagggggaggtaggactgggctggatgagagagcacagctgtgacttcctcctaactgtcagggtggggagctggttcccagaggattgtctaccctgaagtccatcaggttttctgttgcacaaggacgggtcaggaaggaaggagaggcttttccagaaacaaaaaatctgtgagggtctgacttgctcaaaccagaggaggaaacagaaacccctgcacatctttttagggggttctttgacccaggatagtcttgcttcttgaggtagatcacaggggtctgtgtacctctgaattcatgagagatgaacgacagatgctctcatgggtctagatattgaggagtttttctgagggcagagattggacatcaacaaggctagaagggtcagggaagtgggctaaaggaacagattcctagagattaatgaagaggagggaggtttctttggtcttctattccaagggtaaggttgcgattatgggtaagattggccagaggtaggaatgtggggagaaggagaggctgaaaagaaagcagaggagaacccaggtccctgcctcagccttcagcagagttggcttattgcctgcctctataccaataagtcagtcaccttgctcctctccagaggcaaagtggaagagatcctgcaagacacatctatcctttcacagtgttcccaagggaacttggaaaggagagtcaggtattagaggaaagagaagggtatttgtatacaaagccctggccttaaagaatgttacttagtagctactcccaaattgtcagccttcttacctggccaaggtgtccaagccagaaaggaaaaaaggttatggagtctttctcaccctaaggacagggtggaagagggtggtatatagggaagggccagataggcaacttcatttggcttgtgtgcatctggcctggaactggtgttaagccaggcttttgcttgtttgttgccatccctcaccctttgccatttcccttttcagagaatgtaaatgattttcatgttaggccaaaataaacaacttatagggtatatatgttgtcataaaaggtaaaagtgatgcatgccaaaccaaactaaaccaatttggattatctgctattcgggtaatcttcacagaaatgactgagagaagaatctgcagtttactgagggcatttcagttcctcctaccacctcaacaggactttgtccagactctcctcctcttacctttgtgccttgactgtggttctttgtggcaagatactttggttggttaaaataatatggaacaaaaaaaaaaaaaaaaaa

SEQ ID NO: 25562 - DNA, 3645 bp, Homo Sapiens
ggggttcctggtcatacaccagtactaccaaggacagcttttttcctgcaagatctgttacctaaagcaataaaaaatggccagaggatcagtgtccgatgaggaaatgatggagctcagagaagcttttgccaaagttgatactgatggcaatggatacatcagcttcaatgagttgaatgacttgttcaaggctgcttgcttgcctttgcctgggtatagagtacgagaaattacagaaaacctgatggctacaggtgatctggaccaagatggaaggatcagctttgatgagtttatcaagattttccatggcctaaaaagcacagatgttgccaagacctttagaaaagcaatcaataagaaggaagggatttgtgcaatcggtggtacttcagagcagtctagcgttggcacccaacactcctattcagaggaagaaaagtatgcctttgtcaactggataaacaaagccctggaaaatgatcctgattgtcggcatgtcatcccaatgaacccaaacacgaatgatctctttaatgctgttggagatggcattgtcctttgtaaaatgatcaacctgtcagtgccagacacaattgatgaaagaacaatcaacaaaaagaagctaacccctttcaccattcaggaaaatctgaacttggctctgaactctgcctcagccatcgggtgccatgtggtcaacataggggctgaggacctgaaggaggggaagccttatctggtcctgggacttctgtggcaagtcatcaagattgggttgtttgctgacattgaactcagcagaaatgaagctctgattgctcttttgagagaaggtgagagcctggaggatttgatgaaactctcccctgaagagctcttgctgaggtgggctaattaccacctggaaaatgcaggctgcaacaaaattggcaacttcagtactgacatcaaggactcaaaagcttattaccacctgcttgagcaggtggctccaaaaggagatgaagaaggtgttcctgctgttgttattgacatgtcaggactgcgggagaaggatgacatccagagggcagaatgcatgctgcagcaggcggagaggctgggctgccggcagtttgtcacagccacagatgttgtccgagggaaccccaagttgaacttggcttttattgccaacctctttaacagataccctgccctgcacaaaccagagaaccaggacattgactggggggctcttgaaggtgagacgagagaagagcggacatttaggaactggatgaactccctgggtgttaaccctcgagtcaatcatttgtacagtgacttatcagatgccctggtcatcttccagctctatgaaaagatcaaagttcctgttgactggaacagagtaaacaaaccgccataccccaaactgggaggcaatatgaagaagcttgagaattgtaactacgcggtagaattggggaagaatcaagcgaagttctccctggttggcatcggtggacaagatctcaatgaaggaaaccgcactctcacactggccttgatttggcagctaatgagaaggtatacactgaatatcctcgaagaaattggtggtggccagaaggtcaatgatgacattattgtcaactgggtgaatgaaacattgagggaagcagagaaaagttcatccatctctagtttcaaggacccgaagattagtacaagtctgcctgttctggacctcatcgatgccatccaaccaggttccattaactatgaccttctgaagacagaaaatctgaatgatgatgagaaactcaacaatgcaaaatatgccatctctatggcccgaaaaattggagcaagagtgtatgccctgccagaagacctggttgaagtgaaccccaaaatggtcatgaccgtgtttgcctgcctcatggggaaaggaatgaagagggtgtgaggcccaatggggctgggtgggaggcggtgcactcactcctgactgcccggcacagatgctccagggatgattcaagccattccaaagttcaacttggtgacactctataagattccaaaaagcacatattagtgcagccaagtagcctctcctgtatttaacaaaaagtgcttcattctttgcaggaggcccaacctcctatatataggtttctattcttgatttatttgcttcttcgaaaatctagaggaaaagaaagaagttattttccaggtacccttctcgcttttgccattagccaaggatagaagctgcagtggtattaattttgatataatctttcaaaccagcttcatgtggcttcccttttctttgttcaagatgagggccaggaggggaaacatcacacctgccctaaaccctgttcctggaggtcagcatttgatctgttgcaagcccctctttctgtcccctcttcctaccctgcctcccatgactttgctcctcacacttttggaaccatgccttccgggggggcccatctcttctggccgtccttgtctctgggccacttggagtgtgtgataaatcagtcaagctgttgaagtctcaggagtctctggtagcctgcagaagtaagcctcatcatcagagcctttcctcaaaactggagtcccaaatgtcatcaggttttgttttttttcagccactaagaacccctctgcttttaactctagaatttgggcttggaccagatctaacatcttgaatactctgccctctagagccttcagccttaatggaaggttggatccaaggagggtgtaatggagcatcaagccactcggcggcagcatggagctataactaagcatcctttagggttctgcctctccaggcatttagccctcacattagatctagttactgtggtatggctaatacctgtcaacatttggaggcaatcctaccttgcttttgcttctagagcttagcatatctgattgttgtcaggccatattatcaatgtttacttttttggtactataaaagctttctgccacccctaaactccaggggggaaaatatgtgccaatcaatagcacccctactcacatacacacacacctagccagctgtcaagggcagaatgaatctatgctggataagaaatggtggaactgcgttatgaagagctaatttactggacaaagaattccaaagcaaaaccagaacagtatgaatttgagcaggtctcataggttgagcaatttccccctaaaccaactgaaggctaaaaagcaacaggccattgtgaaccaatgcaagacgccctctatcatggtgaaaagctccatcaatgaggtatcttctttagtggtggtatgtaatggaacttagccatttttcaaagcaattgaaatgcattgctctggatctgttccttggcagtggactcagaaagccaacatgtggctcctcccagcccataaccagtatttttgctgcttctgaatacaaattggttggttttgacttcagattgaacttactgtagcctcagatgatttcccccctccgcctccaggaagaaagaatgttactgccttaataaaaaatgaaaagagaatgatgctcaaaatctttccaaataaaatgttccctataaaaaaaaaaaaaaaaaa

SEQ ID NO: 25563 - DNA, 848 bp, Homo Sapiens
ccggctgctcctattgagctgtctgctcgctgtgcccgctgtgcctgctgtgcccgcgctgtcgccgctgctaccgcgtctgctggacgcgggagacgccagcgagctggtgattggagccctgcggagagctcaagcgcccagctctgcccgaggagcccaggctgccccgtgagtcccatagttgctgcaggagtggagccatgagctgcgtcctgggtggtgtcatccccttggggctgctgttcctggtctgcggatcccaaggctacctcctgcccaacgtcactctcttagaggagctgctcagcaaataccagcacaacgagtctcactcccgggtccgcagagccatccccagggaggacaaggaggagatcctcatgctgcacaacaagcttcggggccaggtgcagcctcaggcctccaacatggagtacatgacctgggatgacgaactggagaagtctgctgcagcgtgggccagtcagtgcatctgggagcacgggcccaccagtctgctggtgtccatcgggcagaacctgggcgctcactggggcaggtaagagccacaagttcctctccggctgccgcaggaccccactgccgtgtgccgggctcagcacttgtgccccttatcaagtttagcctgcaaagagagtgagagagaccacccgtcccatcgatattctgggaaactgaggcttggcatccaggaacactcctgagtgactgacaaaatgtattcaagcttggttggctgaccccagacactgatgattgattaaagtttgtagtttgggttttcaaaaaaaaaaaaaaaaaaaaaaaaaaaaaaaaaaaaaaaa

SEQ ID NO: 25564 - DNA, 1225 bp, Homo Sapiens
ctgtgaaggaaccgcctttctctccgcgtgtctcacccttttctccccatatctgtttggacatgagctgagggcacggtcgcgggcggtcagccctgttcgcagctacggcgaggaggggcgcgattgttccttgttgccgctccgcttagtggccgcgtccattccgcgcggtgtcccgattttaggggtagggagaagtgtcagcttcaggcatcgcgaggcgtggcggccccatggccccgctgggaggcgccccgcggctggtactgctgttcagcggcaagaggaaatccgggaaggacttcgtgaccgaggcgctgcagagcagacttggagctgatgtctgtgctgtcctccggctctctggtccactcaaggaacagtatgctcaggagcatggcttgaacttccagagactcctggacaccagcacctacaaggaggcctttcggaaggacatgatccgctggggagaggagaaacgccaggctgacccaggcttcttttgcaggaagattgtggagggcatctcccagcccatctggctggtgagtgacacacggagagtgtctgacatccagtggtttcgggaggcctatggggccgtgacgcagacggtccgcgttgtagcgttggagcagagccgacagcagcggggctgggtgttcacgccaggggtggacgatgctgagtcagaatgtggcctggacaacttcggggactttgactgggtcatcgagaaccatggagttgaacagcgcctggaggagcagttggagaacctgatagaatttatccgctccagactttagtcactaggttctaggagtgagctggggcctgctgaggtgggggtggggctgactctgcaaaatgggggtgtcccccgatcctggccgaggtgaggaacagacagggggggtctagattctgagggggttggtggatattgggcaaggcaggaaacctctggagacctcattttctccatggggaagacagccatgctcttcaggaggagactccaagggcaaaggagggtgtcttggctgtgcttgaaggcgaaaccctgccatatccccagtgccagtcccctcagcctgtggtggccttgcatcctgactggatgttctcagccccttgttctgggcaagaacccagagctccccagtgtggatactaataaacctcttggagcacaaaaaaaaaaaaaaaaaaaaaa

SEQ ID NO: 25565 - DNA, 1884 bp, Homo Sapiens
tgggagtggagtgggggcagcgtggttatgtggctggaccgccgcggatggctcagggttcttggacattggcgctacgaccttaggcgccctagctttaccaggacttggagtggcgataagggcccaatggcagaaacagtgtctacccaggttgggacagagggcgggctgagggcttcgcatcagcaaaacggtgacgctggtggcgacgcgaaggttgagctgtcccccgggcccccgaagccggctggccgggaagtggagccggccccagtaggcggggagcatccctcggctgcagccccaggcccgggcaagcataagaagcggcggggcgcaaccagggagcgtgtcgtgccgcccccgaagaagcggcggaccggggtgagcttcggagatgagcactttgcagaaaccagttattacttcgagggcggcctgcgtaaggtgcggccctattactttgacttccggacctactgcaaaggtcgctgggtgggccacagcttgctgcacgtcttcagtaccgagttccgagctcagcccctggcttactatgaggccgcggtccgggcgggccgcctgcaactcaacgagaagccggtgcaggacctcaacatcgtgctcaaggacaatgatttcttgcggaacacagtgcacaggcatgagccaccagtcacagcagagcccattcgcctgctagctgagaacgaagatgtggtggttgtagacaagccttcctccattcccgttcacccctgtggccgcttccgacacaacacagttatcttcatcctaggcaaggagcaccaactcaaggagctacaccccttgcatcggcttgaccgccttacctcaggggtgcttatgtttgccaagacagctgcagtctctgagagaattcacgagcaggttcgggaccggcagctggagaaggagtacgtgtgccgggtggaaggggagttccccactgaggaagtgacctgtaaagaacccatcttagtggtgtcttacaaagtaggggtgtgccgtgtagatccccggggcaagccctgtgagacagtgttccagaggctaagctacaatggccagtccagtgtggtacggtgccggccactcacaggccgcacacaccagattcgagtccaccttcagttcttgggccatcccattctcaacgaccccatctacaactcagttgcctggggtccttctcgaggccggggcggctacattcccaagacaaacgaggagttgctacgggacctggtagcagagcaccaggccaaacagagcctggatgtgctagatctctgtgagggtgacctgtccccaggactcacagactctacggccccctcctcagagttgggcaaggacgacctggaagagttggctgcagctgcccagaagatggaggaagtagctgaggcagcccctcaggagttggacacaatagccttggcatcagagaaggcagttgaaacagatgtcatgaatcaagagacagacccactctgtgcagagtgccggctggtgcgacaggatcccttgccccaagaccttgtgatgttcctacatgccctacgctataaagggccaggctttgagtacttttcaccaatgcctgcctgggcacaggatgactggcaaaaggactgagggtgtggccaatggagggattgcttcttgggttgtgacaaggatgggctatagggcaagggctgaccccatgggctagtacttggggtttctataggaatgaggacgggcttctaaagagacctgctcatacttgctacctccttccagtgggaatttggagactttttggtttgtaaatatatccctttttctaacaaaaaaaaaaaaaaaaaaaaa

SEQ ID NO: 25566 - DNA, 2605 bp, Homo Sapiens
caaaaaagaatggagaggaaatacacagaaagcaacgtgtatgaaaatgggctatgaagaggtttctcagaagttcacctccatacggcgagtccgtggtgataattactgtgcactgagggccacgctgttccaggccatgagccaggctgtggggctgccgccctggctgcaggacccggagctcatgctgttaccagaaaaactcataagcaaatacaactggatcaagcaatggaaacttggactgaaatttgatgggaagaatgaggacctggttgataaaattaaagagtcccttactctgctgaggaagaagtgggcaggcttggctgaaatgagaactgctgaagcaagacagatagcttgtgatgaactattcacaaatgaggcggaggaatatagcctctatgaagctgtaaaatttctaatgctaaacagagccattgaactatataatgataaagagaaaggaaaggaagtaccatttttctctgtgcttctgtttgctcgggacacatcaaatgacccaggacagcttctgaggaaccacctcaaccaggtgggacacactggtggtcttgaacaggttgaaatgttccttcttgcctatgctgtgcgccacaccatccaggtgtaccggctctccaagtacaacacggaagaattcatcacagtctaccccaccgacccacccaaggactggccagtggtaacgctcattgctgaggacgatcggcactataacatccccgtcagagtgtgtgaggagaccagtctatgagagacgcatgctcctgacagcctggcgacgtggcgaagatgcacaggtggctcctgggcttgggctgcaggtttgggggtctctaagaacaatctctgagaagaacccttgggcccctgggagccaagttggacaggatgtcctgaagactagcttttgataagagaaattaaccaagtctttcccctcatctatgatgcaatatatttcagtgggggccttcagagcacacctgttggacggtgcaaaccatatcttctccagaaggcaaatacttttgtatcagaggaaactcagttttggagaggaatatgttctttatatctcaaatcaaaactctctctaatggtaaactggcttctaatttttttaagtacagtatttttttttcccctttagtagtaacgggtttctatagatcttcctatacagtctgctttaactcaggaccttgagattatgagactgacgtgctgcccactgcactgagggggcttctaacagtctgctttaagtggtataattctgggatagatctgttactggcatagtcatgacaacctctggtaatcttaccttctcctttttatgaagggaagagcaatggtttggacttacatcttaattaaggctattttaagcagattgttttgcaacagattaagaattgggtcccaaagtgggttatttcaaggcatttttgaagactggaggagcgtaggagggagtggtgagggaacctagaacttcttgctccttgtgactatgacagatgtctgatgcccccagcgcactggagtctggggcttggtgcaggtggtgccccatcagtgtggacagacactacttgcctttgtggtttagtgttggaagctttaattattctacagttccatagattcacaattttatagccaaacagtttgtatccacctgctttcagaggaggaaccaaaggccaaattactttgaggtagggcttagctggacctgggttttcctatgctcttttcatgctgtgttggagggtgtgtccactgccagatctgtgtaacccgtctgggtcaggggatgagtgacagcaaaccatcttaaaatttttcatgagtacatttaagcggaagcatacgggaatatgagtgcaaaagtgtggctgagccgcgtatgcccttgattggttttgggaagcctgagggaggcagccttcctggctatgagccatcgcctgcccaatcaggctaagggtggtgactggggtggtgaaggggcagctctgctgagcatggtctgccttatggcctgaattgtcctcaaggggtgtggactgcagatggtgttcacatgaaccggagacatcactctttaggattctactggcagcccctgaattggctcaacgtttgtggaggtggtatttccctgaagtactgagctttgttttataataattaaaatccttatttggtccaatttaatatagtttagaagctattttttttgaggcaaaccgtttttgaaaatgtaaattttgtttttaattaaaaataaagtcttagttaagaaaactcaggatgcacaaaactattcagactgttactttagctttctcccattacctcatcagtaatattcaccacattttgctaaatatttattgattagagtgttgaaatcaaattctgctctaaatgtgtgtgaatatgttggagaggctttgtgttcttcactgtgaaatgcaattgtgccttgaataagaaggtacctagaagccaaattaaagtaataatgacttcttaaaaaaaaaaaaaaaaaaaaaaaaaa

SEQ ID NO: 25567 - DNA, 3693 bp, Homo Sapiens
ctgttgcgtgactcccccacagtccggccgcgggagtccgaccctgaatgcccagggagtgttgagagaaatctggacgagtttcgggtcccgctcccttgggagcacgtggcctaccagcctctcgattgcagggttgggtggtcgcgacaccggggtcgccttgaggccagtccggctgccgaggtctgcgggagtccacctccggccagctggcaattttgaaagactgccttactttccccatctcagtgccagggcaggggcccttggagtgacttggctggggtctgtggcccgatccccctgccgtccctcaggacccgggctttctgctgtacagacttctcgtgggcagcctcccctcggaactcgggcatcatggcctcagaggctcggggtggtctgggggcccctccgctgcagtctgcccgatccctgccgggccccgccccctgcctcaagcacttcccgctcgacctgcgcacgtctatggatggcaaatgcaaggagatcgccgaggagctgttcacccgctcactggctgagagcgagctccgtagtgccccgtatgagttccccgaggagagccccattgaacagctggaggagcggcggcagcggctggagcggcagatcagccaggatgtcaagctggagccagacatcctgcttcgggccaagcaagatttcctgaagacggacagtgactcggacctacagctctacaaggaacagggtgaggggcagggtgaccggagcctgcgggagcgtgatgtgctggaacgggagtttcagcgggtcaccatctctggggaggagaagtgtggggtgccgttcacagacctgctggatgcagccaagagtgtggtgcgggcgctcttcatccgggagaagtacatggccctgtccctgcagagcttctgccccaccacccgccgctacctgcagcagctggctgaaaagcctctggagacccggacctatgaacagggccccgacacccctgtgtctgctgatgccccggtgcacccccctgcgctggagcagcacccgtatgagcactgtgagccaagcaccatgcctggggacctgggcttgggtctgcgcatggtgcggggtgtggtgcacgtctacacccgcagggaacccgacgagcattgctcagaggtggagctgccataccctgacctgcaggaatttgtggctgacgtcaatgtgctgatggccctgattatcaatggccccataaagtcattctgctaccgccggctgcagtacctgagctccaagttccagatgcatgtgctactcaatgagatgaaggagctggccgcccagaagaaagtgccacaccgagatttctacaacatccgcaaggtggacacccacatccatgcctcgtcctgcatgaaccagaagcatctgctgcgcttcatcaagcgggcaatgaagcggcacctggaggagatcgtgcacgtggagcagggccgtgaacagacgctgcgggaggtctttgagagcatgaatctcacggcctacgacctgagtgtggacacgctggatgtgcatgcggacaggaacactttccatcgctttgacaagtttaatgccaaatacaaccctattggggagtccgtcctccgagagatcttcatcaagacggacaacagggtatctgggaagtactttgctcacatcatcaaggaggtgatgtcagacctggaggagagcaaataccagaatgcagagctgcggctctccatttacgggcgctcgagggatgagtgggacaagctggcgcgctgggccgtcatgcaccgcgtgcactcccccaacgtgcgctggctggtgcaggtgccccgcctctttgatgtgtaccgtaccaagggccagctggccaacttccaggagatgctggagaacatcttcctgccactgttcgaggccactgtgcaccctgccagccacccggaactgcatctcttcttagagcacgtggatggttttgacagcgtggatgatgagtccaagcctgaaaaccatgtcttcaacctggagagccccctgcctgaggcgtgggtggaggaggacaacccaccctatgcctactacctgtactacacctttgccaacatggccatgttgaaccacctgcgcaggcagaggggcttccacacgtttgtgctgaggccacactgtggggaggctgggcccatccaccacctggtgtcagccttcatgctggctgagaacatttcccacgggctccttctgcgcaaggcccccgtcctgcagtacctgtactacctggcccagatcggcatcgccatgtctccgctcagcaacaacagcctcttcctcagctatcaccggaatccgctaccggagtacctgtcccgcggcctcatggtctccctgtccactgatgatcccttgcagttccacttcaccaaggagccgctgatggaggagtacagcatcgccacccaggtgtggaagctcagctcctgcgatatgtgtgagctggcccgcaacagcgtgctcatgagcggcttctcgcacaaggtaaagagccactggctgggacccaactataccaaggaaggccctgaggggaatgacatccgccggaccaatgtgccagacatccgcgtgggctaccgctacgagaccctgtgccaggagctggcgctcatcacgcaggcagtccagagtgagatgctggagaccattccagaggaggcgggtatcaccatgagcccagggcctcaatgagcctggtccatgaagtgcccaccacatcgcagcacttttaccacgttttgtcctcagaccccgcccatgctgtgtggtctctgcatgtctccattcttctctgtctctgtcttgcatgtctcctaccatgtcactgtccctgggccacccagtgaaagcaaagcctgggaatctgctcattgttgtttgggctcaggtattgagcctgatggcccaggtattgagggcctcccctgctggtggccctgtcctgggatcctcagaagcctgactgtcctatgggcttctccagtgtccacaggggcttgggatggttgtggggggctggcccctctagcctttccggtccttcctgggcaaatctaagccttggccagggccgaagtttaggcccctgtcttgttcatgtagccgaggggcaggcgggggacctctacacctctgctgtgggcacggggctgctgagggtctgtggaactccagcagctctgcactgggtagagctgggcctagagctcagtcacaggcctgggcttcctggcctgagtgggtagacgcaggcggcagaggtgctggaccacatctccgccaagtcactgcccagcagccttctccgtcctgtccccagcccacgtgctccttgggtgtcagcttcctgtgcctctgtgggagagggcagctgccttgtgttatgtctggggccacagttgctgcaaagtcctggatctgccactcaaccccgggagtggtgttcccagtgtggctcccagagctttgaccagattgtgatcccagctggcccctatgttgtgttctggactgaggcctttgctgtgaactgcagtgtttcatacgaaccatctttcctagtgcatgagaaataaagattatttaagtaaaaaaaaaaaaaaaaaa

SEQ ID NO: 25568 - DNA, 2318 bp, Homo Sapiens
gccgcttccgtcgccaccctctctggacagcccagggccgcaggctcatgccctctccgcgtccagtgctgcttagaggtgctcgcgccgctctgctgctgctgctgccgccccggctcttagcccgaccctcgctcctgctccgccggtccctcagcgcggcctcctgcgccccgatctccttgcccgccgccgcctcccggagcagcatggacggcgcgggggctgaggaggtgctggcacctctgaggctagcagtgcgccagcagggagatcttgtgcgaaaactcaaagaagataaagcaccccaagtagacgtagacaaagcagtggctgagctcaaagcccgcaagagggttctggaagcaaaggagctggcgttacagcccaaagatgatattgtagaccgagcaaaaatggaagataccctgaagaggaggtttttctatgatcaagcttttgctatttatggaggtgttagtggtctgtatgactttgggccagttggctgtgctttgaagaacaatattattcagacctggaggcagcactttatccaagaggaacagatcctggagatcgattgcaccatgctcacccctgagccagttttaaagacctctggccatgtagacaaatttgctgacttcatggtgaaagacgtaaaaaatggagaatgttttcgtgctgaccatctattaaaagctcatttacagaaattgatgtctgataagaagtgttctgtcgaaaagaaatcagaaatggaaagtgttttggcccagcttgataactatggacagcaagaacttgcggatctttttgtgaactataatgtaaaatctcccattactggaaatgatctatcccctccagtgtcttttaacttaatgttcaagactttcattgggcctggaggaaacatgcctgggtacttgagaccagaaactgcacaggggattttcttgaatttcaaacgacttttggagttcaaccaaggaaagttgccttttgctgctgcccagattggaaattcttttagaaatgagatctcccctcgatctggactgatcagagtcagagaattcacaatggcagaaattgagcactttgtagatcccagtgagaaagaccaccccaagttccagaatgtggcagaccttcacctttatttgtattcagcaaaagcccaggtcagcggacagtccgctcggaaaatgcgcctgggagatgctgttgaacagggtgtgattaataacacagtattaggctatttcattggccgcatctacctctacctcacgaaggttggaatatctccagataaactccgcttccggcagcacatggagaatgagatggcccattatgcctgtgactgttgggatgcagaatccaaaacatcctacggttggattgagattgttggatgtgctgatcgttcctgttatgacctctcctgtcatgcacgagccaccaaagtcccacttgtagctgagaaacctctgaaagaacccaaaacagtcaatgttgttcagtttgaacccagtaagggagcaattggtaaggcatataagaaggatgcaaaactggtgatggagtatcttgccatttgtgatgagtgctacattacagaaatggagatgctgctgaatgagaaaggggaattcacaattgaaactgaagggaaaacatttcagttaacaaaagacatgatcaatgtgaagagattccagaaaacactatatgtggaagaagttgttccgaatgtaattgaaccttccttcggcctgggtaggatcatgtatacggtatttgaacatacattccatgtacgagaaggagatgaacagagaacattcttcagtttccctgctgtagttgctccattcaaatgttccgtcctcccactgagccaaaaccaggagttcatgccatttgtcaaggaattatcggaagccctgaccaggcatggagtatctcacaaagtagacgattcctctgggtcaatcggaaggcgctatgccaggactgatgagattggcgtggcttttggtgtcaccattgactttgacacagtgaacaagaccccccacactgcaactctgagggaccgtgactcaatgcggcagataagagcagagatctctgagctgcccagcatagtccaagacctagccaatggcaacatcacatgggctgatgtggaggccaggtatcctctgtttgaagggcaagagactggtaaaaaagagacaatcgaggaatgaggacaattttgacaacttttgaccacttgcgctaaaaaaaaaaaaaaaaaa

SEQ ID NO: 25569 - DNA, 2595 bp, Homo Sapiens
ggccacccccgggcggcttgtagccggtgcgcggggtggctggggctacgtgcagagctgtcgcggagccggagcagcagcggtgaagcccctcggctcggccgagaccgccgtgcccattgctcgcctcggttgccgccgctttagccgcagccgctgctgccgccgccgggggagaggcagcctattgtctttctccgcggcgaaggtgaggagctgtctcggctcggcccgcgggggagccccgggagccgcacggagatggaggaggacatctggacagtgagcaggaggcgcttcggcccatgccgaacatcccaggggacctggagagccgggaggccatggtggcatttttcaactccgctggagccagtgcccaggaggaacaaagggtgtgctgccagcccctggctcacccagtggcctcgtcccagaagaagccagaggtagcggccccagccccagagagtgggggtgagtctgtgtttggggagacccaccgggccctgcagggggccatggagaagctgcagcgactttatggaaggagaaggtggacctgaaggagcgggtagagaaactagagcttcaattcatccacctctcaggacagacagacaccatagggagaaagtacatcagccagggggcagtgtcagagacgcagcactgggagaggaggacatcgtcaggctggcccaggaccaggaggagatgaaggtgaacctgcaggagctgcggggcaggtgttgcagcttgtgggagaccacaaggaggggcatggcaaattctgaccattgcccagaaccctgctgatgagcccactctaggagccccaatagcccaggagcttgggtgtgctgacgagcagggtgatcaccactggattgctgacagatagaggacgtgggaccgtgactatcacccctaatctgcagtggatttggctctcggcactcccaggctgggagctggatacctgccctggcagcatgactcagactgcatgacagtcacagactcgcctctgctcctgtggtccagtggccggacaccccctgggatggctcaaaggagtcaggacttggaagtggggacatcagggtagctgaaggaaatccacacacccagagcatctcggagttcagactctcagacctgaagtaggcgcccccgggactgggctaggagttggacggaatggaggatggaggacagcgagaagaaaggaagagaaatgcaacgtgtgggcagccgccaagagtgaaaatagagggaagtgtcatgcaagtgctggacagaaggcggcaggtgggacgagccccacagccccctcctcaaaaacgaccacctccaggactcagtgatccctggggggcaggctctgccagccctcggccacacgtggctccggcacccatggtcccagtgccttggatggagacggccagttctggcggccagatgtggtgctctggaatccagtcccatttccttcctggccacgcctgtccagcggcctcttcagccgcattcagcccctacttacctggggaccccggctggggcacgagagcaccaggggggtagggcccaaagggatcaggggaagcctctggcctggagggtatggggcacgcttccccaagggcggacccggcaggaggaagcccaggagctgggtcctgccgcccaggagctgggccctgccacccaggccgggctagggacatggcagggcctgggcatcctgacgctggacttgggcgacctgggaggcacagggaggggagagatgggcgaccccgccccagcgcagtgccggccacaccccaaggcggttgccagagcttaagccccgcccccagcagcgagaacatcccagctccacaccccccccccccccccgcagccagtgctccttgtcaagctccccccgtcactccaggtgggagccaccccggtgagggggtgtgccacttgcccccagggcactcctctgggcatcccgggtgggggattttggggccgtggggggcagtctttggtacctgtgttcgtcagggatgctctgacaaccaggtgtcgtccacgggcgggggcatgggcatggtgacagtggtcctgttgatgtcaccgatgatgctgagcgcctccttcagcgcgtggtgcatgtgcagcatctcgtcgtgctgctgtgcctgctctgccaactcctccatcagtgtgttctggttcccacatgagtacatattggccagcggctccgagatgatgaactccggggtctgagagtgggcaaacagggaagaaggttgggacctggtgcctgtgccgccctggctgccttgctgggcccttctgggactgtgcgctggacttggagccccttggagtatggcttttcacacgggcttctataccgcttcgactggaagatccacctccccactgccttttctcactcagatggggacaccgaggtccagaggaaaagacacctgtcaaatgtcacagatctgggaggggacttaagacttaccatgccaagaggaaaaaaaaaaaaaaaaaaaaaaaaaaaaaaaaaaaaaa

SEQ ID NO: 25570 - DNA, 3584 bp, Homo Sapiens
acgagggcggatcccgcagcccccacgcccgcagctcccgctccagcccaggccccggctccagccccggaggcagtcccggccccagccgcagcccccgtcccggcgccggcgcccgcctcggactcggcctccgggccgtcctcggactccggcccagaagccggctcgcagcgcctgctgttttctcacgacctggtgtcgggccgttaccgtggctccgtgcacttcgggctggtgcgcctcatccacggcgaggactcggactcggagggcgaggaggagggccgcgggagctcggggtgctccgaggccgggggcgcgggccacgaggagggccgggccagccccctgcgccgcggctacgtgcgcgtccagtggtacccggagggcgtcaagcagcatgtgaaggagaccaagctgaaactagaggaccgttctgtggtgccccgagatgtggtccggcacatgcgatccaccgacagtcagtgtggcacggtgatcgacgtcaacatcgactgtgccgtcaagctcatcggcaccaactgcatcatctatcccgtcaacagcaaggacctgcagcacatctggcccttcatgtatggggactacattgcctatgactgctggctggggaaggtctacgacttgaagaaccagatcatcctgaagctatccaacggcgccaggtgctccatgaacacggaagatggcgccaagctctacgacgtctgcccgcacgtcagcgactcgggtctcttcttcgatgattcctatggcttctacccaggccaggtgctcattggccctgccaagatcttctccagcgtccagtggctgtcaggtgtcaagcccgtgctcagcaccaagagcaagttccgagtggtggtggaagaggtgcaggttgtagagttgaaagttacatggattaccaagagtttctgtccagggggcacggacagcgtcagccccccaccctctgtcatcacccaggaaaacctaggcagggtgaagcgtctcggatgctttgaccatgctcagcggcagcttggggagcgctgtctgtatgtcttcccagccaaggtagagccagccaagattgcctgggaatgtccagaaaaaaactgcgcccagggggagggctctatggccaagaaggtgaagcgcctgttgaagaagcaggttgtgcggatcatgtcatgctccccagacacccagtgttcccgggaccattccatggaagacccagacaagaagggggaatccaaaaccaagagcgaagcggagtctgccagccctgaggagacgcccgatggctctgccagtccagtggagatgcaggacgagggtgcagaggagccccacgaggcaggagagcagctgcccccattcctgctaaaagaaggcagagatgacaggctgcactcggcagagcaggacgcagatgatgaggctgctgatgacacggacgacaccagttcggtgacctcctctgccagctccaccacttcctcccagagcggcagcggcacgagtcgcaaaaagagcatccccttgtccatcaagaacttaaagcgcaaacacaagaggaagaagaataaaatcactcgagacttcaagccaggggacagggtggcagtggaggtggtgaccacgatgacctcagccgacgtgatgtggcaggatggctccgtggaatgcaacatccgctccaacgacctcttccctgtgcaccacctggacaacaacgagttctgccctggagacttcgtggtagataagcgagtccagagctgtccagaccctgctgtctacggtgtggtacagtctggggaccacatcggccgtacctgcatggtgaagtggttcaagctgaggccgagtggggacgacgtggagctgattggagaagaggaagatgtgagtgtttacgacattgctgaccaccctgactttaggttccgtacaactgacatcgtcatccgcatcggcaatactgaggatggggctcctcacaaggaggatgagccatcggtgggccaggtggcccgtgtggacgtcagcagcaaggtggaggtggtgtgggctgacaactcaaagaccatcatcctgccccagcacttgtacaacatagagtctgagattgaggagtcagactacgattcggtagaaggcagcaccagcggggcatcctcggatgaatgggaagatgatagtgacagctgggagacggacaatgggctggtggaggacgagcaccccaagatagaggagccccccatcccacccctggagcagccggtggcccctgaggacaagggagtggtgatcagtgaagaggcagccacagctgccgtccagggggctgtggccatggctgcccccatggccgggctgatggagaaggctggcaaggacgggccacccaagagcttccgggagttgaaagaggccatcaagatcctggagagcctcaagaacatgactgtggagcagctgctgacgggctcgcccacctctccgactgtggagcctgagaagccaactcgggagaagaagtttctggatgacatcaagaagctacaggaaaacctcaagaagaccctggacaatgtggccattgtagaggaggagaagatggaagcagtgcccgacgtagagcgcaaggaggacaagcccgaggggcagtcacctgtgaaggctgagtggcccagcgaaaccccggtgctgtgccagcagtgtggcggcaagcctggcgtcaccttcaccagcgccaagggcgaggtcttctccgtactggagtttgcaccctgtgagtcagcccttgcctggtcttcgccttcccccgccttctcggggctcctgtttgtgtcaccagatctgggtgcagggtggttagtcccctcgccagaccccagctactgccccagggcaaaccatttccctgtgtggtcacagtgctgaggccagcagcggcgagtgggaagtctgtgggtgtgctcacctgtccagccaggttggcagatggagctccagggcctctccatgagggactgactattctcttcccccctctagcaaatcattcttttaagaaaattgagttccagcctccagaagccaagaagttcttcagcacagtgcggaaggagatggcgctgctggctacctcactgcctgagggcatcatggtcaagacttttgaagatagaatggcaagtaggcttggcatgggcaggtgcagatgtgctgtgtgggcacccagtgcccaagaggccaccaaccttgggtccccaaacctccggggctgactggcacctgcgaggacactcacccacccaccttttacaggggcggtcacaggctcagtcaggtgagggctgactcagccgtgtgtccaggccagatggttctttctttcctccctcctttaaaaaattactttctcggccgggcgcagtggctcacacccgtaatcccagcactttgggaggccgaggtgggtggatcacgaggtcaggagatcgagaccatcctggctaacacagtgaaaccccgtctccactaaaaaaaaaaaaaaaaaa

SEQ ID NO: 25571 - DNA, 3628 bp, Homo Sapiens
attttttgcttggctacccggagtgaagcggccgggttgggcgattaacaggccgtggttaggaaggacggagaaggggcgttcgctcctttgggacttttcatgcctcgtttttttttcagatgtggcttggtctgggcgcaaggtcccagcagccagcttaagcttactcttctgtgaaaggggaaagtatcccctgtggaaagcggttaaacttgtggagggggtgcgggacgtgagttcttccccatgccaggcgaatggtgtggccttgagctggtccaggagccggctcgacgtgtctgagggaggccccggagggggcggggaggtggcccacagaacgcgggttctgtaaagagacgttgggaagattcgattccgagaagaggaagaaccggattgaaagagagccaggccgctgagggggagggggctgctaagatggcgtcggcctcctccgggccgtcgtcttcggtcggtttttcatcctttgatcccgcggtcccttcctgtaccttgtcctcagcatctggaatcaagagacccatggcatctgaggtgccttatgcctctggcatgcccatcaagaaaataggccatagaagtgttgattcctcaggagagacaacatataaaaagacaacctcatcagccttgaaaggtgccatccagttaggcattacccacactgtggggagcctgagtaccaaaccagagcgtgatgtcctcatgcaagatttctacgtggttgagagtatcttctttcccagtgaagggagcaacctgacccctgctcatcactacaatgactttcgtttcaagacctatgcacctgttgccttccgctacttccgggagctatttggtatccggcccgatgattacttgtattccctctgcagtgagccgctgattgaactctgtagctctggagctagtggttccctattctatgtgtccagcgacgatgagttcattattaagacagtccaacataaagaggcggaatttctgcagaagctgcttccaggatactacatgaacctcaaccagaaccctcggactttgctgcctaaattctatggactgtactgtgtgcaggcaggtggcaagaacattcggattgtggtgatgaacaatcttttaccaagatcggtaaaaatgcatatcaaatatgacctcaaaggctcaacctacaaacggcgggcttcccagaaagagcgagagaagcctcttcccacatttaaagacctagacttcttacaagacatccctgatggtctttttttggatgctgacatgtacaacgctctctgtaagaccctgcagcgtgactgtttggtgctgcagagcttcaagataatggattatagcctcttgatgtcaatccataatatagatcatgcacaacgagagcccttaagcagtgaaacacagtactcagttgatactcgaagaccggccccccaaaaggctctgtattccacagccatggaatccatccagggagaggctcgacggggtggtaccatggagactgatgaccatatgggtggcatccctgcccggaatagtaaaggggaaaggcttctgctttatattggcatcattgacattctacagtcttacaggtttgttaagaagttggagcactcttggaaagccctggtacatgacggagacactgtctcagtgcatcgcccaggcttctacgctgaacggttccagcgcttcatgtgcaacacagtatttaagaagattccctgcgttcaccttggtcgtcctgatgttttacctcagactccacctttggaggaaatcagtgagggctcgcctattcctgaccccagtttctcacctctagttggagagactttgcaaatgctaactacaagtacaaccttggaaaagcttgaagttgcagagtcagagttcacccattaagcgcaaagcctcagaagacctggaacaagattctgccatctctgtgatcccaagatgtcagcccttgccccagcaatgctgaattttcttctacttggtcatcaaaaaaggagtgtaatagaagtgaggggagctgctcctccatcttcttcctgaagaagaaccttctctccttcctcttcctcatgaatgggccttagtgcctcagagagttgaggaccgcagcatcccctccactccagagttgggtggtacggattttcaactggccaaccctttgcctccactattgaatttttttcagacccccattcttcatgctggaaatgggattgctggacttggcagctttctttcccctcgtctttgactaggaaccggactcttaatttcctcaggacagactagctggcacattatccctaccttagttctttctctctgactcctggaagaatactcctgtaatctctgtaaaggtttttgggggataagggtgtttaaccacctcccagctttcttcttctttttttttttctgaaaaaaggaaaacacacagcacacaatttcaagccattttcagatcagaactccagaagtgttgacaagatgcctattcgtagagttccctcagaagagccatggtgtttatgaagagaagagtagtgattgctctgccagaagcagctcctctttaaactcctcctctcttgatgaatttcttaaggctgaaggaatgaagagagtgggacatggggtaatctttatcccttttgttaaaacaggaggcagccatgggctgggagatcatagcccttcctaggcagaatcctgttcactgccaggctatagtaattattactattttgcaatttgaaatatattctggttgtttttctaaatgtgaagacttaccaaatgaattttagatcattctccagaggagattttttttgctcttctcatcttttccaacagtgttctcctgtttgtggagctaaggtaaagaggggacacttctgtctgtttaacagacagtccatatctgtgaggccagcaaatattttcttaaactcatggggagacagcagattcttgccttggtgaggtcattgctgtgccatatgtcctacccccctgtcttcatgcagggaagttggaaatgggggctacatatgccctctcctccccgtctacaagagttgtggttttccatctgatccttccactcttgtcaggggaagaagggggcctggtatctcaggcagattgttgaattcctgttctatcccttctctatcccaccctgccttgataatatgttagcccataccccaaataactgtctatattagacacccccagccagtttctggctgcctgtctttgctgccatgttttttacaagaaggaaagaattcttgctatttttttttcataatttactatttatgatgtatttaagtgttttattaaggacagagttctgttaggggtgggagggaatatttgagggagggctgggtcttagggaaaggaatggggaagcaacatttttattaagtgttactatttgcctctactttgtattgttcagaaatggcaaatacaatataaaagtgatatatggttttaatgtaataaactttaatgagttatttagaaaaaaaaaaaaaaaaaa

SEQ ID NO: 25572 - DNA, 1631 bp, Homo Sapiens
catgaagaggagctcagacagctcttaccacatgatacaagagccggctggtggaagagtggggaccagaaagagaatttgctgaagaggagaaggaaaaaaaaaaacaccaaaaaaaaaaataaaaaaatccacacacacaaaaaaacctgcgcgtgaggggggaggaaaagcagggccttttaaaaaggcaatcacaacaacttttgctgccaggatgcccttgctttggctgagaggatttctgttggcaagttgctggattatagtgaggagttcccccaccccaggatccgaggggcacagcgcggcccccgactgtccgtcctgtgcgctggccgccctcccaaaggatgtacccaactctcagccagagatggtggaggccgtcaagaagcacattttaaacatgctgcacttgaagaagagacccgatgtcacccagccggtacccaaggcggcgcttctgaacgcgatcagaaagcttcatgtgggcaaagtcggggagaacgggtatgtggagatagaggatgacattggaaggagggcagaaatgaatgaacttatggagcagacctcggagatcatcacgtttgccgagtcaggaacagccaggaagacgctgcacttcgagatttccaaggaaggcagtgacctgtcagtggtggagcgtgcagaagtctggctcttcctaaaagtccccaaggccaacaggaccaggaccaaagtcaccatccgcctcttccagcagcagaagcacccgcagggcagcttggacacaggggaagaggccgaggaagtgggcttaaagggggagaggagtgaactgttgctctctgaaaaagtagtagacgctcggaagagcacctggcatgtcttccctgtctccagcagcatccagcggttgctggaccagggcaagagctccctggacgttcggattgcctgtgagcagtgccaggagagtggcgccagcttggttctcctgggcaagaagaagaagaaagaagaggagggggaagggaaaaagaagggcggaggtgaaggtggggcaggagcagatgaggaaaaggagcagtcgcacagacctttcctcatgctgcaggcccggcagtctgaagaccaccctcatcgccggcgtcggcggggcttggagtgtgatggcaaggtcaacatctgctgtaagaaacagttctttgtcagtttcaaggacatcggctggaatgactggatcattgctccctctggctatcatgccaactactgcgagggtgagtgcccgagccatatagcaggcacgtccgggtcctcactgtccttccactcaacagtcatcaaccactaccgcatgcggggccatagcccctttgccaacctcaaatcgtgctgtgtgcccaccaagctgagacccatgtccatgttgtactatgatgatggtcaaaacatcatcaaaaaggacattcagaacatgatcgtggaggagtgtgggtgctcatagagttgcccagcccagggggaaagggagcaagagttgtccagagaagacagtggcaaaatgaagaaatttttaaggtttctgagttaaccagaaaaatagaaattaaaaacaaaacaaaaaaaaaaaaaaaaaa

SEQ ID NO: 25573 - DNA, 1369 bp, Homo Sapiens
ggtcgacccctccgggatgggggccagggcagcctccgcggctatcccgggagtcctgctccgacaccacctccacaggggaagccgctcggagagacgcagggacccaggcaagggatgcgggcaaacgcgccaagggttcggcagaggggcgtgaccgccagttggccgggctgagcgaggcgccagagggaagcctgcaaggtacgtctgcgagagccgggtgcgggcgcggcaggggaaaaggggggcgctggctctcttaccgccaggtccggattgcggctgtccctgtgtgacacggctcggatgacccccgctcgccagcttcgccagccgcgtccgctctcccagcgctccgaacgtgcctcgtcgccgaccgccacacacaggaaccgcttacccaccagctctgcccgcgtctctaccgccatagctgtcgctgccgaagcggccgctgcctcctccagtgcgagggaaccgatgaaacctcactcttaccggccgctcatgctgaggagagcggaccgggacacagcagcggacccgaaagagcgcagactcgggacgaaccggccgctctgccccggacacagcgacctcgggccctccccgcaaacactcctttggactcccagattcgcagccttgtgctgcagcgccacacaagaaaactgaaacaaaacccaacgcggccgtcgaagaccccgaggcagcccagccgccgccaccgcgccgcggccagtactgctccgtctccctccccgggcagcggcggcgcgcagcgcgtctccttccgccggcgcgggcggggcagcagccgcgggagggtcggcggaaccaccgcagacggaaagtagtgcccggccctgcggaggcggcagcggccactgggtccgtccagatccagaggcggcggcggcggcggcagcgggagacgaaaaaatgaagagggccgcgggaaagtaggcgacagctattcaaagcttttgggggtctacctttgtattcgttgctccctcagaggtggaggtgaggggaaagtgaagtgtagtggttccactctgatcacaaaataaactcctgggttgacgcctcacccgcggtttgatgttcagagcacacagcgcccgccgcctgagttagcctgaattagcagtcccgcagtaacagcagcagagcaggacaacacttctactgaaaactaagccccaaagtcacagcagaaccaaccgttcatgacttcaagggaaaacgagggggaaaatgtgatcctttcattcttctcatttgtggtgatactaattacatgtttaagctattcacagatttaaaaaaaaaaaaaaaaaaaaaaaaaaaaaaaaaaaaa

SEQ ID NO: 25574 - DNA, 2052 bp, Homo Sapiens
agaccatgtagtgagaccctcgcgaggtctgagagtcactggagctaccagaagcatcatggggccctggggagagccagagctcctggtgtggcgccccgaggcggtagcttcagagcctccagtgcctgtggggctggaggtgaagttgggggccctggtgctgctgctggtgctcaccctcctctgcagcctggtgcccatctgtgtgctgcgccggccaggagctaaccatgaaggctcagcttcccgccagaaagccctgagcctagtaagctgtttcgcggggggcgtctttttggccacttgtctcctggacctgctgcctgactacctggctgccatagatgaggccctggcagccttgcacgtgacgctccagttcccactgcaagagttcatcctggccatgggcttcttcctggtcctggtgatggagcagatcacactggcttacaaggagcagtcagggccgtcacctctggaggaaacaagggctctgctgggaacagtgaatggtgggccgcagcattggcatgatgggccaggggtcccacaggcgagtggagccccagcaaccccctcagccttgcgtgcctgtgtactggtgttctccctggccctccactccgtgttcgaggggctggcggtagggctgcagcgagaccgggctcgggccatggagctgtgcctggctttgctgctccacaagggcatcctggctgtcagcctgtccctgcggctgttgcagagccaccttagggcacaggtggtggctggctgtgggatcctcttctcatgcatgacacctctaggcatcgggctgggtgcagctctggcagagtcggcaggacctctgcaccagctggcccagtctgtgctagagggcatggcagctggcacctttctctatatcacctttctggaaatcctgccccaggagctggccagttctgagcaaaggatcctcaaggtcattctgctcctagcaggctttgccctgctcactggcctgctcttcatccaaatctagggggcttcaagagaggggcaggggagattgatgatcaggtgcccctgttctcccttccctcccccagttgtggggaataggaaggaaaggggaagggaaatactgaggaccaaaaagttctctgggagctaaagatagagcctttggggctatctgactaatgagagggaagtgggcagacaagaggctggccccagtcccaaggaacaagagatggtcaagtcgctagagacatatcaggggacattaggattggggaagacacttgactgctagaatcagaggttggacactatacataaggacaggctcacatgggaggctggaggtgggtacccagctgctgtggaacgggtatggacaggtcataaacctagagtcagtgtcctgttggtcctagcccatttcagcaccctgccacttggagtggacccctcctactcttcttagcgcctaccctcatacctatctccctcctcccatctcctaggggactggcgccaaatggtctctccctgccaattttggtatcttctctggcctctccagtcctgcttactcctctatttttaaagtgccaaacaaatccccttcctctttctcaaagcacagtaatgtggcactgagccctacccagcacctcagtgaagggggcctgcttgctctttattttggtcccggatcctggggtggggcagaaatattttctgggctggggtaggaggaaggttgttgcagccatctactgctgctgtaccctaggaatatggggacatggacatggtgtcccatgcccagatgataaacactgagctgccaaaacatttttttaaatacacccgaggagcccaagggggaagggcaatgcctacccccagcgttatttttggggagggagggctgtgcatagggacatattctttagaatctattttattaactgacctgttttgggacctgttacccaaataaaagatgtttctagacatctgtacaaaaaaaaaaaaaaaaaaaaaaaa

SEQ ID NO: 25575 - DNA, 1661 bp, Homo Sapiens
cggcctccctgccccttcacggcccgcctgcctccctgcccaagtcctgagccaccatgctgaccccgatggtggccgggggggtggtgttccccggactcttcctcctctccaagaacacgctccagcggctgccccagctacgctgggaggaggccgacgcagtcattgtctcagccaggctggtgtcctctgtccaggccatcatggcctccactgccggctacatcgtctccacctcctgcaagcacatcattgatgaccaacactggctgtcctctgcctacacgcaatttgctgtgccctacttcatctacgacatctacgccatgttcctctgtcactggcacaagcaccaggtcaaagggcatggaggggacgacggagcggccagagccccgggcagcacgtgggccatagcgcgtggctacctgcacaaggagttcctcatggtgctccaccatgccgccatggtgctggtgtgcttcccactctcagtggtgtggcgacagggtaagggagacttctttctgggttgcatgttgatggcagaggtcagcacgcccttcgtctgccttggcaagatcctcatccagtacaagcagcagcacacactgctgcacaaggtgaacggggccctgatgctgctcagcttcctctgctgccgggtgctgctctttccctacctgtactgggcctacgggcgccatgccggcctgcccctgctggccgtgcccctggccatccctgcccacgtcaacctgggcgctgcgctgctcctggcccctcagctctactggttcttcctcatctgccgtggggcctgccgcctcttctggccccgctcccggccgcccccggcctgccaggcccaggactgaggccgggggccgggaccctccccctccccacccccacccccgtggagacagggctctggggctgatggctggggttgggagccagggtcctcttgcccggacaaccccaggactgacgatgaccccgaaagggaagaggccccatctctcggggactgagggggtggagagaggggacctcttccccctactctgcccccttcctgcacacccttgcgctggaggaggggagggggcaccgcctcccacccactgagggcaggagggcttgtggggagggacaccaacagggtttcaaggggaccaggagtcagaatgtggggagacgcctctgccaaggccatcccagcccctatgctgccatcccccagggctccccatcacccgagaggagaggacgccccaactaacccccgctggccctcgggcctcccgagtggccggctgcaaccacggctcctctccagggtaggccagcttgaggaatcttatttattttatttatttacccaaatttgaactagtctgttgggttgggggaaggaggtggctgctacccccaagccttcccagtgctgacaaccccgggggcaggcgagggcgcccagtccctcaccatcggctgcacatcgcgccctcgggccctgccatgtccctggtgctactgacctctcaaggcttcctccaatctggggtcgggggaccctgggaggtgctttacagaccgctaataaaagacgatctgcgtgaacgccaaaaaaaaaaaaaaaaaaaaaaaaa

SEQ ID NO: 25576 - DNA, 3121 bp, Homo Sapiens
cactacagcgactgctgagctgggctggatggtgcatcctccatcagggtgggaagaggtgagtggctacgatgagaacatgaacacgatccgcacgtaccaggtgtgcaacgtgtttgagtcaagccagaacaactggctacggaccaagtttatccggcgccgtggcgcccaccgcatccacgtggagatgaagttttcggtgcgtgactgcagcagcatccccagcgtgcctggctcctgcaaggagaccttcaacctctattactatgaggctgactttgactcggccaccaagaccttccccaactggatggagaatccatgggtgaaggtggataccattgcagccgacgagagcttctcccaggtggacctgggtggccgcgtcatgaaaatcaacaccgaggtgcggagcttcggacctgtgtcccgcagcggcttctacctggccttccaggactatggcggctgcatgtccctcatcgccgtgcgtgtcttctaccgcaagtgcccccgcatcatccagaatggcgccatcttccaggaaaccctgtcgggggctgagagcacatcgctggtggctgcccggggcagctgcatcgccaatgcggaagaggtggatgtacccatcaagctctactgtaacggggacggcgagtggctggtgcccatcgggcgctgcatgtgcaaagcaggcttcgaggccgttgagaatggcaccgtctgccgaggttgtccatctgggactttcaaggccaaccaaggggatgaggcctgtacccactgtcccatcaacagccggaccacttctgaaggggccaccaactgtgtctgccgcaatggctactacagagcagacctggaccccctggacatgccctgcacaaccatcccctccgcgccccaggctgtgatttccagtgtcaatgagacctccctcatgctggagtggacccctccccgcgactccggaggccgagaggacctcgtctacaacatcatctgcaagagctgtggctcgggccggggtgcctgcacccgctgcggggacaatgtacagtacgcaccacgccagctaggcctgaccgagccacgcatttacatcagtgacctgctggcccacacccagtacaccttcgagatccaggctgtgaacggcgttactgaccagagccccttctcgcctcagttcgcctctgtgaacatcaccaccaaccaggcagctccatcggcagtgtccatcatgcatcaggtgagccgcaccgtggacagcattaccctgtcgtggtcccagccagaccagcccaatggcgtgatcctggactatgagctgcagtactatgagaaggagctcagtgagtacaacgccacagccataaaaagccccaccaacacggtcaccgtgcagggcctcaaagccggcgccatctatgtcttccaggtgcgggcacgcaccgtggcaggctacgggcgctacagcggcaagatgtacttccagaccatgacagaagccgagtaccagacaagcatccaggagaagttgccactcatcatcggctcctcggccgctggcctggtcttcctcattgctgtggttgtcatcgccatcgtgtgtaacagacgggggtttgagcgtgctgactcggagtacacggacaagctgcaacactacaccagtggccacatgaccccaggcatgaagatctacatcgatcctttcacctacgaggaccccaacgaggcagtgcgggagtttgccaaggaaattgacatctcctgtgtcaaaattgagcaggtgatcggagcaggggagtttggcgaggtctgcagtggccacctgaagctgccaggcaagagagagatctttgtggccatcaagacgctcaagtcgggctacacggagaagcagcgccgggacttcctgagcgaagcctccatcatgggccagttcgaccatcccaacgtcatccacctggagggtgtcgtgaccaagagcacacctgtgatgatcatcaccgagttcatggagaatggctccctggactcctttctccggcaaaacgatgggcagttcacagtcatccagctggtgggcatgcttcggggcatcgcagctggcatgaagtacctggcagacatgaactatgttcaccgtgacctggctgcccgcaacatcctcgtcaacagcaacctggtctgcaaggtgtcggactttgggctctcacgctttctagaggacgatacctcagaccccacctacaccagtgccctgggcggaaagatccccatccgctggacagccccggaagccatccagtaccggaagttcacctcggccagtgatgtgtggagctacggcattgtcatgtgggaggtgatgtcctatggggagcggccctactgggacatgaccaaccaggatgtaatcaatgccattgagcaggactatcggctgccaccgcccatggactgcccgagcgccctgcaccaactcatgctggactgttggcagaaggaccgcaaccaccggcccaagttcggccaaattgtcaacacgctagacaagatgatccgcaatcccaacagcctcaaagccatggcgcccctctcctctggcatcaacctgccgctgctggaccgcacgatccccgactacaccagctttaacacggtggacgagtggctggaggccatcaagatggggcagtacaaggagagcttcgccaatgccggcttcacctcctttgacgtcgtgtctcagatgatgatggaggacattctccgggttggggtcactttggctggccaccagaaaaaaaatcctgaacagtatccaggtgatgcgggcgcagatgaaccagattcagtctgtggaggtttgacattcacctgcctcggctcacctcttcctccaagccccgccccctctgccccacgtgccggccctcctggtgctctatccactgcagggccagccactcgccaggaggccacgggccacgggaagaaccaagcggtgccagccacgagacgtcaccaagaaaacatgcaactcttaaaaaaaaaaaaaaaaaaaaaaaaaaaaaaaaaaaaaaaaaaaaaaaaaaaaaaaaaaaaa

SEQ ID NO: 25577 - DNA, 1886 bp, Homo Sapiens
gtggcagcgacattggcagctgcagagaaactggcctctgcagaggattcagccccggctgataaagacgaggacgagggtgagcccccagcacaggccccagtggccaagaaacctgcacggcccacagtcccttcatcccagcgcctgcctgagcccagggcctcaagttctaaggagtcaccgagtccatctgtgcgggagcagctggcactgctggaggcacggaaactgcagtatcagcgggcagccctgcaggccaagcgcagccaggacctggagcaggccaaagcctatctgcgggtagccaaatggcttgaggctcagatcatccaggcccgatctggcagacctgttgatctgtccaaggtgccttcgcccttgacggatgaggagggtgacttcatcctcatccaccatgaggacctgcgactctcccagaaggcggaggaggtgtatgcccagctgcaaaaaatgcttctggagcaacaagagaagtgcctgctgttctccaagcagttcatgcaccagggcaacgtggctgagaccacccgatttgagaagcttgctcaggaccgcaagaaacagctggagatcctgcagctggcccaggctcagggcctcgaccctcccacccaccactttgagttgaagacattccagactgtgaggatcttctcagaactcaacagcacagaaatgcatctgatcattgtccggggaatgaacctcccagcccctccaggggtgactcccgatgacctggatgcttttgtgcggtttgagtttcactaccctaactcggaccaggctcaaaaaagcaaaacagctgtggtgaagaacacaaactctccagaatttgatcaactcttcaaactaaacatcaaccgaaaccaccggggcttcaagagggtgatccagagcaaaggcatcaagtttgagatcttccacaaagggtccttcttcagaagcgacaagctggttggcacagcacacctgaaactggagcggctggagaatgagtgtgagatcagagaaattgtggaggtcctggatggaaggaagcccaccggggggaagctggaggtgaaggtgaggctgcgggagcctctgagtggccaggatgtgcagatggtcactgagaactggctggttctggagcccaggggcttgtgagccgatggccagcaccaggagaggagtcaggccgcgactgtgcaggagatgactttcccagctttgctggcttcagaagcctttgtacataagagatgctgctacccaagcaccaaagacctgttaagcatgtgcactactgaccacgactctggtctttcctgttgttggcccctctggggctctacagaaacaggctgggttccaggagcccatctccccgctgtctccccctgccccgagtctggaagagggcaaggacacttccattcctctgtaccatggagtcctgcagccccttaacccctgcgtggcaactgtgtacagcttacccctgcctccagttgcaccacttctagatgtgcctttaaaagatctaactatgggatgggagaacttgagggtgatcgggaacctcccctgctgagggtggtgtcagggttccgtgactccagtgggccagtggtagcctgtcccagacaactccgtcaccccagctctgcctgtgcctttatccctgacagctgctgcactagccttcctgcttccctaaggacttagtggagggggaaagttgtttttggtactacttggtgggaagtaaggggaaggttggatcttgggtttggtctacccacccaagagaaaagactgttaactggaagaaaaaatatatatataaaattttatgtaaaaaaaaaaaaaaaaaa

SEQ ID NO: 25578 - DNA, 844 bp, Homo Sapiens
acgaggaggggcggggcgatagggatccagagtcttggggatccagagtcttggggctccatgtgagtttgctgtaccggttgtcccggtcacggcatggggcgagcggacactccacgacaccccccgcccccggctgcagggtttggggtccaccggggcgcatttctgatcccagtggctcttcgggtgctcttggccggaagaactcccagacctttcactcctggcctggccgatccacgaagactcgggccccggcgcgtccaagcagcacaatgagtagttcttgacccgaggtcgccctgaaggtgtcgcatgaagagcttgcttcacacacaacaggattcgatactttgccaattcaaggccctggtggctggccgggaaggtggattcgccttggctaggtgccaggcaggtccgcctgtgcgggtgcccctgacttcgacccctagcttatgtcacagcccgaaccagatcgactggtctggtagcagcctgtcactccagactgtcctccaccccagacttccgcaaactgatgggctctttgcgccgtgcagggtgggaggagaagaccaaacgaagtaacgtctgtaaaaccccttcctggacagcgtaaggcctccacatctaagttcctgtcattaaaatggagacagcaaagccgaccctatccagtccttgggactgttatgaacagaaaatgatgcaatgtatgaaaaactgctttgaggagaaaaacaacacagtgtgtttttggaagatgtgattgatttgtaaaccgcattaaatgctctgaaataaaatgaaagtaaaaataaaaaaaaaaaaaaaaaaa

SEQ ID NO: 25579 - DNA, 1375 bp, Homo Sapiens
ggagcgcggacggctgggctgctgctgggcggccgcggggcagcggagggcgccggcactccggtccccgccgctccccgtccccgctgctcctagcccctgccgcgtccccggcggagcgggcatggcgccacccgcggcgcctggccgggaccgtgtgggccgtgaggatgaggacggctgggagacgcgaggggaccgcaaggcccggaagcccctggtggagaagaagcggcgcgcgcggatcaacgagagcctgcaggagctgcggctgctgctggcgggcgccgaggtgcaggccaagctggagaacgccgaagtgctggagctgacggtgcggcgggtccagggtgtgctgcggggccgggcgcgcgagcgcgagcagctgcaggcggaagcgagcgagcgcttcgctgccggctacatccagtgcatgcacgaggtgcacacgttcgtgtccacgtgccaggccatcgacgctaccgtcgctgccgagctcctgaaccatctgctcgagtccatgccgctgcgtgagggcagcagcttccaggatctgctgggggacgccctggcggggccacctagagcccctggacggagtggctggcctgcggggggcgctccgggatccccaatacccagccccccgggtcctggggacgacctgtgctccgacctggaggaggcccctgaggctgaactgagtcaggctcctgctgaggggcccgacttggtgcccgcagccctgggcagcctgaccacagcccaaattgcccggagtgtctggaggccttggtgaccaatgccagccagagtcctgcgggggtgggcccggccctccctggatctcctccctcctcccaggggttcagatgtggtggggtagggccctggaagtctcccaggtcttccctccctcctctgatggatggcttgcagggcagcccctggtaaccagcccagtcaggccccagccccgtttcttaagaaacttttagggaccctgcagctctggagtgggtggagggagggagctacgggcaggaggaagaattttgtagagctgccagcgctctcccaggttcacccacccagccttcaccagccctgtgcgggctctgggggcagaggtggcaggaatggtgctgggcactagtgttccaggcagccctgggctaaacaaaagcttgaacttgccacttcagcggggagatgagaggcaggtgcactcagctgcactgcccagagctgtgatgctctgtacatcttgtttgtagcacacttgagtttgtgtattccattgacatcaaatgtgacaattttactaaataaagaattttggagttagttacccttgaaaaaaaaaaaaaaaaaa

SEQ ID NO: 25580 - DNA, 2321 bp, Homo Sapiens
cttgcgggaggcgtgggcttcccggtgccagggtgtcatggaagggctgctgacaagatgcagagcattgcccgccctggccacctgcagccgccagctctctgggtatgttccttgcaggtttcaccactgtgccccaagaagagggcggcgcctgctgctgtctcgtgtgttccagccacagaaccttcgggaagaccgggtgctctccctgcaggacaaatctgatgacctgacctgtaagagccagcggctgatgctgcaggtgggcctgatctacccagcaagccccggctgttaccacctcctgccatataccgtccgtgccatggagaagctcgtgcgagtgatagaccaggagatgcaggccatcgggggccagaaagtcaacatgcccagcctcagcccggcagagctctggcaagccaccaaccggtgggacttgatgggcaaagagctgctaagacttagagacaggcatggcaaggaatactgcttaggaccaactcacgaggaagccattacggccttaattgcctcccagaagaaactgtcctacaagcagcttcccttcctgctgtaccaagtgacaaggaagtttcgggatgagcccaggccccgctttggtcttctccgtggccgagagttttacatgaaggatatgtacacctttgactcctccccagaggctgcccagcagacctacagcctggtgtgtgatgcctactgcagcctgttcaacaagctagggctgccatttgtcaaggtccaggccgatgtgggcaccatcgggggcacagtgtctcatgagttccagctcccagtggatattggagaggaccggcttgccatctgtccccgctgcagcttctcagccaacatggagacactagacttgtcacaaatgaactgccctgcttgccagggcccattgactaaaaccaaaggcattgaggtggggcacacattttacctgggtaccaagtactcatccattttcaatgcccagtttaccaatgtctgtggcaaaccaaccctggctgaaatggggtgctatggcttgggtgtgacacggatcttggctgctgccattgaagtcctctctacagaagactgtgtccgctggcccagcctactggccccttaccaagcctgcctcatcccccctaagaagggcagtaaggagcaggcggcctccgagctcatagggcagctgtacgaccacatcacagaggcagtgcctcagcttcacggggaggtgctcctggacgacaggacccatctgaccatcggaaacagactgaaagatgccaacaagtttggctacccctttgtgataatcgctggcaagagggccctggaggaccctgcacattttgaggtttggtgtcagaacactggtgaggtggccttcctcaccaaagatggagtcatggatttactgaccccagtgcagactgtctaaatgcccccagcccacccctgcccccatttgcagccttggtgttcgttctaacactgcattttcctacacccctttcctggactgctctctccagaaacagcacagctcatggagggtgagatcatgttagggaaatcaatttttatctagtcatttgttcagattatttgtatttaaagtcattaacttgatccctttctccagactggccatgccaccatatacctttccttttgtattccattgtggaagcttctaggaggctgagaagcaggagatccaagctccagtcctgggtgttaccctgaggggggaagtcacttcccttctctcagctgagtttttcacgtgtaagatgagaatggctgatggctgagagcccaccaaccttccccaccccgtatcagtttgaccacgggccttttgctacattctatccagagagcaggcctgccagcccctctccactgagaagttgggctgagagtatggggaaaagaatcaagagacctgactgccgccaactcactagtgacttagatacatcccctccccctgctggggcctcagtttccccatctgtaacttgagaaaatagaactagatctgtaaagtctggaactagatctgtaacgtccttataggtgtcactagggggttccatgagaggtgtgtgacaggcagtctgattcctctcattctccatagtctgtttcctggaaagtcgatgtaattaactgatggcccaaaaactacctcaagagacctggccctgttaagacggcttaaccactgagatcccgttctattgatttaataaagtcaaactattggaaaaaaaaaaaaaaaaaaaaaa

SEQ ID NO: 25581 - DNA, 1060 bp, Homo Sapiens
gctcttttcattttgccatccttttccagctccatgatggttctgcaggtttctgcggccccccggacagtggctctgacggcgttactgatggtgctgctcacatctgtggtccagggcagggccactccagagaattaccttttccagggacggcaggaatgctacgcgtttaatgggacacagcgcttcctggagagatacatctacaaccgggaggagttcgtgcgcttcgacagcgacgtgggggagttccgggcggtgacggagctggggcggcctgctgcggagtactggaacagccagaaggacatcctggaggagaagcgggcagtgccggacaggatgtgcagacacaactacgagctgggcgggcccatgaccctgcagcgccgagtccagcctagggtgaatgtttccccctccaagaaggggcccttgcagcaccacaacctgcttgtctgccacgtgacggatttctacccaggcagcattcaagtccgatggttcctgaatggacaggaggaaacagctggggtcgtgtccaccaacctgatccgtaatggagactggaccttccagatcctggtgatgctggaaatgaccccccagcagggagatgtctacacctgccaagtggagcacaccagcctggatagtcctgtcaccgtggagtggaaggcacagtctgattctgcccggagtaagacattgacgggagctgggggcttcgtgctggggctcatcatctgtggagtgggcatcttcatgcacaggaggagcaagaaagttcaacgaggatctgcataaacagggttcctgagctcactgaaaagactattgtgccttaggaaaagcatttgctgtgtttcgttagcatctggctccaggacagaccttcaacttccaaattggatactgctgccaagaagttgctctgaagtcagtttctatcattctgctctttgattcaaagcactgtttctctcactgggcctccaaccatgttcccttcttcttagcaccacaaataatcaaaacccaaaaaaaaaaaaaaaaa

SEQ ID NO: 25582 - DNA, 1204 bp, Homo Sapiens
gcaccttggttggactcgggaattcgtggaggccctccggagaaccggcagccctctggccgcccgctacatgaaccctgagctcacggacttgccctctccatcgtttgagaacgctcatgatgaatatctccaactgctgaacctccttcagcccactctggtggacaagcttctagttagagacgtcttggataagtgcatggaggaggaactgttgacaattgaagacagaaaccggattgctgctgcagaaaacaatggaaatgaatcaggtgtaagagagctactaaaaaggattgtgcagaaagaaaactggttctctgcatttctgaatgttcttcgtcaaacaggaaacaatgaacttgtccaagagttaacaggctctgattgctcagaaagcaatgcagagattgagaatttatcacaagttgatggtcctcaagtggaagagcaacttctttcaaccacagttcagccaaatctggagaaggaggtctggggcatggagaataactcatcagaatcatcttttgcagattcttctgtagtttcagaatcagacacaagtttggcagaaggaagtgtcagctgcttagatgaaagtcttggacataacagcaacatgggcagtgattcaggcaccatgggaagtgattcagatgaagagaatgtggcagcaagagcatccccggagccagaactccagctcaggccttaccaaatggaagttgcccagccagccttggaagggaagaatatcatcatctgcctccctacagggagtggaaaaaccagagtggctgtttacattgccaaggatcacttagacaagaagaaaaaagcatctgagcctggaaaagttatagttcttgtcaataaggtactgctagttgaacagctcttccgcaaggagttccaaccatttttgaagaaatggtatcgtgttattggattaagtggtgatacccaactgaaaatatcatttccagaagttgtcaagtcctgtgatattattatcagtacagctcaaatccttgaaaactccctcttaaacttggaaaatggagaagatgctggtgttcaattgtcagacttttccctcattatcattgatgaatgtcatcacaccaacaaagaagcagtgtataataacatcatgaggcattatttgatgcagaagttgaaaaaaaaaaaaaaaaaa

SEQ ID NO: 25583 - DNA, 1178 bp, Homo Sapiens
cggcctgtggatgggcggtgagcgcagcggcgtccgaggcaacaagatggcagctgcggagccgtctccgcggcgcgtgggcttcgtgggcgcgggccgcatggcgggggccatcgcgcagggcctcatcagagcaggaaaagtggaagctcagcacatactggccagtgcaccaacagacaggaacctatgtcactttcaagctctgggttgccggaccacgcactccaaccaggaggtgctgcagagctgcctgctcgtcatctttgccaccaagcctcatgtgctgccagctgtcctggcagaggtggctcctgtggtcaccactgaacacatcttggtgtccgtggctgctggggtgtctctgagcaccctggaggagctgctgcccccaaacacacgggtgctgcgggtcttgcccaacctgccctgtgtggtccaggaaggggccatagtgatggcgcggggccgccacgtggggagcagcgagaccaacctcctgcagcatctgctggaggcctgtgggcggtgtgaggaggtgcctgaagcctacgtcgacatccacactggcctcagtggcagtggcgtggccttcgtgtgtgcattctccgaggccctggctgaaggagccgtcaagatgggcatgcccagcagcctggcccaccgcatcgctgcccagaccctgctggggacggccaagatgctgctgcacgagggccaacacccagcccagctgcgctcagacgtgtgcaccccgggtggcaccaccatctatggactccacgccctggagcagggcgggctgcgagcagccaccatgagcgccgtggaggctgccacctgccgggccaaggagctcagcagaaagtaggctgggctctggccatcctttcctgcctctgtgcccctgcctctccctgtgtcccttcccctgaggactgcggctccctccctcctgcatgagggtctcctactgctccttctccccttgcacagggaaatgcagggggcaggacttgggaggttccagcaggcgggggagccccgaccagtggggacactcctccctccccagtgagcagaaggcaccgtggtggtggctctgccccttgctgcagtgagcccaccttgctgcaacattggttctgaggggcccaagaaaaaaaaaaaaaaaaaaa

SEQ ID NO: 25584 - DNA, 2240 bp, Homo Sapiens
cgccgggccactggcacttgcttctgcggcgagtcccacccacgaccgcagcccagcaactcgcaaacgcaacctgaagcctgggctgcgcagtgtgggagggcttcgcgatcttgggggacccattccgaacttgcagaggaccgtagctctcctggcctggagagtgtgaacaggattgtggactcttccaagattcacaatgatatggtgaatccaaagactggaaccaaaaagatttactcagtgctttagttttaacaacagtaaattgtctaccaacacccatcatggctaaaagtgcggaggtcaaactggcaatatttgggagagcaggcgtgggcaagtcagctcttgtagtgagatttctgaccaaacggttcatctgggaatatgatcccaccctcgaatcaacctaccgacaccaagcaaccatcgatgatgaagttgtttccatggagatactagacactgctggtcaggaagataccattcagagggaggggcacatgcgatggggggaaggctttgtgctggtctacgacattactgaccgaggaagttttgaggaagtgctgccacttaagaacatcctagatgagatcaaaaagcccaagaatgtgactctcatcttggttggaaacaaagctgacttggaccactccaggcaggttagcacagaagaaggagagaagctggccacagaattggcttgtgctttttacgagtgctctgcctgcactggagaagggaacatcacagagatattctatgaattgtgtcgagaggtgcgtcgccggaggatggtgcagggcaagacgaggcgacgcagctccaccacgcatgtcaagcaagccattaacaagatgctcaccaaaatcagtagttaggcagcccagctgaggtggaccaactaattggaaacactcttccccttctgttcccctttcaaaaataaaacaaaatattgcattctttgtttggattctgagaaatgtctgggcttcccattgtttctggcctctaataggttgggaagttttagcgtgttttatgcaatttcagtgctaacaatttcttcctttcctgcttgaataagatacactctaatggcatttgaacatgtaatcaccagagattctgaaatgactggtttatgttaagctatttttaggcatcttcaccttgctttaagtaggttgaagtttttgcaaaggcatttaaaaattcaatttcttgtcagatactacaaataattttcttaaaagtctaagatagcagaaaatacagtaaaaacacaggagaagaagctgagctattggaacaggaaatagaaggaactctagtttctgtttgaagtgaggattttctgaattatctaatatcatctaggttttctttaaaattttattttgttcttcagttcaagcatcttctcactaatgtttttcactataacagagaattcatttcaatttgagttggttctctcaatgatctattgatcattacaccctaactctccttccttggctcaaacaatattttccctataacaaaggcaataggacacaaaattcacatcctgctgggccttttttcatcaagtcagggtgatataaaaacattggaagtcttttcaccaaaccctgactttattgaatgctagtagaagatgtagaattagagacatctgatttgtttatcaccttagcagaaaaaccacagtccaaaagacaagcaaattaagaatggagcttaaccatgcctccattgggaagtctagactttgagccaggtacagtaagaaaaattagcctctgattcattaagtttgccacatgacttattttgatattttggatacattaactcacttaggagaattcagaaaagaatgggtgattaaagttcattacagctgaataaatgtgtctaaaacagactcttgtattctgaaagtacagtctacaactgataaaaccttatgattcttttctcccccattatgcccctatatatatcaagatttgggtactttattttagtagaaaatatatatcttttacatatgtatgtatttataaatgcatagatatatgtataaaaatttgtaagcgttagcggcattaattcaccaatgcatttggacaacttgatgtaactgactttattttatgtgactataataaaaagcataattttctcattctgtcaaaaaaaaaaaaaaaaaaaaaaaa

SEQ ID NO: 25585 - DNA, 1556 bp, Homo Sapiens
gctcgagttcctgtgcgggactgccaaggcacgaccacgggccggaaggctgccaggcccagtgggcaagcgaagaaatgaaccaccgcaacgcgggcgcttcggggcggggccgagtgcgaacctgagccccaaatcccgacccaggcaggggcggggctcggagcggggccttggaggcccagcccgcgcggcgacgtctccgcgtggcgtcacggcaccgactgacggccacccaccatggccgcagaccagcgcccgaaggccgacacgctggccctgaggcaacggctcatcagctcttcctgcagactcttttttcccgaggatcctgttaagattgtccgggcccaagggcagtacatgtacgatgaacagggggcagaatacatcgattgcatcagcaatgtggcgcacgtgcgtatcacggccacctgagctccctgattgacatcagtccctacaagttccgcaacctggatggccagaaggagtgggtccacgtggtatgcactgcccaactcaacaacagattgcagccttcttcgctgagtctctgcccagtgtgggagggcagatcattccccctgctggctacttctcccaagtggcagactccagggaaaagacttcgtccctgacatcgtcaccatgggcaagtccattggcaacggccaccctgttgcctgcgtggccgcaacccagcctgtggcgagggcatttgaagccaccggcgttgagtacttcaacacgtttgggggcagcccagtgtcctgcgctgtggggctggccgtcctgaatgtcttggagaaggagcagctccaggatcatgccaccagtgtaggcagcttcctgatgcagctcctcgggcagcaaaaaatcaaacatcccatcgtcggggatgtcaggggtgttgggctcttcattggtgtggatctgatcaaagatgaggccacaaggacaccagcaactgaagaggctgcctacttggtatcaaggctgaaggagaactacgttttgctgagcactgatggccctgggaggaacatcctgaagtttaagcccccaatgtgcttcagcctggacaatgcacggcaggtggtggcaaagctggatgccattctgactgacatggaagagaaggtgagaagttgtgaaacgctgaggctccagccctaagccagccctgctctgcctaagtgtactccagaagaaactcatctcatccaaatacacgctattgagaaggcgagcctgacctccctcttacagataaagtcagctttcagaggctcagggtgggggggcctgcccgaggccataatgctacccaccccctcctcctaaccactggtctgttggaataacccagatgtctgcatcccctcaagtcagtcaatttcctttctgtccactgggggtggaatggggtagggtgggatactttaaagtgctcctgcttaaataaattagaccagaccagtgtatttctaaagaaaatcctgacatgcacacccattaaaaatagtacattttacaaaaaaaaaaaaaaaaaa

SEQ ID NO: 25586 - DNA, 2604 bp, Homo Sapiens
agagggagggagcgagcgagcagtgagtaagccagcaagggcggtcgggtcccgaggtcagccgagatttctcaggtccctccggccccctccctggagtccacagcgcctccggtgtccagaggatcggacacggcccggcccggccatggcctcgttgctgaaggtggatcaggaagtgaagctcaaggttgattctttcagggagcggatcacaagtgaggcagaagacttggtggcaaattttttcccaaagaagttattagaacttgatagttttctgaaggaaccaatcttaaacatccatgacctaactcagatccactctgacatgaatctcccagtccctgaccccattcttctcaccaatagccatgatggactggatggtcccacttataagaagcgaaggttggatgagtgtgaagaagccttccaaggaaccaaggtgtttgtgatgcccaatgggatgctgaaaagcaaccagcagctggtggacattattgagaaagtgaaacctgagatccggctgttgattgagaaatgtaacacggtcaaaatgtgggtacagctcctgattcccaggatagaagatggaaacaactttggggtgtccattcaggaggaaacagttgcagagctaagaactgttgagagtgaagctgcatcttatctggaccagatttctagatattatattacaagagccaaattggtttctaaaatagctaaatatccccatgtggaggactatcgccgcaccgtgacagagattgatgagaaagaatatatcagccttcggctcatcatatcagagctgaggaatcaatatgtcactctacatgacatgatcctgaaaaatatcgagaagatcaaacggccccggagcagcaatgcagagactctgtactgaggccagggccagggccaggggactctgtgagtctggctcaagaccgacattgccttggtttgttacatgactatcgtgatggggaaactggctggaaatagtaatcacacctctctgtttttagttagagtctaatgaaactctcatctagttctgtgatgtgtttacctcttttttcaggcctcaggaactcttctatttccttccctaataccccacacccaacctgtcgtaatttctggagaactccaggtttgtgtgtgcaggatgttggcacaaaaatacctgtgttttcattctccccctctctccctcctgtgtcttgcgctttatgttttcttccgtttgataattagttggttaaaagctgagggaaccggaaggaaagtgctaggtgttttttaggaactagggtggcggggggacgaacttctcttcctcacatgaggttactgtttctttcctctgtggggcattggatcctcccacagttgccctggtgatgacttagggcttcccatctgtgtacatcccactttgaatcttgatcgtgacaagaaataccttaggccttcagtcaattccgaagctccttcagttgtttttataatgggcgttttcacatgcacatatgtgtatgcatgtatacgcccatacagacatgcacacacagactcctactccattagctaacataccctccctctccacaacccctgtcacatacctttcaggaggtgacagttgtcttagttgtcatctacccagacaaacgtcctgggcccgtcctccctcctgatactgtagcctcttggtacccagggtgagttggtggagaacagagagatgagaagcagagggcttggggaaagcctgttcctctctgactcagccctttttggcattattgcaagagcttgactcctggttgccttttcccagccagttttcagttggggtgaaggtttctgcaagtgtgaggtccagatgctgctgctcatgttgggctttccttttgggaactatttctctttatttatagtgtcgggcttccggggaaagcaatcattggtgtgtatgtgtatgtgcatgcacacacgtgcatatacacatttgtgtatgtggaaatgtgctgggcaagtcaaaactatagaagagttgcctcctgtctctcgaatcttccagagatatcacttaattgttaacagcttttgtgttaatccccttcagcccctagctcttttattctaccacggctggagagttgatacctgcagtcagcctgccagtgactcttagtgtctgtttctgacttatttttcctgtctctgtcttccaacccccaataatatttccaccggggatgcatcatttttactcccaatattctgtagagagggagtcaggatgctgtcttcccacgaatagtactcagtaacaaaccaattgcattttagttgggcagtgctcccacccaccctccagatcccttccagctaaaacccttcccccttccctccatgtgtttctcagtttcccgtttcgtttgttggactgttccactgcccctcctcctcaccctatcacccatggatcgtaatgtaaaattcttttaccatgtcaagaaattattaaaaatacaggtactttgaaaaaaaaaaaaaaaaaaaaaaaaaaaaaaaaaaaaaaac

SEQ ID NO: 25587 - DNA, 1519 bp, Homo Sapiens
atgctaggggattctgccgggtagaagagctgggcctggaacccagccctgaggacatcctgcggcccaggggcaagtgacacctgctgagagaggcccaggatggtggaggctgaggaactggcacagctgcggctgctcaatctggagctcctgaggcagctgtgggtggggcaggatgctgtgcggcggtcagtggccagggcagcctcggagtcaagcctggaatccagcagcagctacaactcagagactccatcgaccccagagacgtcctcaacttccttgagcacctcctgcccacggggccggtcctccgtgtggggcccaccagatgcctgtcgaggggacctccgtgatgtggccagatcgggggtggcctctctcccacctgccaattgccagcaccaggagtccctgggccgaccgagaccccactcagcaccctcgctgggcacctcaagcctgagggacccagagccctcagggaggctgggtgatccaggaccccaggaggcacagacctcgaggtccatcctggctcaacagagcaagctgtccaagcccagggtgaccttctctgaggagtctgcagttcctgagaggagctggcgcctcaggccatacctgggctatgactggattgcagggtctctggacaccagctcttccatcaccagccagcctgaggccttcttctccaagctgcaggagtttcgggaaaccaacaaggaggagtgtatctgcagccatcctgaaccccagttgccaggcctgcgtgagagcagtggcagcggcgtggaggaagaccatgaatgcgtgtactgttaccgtgtcaaccggcgcctgttcccggtgcctgtggatcccggtaccccctgccgcctgtgcaggacaccgcgagaccagcagggccctgggaccctggcgcagccagcgcacgtcagggtgagcatcccgctgtcgatcctggagcccccgcaccggtaccacatccaccggcgaaagagctttgacgcctctgacacactggccctgccccggcactgcctgctgggctgggacatttttcctccgaagtctgagaaaagctcagcccccaggaacctggacctctggtcctctgtctccgctgaggcccagcaccagaagctgtccggcaccagcagcccttttcacccggcctcaccaatgcagatgctgcccccgaccccgacctggtcagtgccccaggtccctcggccccacgtcccacggcagaagccctgaggactgactcctgggggagaacagcattcccgccgcctccagcctctcccctctggcaggcgcacccaggagatggaatcccctgcccgcccagctcaggcccagctgtcctaggttgggcaggtgggtggacccaagcttgtctgctgcctgagttccagagagggaggaccctggggtggagggtgagggattctgtggaagtttgtaaataaagctcagtgctctgcaaaaaaaaaaaaaaaaaaaa

SEQ ID NO: 25588 - DNA, 1125 bp, Homo Sapiens
agagaaacagacgcttctgaatcaagccagggaggacttcaaccaggacatcggctggtgtgtctccctcatcaccgactacagggtccggttaggctgcgggtcttttgctggctctttcctggaatattacgcggctgatataagctatcctgtccgaaaatccatccagcaggacgtcttggggaccaagcttcctcaactgagcaaggggagccccgaggagcccgtggtggggtgccccctggggcagaggcagccctgccggaaaatgctccccgaccgctcgcgggccgcccgggaccgggccaaccagaagctggtggagtacattgtgaaggccaagggcgcggagagccacctgcgggccatcctaaagagcaggaagccatctcgctggctgcagaccttcctgagctccagccagtacgtgacctgtgtggagacctacctggaggatgaggggcagctggacctggtggtgaagtacctgcagggcgtctaccaggaggtgggggccaaggtgctccagcgcaccaacggcgaccggatccggttcattctggacgtgcttctgcccgaggccatcatctgtgcgatctctgcggtggacgaggtggactacaagacggctgaggagaagtacatcaaggggccttcgctgagctaccgggaaaaagaaatatttgacaaccagctccttgaagagcggaaccggcgccgtcggtgagggagcagccggctgtgctgtcagcggggcctggcggtggaagcgcctccagtgtgcatgagcgtgtctgaagatggggggctcagggggcacgtttgcgtttggacctgtctgtgcgttctcctgcgtggcagtcctgatttccatacttctggagaatccatttcgttaacactgaaagccagttctcttttcctggcagtttttttcattttatttttggcattttttacaagataccgttcgggaaaggcttttgaaaggacggaagcgtattcactgtgcgccagtactcctggctgtgctgtggtttctcccgacgtgcacatcgatctcgtatgtgtggcatctgatattaaacgggaggttttaagaagaaaaaaaaaaaaaaaaaa

SEQ ID NO: 25589 - DNA, 2152 bp, Homo Sapiens
tgagcaatggagcttaccatctttatcctgagactggccatttacatcctgacatttcccttgtacctgctgaactttctgggcttgtggagctggatatgcaaaaaatggttcccctacttcttggtgaggttcactgtgatatacaacgaacagatggcaagcaagaagcgggagctcttcagtaacctgcaggagtttgcgggcccctccgggaaactctccctgctggaagtgggctgtggcacgggggccaacttcaagttctacccacctgggtgcagggtgacctgtattgaccccaaccccaactttgagaagtttttgatcaagagcattgcagagaaccgacacctgcagtttgagcgctttgtggtagctgccggggagaacatgcaccaggtggctgatggctctgtggatgtggtggtctgcaccctggtgctgtgctctgtgaagaaccaggagcggattctccgcgaggtgtgcagagtgctgagaccgggaggggctttctatttcatggagcatgtggcagctgagtgttcgacttggaattacttctggcaacaagtcctggatcctgcctggcaccttctgtttgatgggtgcaacctgaccagagagagctggaaggccctggagcgggccagcttctctaagctgaagctgcagcacatccaggccccactgtcctgggagttggtgcgccctcatatctatggatatgctgtgaaatagtgtgagctggcagttaagagctgaatggctcaaagaatttaaagcttcagttttacatttaaaatgctaagtgggagaagagaaaccttttttttggggggcggtttttttggtttgttgttggtttttttttttttttggcgggaagaaagagttttgctcttgttgcccaggctggagtgcagtgacgtggtctccgctcactgcaacctccacctcgcgggtttaggcgattcttctgcctcagcctccctagtagctgggattgcaggtgcccaccaccatgcccagctaatttgtatttttagttgagacagggtttcactacgttggccaggctggtcttgaactcctgatctcaggcaatccacccacctcagcctcccaaagtgctgggatgacaggcgtgagcaaccgcacccagcttaaggtttttttgttttgttttgagacggagttttcgctcttgttgcccaggctggagtgcaatgctgtgatctcggcttaccacaacctccacctcccgggttcaagtgattcacctgcctcagcctcctgagtagctggtattacaggcatgcgtcaccacgccggctaattttgtacttttagtagagatggtgtttccccacgttggtcagtctggtctcaaattcctgacctcaggtgatctgcctgcctcggcctcccaaagtgctgtgattgcagacgtcagccaccatgcctggcctgaaaccttttttaggtaaagttgaattccatccttaaaagtttctgttatatcctatttagccattttctattgtctcccaaagaattcacatcaaaaaaacagctttgaactcccccttcaaaggaaacagtcgactttcataattagcatctaccattatccccaaatcttattttattcattgacttgaaattttttccaattgctttttttttttttttttttaaggttaagagcagaggtttactaggccaaagaaagagaatagctctctgttgcagagaggggtcctggagaaatgggttaccccagttgtcttatttaaatggttacccatcagattttaattttatcttctctttgagagcttggtaataagaagcacttaaatcactccaaagaagactttaaaaagggagcagtgaaaaggtcttaataatttattgattgaattaagaaatactagctaattaagaatctgagtctaaacagcacagattttttctttctgcttttaaattgtgttttaaaaaaagagacagggggctgggcgtggtggctcgcgcctgtgatcctagcactttgggaggccgaggcgggtggatcacgaggtaggagttaaagaccagcctggccaacatggcaaaaccctactaaagatacaaaaaaaaaaaaaaa

SEQ ID NO: 25590 - DNA, 1039 bp, Homo Sapiens
gggattcccacccacccacagcccgccatggcgtctcagctccagaaccgactccgctccgcactggccttggtcacaggtgcggggagcggcatcggccgagcggtcagtgtacgcctggccggagagggggccaccgtagctgcctgcgacctggaccgggcagcggcacaggagacggtgcggctgctgggcgggccagggagcaaggaggggccgccccgagggaaccatgctgccttccaggctgacgtgtctgaggccagggccgccaggtgcctgctggaacaagtgcaggcctgcttttctcgcccaccatctgtcgttgtgtcctgtgcgggcatcacccaggatgagtttctgctgcacatgtctgaggatgactgggacaaagtcatagctgtcaacctcaagggcaccttcctagtcactcaggctgcagcacaagccctggtgtccaatggttgtcgtggttccatcatcaacatcagtagcatcgtaggaaaggtggggaacgtggggcagacaaactatgcagcatccaaggctggagtgattgggctgacccagaccgcagcccgggagcttggacgacatgggatccgctgtaactctgtcctcccagggttcattgcaacacccatgacacagaaagtgccacagaaagtggtggacaagattactgaaatgatcccgatgggacacttgggggaccctgaggatgtggcagatgtggtcgcattcttggcatctgaagatagtggatacatcacagggacctcagtggaagtcactggaggtcttttcatgtaactgcctcaaggaccctggactctgctcacccccccaccactctgcctggcctcctgctgatgaggactctaagttcccaggatacaaaaggggtggcagtgtatggttcaggaatgctgaatatgggaagcaggggtgcttgtgaccctaataaattccaagtcctctaaaaaaaaaaaaaaaaaaaaaaaaaaaaaaaaaaaaaaaaaaaaaaaaaaaaaaaaaa

SEQ ID NO: 25591 - DNA, 1512 bp, Homo Sapiens
atcgcccccgactgtggagaagtgtccggggtagccccgttacaggaatgtgtttctgatcatctgaatcttaatcatgtccaactgcctgcaaaatttcctgaaaattacaagcactcgtcttctatgttcaagattatgccaacagttaagaagtaaaaggaagtttttcggaactgtgccaatatccagattgcataggcgagttgtcattacaggcattggcttagtgactcctcttggtgttggaactcacctggtttgggatcgtcttatcggaggagagagtggaattgtttcactggttggtgaagagtataagagtatcccttgcagtgttgctgcttatgtgccaagaggtagtgatgaaggtcagttcaatgaacaaaactttgtgtccaaatcagatatcaagtccatgtcttctcccaccatcatggccattggggctgcagaattagccatgaaggattctggctggcatcctcagtcagaagctgatcaagtggctactggtgttgcaattggcatgggaatgattcctcttgaagttgtttctgaaactgctttgaattttcagacaaaaggttacaataaagttagcccattttttgtccctaagattctggtcaatatggcagcaggccaggtcagcattcgatataaactcaagggcccaaatcatgcagtatccacagcctgtaccacaggagctcatgctgtgggagactcatttagatttatagcccatggtgatgctgatgtgatggtggctggaggtacagattcttgtattagccctttatctcttgctgggttttccagagcccgggctctgagcacaaactcagatcccaagttggcatgtcgaccatttcatccaaagagagatggttttgtaatgggagaaggtgcagctgtgctggtgctggaagaatatgaacatgctgttcaaagaagagcccggatctatgcagaagttttgggctatggactctcaggtgatgctggtcacataactgcccctgatcctgaaggagaaggtgccttaaggtgtatggctgctgctttaaaagatgcaggtgtgcagcctgaggagatatcctatatcaatgcacatgctacttccacaccattgggagatgctgctgaaaacaaagctatcaaacatctcttcaaagaccatgcatatgcccttgcagtttcctcaactaagggagcaacaggacatctgctgggagctgcaggggcagtcgaggcagcttttaccacattagcttgttattatcaaaaactaccacctactttaaacctggattgttcggaaccagaatttgatctcaactatgttccactaaaggcacaggaatggaaaactgagaaaagatttattggcctcaccaattcctttggttttggtggtactaatgcaacactttgtattgctggactgtagaacatataatttgtaattaaatactgatttttaaatgttaaaaaaaaaaaaaaaaa

SEQ ID NO: 25592 - DNA, 1007 bp, Homo Sapiens
agcgagctgtgaacaactcgtgtccaaataagtggctgagaggtggtcctaagtaagcacaagtttagtagtattgtactcgtaacacagaactggctgaaaccccgccctcttgtctacgggcgttctttcagggcgactttgtcagtaccccaaactgtccccgcatgaggtcactctgcacggtcacgtgctcgagcccgcgggagcgccacatcgccagccgcacccctccacccccaccctgcccacgtgacccggcctagtttctccaggcccgtccctacgtctcactcgggaagccccgccccacgctgagcgctccgcctgcgaccctccgccacttacccaccccggctcaagcacgacccgtggatccacgtgctttttcttgtccaatgggagccggctcccgggcgcgaaggggcggggaggaaaggaacgactgtgctacgttgccagaaggggcgggacctgcaacgtccgacagaacgaggggacgtaacggaggcaggttggagccgctgccgtcgccatgacccgcggtaaccagcgtgagctcgcccgccagaagaatatgaaaaagcagagcgactcggttaagggaaagcgccgagatgacgggctttctgctgccgcccgcaagcagagggactcggagatcatgcagcagaagcagaaaaaggcaaacgagaagaaggaggaacccaagtagctttgtggcttcgtgtccaaccctcttgcccttcgcctgtgtgcctggagccagtcccaccacgctcgcgtttcctcctgtagtgctcacaggtcccagcaccgatggcattccctttgccctgagtctgcagcgggtcccttttgtgcttccttcccctcaggtagcctctctccccctgggccactcccgggggtgagggggttaccccttcccagtgttttttattcctgtggggctcaccccaaagtattaaaagtagctttgtaattctaaaaaaaaaaaaaaaaaa

SEQ ID NO: 25593 - DNA, 1723 bp, Homo Sapiens
catccttagattcgctcctccgggcagggagcggagacggaggaggaggagggagaggctgaatgttggctcgggagacgtacgaggaggaccgggagtacgagagccaggccaagcgtctcaagaccgaggagggggagatcgactactcggccgaggaaggcgagaaccgccgggaagcgacgccccggggcgggggcgatggcggcggcggcggccggagcttctctcagccggaggcaggtggaagtcatcataaagtttctgtttcacccgtcgtccatgttcgaggactctgtgaatctgtggtggaagcagacctcgtggaagcgctggaaaaatttgggacaatatgctatgtgatgatgatgccatttaaacgacaggctctagtggaatttgaaaacatagatagtgccaaagaatgtgtgacatttgctgcagatgaacccgtgtacattgctggtcaacaggcttttttcaactattctacaagcaaaaggatcactcggccaggaaatactgatgatccatcaggaggcaacaaagttcttctgctctcaattcagaatccgctttatccaattacagtggatgttttatatactgtatgcaaccctgttggcaaagtgcaacgtattgttatattcaagagaaatgggatacaagcaatggttgagtttgaatcagtcctttgtgcccagaaagctaaagcagcactcaatggagctgatatatatgctggatgttgcacactaaaaattgaatatgcacggccaactcgtctaaatgttattaggaatgacaatgacagttgggactacactaaaccatatttgggaagacgaggtaggtattttatacattttagaatgtacttgatctgctgacaaatttttatatgcagttagattcttttttcctgagatgagctagttaattcaaatgaaaaccttgttgatgaatgcttttgttgcaaaaggccatgtaatgctggaaaataaccttgaacattagtgccccctactggtatgtactgagctatttatatttagttcaacaaggagcccacacattcaggcacgcccgcagttcaaggacttgcatttctccaagcagctctctctctttggaggagaggaaactgattcagaatattccttacaaactgcaaacttgcacactgcttctctatggaaaggactttcccccaagctggacgaggcattaagaaggatagaggactccagcaggctgactctacacttcatcatgcacaacatcggcatcagcaaaaagccctctgaaaaactcagactcgcaattcaccttgactgcatactgcatgcaccatcaccccaagtttttaaaggaggacacttaacagtacttcagaattgcatgggatgaacaccatgatagactgtgcccatttatacaagttgtatgtatatattggtctgatttcccttaaggtttcagttgtagaatttaagactttccactaacggaaactagacttcatctgcaatgttgtaaatcttaatgcccattactgtgactgtgtgcagcttagattcaaattgttaattggcaaataaccaggaccagtttattaacaggtcttgggaattgataatgctcaaccaatccacacagatagaaaaataaaaggattagaaaggtgaaaaaaaaaaaaaaaaaaaaaaaaaaaaaaaaaaaa

SEQ ID NO: 25594 - DNA, 1509 bp, Homo Sapiens
cgaaagaatctatcttgaccatgaaactgtggctgttgaccttggaattggaaccacagtcctttcccatacagaaaccccaaatgtgggctcccccctccaacctgttcttttggggaccctttgcccttagagctgtcacagatgacataagcctgggcaggctgtggggaggccgctgcctcctagcctcacggtcagctttctcaagccaggtgtggcctgcacagctgtcagggcagggctggccatcctcccaggcctcaagggcagtgtcttggagtgggaggatggccgccacaagccaccagcttgtcagcatgggaagggcaagggggaaatgggttggcctacctcatttgactccagccaatggagacaattcctgacccctgctttgatggtgttgaccccacaggaatcaaggatcttgatgccaagtgtggcatctctacctgaagagctgcttctgttagacccaggggccccggcctctgttttaagggggcagggcgtctgcaacaggagtggcacacggtgaagtgctggcatggctctacctcccaacccctcccaaccccatcccaaagcctacagtcctctgctccttctacctccactgtatcctgcatcccagaccctacagattgtgtgattgcttcatctgtatcaccccccgagtcctgtggacctgccttctgtgtagagcaaaacccaggctccctcacagccattctttgcagagatcacccttgcagtgagtgtgagttccttccaggtgtgtgcgcgtacactcaccctctgaattgctgccgctgccaaggaagtgggctccaggtgaaggccagtgccacgtcactctggctggccttcttagtagtttcatttctccggaagctgagccagtctcctggtctagcccaggttgccagaacgcttggcattgcagagtgctagagccagtggagaacttgccaacttgattgttttacagcagaggaaagaggatcacagagggaaagtgattcacccaaagtcacacagcaagttcatggctgagctgagaccaggattaagcttcctgactcccagttcaccatgaaaagggttctggcaacaggttcaagctggagaatccttcaaaatgctacacccacattctctccaactcttcatctccctgatcttccagacaaactacctggatgttgcccttaaaccatttctagctgttaaccctgtccagaaaaatgattgagtgatagctgagaagtggaaagtgtgggatttttggcaggtgctctctttcctccgccccccgcgccattctttctcttcctcctctctgtaatggtatgtccagcctcactctccctccctggtgctgtatgcgttccccctgttagctacatttgtgatcacatacccttcttttaagtgaatttttttcatttgatttgtcaataaacgaatcaaactggaaaaaaaaaaaaaaaaaaaaaaaaaaaa

SEQ ID NO: 25595 - DNA, 1844 bp, Homo Sapiens
atgattgttacctttatgaagctttagtgattacaaagcactttttttgtccatttttacctgagctttgtaaactctgatttgcaggatggctggctgtggtgaaattgatcattcaataaacatgcttcctacaaacaggaaagcgaacgagtcctgttctaatactgcaccttctttaaccgtccctgaatgtgccatttgtctgcaaacatgtgttcatccagtcagtctgccctgtaagcacgttttctgctatctatgtgtaaaaggagcttcatggcttggaaagcggtgtgctctttgtcgacaagaaattcccgaggatttccttgacaagccaaccttgttgtcaccagaagaactcaaggcagcaagtagaggaaatggtgaatatgcatggtattatgaaggaagaaatgggtggtggcagtacgatgagcgcactagtagagagctggaagatgctttttccaaaggtaaaaagaacactgaaatgttaattgctggctttctgtatgtcgctgatcttgaaaacatggttcaatataggagaaatgaacatggacgtcgcaggaagattaagcgagatataatagatataccaaagaagggagtagctggacttaggctagactgtgatgctaataccgtaaacctagcaagagagagctctgctgacggagcggacagtgtatcagcacagagtggagcttctgttcagcccctagtgtcttctgtaaggcccctaacatcagtagatggtcagttaacaagccctgcaacaccatcccctgatgcaagcacttctctggaagactcttttgctcatttacaactcagtggagacaacacagctgaaaggagtcataggggagaaggagaagaagatcatgaatcaccatcttcaggcagggtaccagcaccagacacctccattgaagaaactgaatcagatgccagtagtgatagtgaggatgtatctgcagttgttgcacagcactccttgacccaacagagacttttggtttctaatgcaaaccagacagtacccgatcgatcagatcgatcgggaactgatcgatcagtagcagggggtggaacagtgagtgtcagtgtcagatctagaaggcctgatggacagtgcacagtaactgaagtttaaataaaaatgtcttcagctccatgctcaaggttgaaagggttacctgtaaatttctgcccacataacattatactcatccctagtagtgcattttgggagttggggtgggaaggggtatgggaaggatagactcataattaaaatgtctaacatgtctctgttgagaaatttatttaatgtaaggaacttgggtgttaatagttgagagctgtttagtaataacccagttttcttgaggtctgtttactttatactttttaaaaacttctgtagttcttttggccagtgtgtttgtattatctgtgcattaatggtcctcatctgactcctgcattgtgtcttatttttctgcatggattggcataagaccattactaaaatttggcacctgtgagatgtttgatattatgaacaggaaacataatttaatgtatgaatagatgtgaatttgggatttcaaaatagatgaataacaactattttatagtaaagttattgaaatggaaatgaaaacagccagtaacttatgtttcagaatgtttgtaacacacttcatggtgttcccataggctttgctgtctagtcttatagtttgaggtttttttggtctgcatttttctttttgattacaaaatttataatttaataaatactagagtttatcaaaaaaaaaaaaaaa

SEQ ID NO: 25596 - DNA, 1487 bp, Homo Sapiens
cccattttgtgggaggcgagagatctgtcaacatggaaaacctctgctgaggatgcatccgagtttggaaaccccacttaagggatggagcctgggggatcacattaaacggaaaatgccaacgacttctaccacctctacgcgtttttagtttttcattttctcgaaggaagcgccagaagcctgtggagtaattgtaactagagggagaacggaaagctgaggtgactgctccggggacttggcgcggcgccttggtggctttggttgctcttccacgctcccggcagctgaccagaatctcttggagggtctcctgggccacctcggccgcgccagtcgtgcagtgagacttctgtagttttaaaatgccacagtccacggcccggtcggcaccgctcgcctgaatcgtgggctttgggaaccttggaggctgctgctccaggaactcgcggtcggccgggagccggggagcttcgttgctgggagcgggcggtattcgcggactccggcggccctggcgggtcgcggccgggatccgagccggggatgacgatgctgatggagctgatggggcaagagtgggaacggaggcacgtacactgaaatttaagtcatccaagttgggacttaagatagcaggttaatattgtctcaggcgagacttagaacgtcttttctggtatcccagtctgcagtgggcaaatctattgtctttatttctcatttaagggcagaatggagggatgacatatttttacttttcaagaggcggttgccacttttaagtcactgttgtgtgtgtgtgtgtacatacacaaacatacgatagtgtgttttcagagcaagtatcaaaggctaaagacttggagtgatactagtgtttaaaagcctttttaaaaaaattaagatgtgatgagaaactggagaattgacttttaaaaatttcttttctgtagaagaggctatcttcaaaatggagtcctaaagtatatctgatggatagaatttaaattcttaacactgtatataccctgtggtcaaaagcatcaacgtaaaacttgatgtttatcagattacttatgtttcaattttcctgtggttagaaaaattaagacagaagtaagctattaacggtatttgcttgtaagagtaacgttaaaggtttaaggaaaggtttgttgaaatcgatatgcatcacacgaatcatttattttcaatgttgttttccagttgcagcaatcatttgtgtttacatgactttgaaaaagggtttagtttatgttgattttgaccctcttatttaatctctagtgcagaagtgcagctttctgcaggctgcgcctcaatcgctaagttccactctccatcctctgccgcgctactcctggcatgtggatcaccaagatacaatttctggtcctgtctgttcttattgatgtcctttacagttaataaatttgattgccactaaaaaaaaaaaaaaa

SEQ ID NO: 25597 - DNA, 1493 bp, Homo Sapiens
gtgccccagccgctgcgtgcctgcggttggggaccagtgcagggaccgggtcgcgccgtgctatggccctgtaccacactgaggagcgcggccagccctgctcgcagaattaccgcctcttctttagtaagtagctcccggaggttcgccgagcggcgcaccggagaaacctgggtgggggatggaatgggggacacttgggacgccccgcgcggtctcccttctctctttttggggccctcagcggtagccgcgcggtccaggccaccttacttcccgcgggagcgcgcaccgagtcacgagaactgccagcgaggaggcggcggatcaagaccccaaagcggagagcagaggcgcagggctgccggctggggggtagatagcgccctgtgccctgccagccgccctccccgaggggtaggcagagtgcaagcggccaccccgcggcggcctgcagccattagccggcccggccgccgttcccggttcacacaactcagtgaggaagggaaggcagagcccgcccacacgccggccttcctagaggcgtaagaaacctcctactgcgggagctccctgacgtcggagaggcaggcggaactttgcggatgcctaatccagcgcgtcttctttttttggagggactctgatgaaggttctttccccagaagcttgacttggtacgcacaagtttacaccctgagtgtgatccaccatccaaagcctcgttggttccggagcagccccttttcctccccaagctgaacaagcccagaaggctaagcgacttcgggggtgtccctgagttgccgagctcagagaaaggacccaggtcttcgtgactcattgttccgtgtaccccattgtttcactgtgtacgttaaccgtaacagaaaatagcgatgtcggtcgcttgccttcactccccactgactgcagagccttggagtggtagtatcaaagtgggccttgcattatcgctccccttttcggagcactggctctggaggctttcagttctaagcaggccctcgagttcttcacgtcttaactctgtgaccccggacgagtttaagttgctaagccttgttttttctcatccgtaaaatagggctgcaagtattacatgacattatatatgtaaagtgattagtcacagggcctaaaatataaattactattgttaataccgataatcattatagatatttgtaatttatgagagatttgcagttatgctacatgagtttagggtcgaggattattttgtgggaaagaagagtttgcctaaagtcgtgtgattataatgcaactagtactagaatttctattttcttcaaaattggttgcagttttcaccctatgccacatattttcttctatctttggttaagactgatcaggtgaacaggaagtctcaaatttctgaatggattatgttctaaaaggttaccatgtgatgattaatgggaatagtcaaaaaaaaaaaaaaa

SEQ ID NO: 25598 - DNA, 1139 bp, Homo Sapiens
ggcgcacaagtgtttctagggacggttggagaccctatctaaccctaagaaggtggggaggtcgaattcgtgtgccgattgctgtcggccaacccactcaaccaccagagacccgcgggaggggcgtgcaaggcggagggcgccgcgggtcggtcacctgtctccgtagccgcagggctgccggcagcttccatggccgaagaggcagcggaccaggttgggcgggcggccctggcctggctctgccccgctgggcggcgccggggattcggcggcgaagtgatgagggccctagttgcttctcgcccagacctcctaaccctgagtgcctcctcgggctgggccctagggtcagagggcagggtgaaagcttctgggcggacctacttagtattctaattaaactcgtccaaccgctgaggatctaaagcggggcaactcgccaataatccggtcccgtagtgtcactccatttgtagtcctgccctgcgccgtacctccctattctgcagacgaacccatatggtctccctccgccgcccatttcagcaactgttgttccttcagggctaagtcctgttaaacttgtttcccctacagcctgagaggagcccggctgcaggttcctctcctcaggtgtcaactctgccctcctccaccctcatatagctttttccttatcaacccttttaccttcctgcttatatccccactttggcttagtttaatgtccagcagtacccctggaaccagggaggaggcaggaggtaagtattggtgactacctccaacactaggcagcatgtcccatttaaaaaacaaaacaaaagccaggcgcggttgctcacgcctgtaatcccagcactttgggaggccgaggcgggtggatcacgaggtccggagttcaagaccaacctggccaaggtggcgaaaccccgtctctactaaaaatacaaaaaaattagccgggcgtggtggcgggtgcctgtaatctcagctactcgggaggctgaggcagagaatttcttgaatctgggaggcggaggttgcagtgagccaagatcgctccactgcactccagcttggacgacagagtgagaccccgtctcaaaaaaaaaaaaaaaaaaaaaaaaaaaaaa

SEQ ID NO: 25599 - DNA, 2403 bp, Homo Sapiens
gtattgctaaggcattcgtgcctcccctagccgaggatctgctggcccgggattttgagcggctgggacgcctaccctacaaagctggcctgagcctacagcgggcccaggagggctggttctctctcagtggctcggagctccgtgctgtcttcccggaggggccctgcgaagagccgctgcaactacggaaactgcaggagctttccatccagggggacagtgagaaccaggtgctggtgctggtggagcgaaggaggacactgtacatacagggcgagcggcggctggacttcatgggttggctgggggccatccagaaagcagccgccagcatgggggacacgctgtcggagcagcagcttggggactcggatatcccggtgatcgtgtaccgctgtgtggactacatcacgcagtgcggcctgacctccgagggcatctaccgcaagtgtgggcagacatcgaagacacagcggctgctggagagcctgcggcaggatgcgcgctctgtgcacctcaaggagggcgagcagcacgtggatgatgtttcctcggcgctcaagcgcttcctgcgcgacctgcctgatgggctcttcactcgcgcccagcgcctaacctggctggaggcctcagagattgaggacgaggaggagaaggtctccaggtaccgagagctgctggtgcggctgccccctgtcaaccgggccacagtgaaggcccttatcagccacctgtactgtgttcagtgcttctcagacacgaaccagatgaacgtgcacaacctggcaattgtgtttgggcccacgctcttccagacagatgggcaggactacaaggctggccgtgtggtggaagacctcattaaccactatgtggtggtgtttagtgtggatgaggaagagctcaggaagcagcgggaggagatcactgccattgtgaagatgcgcgtggctggcactgccagtgggacccagcatgccggtgacttcatctgcacagtgtatctggaagagaagaaggcagagactgagcagcatatcaaggtcccagcatccatgactgctgaggagctcaccctggagatcctggatcgccggaacgtgggcatcagggagaaggactattggacctgctttgaggtcaacgagagggaggaggcagagcgccccctgcactttgcggagaaggtgctgcccatcctgcacgggctgggcacggacagccacctggtggtgaagaagcaccaggccatggaggccatgctgctgtacctggccagccgtgtcggtgacaccaagcatggcatgatgaagttccgtgaggaccgcagcctcctgggcctgggcctgccctcaggtggcttccacgatcgctacttcatcctcaacagcagctgcttgcggctctacaaggaggtccggagtcaccggcctgagaaggagtggcctattaagagtctcaaagtctacctgggagtgaagaagaaactcaggccacccacctgctggggcttcacagtggtgcatgagacagagaaacatgagaagcagcagtggtacctctgctgtgacacacagatggagctccgggagtggttcgctacctttctgtttgtgcagcatgacggcctggtgtggccctcagagccctcacgcgtgtcccgggcagtgcctgaggtccggctgggtagtgtgtcactgatcccccttcgaggtagtgaaaatgaaatgcgccggagtgtggctgccttcaccgcggaccctctgtctcttctgcgcaacgtctgagcacaggagcccatccttggctctaggattccgccgctggaagccttctgttcagacaccccttatgctccaaggcctgatgtgagccagcggggggtgcatgggaaactgcaccccacaacccacatcctccatcctgactgcagcatggggttccccggcaggggtgggaggcagcaggggtcagcctgggcaggaacctctcccaactctgtccaggtgttcagacctcttggcccaacctgctcaccccaccgggttcactgtccttgtggggctggagagatgggcataagtcaggaacttgggaggaccaccaccctttcagaggcgtgaggccctggggccctgccggaagggagccccctgctcctcccaacaaactccagaacagcagaaagcgggtgctgtagaggagcactcagctcacggggagggagctcttggctgagcttctacagggctgagagctgcgctttggggacttcagccttccttccagtctgggctgagtggggggtccagactacctgatgccccttccccaatttggggactttttgataatataaatatatctgtatattttaccctaaaaaaaaaaaaaaaaaaa

SEQ ID NO: 25600 - DNA, 2212 bp, Homo Sapiens
ctcatgcaagtcaccaccatagtcatagccatgaagaaccagcaatggaaatgaaaagaggaccacttttcagtcatctgtcttctcaaaacatagaagaaagtgcctattttgattccacgtggaagggtctaacagctctaggaggcctgtatttcatgtttcttgttgaacatgtcctcacattgatcaaacaatttaaagataagaagaaaaagaatcagaagaaacctgaaaatgatgatgatgtggagattaagaagcagttgtccaagtatgaatctcaactttcaacaaatgaggagaaagtagatacagatgatcgaactgaaggctatttacgagcagactcacaagagccctcccactttgattctcagcagcctgcagtcttggaagaagaagaggtcatgatagctcatgctcatccacaggaagtctacaatgaatatgtacccagagggtgcaagaataaatgccattcacatttccacgatacactcggccagtcagacgatctcattcaccaccatcatgactaccatcatattctccatcatcaccaccaccaaaaccaccatcctcacagtcacagccagcgctactctcgggaggagctgaaagatgccggcgtcgccactttggcctggatggtgataatgggtgatggcctgcacaatttcagcgatggcctagcaattggtgctgcttttactgaaggcttatcaagtggtttaagtacttctgttgctgtgttctgtcatgagttgcctcatgaattaggtgactttgctgttctactaaaggctggcatgaccgttaagcaggctgtcctttataatgcattgtcagccatgctggcgtatcttggaatggcaacaggaattttcattggtcattatgctgaaaatgtttctatgtggatatttgcacttactgctggcttattcatgtatgttgctctggttgatatggtacctgaaatgctgcacaatgatgctagtgaccatggatgtagccgctgggggtatttctttttacagaatgctgggatgcttttgggttttggaattatgttacttatttccatatttgaacataaaatcgtgtttcgtataaatttctagttaaggtttaaatgctagagtagcttaaaaagttgtcatagtttcagtaggtcatagggagatgagtttgtatgctgtactatgcagcgtttaaagttagtgggttttgtgatttttgtattgaatattgctgtctgttacaaagtcagttaaaggtacgttttaatatttaagttattctatcttggagataaaatctgtatgtgcaattcaccggtattaccagtttattatgtaaacaagagatttggcatgacatgttctgtatgtttcagggaaaaatgtctttaatgctttttcaagaactaacacagttattcctatactggattttaggtctctgaagaactgctggtgtttaggaataagaatgtgcatgaagcctaaaataccaagaaagcttatactgaatttaagcaaagaaataaaggagaaaagagaagaatctgagaattggggaggcatagattcttataaaaatcacaaaatttgttgtaaattagaggggagaaatttagaattaagtataaaaaggcagaattagtatagagtacattcattaaacatttttgtcaggattatttcccgtaaaaacgtagtgagcacttttcatatactaatttagttgtacatttaactttgtataatacagaaatctaaatatatttaatgaattcaagcaatatatcacttgaccaagaaattggaatttcaaaatgttcgtgcgggtatataccagatgagtacagtgagtagttttatgtatcaccagactgggttattgccaagttatatatcaccaaaagctgtatgactggatgttctggttacctggtttacaaaattatcagagtagtaaaactttgatatatatgaggatattaaaactacactaagtatcatttgattcgattcagaaagtactttgatatctctcagtgcttcagtgctatcattgtgagcaattgtcttttatatacggtactgtagccatactaggcctgtctgtggcattctctagatgtttcttttttacacaataaattccttatatcagcttgaaaaaaaaaaaaaaaaaaaaaaaa

SEQ ID NO: 25601 - DNA, 2050 bp, Homo Sapiens
gctgtgtgtctactgagacggggaggcgtgacagggcccgggtcccttctcagtggtgctctgtgcttcagggcaagctccccgtctccgggcgcacttccctcgcctgtgttcggtccatcctcctttctccagcctcctcccctcgcaggtgggatcgtcggtgggaccggagcgcgggcgggcgcggccccccgggaccatggccgggtccgacaccgcgcccttcctcagccaggcggatgacccggacgacgggccagtgcctggcaccccggggttgccagggtccacggggaacccgaagtccgaggagcccgaggtcccggaccaggaggggctgcagcgcatcaccggcctgtctcccggccgttcggctctcatagtggcggtgctgtgctacatcaatctcctgaactacatggaccgcttcaccgtggctggcgtccttcccgacatcgagcagttcttcaacatcggggacagtagctctgggctcatccagaccgtgttcatctccagttacatggtgttggcacctgtgtttggctacctgggtgacaggtacaatcggaagtatctcatgtgcgggggcattgccttctggtccctggtgacactggggtcatccttcatccccggagagcatttctggctgctcctcctgacccggggcctggtgggggtcggggaggccagttattccaccatcgcgcccactctcattgccgacctctttgtggccgaccagcggagccggatgctcagcatcttctactttgccattccggtgggcagtggtctgggctacattgcaggctccaaagtgaaggatatggctggagactggcactgggctctgagggtgacaccgggtctaggagtggtggccgttctgctgctgttcctggtagtgcgggagccgccaaggggagccgtggagcgccactcagatttgccacccctgaaccccacctcgtggtgggcagatctgagggctctggcaagaaatcctagtttcgtcctgtcttccctgggcttcactgctgtggcctttgtcacgggctccctggctctgtgggctccggcattcctgctgcgttcccgcgtggtccttggggagaccccaccctgccttcccggagactcctgctcttcctctgacagtctcatctttggactcatcacctgcctgaccggagtcctgggtgtgggcctgggtgtggagatcagccgccggctccgccactccaacccccgggctgatcccctggtctgtgccactggcctcctgggctctgcacccttcctcttcctgtcccttgcctgcgcccgtggtagcatcgtggccacttatattttcatcttcattggagagaccctcctgtccatgaactgggccatcgtggccgacattctgctgtacgtggtgatccctacccgacgctccaccgccgaggccttccagatcgtgctgtcccacctgctgggtgatgctgggagcccctacctcattggcctgatctctgaccgcctgcgccggaactggcccccctccttcttgtccgagttccgggctctgcagttctcgctcatgctctgcgcgtttgttggggcactgggcggcgcagccttcctgggcaccgccatcttcattgaggccgaccgccggcgggcacagctgcacgtgcagggcctgctgcacgaagcagggtccacagacgaccggattgtggtgccccagcggggccgctccacccgcgtgcccgtggccagtgtgctcatctgagaggctgccgctcacctacctgcacatctgccacagctggccctgggcccaccccacgaagggcctgggcctaaccccttggcctggcccagcttccagagggaccctgggccgtgtgccagctcccagacactacatgggtagctcaggggaggaggtgggggtccaggagggggatccctctccacaggggcagccccaagggctcggtgctatttgtaacggaataaaatttgtagccagaaaaaaaaaaaaaaaaaa

SEQ ID NO: 25602 - DNA, 2459 bp, Homo Sapiens
gaccacctgatgtccagggtggtgccactccagtacaagcgtgggggacctatcattgccgtgcaggtggagaatgaatatggttcctataataaagaccccgcatacatgccctacgtcaagaaggcactggaggaccgtggcattgtggaactgctcctgacttcagacaacaaggatgggctgagcaaggggattgtccagggagtcttggccaccatcaacttgcagtcaacacacgagctgcagctactgaccacctttctcttcaacgtccaggggactcagcccaagatggtgatggagtactggacggggtggtttgactcgtggggaggccctcacaatatcttggattcttctgaggttttgaaaaccgtgtctgccattgtggacgccggctcctccatcaacctctacatgttccacggaggcaccaactttggcttcatgaatggagccatgcacttccatgactacaagtcagatgtcaccagctatgactatgatgctgtgctgacagaagccggcgattacacggccaagtacatgaagcttcgagacttcttcggctccatctcaggcatccctctccctcccccacctgaccttcttcccaagatgccgtatgagcccttaacgccagtcttgtacctgtctctgtgggacgccctcaagtacctgggggagccaatcaagtctgaaaagcccatcaacatggagaacctgccagtcaatgggggaaatggacagtccttcgggtacattctctatgagaccagcatcacctcgtctggcatcctcagtggccacgtgcatgatcgggggcaggtgtttgtgaacacagtatccataggattcttggactacaagacaacgaagattgctgtccccctgatccagggttacaccgtgctgaggatcttggtggagaatcgtgggcgagtcaactatggggagaatattgatgaccagcgcaaaggcttaattggaaatctctatctgaatgattcacccctgaaaaacttcagaatctatagcctggatatgaagaagagcttctttcagaggttcggcctggacaaatggagttccctcccagaaacacccacattacctgctttcttcttgggtagcttgtccatcagctccaccccttgtgacacctttctgaagctggagggctgggagaagggggttgtattcatcaatggccagaaccttggacgttactggaacattggaccccagaagacgctttacctcccaggtccctggttgagcagcggaatcaaccaggtcatcgtttttgaggagacgatggcgggccctgcattacagttcacggaaaccccccacctgggcaggaaccagtacattaagtgagcggtggcaccccctcctgctggtgccagtgggagactgccgcctcctcttgacctgaagcctggtggctgctgccccacccctcactgcaaaagcatctccttaagtagcaacctcagggactgggggctacagtctgcccctgtctcagctcaaaaccctaagcctgcagggaaaggtgggatggctctgggcctggctttgttgatgatggctttcctacagccctgctcttgtgccgaggctgtcgggctgtctctagggtgggagcagctaatcagatcgcccagcctttggccctcagaaaaagtgctgaaacgtgcccttgcaccggacgtcacagccctgcgagcatctgctggactcaggcgtgctctttgctggttcctgggaggcttggccacatccctcatggccccattttatccccgaaatcctgggtgtgtcaccagtgtagagggtggggaaggggtgtctcacctgagctgactttgttcttccttcacaaccttctgagccttctttgggattctggaaggaactcggcgtgagaaacatgtgacttcccctttcccttcccactcgctgcttcccacagggtgacaggctgggctggagaaacagaaatcctcaccctgcgtcttcccaagttagcaggtgtctctggtgttcagtgaggaggacatgtgagtcctggcagaagccatggcccatgtctgcacatccagggaggaggacagaaggcccagctcacatgtgagtcctggcagaagccatggcccatgtctgcacatccagggaggaggacagaaggcccagctcacatgtgagtcctggcagaagccatggcccatgtctgcacatccagggaggaggacagaaggcccagctcagtggcccccgccccccaccccccacgcccgaacagcaggggcagagcagccctccttcgaagtgtgtccaagtccgcatttgagccttgttctggggcccagcccaacacctggcttgggctcactgtcctgagttgcagtaaagctataaccttgaatcacaaaaaaaaaaaaaaaaaa

SEQ ID NO: 25603 - DNA, 3649 bp, Homo Sapiens
cccggggagaggtacccggccagaggcgagtcctgcggagtggtagcgcgcacggcctgcggtgtgacacccagcccctgccagtcccccatggccccgtggagccgagaggcggtgctgagtctctatcgggctctgttgcgccagggccgacagcttcgctacactgatcgagacttctactttgcctccatccgccgtgaattccgaaaaaatcagaagctagaggacgctgaggcccgggagaggcagctggagaagggcctggtctttctcaacggcaaattggggaggatcatttaggatcctccaagggaaagaggacaaaggtgccttctgtagacactcctgctctcttccatccccatcttacagatgtattaagaagcctcagatgagcaatggcaggcgctggtgagcgcaaaggcaagaaggatgacaatggcattggcacggccattgactttgtgctctccaatgcccggctggtgctgggggtgggtggagcggccatgctgggcatcgccacgctggcagttaagcggatgtacgatcgggcgatcagtgcccctaccagccccacccgcctgagccattcggggaaaaggagctgggaagaacccaactggatgggctccccacgactgctgaacagggacatgaagacgggcctgagccggtccttgcagacccttcccacagactcctccaccttcgacacagatacattctgcccgccccggcccaagccagtggccaggaagggccaggtagacttgaagaagtcacgactccgcatgtccctgcaggagaaacttcttacttactaccggaaccgggcagccatccctgctggagagcaggctcgggccaagcaagctgctgtggacatatgtgccgagctccggagcttcctgcgggccaagttgcctgacatgccgcttcgggacatgtacttgagtggcagcctctacgatgacctgcaggtggtgacagctgaccacatccaactcattgtgccccttgtgctggagcagaacctgtggtcatgtattcctggtgaagacaccatcatgaatgtccctggcttcttcctggtgcgtcgtgagaatccagagtactttcctcgtgggagcagttactgggaccgctgtgtagtagggggctacctctctccaaagacagtcgcagatacatttgagaaggtagtggctggctccatcaattggccagccatagggtccctcttggactatgtgatccgcccggccccacccccagaagccctcacactggaggtgcagtatgagcgtgacaaacatctcttcattgacttcctgccatcagtgaccctcggtgacacagtcttggtggccaaaccacaccggctagcccagtatgacaacctgtggcggctgagcctgcgtcccgcggagacggcacgcctgcgggctctggaccaggctgactcgggctgccgatctctgtgcctcaagatcctcaaggccatatgcaagtccaccccggctctgggccacctcactgccagccagctaaccaatgtcatcctccacttggcccaggaggaggctgactggtctccggatatgctggccgaccgtttcctgcaggccttgaggggacttatcagctacttagaggctggagtcctgcccagtgccctaaaccccaaggtgaacttatttgcagagctcacccctgaagaaatagacgaattaggatacactctgtattgctcattgtctgagccagaggtgctgctgcagacgtagggcaggtgaaggccaaagcgggtgttggtggtcaggccctggattctccgttagatacacttggctacctagttggtgcctcacagggttcctgctgcctggtgtcttgctgatcatcaccctggtcacttcatgctgattagaatgacatctctttcgtctcctattttgttacccaactcttcctatttttgttaccaatcactgtgctctctgccgccccctggctccaggctaatttttttggaatgaattgagaaggtggcgtgctggcctgagctgatggaccacttggtgttttgcgttttggcccatgtttgctgcctctatctggtctgccttgcccgtttgcctgttcctattcagtgtcttttctattttttcctctctcgttcatgccttctgttttgctcttgtccctggagcatatctgcctaattaagatgttgccttttagttgaatgccactgaagagctgtgatagcatgtttcaaagctgaactctacagagcgagtgctgagacagtatttagggtttctgggagtgaggctggtagaagagttggcctttgaccacggttcctggagtagaagtccatcctccccccaacctcctgacccattcataaatgctgagaatgtctctcatgggaacactgttaatgacccacacaggataagctgaatgcaaagttatttgcaggttgaatttcttggtggctattagcagaagtgcagagtagggaaccagagctggttaagggcctagtgaagggtttgtgtgcccagtgtctgctcgtcatctgtggctgcaggggtcagacagacaaggatggggactgccagggcaccacttcatcatgaatgctggttttcacaccttttccttattttattgccaatcaggacaaggccttgaaggaacgcagccttagacatcaggtgaggatgatggaggtagacagtcgactgaatgtcagctggaaaatccagtcactagttggggtttggtggccatgttttctacccagacaggccctgcttttctaggatgtggccttagagcaagaacagacccaacagccagcccttcatcctccagcgtctgccataggaatgtgagaggggtgtttgctgagcgctccgggcacggccagagggcaagtgagcatgcacggacctcttccccctgtcctgtttctcacccagcacctggggagatcggtgctaccaaggaagagagcacacagataagacagaggggaggaggtgggcatttcctacattcctccttgtttgccgctgctgagattgcagtatttattgcaatgtaaatgtatcctgaaggtggggaggaatgtttaatctaccatgtccgtgtgtcatcttggtttgtgtttttccctgtttgtagcaagactctgatgataattctgtttctcatctgcccattcagtattttgttttccttccgtcaagttgtcttattttttcaatgactacctctccatcattgaggttctggtgaagctctctgcagctgtctcattccttcccaacgatagtaacaggaaatgactctttagcatcgatacctcaacatcaatttagggtagagattcctgcccctcttttgtcacagattaggaaattgagaactagggttaaccttgactatatttagaggtctttttgcctcttttccccttaacaaggatttcttatggtggtttcagtttcatttgcataaaggtattgagagggaacaaaaaacataaagctgagaatcttgagagagctcatctaccctgtctgttggtcagactcaaatgagagttaaaaaaaaaaaaaaaaaa

SEQ ID NO: 25604 - DNA, 3647 bp, Homo Sapiens
gggaggcggcggcggcggcggcggcggctcgggtggctgcgctgggaggcggcggtgagaggctcgcacgcctccagcccggccccggccccccgggagggagagccgagcagccccggctctgggctacggactatgggcgaatagctctgaccacccggcgaagagctgagaatgaagcggagagcatcagacagaggagctggggaaacgtcggccagggccaaggctctaggaagtgggatttctggaaataatgcaaagagagctggaccattcatccttgctctctgtgccgtaggtccccgtctgggcaactcaccggtgccaagcatagtgcagtgtttggcgaggaaagatggcacggatgacttctatcagctgaagatcctgaccctggaggagaggggggaccaaggcatagagagccaggaagagcggcagggcaagatgctgctgcacaccgagtactcactgctgtctctcctgcacacgcaggatggcgtggtgcaccaccacggcctcttccaggaccgcacctgtgaaatcgttgaggacacagaatccagccggatggttaagaagatgaagaagcgcatctgcctcgtcctggactgcctctgtgctcatgacttcagcgataagaccgctgacctcatcaacctgcagcactacgtcatcaaggagaagaggctcagcgagagggagactgtggtaatcttctacgacgtggtccgcgtggtggaggccctgcaccagaaaaatatcgtgcacagagacctgaagctggggaacatggtgctcaacaagaggacacatcggataaccatcaccaacttctgcctcgggaagcatctggtgagcgagggggacctgctgaaggaccagagagggagccctgcctacatcagtcccgacgtgctcagcggccggccgtaccgtggcaagcccagtgacatgtgggccctgggcgtggtgctcttcaccatgctgtatggccagttccccttctacgacagcatcccgcaggagctcttccgcaagatcaaggctgccgagtataccattcctgaggatggacgggtttctgagaacaccgtgtgtctcatccggaagctgctggtccttgacccccagcagcgcctggccgccgccgacgtcctggaggccctcagtgccatcattgcatcatggcagtccctgtcatctctgagtgggcctttgcaagtggttcctgacattgatgaccaaatgagcaatgcggatagctcccaggaggcgaaggtgacggaggagtgctcccagtacgagtttgagaactacatgcgtcagcagctgctgctggccgaggagaagagctccatccatgacacccggagctgggtacccaagcggcagttcggcagcgcaccaccggtgcgacggctgggccacgacgcacagcccatgacctccttggacacggccatcctggcgcagcgctacctgcggaaataacagcctcagccggggccaccagcactgctgccacttcttccagccccagccaaaggcgtggctgtcagggctgggccctgtagtgctggactctcccgggccacaatagggacagggcagggacagggacagcccaggtcacacgtggggtcagcagaggtaccacgaagctaccttttgggatgattgctcgattgtttggtttttaaatctgagaagcctagataactaatctgcttttaatcacgatgttttaatctacctctgtctctttaaccatgctgtctctggactgagcaagagggaggagggagcctgctcaccccactccagggccttccccagcggccaccaactgacctggggcgctgctccccacagtccaaataagctgaaagtgcagctcgctgcaggccccagagcgagcttcccctcctccctgctctcccaggcccctgccacagcctctttccgtccctctctttctgatccaggcccctcagtccaagctttggaaaaccttcacctcatcttaaaccgaactcaaatatatttatttttttaccataccaacttctctcccatctctaggtggctcagtccatggccactccctgcccccagcctggctggacagcaaggaatccacagcccacacgtgagctccctcctcacccccaggcagggaagcccctcctgccagtccctgtcccctttcagcccaccagtccctctctgctgccggtgatgggaggcctttctagacctggctctttctctcccgtctcagtggcttctctgaggtgctgtacacgcgcgttaacctgttcccttctctatccttccccgtggtactgagctcacgtggactcccagtgcgaaggggcccatgggttgggctgcaggcctggccgtgagcgggggctgcctgcacgctcccctagcctactcttgtgtttaggggatggtgggaacatatcccagtgcccttgcctcataatagatgtggtgactctcccggtagaccctagcaagggtcctccatggtggtgagggactcaggagaattgtagggattgggggaccctgcctgcctggcttgagaacagccctgctgcccttttgagccgagattttgaagtggatgcccgtcttgccagaaatgctgttctcaccagaatgccccctccccttgcccttactggacttggccctgcctgatgccaagcaaagacccttccccagaggcctaccccccatatgtcctcagagaggctgagtgtcccctccaggcagtcatgggccctgaggcccctcctgcctggccctgctccccagtggggaggtgactgtgtttcccagagtgtgagccgctctcctccccctaaaaagctgactcactgtgagtgaccttgggcaagttcccaaacctccttgtgcctcagtttccccatctggaaaaaatggggccacctcttgccagcagtagcagggctgcccacgcccctttctccccatgccccatccagcacttgggcgactcatgcctctgcctcagtgggcctgtgggagcctactggagcccagcacttactccccctgagcagcgagcctgcgtctgtctcagctgtccagcgctgagggccagggtcttgtgctgtggggctgggggatgccctcttttctatatttatttcatagaaagtctcctgcgggagcggaaatgcagtccggcctagggctcccagcccttgactgtcctcctgtgagggcctgaagctgggccagggcccgtcgcagcggagccccctctcagcagcccaccgggtccctccaggctgctgcccgtgcgtggtctttctcctccttttcaaagcaatagccgccgggtctgcaaagccctgtcagacagactgggcccttccaaggtcaagccatgtgtctgatgacattcctggtgaagcaaaggagaggaggatgggtcagccctcactgggtgtcacacactgagagaagtcctattgtaaagaaacggaaaaagtcacaaaaaagtttgtataaagacatatttttgtactacatggggactcttcctgcatgtcagcaataaaacttcctgatctggaaaaaaaaaaaaaaaaaaaaaaaaa

SEQ ID NO: 25605 - DNA, 1550 bp, Homo Sapiens
gagacactgagggggccccgaggctcctgaggacctgagggttaccgggggcgccgggcccgtcacccttctctgggctcgacgaccgggcactgtggaggcgggagaggggctgaggggacgggaactgacccagcagcccctgccgccaggctcaacgtggacgggctcctggtctacttcccgtacgactacatctaccccgagcagttctcctacatgcgggagctcaaacgcacgctggacgccaagggtcatggagtcctggagatgccctcaggcaccgggaagacagtatccctgttggccctgatcatggcataccagagagcatatccgctggaggtgaccaaactcatctactgctcaagaactgtgccagagattgagaaggtgattgaagagcttcgaaagttgctcaacttctatgagaagcaggagggcgagaagctgccgtttctgggactggctctgagctcccgcaaaaacttgtgtattcaccctgaggtgacacccctgcgctttgggaaggacgtcgatgggaaatgccacagcctcacagcctcctatgtgcgggcgcagtaccagcatgacaccagcctgccccactgccgattctatgaggaatttgatgcccatgggcgtgaggtgcccctccccgctggcatctacaacctggatgacctgaaggccctggggcggcgccagggctggtgcccatacttccttgctcgatactcaatcctgcatgccaatgtggtggtttatagctaccactacctcctggaccccaagattgcagacctggtgtccaaggaactggcccgcaaggccgtcgtggtcttcgacgaggcccacaacattgacaacgtctgcatcgactccatgagcgtcaacctcacccgccggacccttgaccggtgccagggcaacctggagaccctgcagaagacggtgctcaggatcaaagagacagacgagcagcgcctgcgggacgagtaccggcgtctggtggaggggctgcgggaggccagcgccgcccgggagacggacgcccacctggccaaccccgtgctgcccgacgaagtgctgcaggaggcagtgcctggctccatccgcacggccgagcatttcctgggcttcctgaggcggctgctggagtacgtgaagtggcggctgcgtgtgcagcatgtggtgcaggagagcccgcccgccttcctgagcggcctggcccagcgcgtgtgcatccagcgcaagcccctcagattctgtgctgaacgcctccggtccctgctgcatactctggagatcaccgaccttgctgacttctccccgctcaccctccttgctaactttgccacccttgtcagcacctacgccaaaggccaggctcagcactgtggaagcagcaggaaccaaaaaagatctcatccctaaccccccagaacttatattccagatgggaaaaccagtagcaaagatgcagccaaataaacaaggaaataattccagaaagtgacagttatcatgaaaaaaaaaaaaaaaaaaaa

SEQ ID NO: 25606 - DNA, 1646 bp, Homo Sapiens
gatcgctttgccaattttgcgttactgggcaggctaagagatcttcttttaattcagcctgcttaagacgggaactgataactgtagtgtatcctctgccttttttcttatctattggaggaagctcaggtgaagaaatggagttgccatcaactaagttgagaaagactacagatggtgtcacaagaaggatctgaagtggagcttctagtatccccaggagcgcgaagtgaacacggaaggtacctgcaggatccaattgtgtccattgatctctcagagtggctgaggataatagagtttcttcttcaaggtctcaaggtctgaagcatcccacagaatgatcctactgaataactcccataagctgctggccctatacaaatccttggccaggagcatccctgagtccctgaaggtgtatggctctgtgtatcacatcaatcacgggaaccccttcaacatggaggtgctggtggattcctggcctgaatatcagatggttattatccggcctcaaaagcaggagatgactgatgacatggattcatacacaaacgtatatcgtatgttctccaaagagcctcaaaaatcagaagaagttttgaaaaattgtgagatcgtaaactggaaacagagactccaaatccaaggtcttcaagaaagtttaggtgaggggataagagtggctacattttcaaagtcagtgaaagtagagcattcgagagcactcctcttggttacggaagatattctgaagctcaatgcctccagtaaaagcaagcttggaagctgggctgagacaggccacccagatgatgaatttgaaagtgaaactcccaactttaagtatgcccagctggatgtctcttattctgggctggtaaatgacaactggaagcgagggaagaatgagaggagcctgcattacatcaagcgctgcatagaagacctgccagcagcctgtatgctcggcccagagggagtcccggtctcatgggtaaccatggacccttcttgtgaagtaggaatggcctacagcatggaaaaataccgaaggacaggcaacatggcacgagtgatggtgcgatacatgaaatatctgcgtcagaagaatattccattttacatctctgtgttggaagaaaatgaagactcccgcagatttgtggggcagtttggtttctttgaggcctcctgtgagtggcaccaatggacttgctacccacagaatctagttccattttagacaatgaagctgcttagtaatctctgccaagccatctcttaatattaaagcagacaccacagaatagatttcttcacttacaaatgcatattgggcacttataatacagcaggaactcttctcacctggagccttgatgttaaaagacacagccatgctcttgaggagcttacaatcctggctggaggcaggggagggtatattctttaaatatgcttaagtgttatagggaaagacggggttaccagtaaacatgtaactagaaagccaggctcagttcttacctctgggaatcagaactctttatgcaacttggttaatagaatctactatctggaagataaatgaaggattttaataaaattttcaatagaataaaaaaaaaaaaaaaaaaaaa

SEQ ID NO: 25607 - DNA, 2071 bp, Homo Sapiens
gcgctgccggaagatcttcttccgctctgaggcgctactgaggccgcggagccggactgcggttggggcgggaagagccggggccgtggctgacatggagcagccctgctgctgaggccgcgccctccccgccctgaggtgggggcccaccaggatgagcaagctgcccagggagctgacccgagacttggagcgcagcctgcctgccgtggcctccctgggctcctcactgtcccacagccagagcctctcctcgcacctccttccgccgcctgagaagcgaagggccatctctgatgtccgccgcaccttctgtctcttcgtcaccttcgacctgctcttcatctccctgctctggatcatcgaactgaataccaacacaggcatccgtaagaacttggagcaggagatcatccagtacaactttaaaacttccttcttcgacatctttgtcctggccttcttccgcttctctggactgctcctaggctatgccgtgctgcggctccggcactggtgggtgattgcggtcacgacgctggtgtccagtgcattcctcattgtcaaggtcatcctctctgagctgctcagcaaaggggcatttggctacctgctccccatcgtctcttttgtcctcgcctggttggagacctggttccttgacttcaaagtcctaccccaggaagctgaagaggagcgatggtatcttgccgcccaggttgctgttgcccgtggacccctgctgttctccggtgctctgtccgagggacagttctattcacccccagaatcctttgcagggtctgacaatgaatcagatgaagaagttgctgggaagaaaagtttctctgctcaggagcgggagtacatccgccaggggaaggaggccacggcagtggtggaccagatcttggcccaggaagagaactggaagtttgagaagaataatgaatatggggacaccgtgtacaccattgaagttccctttcacggcaagacgtttatcctgaagaccttcctgccctgtcctgcggagctcgtgtaccaggaggtgatcctgcagcccgagaggatggtgctgtggaacaagacagtgactgcctgccagatcctgcagcgagtggaagacaacaccctcatctcctatgacgtgtctgcaggggctgcgggcggcgtggtctccccaagggacttcgtgaatgtccggcgcattgagcggcgcagggaccgatacttgtcatcagggatcgccacctcacacagtgccaagcccccgacgcacaaatatgtccggggagagaatggccctgggggcttcatcgtgctcaagtcggccagtaacccccgtgtttgcacctttgtctggattcttaatacagatctcaagggccgcctgccccggtacctcatccaccagagcctcgcggccaccatgtttgaatttgcctttcacctgcgacagcgcatcagcgagctgggggcccgggcgtgactgtgccccctcccaccctgcgggccagggtcctgtcgccaccacttccagagccagaaagggtgccagttgggctcgcactgcccacatgggacctggccccaggctgtcaccctccaccgagccacgcagtgcctggagttgactgactgagcaggctgtggggtggagcactggactccggggccccactggctggaggaagtggggtctggcctgttgatgtttacatggcgccctgcctcctggaggaccagattgctctgccccaccttgccagggcagggtctgggctgggcacctgacttggctggggaggaccagggccctgggcagggcagggcagcctgtcacccgtgtgaagatgaaggggctcttcatctgcctgcgctctcgtcggtttttttaggattattgaaagagtctgggacccttgttggggagtgggtggcaggtgggggtgggctgctggccatgaatctctgcctctcccaggctgtccccctcctcccagggcctcctgggggacctttgtattaagccaattaaaaacatgaatttaaaaaaaaaaaaaaaaaa

SEQ ID NO: 25608 - DNA, 1932 bp, Homo Sapiens
ccaaggagcagtttcaccaattcctggaagccaaagggcaggagaagacttgccgggaaaccgaggtaggagaccctgctggcaatgagctggctgagcctgaggctaagcggatccgactggaggatggacagacggcggacgggcagacggaggaggcagcagagcccggggagcagctacagactcagaagagggcccggggacaaaacaagggccggccccatgtgaagcccacgaactacgacaagaacaggctgtgtccctccctaatccaggagtcggctgctaagtgtttcttcggtgatcgctgccgctttctgcacgacgtggggcgctacctggagaccaagccggccgacctgggcccccgctgcgtgctcttcgagaccttcggccggtgcccctacggcgtgacctgccgcttcgctggggcccacctgaggcccgagggacagaacctggtgcaggaggagttggcggcccgcgggacccagcccccgtccatccgcaacggcctggacaaagccctgcagcagcagctgcggaagcgcgaggtccgcttcgagcgagctgagcaggccctgcgccggttcagccagggccccacacccgctgccgctgtccccgagggcacggcagccgagggcgctcccaggcaggaaaactgtggtgcccagcaggtccccgcagggccgggcactagcacccctcccagcagccccgtgcggacctgcgggcccctgacggatgaggacgtggtcaggctgcggccctgtgagaagaagcggctggacatccgtggcaaactttacctggcccccctcaccacgtgtgggaacctgcccttccgacggatctgcaagcgcttcggggcggatgtgacatgtggagagatggccgtctgcaccaacctgctgcagggccagatgtccgagtgggccctactcaaacgccaccagtgtgaggacatctttggcgtccagctggagggcgccttccccgacaccatgaccaagtgtgccgagctgctgagccgcaccgtggaggtggactttgtggacatcaacgtcggctgccccatcgacctcgtgtacaagaagggtgggggctgtgccctcatgaatcgctccaccaagttccagcagatcgtccgtggcatgaaccaggtgctggatgtgccgctgactgtgaagatccgcacaggcgtccaggagcgtgtgaacctggcgcaccgcctgctgcccgagctgcgggactggggcgtggcactcgtcacgctccacggccgctctcgggagcagcgctacaccaagctagccgactggcagtacatcgaggagtgcgtgcaggccgccagccccatgcccctgttcggaaatggggacatcttgtcatttgaggatgccaaccgcgccatgcagactggtgtcaccgggatcatgattgcccgtggcgccctgctcaagccgtggctcttcacggagatcaaggagcagcggcactgggacatctcgtcgtccgagcgcctggacatcctgcgggacttcaccaactacggcctggagcactggggctcggacacgcagggcgtggagaagacccggcgctttctgctcgagtggctgtccttcctgtgccggtacgtgcccgtggggctgctggagcggctcccacagaggatcaacgagcggccgccctactacctgggccgcgactacctggagacgctgatggccagccagaaggcagccgactggatccgcatcagcgagatgctccttgggccagtgccccccagcttcgccttcttgccgaagcacaaggccaacgcgtacaagtagcctcaggctttcccaggggcaccctggggcgaggagagtacaataaattttattcttttaaaaaaaaaaaaaaaaaaaaaaaaaaaaa

SEQ ID NO: 25609 - DNA, 1227 bp, Homo Sapiens
cttccggcccggcgcccgatttccgccttccgacccagctgtgggctgcgccccacgccagcccgcgccccgcatggctgccgccggggccaggcctgtggagctgggcttcgccgagtcggcgccggcgtggcgactgcgcagcgagcagttccccagcaaggtgggcgggcggccggcatggctgggcgcggccgggctgccggggccccaggccctggcctgcgagctgtgcggccgcccgctctccttcctgctgcaggtgtatgcgccgctgcctggccgcccggacgccttccaccgctgcatcttcctcttctgctgccgcgagcagccgtgctgtgccggcctgcgagtttttaggaatcaactacccaggaaaaacgatttttactcatatgagccaccttctgagaatcctcccccagaaacaggagaatcagtgtgtctccagcttaagtctggtgctcatctctgcagggtttgtggctgtttaggccccaaaacgtgctccagatgccacaaagcatattactgcagcaaggagcatcagaccctagactggagattgggacataagcaggcttgtgcacaaccagatcatctggaccatataattccagaccacaacttcctttttccagaatttgaaattgtaatagaaacagaagatgagattatgcctgaggttgtggaaaaggaagattactcagagattatagggagcatgggtgaagcacttgaggaagaactggattccatggcaaaacatgaatccagggaagataaaatttttcagaagtttaaaactcagatagcccttgaaccagaacagattcttagatatggcagaggtattgcccccatctggatttctggtgaaaatattcctcaagaaaaggatattccagattgcccctgtggtgccaagagaatattggaattccaggtcatgcctcagctcctaaactacctgaaggctgacagactgggcaagagcattgactggggcatcctggctgtcttcacctgtgctgagagctgcagcttgggtactggctatacagaagaatttgtgtggaagcaggatgtaacagatacaccgtaaaggcatcttaaagccttgaaaaatgttaataatcttttataccttgcaattccatttctgggattttatcctaaggaaatacttataccaaaaaaaaaaaaaaaaaaaaaaaaaaaaaa

SEQ ID NO: 25610 - DNA, 1987 bp, Homo Sapiens
agagacaacagtgaatgacaaggaggggccatccaatccctgctgccacctcctgggatggagccctagggagcccctgtgctgcccctgccgtggcaggactcacagccccaccgctgcactgaagcccagggctgtggagcagcctctctccttggacctcctctcggccctaaagggactgggcagagccttccaggactatggttggactgaagccttcagacgtgcctcccaccatggctgtgaagttcctgggggcaggcacagcagcctgttttgctgacctcgttacctttccactggacacagccaaggtccgcctgcagatccagggggagaaccaggcggtccagacggcccggctcgtgcagtaccgtggcgtgctgggcaccatcctgaccatggtgcggactgagggtccctgcagcccctacaatgggctggtggccggcctgcagcgccagatgagcttcgcctccatccgcatcggcctctacgactccgtcaagcaggtgtacacccccaaaggcgcggacaacttcccctgccactttgtctctgcctttggagccggcttctgtgccacagtggtggcctccccggtggacgtggtgaagacccggtatatgaactcacctccaggccagtacttcagccccctcgactgtatgataaagatggtggcccaggagggccccacagccttctacaagggatttacaccctcctttttgcgtttgggatcctggaacgtggtgatgttcgtaacctatgagcagctgaaacgggccctgatgaaagtccagatgttacgggaatcaccgttttgaacaagacaagaaggccactggtagctaacgtgtccgaaaccagttaagaatggaagaaaacggtgcatccacgcacacatggacacagacccacacatgtttacagaactgttgtttacttgttgctgattcaagaaacagaagtagaagaggaggagggattctggtcttcactgccatgcctcaagaacacctttgttttgcactgacaagatggaaaataaattatattaatttttgaaacccattaggcatgcctaatatttaggcaagagaaaataaaccaagatagatccatttggacaaaatggaaggttggagacgtgtatccccgtgaaatctggttagataatgaatgataagcaggaaggatggcaagcacgggacaggaggggcccacaatggagtgggagatcagccacggagcctggagggacgccacccagcaacacagagctggcgactgcagctgcaccatcacacatgcatcatcagcctatttgtaatatgtctgccacagagagtcctttgggattctaggaaacccaaggaacaagagaaaaaactagagcctgtgctaaagaagccctgctgggcccatgtgaggctggggctcgtaaatattccctgacgacactgaagaatcaagagggcagcccccactttcctacaaaatggagggagccatcccttccctgtccacctcaccaggggtgctatgacatgcaagtgagaagctgggcatgaacgcactttataaaagcaaaagctctgtgtaaatctaactacaaggacaatgccttgggagagattttgtcgggacagagaggagttgccagggaagaaggtttgaaagatacggttgtctagaggtgagaccaaaggatccagagacttggggaccagaggtgacagtggatgacgtgaagccacaggagccccacccccatgcagcctcttccccaccccccccaccacgcgctcaatcatgagtacctcaaaggattgttgggcttgggggaaaagaggtggattcctgggcaagaacctaaagtagcaggactcggaattctcgggaaattattatgactcaataaaagaattcacaccttaggtgtgggagcaaaaaaaaaaaaaaaaaaaaaaaaaaaaaa

SEQ ID NO: 25611 - DNA, 2111 bp, Homo Sapiens
attgccgaggacgggaccccagggcagcgaagcagaatggccaacatgcagggactggtggaaagactggaacgagctgtcagccgcctggagtcgctgtctgcagagtcccacaggccccctgggaactgcggggaagtcaatggtgtcattgcaggtgtggcaccctccgtggaagcctttgacaagctgatggacagtatggtggccgagtttttaaagaacagtaggatccttgctggggacgtggagacccatgcagaaatggtgcacagtgctttccaggcccagcgggctttccttctgatggcctctcagtaccaacaaccccacgagaatgacgtggccgcacttctgaaacccatatcggaaaagattcaggaaatccaaactttcagagagagaaaccgggggagtaacatgtttaatcatctttcggccgtcagcgaaagcatccctgcccttggatggatagctgtgtctcccaaacctggtccttatgtcaaggagatgaatgacgctgccaccttttacactaacagggtcttaaaggactacaaacacagtgatttgcgtcatgtggattgggtgaagtcatatttgaacatttggagtgaacttcaagcatacatcaaggaacaccacaccacgggcctcacatggagcaaaacaggtcctgtagcatccacagtatcagcgttttctgtcctctcctctgggcctggccttcctccaccccctcctcctctgcctcctccagggccacctccacttttcgagaatgaaggcaaaaaagaggaatcttctccttcacgctcagctttatttgcccaacttaaccagggagaagcaattacaaaagggctccgccatgtcacagatgaccagaagacatacaaaaatcccagcctgcgggctcaaggagggcaaactcaatctcccaccaaaagtcacactccaagtcccacatctcctaaatcttatccttctcaaaaacatgccccagtgttggagttggaaggaaagaaatggagagtggagtaccaagaggacaggaatgaccttgtgatttcagagactgagctgaaacaagtggcttacattttcaaatgcgaaaaatcaactattcagataaaagggaaagtaaactccattataattgacaactgtaagaaactcggcctggtgtttgacaatgtggtgggcattgtggaagtgatcaactcccaggacattcaaatccaggtaatggggagagtgccaacaatttccattaataagacagaaggttgccacatatacctcagtgaagatgcattagactgtgagatcgtgagcgccaagtcatctgaaatgaacatacttatccctcaggatggtgattatagagaatttcccattcctgaacagttcaagacagcatgggatggatccaagttaatcactgaacctgcagaaattatggcctaacttcctgagagaccgaaccccctcacctgaatccccctctatcaaacaaacaaaaaagcagcagtaaagagctagaagttgcagtagcccctactgctttagctttggcctccaacgattctgtgctatagatacagcactgtttctggcacgcctcgtgggcattttgaaatatttaacgtttcctcatgatttgcctttgtgtgtgattttagttccacatgatgacttgtgaacattagggatttaaaggaaaaaaaaaaaagaattctgttcccctcatatcatgaacacagtaactgataggtaaaaagactgcatgattcacttttacacttatatttcattgctagttaaaaaataaaacctttgagaatctaagatgtacatttttaccttttaggcaatttcaatataatgtagaagtagtagtgtgccctgaaaaatgtacacgttttttcttattgttaccacatgttcacctttatcagcgtggatactgtcagcatgagtacatatttcaacccacgcttgtaaaagacataagagtttataaaggaccaaattcagttccttggtccttggaagacctatattctctgtagttactgaaaaaaaaaaaaaaaaaaaaaaaaaaaaaa

SEQ ID NO: 25612 - DNA, 1210 bp, Homo Sapiens
gggctgagctgcgcagcggggttttggccaaattgggcgagggcacaaaataaccacttaccccttctcaccgaggaagagcgggagaaagggtatggcacagtcacaagggtgggtgaaaagatacatcaaggccttttgtaaaggcttctttgtggcggtgcctgtggcagtgactttcttggatcgggtcgcctgtgtggcaagagtagaaggagcatcgatgcagccttctttgaatcctggggggagccagtcatctgatgtggtgcttttgaaccactggaaagtgaggaattttgaagtacaccgtggtgacattgtatcattggtgtctcctaaaaacccagaacagaagatcattaagagagtgattgctcttgaaggagatattgtcagagatgggagaaaactgaaaaggatatgaaacagaaacttccgaatcagtgacaagaatgaaagctttagatgataagattgtaacaatcaggtgtttaagcagcctttagtaatgtcgtatttattgtacttgctgataaatcaagaacaattgttgacattcagcaagtaaatactgtgtggcatgatgtgtctcattgtgatcgctttctttaaacaagttgtagccaggcctatacaatgtggtagccaaaatgctttgactactacattgaggaagttttctgaccctgttttctaaaaaaacttgatcctaaagtatttgtattaatgatagtacacatattaactaatctcactgaaatgaacctcagtcagttttagagcagattctaggctagcagttctcacagcatggccagaggatcccaggggatccccactgggggcctatgagattaaaactactttcctaataatactaaagtgttacttgccgtttttcactctcattctcttgtgagtgtacagtggaattttccagatatgtaatattggagttgattgaatgcaggagcagatatgagaatccagctgttttctattaagccagaaactaaaaagatttgcaaaaatgtaaaaaaaaaaaatcattatttttactatttattgtttgcttttggaaaaggactataatttttatttaaatcgtattctttttgttaacataagggtttattattggtattttaaattgaatcaataaatgaaattttaaaccaaaaaaaaaaaaaaaaaaaaaaaaaaaaaa

SEQ ID NO: 25613 - DNA, 1790 bp, Homo Sapiens
gacgcgcctgaggaggaggaggaggcgggggcggccatggctgctgtggtggtggcggctgcgggtggcgcgggaccggcggtcctgcaggtggccggtctctaccggggcctgtgcgcggtgcgcagccgcgccctgggcctggggctcgtgtcacccgcgcagctgcgcgtcttcccagtgcgccccggctcgggccggcccgaggggggcgccgacggcagcggggtcggggccgaggccgagctccaggccaaccctttctacgaccgctaccgcgacaagatccagctgctgcgcaggtcagacccagctgcttttgagtcccgcctggagaaacgcagtgaatttcggaagcagccagtggggcattccaggcaaggtgattttatcaaatgtgtggaacagaagacagatgccttggggaaacagtctgtgaacagaggattcactaaggacaagactctcagttcaatctttaacattgagatggtaaaagaaaaaactgcagaagaaataaaacagatttggcagcaatattttgcagcaaaagatacagtctacgcagttattcctgcagaaaagtttgatttgatctggaaccgggctcagtcctgtccaacatttctatgtgctctgccaagaagggaaggttatgagttttttgtaggacaatggacaggtactgaactccacttcactgcacttataaatattcagacccgaggggaagctgcagccagccagctgattttatatcactatcctgaacttaaggaagaaaagggcatagtgctgatgactgcagaaatggattccacatttctgaatgttgctgaggcacagtgcatcgccaaccaagttcagctcttctacgctactgatcggaaagagacctacgggttagtggagacctttaacctcagaccaaatgagttcaaatatatgtctgtcatcgctgaattggagcaaagcggacttggagcagaactgaaatgtgcccagaaccaaaataagacttagaactgtacaggttggcccttcacctagttgactcagccctcgatagtctagagcccaccccctcctcaggaactcaagagctcagcatttataatgagcagttggtaatgagttgccctatgtgcttgtcgcaagcagtcacagagatgagccctattacttgatattcaggaacaaaggtacctgaacattctgataattatctcagcatacttgaggtttccttttttaagtgttcgaggttataacaagagacagccaaggacctacaagacagttgacttgattttgcacagtgtaacagcgcagttgcattctggccactttgaccttatagctcccaaatgatgagtttgtcatctttatgaactcatgacaggataataagcttgaagacctgctgtagttagatatgggctttaatccttcccatgcaccagtcagctgaacaaaagcataagccaaacatcctgtttaaactgtagaataaccagatattcccatcaggttaaagacttcatctagatgatgccccccagagatgcctttagtgtaagtagctggcttggggtatcagcaaatttcaggtatagttagataaacaggtacagggcctgcatactattaaaccatagtttgtggcacccgcttttctaactccacctgttagaagctatgtgtttgaaggaatgaatcagtgcagtataaataaaattcttttgtaaggagaagaccaaaaaaaaaaaaaaaaaaaaaaaaaaaaaaaa

SEQ ID NO: 25614 - DNA, 1418 bp, Homo Sapiens
gtctagtgcacaggcaacctggccttcgcctcctagcccgagaagccgaatctccctaatccctgtgacctgtgtcacctctgcatcgcgaggagggggataagtggggagaagtctggtgtcagatgggatggcgccggaagagggtgccacagcggggacggaaggcgcccccaccccaactccacgggaatataaacaatttgtattttccgatcaggtggcgggacaggcttcattgggacagccctaacccagctgctgaatgccagaggccacgaagtgacgttggtctcccgaaagcccgggcccggccggatcacgtgggatgagctcgctgcatcggggctgccgagctgcgatgccgccgtcaacctggccggagagaacatcctcaaccctctccgaagatggaatgaaaccttccaaaaagaggttctcggcagccgcctagagaccacccaattgctggctaaagccatcaccaaagccccacaaccccccaaggcctgggtcttagtcacaggtgtagcttactaccagcccagtctgactgcggagtatgatgaagacagcccaggaggggactttgactttttctccaacctcgtaaccaaatgggaagctgcagccaggcttcctggagattctacacgccaggtggtggtgcgctcaggggttgtgctgggccgtgggggtggtgccatgggccacatgctgctgccctttcgcctgggcctggggggccccatcggctcaggccaccaattcttcccctggatacacatcggggacctggcaggaatcctgacccatgcccttgaagcaaaccacgtgcacggggtcctgaatggagtggctccatcctccgccactaatgctgagtttgcccagaccttcggtgctgccctgggccgccgagccttcatccctctccccagcgctgtggtgcaagctgtctttgggcgacagcgtgccatcatgctgctggagggccagaaggtgatcccacggcgaacactggccactggctaccagtattccttcccagagctaggggctgccttaaaggaaattgtagcctaagtaggtcatggcaagggcctgaggcctgttcctcacaggcttccaggttaggcactgtgaataggctcagctcctctagagagctgaagccatctggttcttagattcctctcccagtcctctttcccattgttctgttgctccaccttattgtctcaaggccgtaatctcatcaggttgggacattaatcttttcaactccttgtaagatttcccggtttggtttctctacatgtcctgcagctgccccacttctcctttacgctgtgtagagaatgctctgcagtttaggcaataaaaataaattgtctcactaaaaaaaaaaaaaaaaa

SEQ ID NO: 25615 - DNA, 1739 bp, Homo Sapiens
ggcccctggccccggcccgggacccgaggtcccgcgcccgggtcagtgaaaggcgtcttcccgttcccgccctccgcctcctctcgccggccagcaacatgggatgtaatatgtgcgtggtccagaaaccggaggagcagtacaaagtgatgctgcaggtgaacgggaaggagctctccaagctgtctcaggagcaaactctgcaggccctgcgctcctccaaggagcccctggtgatccaggtgctgagacgcagcccccgcctccggggggacagctcctgtcacgacctgcagctggtggacagtggcactcagaccgacatcaccttcgagcatatcatggcgctgggcaagctgcgtccgcccaccccgcccatggtcatcctggagccccccccaatcagccatgagtattatgacccggcggagtttatggagggcggcccgcaggaggcagaccgcttggatgagctggagtatgaggaggtggagctgtataaaagcagccaccgggacaagctgggcctgatggtttgctaccgcacggacgacgaggaggacctgggcatttatgtcggagaggtaaatcccaacagcattgcagccaaagacggccggatccgtgagggagaccgcatcatccagattaacggtgtagacgtccagaaccgggaagaggcggtggccatcctgagccaggaagagaacaccaacatctccctgctggtggcccgacctgagagtcagctggcgaaaaggtggaaggacagcgaccgggatgacttcctggatgactttggctctgagaatgagggggagctgcgtgctcgtaaactgaaatcaccccctgcccagcagcccggaaacgaagaggagaagggggctcccgatgccggcccaggcctgagcaacagccaggagctggacagcggggtgggccggactgacgagagcacccggaacgaagagagctctgagcacgacctgctgggggacgaacccccgagctccaccaacaccccgggaagcctgcgcaagtttggcctgcaaggggacgccctgcagagccgggacttccatttcagcatggactctctgctggccgagggggcggggctgggagggggcgacgtcccgggcctcacggatgaggagtatgagcgctaccgtgagctcctggagatcaagtgccacctggagaacggcaaccagctgggcctcctctttccccgggcctccggaggcaacagcgccctggacgtcaaccgcaacgagagcctgggccacgagatggccatgctggaggaggagctaaggcacctggaattcaagtgccgcaacatactgcgggcgcagaagatgcagcagctgcgtgagcgctgcatgaaggcctggctgctggaggaggagagcctctacgacctggcggccagcgagcccaagaagcacgagctgtccgacatctccgagctgcccgagaagtcggacaaggacagcaccagcgcctacaacactggggagagctgccgcagcaccccgctgcttgtggagcccctgcccgagagccccctgcggcgggccatggccggcaactccaacttgaaccggacccctcccggccccgctgttgccacccccgccaaggcagctcctccaccggggagccccgccaagttccggtccctctcccgggatcctgaggccggccggaggcagcacgcggaggagcgcggccgc

SEQ ID NO: 25616 - DNA, 1532 bp, Homo Sapiens
ggagggagcatggccacctcccaccccaacaccaccgccactgtcctgagactcccgaatatcgccacctccctttcctttgctggcctcttcaggctctccgtccccaacgctcacctgctctccctcaggccacccatgggccttggccccgccccctactcatggctggcagattcgtggccccacccatctcgaagcccctcggcccaggaacccaggggaagctgctgccctagcaatcctgacccggacgacagatattacaacgaagcaggaatctccctgtatctagctcagacggccaggggcacggccgcccctggcgagggtcctgtctatagcaccattgacccagcgggggaggagctgcagaccttccatgggggcttcccccaacatccctcaggagatctgggtccctggagccagtacgctcctccagagtggagccagggggacagtgctcagagccagaggagtggtgcccgccaatgcctgagagaagtcacctgacggagcccagctccagtggagggtgcctggtcaccccatcccgaagggaaaccccctctcccacaccttcctatggacagcagtccacagccactcttacaccctcacctcctgaccctccccagcccccaactgacatgccccatctccatcagatgcccaggagggtgccccttgggccgagttcccctctcagtgtatcccagcccatgctgggcatccgtgaagcgaggcctgctggcttgggtgctggccctgcagcctcaccccacctcagccccagtcctgcccctagcacagccagcagtgccccaggcagaacctggcaggggaatggggagatgactcccccacttcaaggaccccgtgctcgattccggaagaaacccaaggctcttccctacaggagggagaacagtcctggggacttgcccccaccacccttgccaccgccagaggaagaggcgagctgggccctagagctgagggcagcaggcagcatgtcctccctggagcgggagcgcagtggggagaggaaagcggtccaggccgtgcccctggcagcccagcgggtgctccacccagatgaagaggcctggctcccatacagcagaccaagcttcctgtcccggggccagggcaccagcacatgttccacggccggcagcaactcttccaggggctccagcagctctaggggctcccggggccctggccggagccggagtcagagccggagccagagccaaaggccaggacagaaacgccgagaggaaccaagatgacccttgttggggcattgagaatatcatgagtgccacggggaaggggagtagggatgtcttttcccccccagcagtgatgagtggggctagctgaagcccattggtttccacgatttcaattggctgagaaggcagagagctagctcctccctttctttctttttccacctgagacttgtttataaaaaacaaaacaataaaaagagtctgatcagaaaaaaaaaaaaaaaa

SEQ ID NO: 25617 - DNA, 1552 bp, Homo Sapiens
gacttttgttaagaaagcaaagtcatccaagagaagggcagctcaagcaggtcccacccagccaggacccccaaggtccactttctctcgtctgcaggcccccgacagtgctaccttgcttgagaagatgaagctcaaggactctctctttgatctggatgggcccaaagtggcatctcctttgtcccccacatccctgacacatacctcccggccccctgctgctcttacccccgtgcccctttcccagggggacctctcccatcctcctcgaaagaaggaccgaaagaaccgaaagttggggccaggagctggggctggctttggggtgcttcggaggcctcggccaactcctggggatggggaaaagagatctcgaatcaagaagagcaagaagcggaagttaaaaaaggcagaacggggggatagactcccacctcctgggcctccccaggcaccccccagtgatacagactctgaagaggaggaggaagaggaggaagaggaagaagaagaagagatggcaacagtggtagggggtgaagccccagtccctgtgctgccaacaccccctgaggctcctaggccccctgccacagtgcaccctgaaggagtccctcctgctgacagtgaaagcaaggaggtgggcagcactgaaacaagccaagatggagatgccagctccagtgaaggcgagatgcgggtcatggacgaggacatcatggtagaatcaggtgatgactcatgggatctgatcacatgttactgtcgaaagccctttgcagggcggcccatgattgagtgcagcctgtgtgggacgtggatccacctctcctgtgctaagattaagaagaccaacgtccccgacttcttttattgccagaaatgcaaggaactgaggccagaggcccggcggttaggggggcctcccaaatctggagagccctgatggcaccaactttagcctggaacttccaaatgacaacatgatttgggaactgagcctcagggtcctcagcctatcccctggagcttggatactgtctgcacttcaaggcaggaattctcaagggagacttgtttgaaaatgagtgtctcactttcccaccctatccttcctccccactctgtggacttgaaattgaatccattacggttggggatgggaggctgtctgtgtcccgacacataatctctgtctcttggacctgccaccatcactttctgggtcaggattggaattgggatggaatgggacagttgtctataaaactctagtgtaaatattagcactcccctccctcatcttttcttctatttcactccccatttattttcttctacaccggttgtatttttaattttggacttcccctattgggcatggcagctcaaaggtggagtactagagcctggccaagtgaggaaggaaagcagaaaggtgacgattctcactcacctcttttgtttttaataatatcggccgctgtttgtacagacagcctgcgtgttgtaaataaagcagagtgggctctttaaaaaaaaaaaaaaa

SEQ ID NO: 25618 - DNA, 794 bp, Homo Sapiens
ggcggcgccttggaggcgatggcccacggggctgctagccgtgctgcggcccctgctcacctgccggcccctgcaaggcgcgacgctgcaacgggatgtgctgctctttgagcatgatcggggccgcttcttcaccatcctcgggctgttctgcgcgggccagggcgtcttctgggcttccatggctgtggcagccgtgtcccggcccccggttccggtgcagcctctggatgcggaggtcccaaatcgtggccccttcgacctgcgctccgcgctctggcgctacggtctggccgtcggctgcggcgccatcggagccctcgtactcggtgctggtcttctcttctctctccggtctgtgcgctcagtggtgcttcgagctggagggcagcaggtgaccctcaccactcatgccccctttggcttgggggcccatttcacagttcctttgaagcaggtatcttgcatggcccaccggggtgaagtccctgccatgctacctctgaaagtcaaaggccgacgcttctatttcctcttggacaaaactggacacttccctaacacaaaactctttgacaatactgtgggtgcctaccggagcttgtgaagaaatgacctcaagtcactcacctctccaagaggaggataaaaactgaaccttggggagccaggtgtgttggttcacacctgttgtaatcccagcactttgggagggtgaggcaggagcactgctcgagcccaggctgggcaacatagcgagaccttgtctctatttacaaaaaaaaaaaaaaaaa

SEQ ID NO: 25619 - DNA, 1819 bp, Homo Sapiens
gatggctgatgaagaggaagaagtcaagccgatcttgcagaaattgcaggaactcgtggatcagctctactcatttcgagactgctatttcgagacacatagtgttgaggatgctgggaggaagcaacaggatgtgcggaaggagatggagaaaaccctacagcagatggaagaagtagtgggttctgtccagggcaaggcacaagttctaatgctaactgggaaagcactaaatgtgactcctgactatagccctaaggctgaggagcttctgtcaaaggctgtgaagctggagcccgagctggtggaagcctggaaccagctgggtgaggtgtactggaaaaaaggggatgttgcagctgcccacacctgcttctcaggagccctcacccattgcaggaacaaagtctccttgcaaaacctgtcaatggtgcttcgtcagctgcggactgacactgaagatgaacattctcaccatgtcatggacagtgtccgacaggctaagttggctgttcagatggatgtccatgatggccgctcctggtatattcttgggaattcatatctttccctttacttctctactggccagaaccctaagatctcccagcaagccctcagtgcctatgcccaagcagagaaagttgacagaaaagcgtctagcaatcctgaccttcatctgaacagggcgacgttgcataaatatgaagagagttatggggaggccctggagggcttctctcgggctgcagccctggaccctgcctggccagagccccggcaacgagagcaacaacttctggaattcctggatagattaaccagcctccttgagagtaagggaaaggtgaagaccaaaaagctgcagagcatgctgggaagcttgcgcccagcccatctaggcccttgcagtgatgggcactatcagtcagcctctgggcagaaagtgaccctggagctcaagccactgagtacgcttcagcctggggtgaacagcggtgccgtcatcctgggaaaggtggtatttagcctcaccacagaggagaaagtcccctttacatttggcctggtagattcagatggaccttgctatgcagtgatggtgtacaatatagtgcagagctggggagtgctcattggagactctgtagccattcctgagcccaacctgcggcttcaccgaattcagcacaaaggaaaggactattccttttccagtgttcgagtggagacgcccctcctgctagtggtgaatgggaagcctcagggatccagcagccaggctgttgccacagtggcatcgcgaccacagtgtgaatgacctttgacttgcatgctcaacagggagtggaggagaggagacaaggctctggacagccggtccagccacatccagtgattcagcagggatgggaggaatgttttaaatgaagactttctctttccctgcctgtattacacttcgtatctcttctctctcctctgtcctcatcatgttccagctctctacagggccacatactcttctggcatatctctcctgtctcttccactgctctctatgttttaagcaaagagcatggaattggtagaagtcttgggatcttgccatgggacagagtccccaaggttcctgttgttgcctccttcctaagcctcatatgtatatatcagttcagtatttattgctaaaggagggggcttaattttgtaatggcttttatttttagcaatttttatttttatttttgaactttaggtccttcctcttctttggggctggaacagaattaaatttgtttggaaaaaaaaaaaaaaa

SEQ ID NO: 25620 - DNA, 677 bp, Homo Sapiens
gactgggtggatgaggctcaccccggcggggagaagggacgaggaggggcggacagcggaaggtccgggagtgtccgccataaagtcgtttgagttttaacttctagtcatggcgaatgatcgcaggagagcacagactggaccctgctacgatctctcttggagtggatcagactgatgatcaccaacaaccaactcattcccggataaggaagaagagagtgtcacctacttcagtgtggtttcaaccctacttctgcatcttaaagacactgtgtacaacgttggacactgtgcaggatgatgccacttcatcttggatgctaatctgccatgttgacttctgattaaccccaggcccaggaatgcctcaagatttctactttacttactgttgcttgtgtaagccaagacaaccttgatgttatcataaacatgtacttacctaagtcctgtcctttggcaaattatgggctatgagacacagcattcttgcctttccctgaggggtcaatttcagcgatcctacacattccttctgaagcacttatgctctttctatatggtatgtaagctctcggtctggggagtaacagtgcagagatctacctgtcttgttgccacatgtttctaaactttccaataaatcaccttctactgacaaaaaaaaaaaaaaa

SEQ ID NO: 25621 - DNA, 1319 bp, Homo Sapiens
gcgtcgcgcagggtcggggactgcgcggcggtgccaggccgggcgtgggcgagagcacgaacgggctgcctgcgggctgagagcgtcgagctgtcaccatgggtgatcacgcttggagcttcctaaaggacttcctggccgggggcgtcgccgctgccgtctccaagaccgcggtcgcccccatcgagagggtcaaactgctgctgcaggtccagcatgccagcaaacagatcagtgctgagaagcagtacaaagggatcattgattgtgtggtgagaatccctaaggagcagggcttcctctccttctggaggggtaacctggccaacgtgatccgttacttccccacccaagctctcaacttcgccttcaaggacaagtacaagcagctcttcttagggggtgtggatcggcataagcagttctggcgctactttgctggtaacctggcgtccggtggggccgctggggccacctccctttgctttgtctacccgctggactttgctaggaccaggttggctgctgatgtgggcaagggcgccgcccagcgtgagttccatggtctgggcgactgtatcatcaagatcttcaagtctgatggcctgagggggctctaccagggtttcaacgtctctgtccaaggcatcattatctatagagctgcctacttcggagtctatgatactgccaaggggatgctgcctgaccccaagaacgtgcacatttttgtgagctggatgattgcccagagtgtgacggcagtcgcagggctggtgtcctacccctttgacactgttcgtcgtagaatgatgatgcagtccggccggaaaggggccgatattatgtacacggggacagttgactgctggaggaagattgcaaaagacgaaggagccaaggccttcttcaaaggtgcctggtccaatgtgctgagaggcatgggcggtgcttttgtattggtgttgtatgatgagatcaaaaaatatgtctaatgtaattaaaacacaagttcacagatttacagtgaacttgatctacaagttcacagatccattgtgtggtttaatagactattcctaggggaagtaaaaagatctgggataaaaccagactgaaaggaatacctcagaagagatgcttcattgagtgttcattaaaccacacatgtattttgtatttattttacatttaaattcccacagcaaatagaaaataatttatcatacttgtacaattaactgaagaattgataataactgaatgtgaaacatcaataaagaccacttaatgcacgctttctaaaaaaaaaaaaaaaa

SEQ ID NO: 25622 - DNA, 2230 bp, Homo Sapiens
ctgacctgcttacgcccagcctgtggacattttcgcggtccgggtccctgcggcggacgggtcggatcgtgctcgtggccagggcgcagtcaggtgtcgcgtggtcctgatctaggaagagactgcggccttatcaccgtctcggtgtctgctttcaccttcaactgaccccctcctcacctggaccgctcaccctcctcctcccctctcaccccgccatccccaccagtccccacctgtctctgtagactgcaagactcatcaagtgacttgctgagcaaaccctgccgagaagagattttcttcaatcacatctgaataaatcacttgaagaaagcttatagcttcattgcaccatgtgtggcatttgggcgctgtttggcagtgatgattgcctttctgttcagtgtctgagtgctatgaagattgcacacagaggtccagatgcattccgttttgagaatgtcaatggatacaccaactgctgctttggatttcaccggttggcggtagttgacccgctgtttggaatgcagccaattcgagtgaagaaatatccgtatttgtggctctgttacaatggtgaaatctacaaccataagaagatgcaacagcattttgaatttgaataccagaccaaagtggatggtgagataatccttcatctttatgacaaaggaggaattgagcaaacaatttgtatgttggatggtgtgtttgcatttgttttactggatactgccaataagaaagtgttcctgggtagagatacatatggagtcagacctttgtttaaagcaatgacagaagatggatttttggctgtatgttcagaagctaaaggtcttgttacattgaagcactccgcgactccctttttaaaagtggagccttttcttcctggacactatgaagttttggatttaaagccaaatggcaaagttgcatccgtggaaatggttaaatatcatcactgtcgggatgaacccctgcacgccctctatgacaatgtggagaaactctttccaggttttgagatagaaactgtgaagaacaacctcaggatcctttttaataatgctgtaaagaaacgtttgatgacagacagaaggattggctgccttttatcagggggcttggactccagcttggttgctgccactctgttgaagcagctgaaagaagcccaagtacagtatcctctccagacatttgcaattggcatggaagacagccccgatttactggctgctagaaaggtggcagatcatattggaagtgaacattatgaagtcctttttaactctgaggaaggcattcaggctctggatgaagtcatattttccttggaaacttatgacattacaacagttcgtgcttcagtaggtatgtatttaatttccaagtatattcggaagaacacagatagcgtggtgatcttctctggagaaggatcagatgaacttacgcagggttacatatattttcacaaggctccttctcctgaaaaagccgaggaggagagtgagaggcttctgagggaactctatttgtttgatgttctccgcgcagatcgaactactgctgcccatggtcttgaactgagagtcccatttctagatcatcgattttcttcctattacttgtctctgccaccagaaatgagaattccaaagaatgggatagaaaaacatctcctgagagagacgtttgaggattccaatctgatacccaaagagattctctggcgaccaaaagaagccttcagtgatggaataacttcagttaagaattcctggtttaagattttacaggaatacgttgaacatcaggttgatgatgcaatgatggcaaatgcagcccagaaatttcccttcaatactcctaaaaccaaagaaggatattactaccgtcaagtctttgaacgccattacccaggccgggctgactggctgagccattactggatgcccaagtggatcaatgccactgacccttctgcccgcacgctgacccactacaagtcagctgtcaaagcttaggtggtctttatgctgtaatgtgaaagcaaatatttcttcgtgttggatggggactgtgggtagataggggaacaatgagagtcaactcaggctaacttgggtgtgaaaaaaataaaagtcctaaatctaaaaaaaaaaaaaaaaaaaaaaaaaaaaaaaaaaaaaaaaaaaaaaaaaaaaaaaaaaaa

SEQ ID NO: 25623 - DNA, 4521 bp, Homo Sapiens
ctggggtggagggcgggacagaggggctgggcccaggcaaagcttctgtcgctgctgctgcggaggccgaggacaggacgtgggctgggccgggcagtgccggactcggaggagcaggaggcgaggtccgccggagctctgagcccccgctgctctgccgcgcggtgaccccgcgccccggcgccgtccgacccgtggctgttccgagacgattggtgggggcgcggcggcggcggcggcggctgttgggggtggggagacgcgcggcgaggagacgagcgaggtcagcgagtttgagggaggaccgcgagccgctgccgccgtcatgtccgaggactcgagcgccctgccctggtccatcaacagggacgattacgagctgcaggaggtgatcgggagtggagcaactgctgtagtccaagcagcttattgtgcccctaaaaaggagaaagtggcaatcaaacggataaaccttgagaaatgtcaaactagcatggatgaactcctgaaagaaattcaagccatgagtcaatgccatcatcctaatattgtatcttactacacatcttttgtggtaaaagatgagctgtggcttgtcatgaagctgctaagtggaggttctgttctggatattattaagcacattgtggcaaaaggggaacacaaaagtggagtcctagatgaatctaccattgctacgatactccgagaagtactggaagggctggaatatctgcataaaaatggacagatccacagagatgtgaaagctggaaacattcttcttggagaagatggctcagtacagattgcagactttggggttagtgcttttttagcaactggtggtgatattacccgaaataaagtgagaaagacctttgttggcaccccttgttggatggcacctgaagttatggaacaggtccgtggttatgatttcaaagctgatatttggagttttggaattacagcaattgaattggctacaggggcggctccttatcataaatatccaccaatgaaggttttaatgctgacactgcagaacgatcctccttctttggaaactggtgttcaagataaagaaatgctgaaaaaatatggaaaatcatttagaaaaatgatttcattgtgccttcaaaaagatccagaaaaaagaccaacagcagcagaactattaaggcacaaatttttccagaaagcaaagaataaagaatttcttcaagaaaaaacattgcagagagcaccaaccatttctgaaagagcaaaaaaggttcggagagtaccaggttccagtgggcgtcttcataagacagaggatggaggctgggagtggagtgatgatgaatttgatgaagaaagtgaggaagggaaagcagcaatttcacaactcaggtctccccgagtgaaagaatcaatatcaaattctgagctctttccaacaactgatcctgtgggtactttgctccaagttccagaacagatctctgctcatctacctcagccagctgggcagattgctacacagccaactcaagtctctctcccacccaccgcagagccagcaaaaacagctcaggctttgtcttcaggatcaggttcacaagaaaccaagatcccaatcagtctagtactaagattaaggaattccaaaaaagaactaaatgatattcgatttgaatttactcctgggagagatacagcagagggtgtctctcaggaactcatttctgctggcctggtcgacggaagggatttagtaatagtggcagctaatttgcagaaaattgtggaagaacctcagtcaaatcgatctgtcactttcaaactggcatctggtgtcgaaggctcagatattcctgatgatggtaaactgataggatttgcccagctcagcatcagctaaaccacaaccctggaagaggcggcctaaggagattccacacatgcgtatctctgttgcttctattggcctaaacccactactgccaaagaacccagcaacaaacctcccggctaggagctttagaagtctttatgttcttcctgccatcattcctccttttcccacagggaaagaaaagttggatcactagtggccagcatccccagagttccgttagtaaacttacttcatatgtcccctgtcttcctccatctgagaagtggcccatgtgcttcaaggcccaggagggagatctgtcagctcattcttgccttactccaatgatggcccaggtggaaaagtagcagctgtatcgggcttcctcatcctgcctgttcccccacacctgccaggatatggacatcttgggatatctctttaccactgaagtagaattgattgttcagctggagcccagagaatttaatttaatgttttttctttgtacctgatgtgaattctagcaacctttgttaggaaaaagcacagcctcagatggaggcagcctaaactgtgttcttgttttgttcatggtgtttctaagcgttttgctgaagctgctctcaggcacccccttcttcattgctctctccagaaagggttgctagccttaacttcagctggtgcaaaacatctgactgtagccgaacttcagccatcagatccttcaaagtggaactttggattgtttttacagacaacatcgagtaatggcttgtaaatgtgaattttgccagaggtggtttttgaacaggaaaatcataattcatatcattggagaagtatttattttcaaatatcaaattgaagaaaaactcaatcctcccatgaaaatcagttcgcctggcctccaagtcgtgaggaaatgggtatgcaaggctgagatttctacagcaataaaggagacacacactgggccagagaggcctgccttctgcctgctctcctgcactgaccctttggagggggtctctgtgtgctgaagctaactcaagatggaaagtgaaaccacatgtgccgtgacctttaggttttatgagtagacagtgttcatttgattttctacagaaataatataaattattctttaggtttaaaaaagagcactcataatgcaatatgtgaataatcagtgaggttgatttttcttttttcctaccgtttcatagtctttgtctaactgctagtaaccctaccgagttttatatatgagtgggatactcaatctggccttaaaaagatacacaaagatgggctgtgggtccctggaaagggggagagttgccctttacagaatcactcgagccctttccagcactgttggtctgatgaacaaggttgttttaccttattttctcttggaacatatctgaaaaccttccccacaaataacttgtcacaccttttgtttcattctgagtctttagttttagtcatgggctttcttcacctgctctaggtgcaaaggcatgttgggaaagagatggatgttggggaggaagagaggagatggatttcagttgggagttaggaggagagtaggtgagatgatcagacaccggagttcaacgtcccagcagtcttggtaaaaggagggagcctgctgagccaggagggagaaaagaagattgaccagcttgctagaaaaatacttagcttttctttttctttttttgtggaggggggacggagaggaacaaggatggggaggtaggaatgaggtatagaaaagagatagcatcttctttggcacaagactagtggcttaccgcttaccttagagttttgttttttttttttcaaacccatcaaaatctacttatttatgaatccaaggggtggcagcatcactctgttctagcattctttgtggagatggtctggtgcctagctgggagtgagcagcagcccatcccctgttcactttctctagcccatcattacctgtgaactgcagtggggcagtcatggcaaatagaattgggctggggtttctccttcttttcagttcattgtttgccctgctaggaattagaagacagacaccatgtcccaggacagtgttacttcttctgcatgatgtgtggtagactccctttgctggcttgtgcagtgatactgagaaaatacatgaacagaaactgcccaggtggaacagcacgtaacctagtgagtgactgtactcctttctaggaatgctgattcagagtgcacctctttgactaggtcccaggatccccttgtccctggagtagggactaactatagcacaaagtaatatgtgccaatgctatttgtgaaatgtttggtctttctaaacgactaaaggatttgttgggtttttgcttaagttttgaaccaaatcctagagccagctgataatatttaataatctagaggagagaataatgatgtaccaataagtggagattcctccttatgatgtatgctaggttatggaagatgtaaaatattcaactttttcctcctttttttggactttgtattttactgcatgttttcttcatttttaatcaataaagagtaaattgtcaaaaaaaaaaaaaaaaaaa

SEQ ID NO: 25624 - DNA, 2768 bp, Homo Sapiens
ccggatcgggaagtgtcaagcgggcgctcccccatctccgccgctattaccactgaacccggaccccctacccaggtccagggccagccgccatgacgaacgtgtactccttggatgggattctggtgtttggtttgctctttgtttgcacctgtgcctacttcaagaaagtacctcgtctcaaaacctggctgctatcagagaagaagggtgtttggggtgtgttttacaaagccgctgtgattggaaccaggctgcatgctgctgtggcaattgcttgtgttgtaatggccttttacgtcctgtttataaaatgaattccaaagcacccaagtcatcaactgccaaccaaggggacggggatgaagaacctgttggagacctgaacccagtgtaggagagttcagctgaaatcatcggtccccaggatgacaccacagcatctgcccctgctatatgtggggaaaactcatggtcacgaacattatttatgcttcaggggactacagaaagccagcttcctttgatctatgtgtaaatcagtccttggcagagtgcatataatgtccggataaattacacccctcggtgataagattacatacctccttcataaaaacctgtcatcctgttttgttcttcagctcctcatcaggatcttttcaaactgaggctcattagggaaggaactaggctgtgttcagacttcttttgaagagagagaattttcaagacttcttttcactctttgatttggatctggcaaattggggaggggatgctgggtgggaaacagttatgaaatgccaagaaattctttggctttagaaatttatctttcatgtacccatccgggaacataaaagagaggcatagtgctcattgcaaaaagagaacagatgaagtagctgtgttatgtgctggtatcttgagagttttgccaagaaaatctgggcctacataaaatttgagaattatctgtgtgatgagaccagaaagcagtggcttagacaagaaaaaatctttctgttcaccagtatcctcaaatggagacttcacttgatcagatggtatatgaaaaatgaatcaactattgctatttcgtaaaacctttttatattttctaaatttacttagtgctaaatactgttactcagttttaaatgccacgactaggggaaaaagaaactattgaagaaataattgtttagtatatttgcagttggggtagaagaaagaaatctagtatattgattcatatactagtaaattcatctagtataagaacttgtgatgttagattgaagttttgtcatcttataaaagacaacaaacttattttctgtttaagtctgagtgttatggcaatttttagttgattacttatttttcttagccaaattttaattttcttcatattgcattgctctttagttgtctctggaaattctatttactttaaggacatgagaaattcaaatgagagaagttgctgatattcatcagtgtgtttggacagttcatagggtccacaaatcaaatgaggttgtttcctgaagtagaagaaaacagaactttgcaattgatactgaagtactttgccatggagttagtaactcctgagcagaccattttagatggctcagcatttggcaggaagacttctccattccctgcttatatctatggaaggatcagctgttggatgtctagaacttctctatttaaaaaaaaagagtaggtctaaaattaaattattataagcaagcatagacatgggtcttccagttgaattgtccattaccgtaaaacttaatggtggacaagttagctgtggttgattcctgtgtggcagtaaattgtcttctgtctgcttactccaaataataaaagctgctaggaagtttagattttgaaataggcagtttaatgctttgagggtttctagaaatacagaaagtcatcaagtaaacactgcatgtctaatcatctcagagttgtggctgttatctcttcaggaattggtccacagggtaaatttcaacaattcatacgttttccattgtcatttctgaggacctttgagatgagagaaaggaaatctagtggaacaggaaagagagttacaccttgtgggtgtgagtttgggacctgttggcagaagggaatgtcactccctggaaacaggttcagcatgtttgcacttgttattttgtagctttaatgatttttgttttctaatagggcaaatgtctctaagcttggtgtttagagctgcttcatattttaaactagttccattccacagttctagttcaaaccagtttttacagcctcctgggtgggtcgtcttgacccaaactcttgtgttgttacattttgagaggttttcataccagaatgtaccaaaaagtgcacaaggtaaaggtaatttacagccagaaacaaatatacatttgtttcatttcttgactttccctaagcagataagcagaaacttgtttaactcattactttgtttgatgtgtcttacatatttttgactaaaagttatagaatgttattcctctgggggaatcttttacaggtggaggaatggggatagcagtattgcctcagattcaaactggcatcaccataaaccctgtaggccagggtggaatgaagtcagctcctttttatagttgaaatacaattttttattcaccattgtctgcacaaatccttgaaaataaacctttttttccctaaaaaaaaaaaaaaaaaaa

SEQ ID NO: 25625 - DNA, 1430 bp, Homo Sapiens
ttccttccttcctttcgccgggcgcgatggagccggggcgccggggggccgcggcgctgctagcgctgctgtgcgtggcctgcgcgctgcgcgccgggcgcgcccaatacgaacgctacagcttccgcagcttcccacgggacgagctgatgccgctcgagtcggcctaccggcacgcgctggacaagtacagcggcgagcactgggccgagagcgtgggctacctggagatcagcctgcggctgcaccgcttgctgcgcgacagcgaggccttctgccaccgcaactgcagcgccgcgccgcagcccgagcccgccgccggcctcgccagctatcccgagctgcgcctcttcgggggcctgctgcgccgcgcgcactgcctcaagcgctgcaagcagggcctgccagccttccgccagtcccagcccagccgcgatgtgctggcggacttccagcgccgcgagccctacaagttcctgcagttcgcttacttcaaggcaaataatctccccaaagccatcgccgctgctcacacctttctactgaagcatcctgatgacgaaatgatgaagaggaacatggcatattataagagcctgcctggtgccgaggactacattaaagacctggaaaccaagtcatatgaaagcctgttcatccgagcagtgcgggcatacaacggtgagaactggagaacatccatcacagacatggagctggcccttcccgacttcttcaaagccttttacgagtgtctcgcagcctgcgagggttccagggagatcaaggacttcaaggatttctacctttccatagcagatcattatgtagaagttctggaatgcaaaatacagtgtgaagagaacctcaccccagttataggaggctatccggttgagaaatttgtggctaccatgtatcattacttgcagtttgcctattataagttgaacgacctgaagaatgcagccccctgtgcagtcagctatctgctctttgatcagaatgacaaggtcatgcagcagaacctggtgtattaccagtaccacagggacacgtggggcctctcagatgagcacttccagcccagacctgaagcagttcagttctttaatgtgaccacactccagaaggagctgtatgactttgctaaggaaaatataatggatgatgatgagggagaagttgtggaatatgtggatgacctcttggaactggaggagaccagctagcccacagcaaccaaagagacttcctcttggcgttcaggaaacacagattctttgtccttttcccaacagcccaggctgttgatacctcagagccttctctttactctccaaagtgaaagggaagcccccgtccctctacctgcacgacaacacataaaaaaaaaaaaaaaaaaaaaaaaaaaaaaaaaaaaaaaaaaa

SEQ ID NO: 25626 - DNA, 3061 bp, Homo Sapiens
ggagggcggagggcggaggggcggcgggaggagggcggggaggagcgctcttcctggttgggccctgccctgagctgccaccgggaagccagcctcagggactgcagcgacccccaaacacccctcccccaggatgtcggaggagatcatcacgccggtgtactgcactggggtgtcagcccaagtgcagaagcagcgggccagggagctgggcctgggccgccatgagaatgccatcaagtacctgggccaggattatgagcagctgcgggtgcgatgcctgcagagtgggaccctcttccgtgatgaggccttccccccggtaccccagagcctgggttacaaggacctgggtcccaattcctccaagacctatggcatcaagtggaagcgtcccacggaactgctgtcaaacccccagttcattgtggatggagctacccgcacagacatctgccagggagcactgggggactgctggctcttggcggccatcgcctccctcactctcaacgacaccctcctgcaccgagtggttccgcacggccagagcttccagaatggctatgccggcatcttccatttccagctgtggcaatttggggagtgggtggacgtggtcgtggatgacctgctgcccatcaaggacgggaagctagtgttcgtgcactctgccgaaggcaacgagttctggagcgccctgcttgagaaggcctatgccaaggtaaatggcagctacgaggccctgtcagggggcagcacctcagagggctttgaggacttcacaggcggggttaccgagtggtacgagttgcgcaaggctcccagtgacctctaccagatcatcctcaaggcgctggagcggggctccctgctgggctgctccatagacatctccagcgttctagacatggaggccatcactttcaagaagttggtgaagggccatgcctactctgtgaccggggccaagcaggtgaactaccgaggccaggtggtgagcctgatccggatgcggaacccctggggcgaggtggagtggacgggagcctggagcgacagctcctcagagtggaacaacgtggacccatatgaacgggaccagctccgggtcaagatggaggacggggagttctggatgtcattccgagacttcatgcgggagttcacccgcctggagatctgcaacctcacacccgacgccctcaagagccggaccatccgcaaatggaacaccacactctacgaaggcacctggcggcgggggagcaccgcggggggctgccgaaactacccagccaccttctgggtgaaccctcagttcaagatccggctggatgagacggatgacccggacgactacggggaccgcgagtcaggctgcagcttcgtgctcgcccttatgcagaagcaccgtcgccgcgagcgccgcttcggccgcgacatggagactattggcttcgcggtctacgaggtccctccggagctggtgggccagccggccgtacacttgaagcgtgacttcttcctggccaatgcgtctcgggcgcgctcagagcagttcatcaacctgcgagaggtcagcacccgcttccgcctgccacccggggagtatgtggtggtgccctccaccttcgagcccaacaaggagggcgacttcgtgctgcgcttcttctcagagaagagtgctgggactgtggagctggatgaccagatccaggccaatctccccgatgagcaagtgctctcagaagaggagattgacgagaacttcaatgccctcttcaggcagctggcaggggaggacatggagatcagcgtgaaggagttgcggacaatcctcaataggatcatcagcaaacacaaagacctgcggaccaagggcttcagcctagagtcgtgccgcagcatggtgaacctcatggatcgtgatggcaatgggaagctgggcctggtggagttcaacatcctgtggaaccgcatccggaattacctgtccatcttccggaagtttgacctggacaagtcgggcagcatgagtgcctacgagatgcggatggccattgagtcggcaggcttcaagctcaacaagaagctgtacgagctcatcatcacccgctactcggagcccgacctggcggtcgactttgacaatttcgtttgctgcctggtgcggctagagaccatgttccgatttttcaaaactctggacacagatctggatggagttgtgacctttgacttgtttaagtggttgcagctgaccatgtttgcatgaggcagggactcggtcccccttgccgtgctcccctccctcctcgtctgccaagcctcgcctcctaccacaccacaccaggccaccccagctgcaagtgccttccttggagcagagaggcagcctcgtcctcctgtcccctctcctcccagccaccatcgttcatctgctccgggcagaactgtgtggcccctgcctgtgccagccatgggctcgggatggactccctgggccccacccattgccaagccaggaaggcagctttcgcttgttcctgcctcgggacagccccgggtttccccagcatcctgatgtgtcccctctccccacttcagaggccacccactcagcaccaccggcctggccttgcctgcagactataaactataaccactagctcgacacagtctgcagtccaggcgtgtggagccgcctcccggctcggggaggccccggggctgggaacgcctgtgccttcctgcgccgaagccaacgccccctctgtccttccctggccctgctgccgaccaggagctgcccagcctgtgggcggtcggccttccctccttcgctccttttttatattagtgattttaaaggggactcttcagggacttgtgtactggttatgggggtgccagaggcactaggcttggggtggggaggtcccgtgttccatatagaggaaccccaaataataaaaggccccacatctgtctgtgaaaaaaaaaaaaaaaaaaaaaaaaaaaaaaaaaaaaaaaaaaaaaaaaaaaaaaaaaaaaaaaa

SEQ ID NO: 25627 - DNA, 3464 bp, Homo Sapiens
cgaggatccgctcgggagcctcccctggccaggagcaggggattagtctgccccgcgaccggccccagccacgacgcggacatcgccccctctgtctgggccgctgtcactcacgcgccaaagggccacggagaaagaaggggcgggccggggcgggccgggcgagcggaggcggggacttgcgccgtcctgaggctgcctcctagggtccggccggcgctggagctgcggatttagattgtcactgccacctcggtcggtgcttacttcgctgccagctggtcgtcgccatgaacccggacctgcgcagggagcgggattccgccagcttcaacccggagctgcttacacacatcctggacggcagccccgagaaaacccggcgccgccgagagatcgagaacatgatcctgaacgacccagacttccagcatgaggacttgaacttcctcactcgcagccagcgttatgaggtggctgtcaggaaaagtgccatcatggtgaagaagatgagggagtttggcatcgctgaccctgatgaaattatgtggtttaaaaattttgtgcaccgagggcggcctgagcctctggatcttcacttgggcatgttcctgcccaccttgcttcaccaggcaactgcggagcagcaggagcgcttcttcatgcccgcctggaacttggagatcattggcacttatgcccagacagagatgggtcatggaactcaccttcgaggcttggaaaccacagccacgtatgaccctgaaacccaggagttcattctcaacagtcctactgtgacctccattaaatggtggcctggtgggcttggaaagacttcaaatcatgcaatagttcttgcccagctcatcactaaggggaaatgctatggattacatgcctttatcgtacctattcgtgaaatcgggacccataagcctttgccaggaattaccgttggtgacatcggccccaaatttggttatgatgagatagacaatggctacctcaaaatggacaaccatcgtattcccagagaaaacatgctgatgaagtatgcccaggtgaagcctgatggcacatacgtgaaaccgctgagtaacaagctgacttacgggaccatggtgtttgtcaggtccttccttgtgggagaagctgctcgggctctgtctaaggcgtgcaccattgccatccgatacagcgctgtgaggcaccagtctgaaatgaagccaggtgaaccagaaccacagattttggattttcaaacccagcagtataaactctttccactcctggccactgcctatgccttccagtttgtgggcgcatacatgaaggagacctatcaccggattaacgaaggcattggtcaaggggacctgagtgaactgcctgagcttcatgccctcaccgctggactgaaggctttcacctcctggactgcaaacactggcattgaagcatgtcggatggcttgtggtgggcatggctattctcattgcagtggtcttccaaatatttatgtcaatttcaccccaagctgtacctttgagggagaaaacactgtcatgatgctccagacggctaggttcctgatgaaaagttatgatcaggtgcactcaggaaagttggtgtgtggcatggtgtcctatttgaacgacctgcccagtcagcgcatccagccacagcaggtagcagtctggccaaccatggtggatatcaacagccccgaaagcctaaccgaagcatataaactccgtgcagccagattagtagaaattgctgcaaaaaaccttcaaaaagaagtgattcacagaaaaagcaaggaggtagcttggaacctaacttctgttgaccttgttcgagcaagtgaggcacattgccactatgtggtagttaagctcttttcagaaaaactcctcaaaattcaagataaagccattcaagctgtcttaaggagtttatgtctgctgtattctctgtatggaatcagtcagaacgcgggggatttccttcaggggagcatcatgacagagcctcagattacacaagtaaaccagcgtgtaaaggagttactcactctgattcgctcagatgctgttgctttggttgatgcatttgattttcaggatgtgacacttggctctgtgcttggccgctatgatgggaatgtgtatgaaaacttgtttgagtgggctaagaactccccactgaacaaagcagaggtccacgaatcttacaagcacctgaagtcactgcagtccaagctctgaagtgtcacaaggacaagtttaatctgcttcagaaagcgcctgtgtgcaactcaaattttgtggaatctttttcgaattcaaatagctatagagcaaatgataaattgacccctttttataaatggagggaaaaaatgaacagatttcagagattaaatgaaaaaaagcagatgttttaagtgcaattaacactgaaagagacctgttaaaccattcagaaaaagcttaagaaatgcgatatgacttccttttgtaatgctgctgatcccagtagactatgacttttgataattagcagaatttaactactgagtagttgattattttcacattttaattgctaatcactggctatataagtgtttttaagcaaaggtatttttgaagtggtgtagaacccttccaagctttcctgctcagtgttctaccagacttaccctggggcctggcttaaaagcaggattgaagaaaagggactgggggaaggaaacttattggaaaacttgatgcgaatgagtttctgcttggcacagtctctgcctgcttgctctcctttgctgatggattgcatttatcaaactattcatgctagcatttttccaacgagggaacttattccgcacgggcctactgtaggaccattgtctcgtgtaattaggaattttccatttgaaggattgctaaattgtcacagtagtaggaagtatagggaaacctctcagctgtggcactgttgtagctttggagtgcagagtgtaactctgggacaatcagatttcacatattctgtcatcttggcataagccattaaaagcttggagattactgtatttggcattaaaaaaaaatgtcacttaggtcagcactcccagacgtagcacagaaaaaccctttgacacaaaccatgtgttctgatttttggttcagaaaatattgaaactgtgagttgttttttttttaacaactgggaaaaaacaaaaacaaaaaactatagttagaaaaatggaagttccataggttctatttcttactctatgtatggctttgttttcagtctatttctaggagctttctctgaatcgctaattgtcctttcagttgaaatctaatttatacaatcattctatacttaaaggttaaatacatcttaattaattttttcttaaaaaaaaaaaaaaaaaaaaaaaaaaa

SEQ ID NO: 25628 - DNA, 4004 bp, Homo Sapiens
ccaaggcatctgccactgctgctgactgccactaccagccggagccagggcctggtcgagacaactatttttgaggcaagactcgtggctgtgacccatgggcctctgaggaggcgttgtaagtccgcccagctccccacttgctgtgctctcactcaatgcgaagggaaccaagactttgtccagccatcagccacggcctctcgacagcaccaagatggaagtcaaaggtcagctgatcagctctcctaccttcaatgccccagctgccctgttcggagaggctgccccccaggtgaagtcagagcgtctgcgggggctgcttgaccggcagcggaccctgcaggaggccctgagcctgaaacttcaggagctccgcaaagtgtgtctccaggaggcggagctgactggccagctgccccctgagtgcccactagagcctggtgaacggccccagttggtccgccggcggccccccacagcccgcgcctaccctccaccgcaccccaaccaagcacaccactccttgtgccctgctgaggagctggctcttgaggccctggaacgcgaggtgtcagtgcaacagcagatcgcggcggccgcccgccgcctggccttggcccctgatctgagcaccgagcagcgccggcgccggcgccaggtccaggcagatgcactgaggaggctgcatgagctagaggagcagctcagggatgtccgggcccgccttggcctcccagtgctcccgctgccccagccactgccactgtccacggggtcagtgatcaccacccagggagtctgcctgggcatgcgtcttgctcagctcagccaagaggacgtagttctgcactcagagagcagctccctctcagagtctggggccagccatgacaacgaggagccccatggctgcttctctctggccgagcgcccctcaccacccaaggcttgggaccagctgcgggcagtatctggggggagccctgagcggcgaaccccatggaaaccacctccatcagatctttatggggatctgaagagccggcggaactctgtggccagccccaccagccccacacgctcgctgcccaggagtgcctccagttttgaggggcgaagtgtgcctgccacccctgtcctcacccggggcgctggcccccagctctgcaaacctgaaggccttcattctcgtcagtggtccggcagccaggactcccagatgggcttcccccgggcggaccctgcctccgatcgcgcctccctcttcgtagctcgcacccgccgcagcaacagttctgaggccctgctggtggaccgggccgctggtgggggagctggctccccgcctgcccctctggctccctctgcctctggccccccagtctgcaagagcagtgaggtgctgtatgagcgcccccaaccaacccctgccttctcctcccgcacagcaggccccccagaccctccccgggccgcccggcctagctcagctgcccctgcctcccgaggtgccccccggctcccacctgtgtgtggagacttcctcttggactattccttggaccggggcctgccccgcagtggcggtggaacaggctggggggagctgccgcctgcagctgaggtcccaggacccctctcccgccgggatgggctcctcaccatgctccccggcccaccacctgtgtatgcagctgacagcaacagccccctcctccgcaccaaggacccccacacccgtgccacccgcactaagccctgtggcctgcccccagaggctgccgaaggccctgaggtgcatccaaaccctctgctgtggatgcccccacccacccgtatcccctcggctggtgaacgcagtggccacaagaacctggctctggaggggctgcgggactggtacatccggaactcgggactggctgcggggccccagcgccggcctgtgctcccttccgtgggcccgccacacccacccttcctccatgcccgctgctatgaggtgggccaggcgctgtacggggcccccagccaggcgccactcccacactcgaggagtttcacggcgccccctgtctctggcaggtatggggggtgcttttactgatgggtaggggtctcgtaaggcagatggcgaagatatccaggccagggagtggctagtcatgatagctaatgaattggaccatgaggaaactagctgctgtgatggcacagggtcactctactgcacatgacctgcattagtccatggggtcctggtggaggggatcttgggcactggtagcagcaattctttatcaagttataggctgaagatgagccttgaagccagggtgccgggaggaagggacatctcatgccccttgctgttttcttccttttttctccatgccccagagcctgaaagtgctgtcctgtgcctgcctccacctctttaacgagcctcttttcctttctttttctgtgtcttgtctgtcttttcttcttcttgtcttccccgccctgtcctccggattcctgctaccccttctaaagatactacgcggacttcctgtatcccccggagctgagcgctcgtttaagtgacctgacgctagagggggagcagtcctccagttctgacacccagaccccggggacactggtctgaccccttctgatatgtcccttgttggcctgggcacgattccaatctggggagcacacagctgacctcgctgggccctggggtgtggttgctctcagtcctgagcagagtgcgccaacctaatcttccaaggcccctggctccccgtaggcccaggaaggtgtctgacaccctgcttcttctctcacactgtgctggggactgggggccctcagctagcttaaaagaggggggatgatgtcatggggaccccaagccccttcctccatttatgtttacagttgtgacttaggtattcactgtcttcctccaacactaggcgttttacaaaagggaaactgtgatctcatctggttgggttcattcctgttcccatgcccaaccaggttccattcaggaaccccctccataaaatggaccatatcgggtctcagggccatttagggcagccaggagactccggtgtgaacagaaatccctgccacgcatcgccagggcagttggggcagtgggctctctgcccacacttggaaggactgcagtctgggtgggatgcctgaaagagcccaaccccctctgtgcccatggcctctgccctgaccacccccagtcaggaggccccacaggaggggcacccggtagatgccagtgaaatcctcaggggaggtctgcctgaaagagcccaaccccctctgtgcccatggcctctgccctgaccacccccagtcaggaggccccacaggaggggcacccggtagatgccagtgaaatcctcaggtgaggtctgcctacgggccacgggccactcaccactcacaccttccttggctttccttccacccttttttttttctcgagacggagtcttgctctgtcaccaggctggagtgcagcggcgcaatctcagctcactgcaacctctgcctcctgggttctcctgcctcaccctcccgagtagctgggattacaggcacacgccaccatgcccggctaatttttgtattcttagtagagacaaggtttcaccatattggccaggctggtcttgaactcttgacctcgtgatctgcccgccttggcctcccaaagtgctgggattacagccgtgagccactgcacccagccccaatccaccactttttaagcaaacccacacaagttgtgttttctatgatacctgtctgtgattttcggagctgggggttcccctacccccttttcctggcgttaagcttttctttttataccagtggatctggacccaagacattacccacactggaaggggatttgtataataaatgtgtaaactgaacccaaaaaaaaaaaaaaaaaaaaaaaaaaaaaaaaa

SEQ ID NO: 25629 - DNA, 3702 bp, Homo Sapiens
tggagggtctcgctctgtcacacaggctggagtgcagtggtgtgatcttggctcatcgtaacctccacctcccgggttcaagtgattctcatgcctcagcctcccgagtagctgggattacaggtggtgacttccaagagtgactccgtcggaggaaaatgactccccagtcgctgctgcagacgacactgttcctgctgagtctgctcttcctggtccaaggtgcccacggcaggggccacagggaagactttcgcttctgcagccagcggaaccagacacacaggagcagcctccactacaaacccacaccagacctgcgcatctccatcgagaactccgaagaggccctcacagtccatgcccctttccctgcagcccaccctgcttcccgatccttccctgaccccaggggcctctaccacttctgcctctactggaaccgacatgctgggagattacatcttctctatggcaagcgtgacttcttgctgagtgacaaagcctctagcctcctctgcttccagcaccaggaggagagcctggctcagggccccccgctgttagccacttctgtcacctcctggtggagccctcagaacatcagcctgcccagtgccgccagcttcaccttctccttccacagtcctccccacacggccgctcacaatgcctcggtggacatgtgcgagctcaaaagggacctccagctgctcagccagttcctgaagcatccccagaaggcctcaaggaggccctcggctgcccccgccagccagcagttgcagagcctggagtcgaaactgacctctgtgagattcatgggggacatggtgtccttcgaggaggaccggatcaacgccacggtgtggaagctccagcccacagccggcctccaggacctgcacatccactcccggcaggaggaggagcagagcgagatcatggagtactcggtgctgctgcctcgaacactcttccagaggacgaaaggccggagcggggaggctgagaagagactcctcctggtggacttcagcagccaagccctgttccaggacaagaattccagccacgtcctgggtgagaaggtcttggggattgtggtacagaacaccaaagtagccaacctcacggagcccgtggtgctcaccttccagcaccagctacagccgaagaatgtgactctgcaatgtgtgttctgggttgaagaccccacattgagcagcccggggcattggagcagtgctgggtgtgagaccgtcaggagagaaacccaaacatcctgcttctgcaaccacttgacctactttgcagtgctgatggtctcctcggtggaggtggacgccgtgcacaagcactacctgagcctcctctcctacgtgggctgtgtcgtctctgccctggcctgccttgtcaccattgccgcctacctctgctccagggtgcccctgccgtgcaggaggaaacctcgggactacaccatcaaggtgcacatgaacctgctgctggccgtcttcctgctggacacgagcttcctgctcagcgagccggtggccctgacaggctctgaggctggctgccgagccagtgccatcttcctgcacttctccctgctcacctgcctttcctggatgggcctcgaggggtacaacctctaccgactcgtggtggaggtctttggcacctatgtccctggctacctactcaagctgagcgccatgggctggggcttccccatctttctggtgacgctggtggccctggtggatgtggacaactatggccccatcatcttggctgtgcataggactccagagggcgtcatctacccttccatgtgctggatccgggactccctggtcagctacatcaccaacctgggcctcttcagcctggtgtttctgttcaacatggccatgctagccaccatggtggtgcagatcctgcggctgcgcccccacacccaaaagtggtcacatgtgctgacactgctgggcctcagcctggtccttggcctgccctgggccttgatcttcttctcctttgcttctggcaccttccagcttgtcgtcctctaccttttcagcatcatcacctccttccaaggcttcctcatcttcatctggtactggtccatgcggctgcaggcccggggtggcccctcccctctgaagagcaactcagacagcgccaggctccccatcagctcgggcagcacctcgtccagccgcatctaggcctccagcccacctgcccatgtgatgaagcagagatgcggcctcgtcgcacactgcctgtggcccccgagccaggcccagccccaggccagtcagccgcagactttggaaagcccaacgaccatggagagatgggccgttgccatggtggacggactcccgggctgggcttttgaattggccttggggactactcggctctcactcagctcccacgggactcagaagtgcgccgccatgctgcctagggtactgtccccacatctgtcccaacccagctggaggcctggtctctccttacaaaccctgggcccagccctcattgctgggggccaggccttggatcttgagggtctggcacatccttaatcctgtgcccctgcctgggacagaaatgtggctccagttgctctgtctctcgtggtcaccctgagggcactctgcatcctctgtcattttaacctcaggtggcacccagggcgaatggggcccagggcagaccttcagggccagagccctggcggaggagaggccctttgccaggagcacagcagcagctcgcctacctctgagcccaggccccctccctccctcagccccccagtcctccctccatcttccctggggttctcctcctctcccagggcctccttgctccttcgttcacagctgggggtccccgattccaatgctgttttttggggagtggtttccaggagctgcctggtgtctgctgtaaatgtttgtctactgcacaagcctcggcctgcccctgagccaggctcggtaccgatgcgtgggctgggctaggtccctctgtccatctgggcctttgtatgagctgcattgcccttgctcaccctgaccaagcacacgcctcagaggggccctcagcctctcctgaagccctcttgtggcaagaactgtggaccatgccagtcccgtctggtttccatcccaccactccaaggactgagactgacctcctctggtgacactggcctagagcctgacactctcctaagaggttctctccaagcccccaaatagctccaggcgccctcggccgcccatcatggttaattctgtccaacaaacacacacgggtagattgctggcctgttgtaggtggtagggacacagatgaccgacctggtcactcctcctgccaacattcagtctggtatgtgaggcgtgcgtgaagcaagaactcctggagctacagggacagggagccatcattcctgcctgggaatcctggaagacttcctgcaggagtcagcgttcaatcttgaccttgaagatgggaaggatgttctttttacgtaccaattcttttgtcttttgatattaaaaagaagtacatgttcattgtagagaatttggaaactgtagaagagaatcaagaagaaaaataaaaatcagctgttgtaatcgcctagcaaaaaaaaaaaaaaaaaaa

SEQ ID NO: 25630 - DNA, 1322 bp, Homo Sapiens
gtcggtcttcctccggcccgggccctggcccagctagccggccatggaaggtaatggccccgctgctgtccactaccagccggccagccccccgcgggacgcctgcgtctacagcagctgctactgtgaagaaaatgtttggaagctctgtgaatacatcaaaaaccatgaccagtatcctttagaagaatgttatgctgtcttcatatctaatgagaggaagatgatacctatctggaaacaacaggcgagacctggagatggacctgtgatctgggattaccatgttgttttgcttcatgtttcaagtggaggacagagcttcatttatgatctcgatactgtcttgccatttccctgcctctttgacacttatgtagaagatgccattaagtctgatgatgacattcacccacagtttaggaggaaatttagagtgatctgtgcagattcatatttgaagaactttgcttctgaccgatctcacatgaaagactccagtgggaattggagagagcctccgccgccatatccctgcattgagactggagattccaaaatgaacctgaacgatttcatcagtatggatcccaaggtaggatggggcgccgtctacacactatccgaatttacacatcggtttggcagtaaaaactgctgaacttggcctcaagatgtggaactgtggagaaattctaggacatgaacaagctatcctttcatcgaggacagcaaacattatggtacagttggcttggaattatgtctttctcttttaatttgattgagtggaaatctgagtgagtacaaatataaatgaacaacataaaaacttttgttttgacatgtcaaattgaaacttgataaagtgcgtacttgctaagatattcctgtggctcatgcgttacaacacgaggacttaagccagtaatcgtttttgttcagatagaggtgtggaggtagagccagcccctcatgtctgttctggatgttttgtgtctctccagctacactgtaagttccttgagggcagggccatggcccattgctctgtgaatctcaaatgcccataaaaggtgcccataaaatgttttcttgaacatttgaatgtgctgttgtctggaaaggggtaatattgtgagctgaatcagcaataagtattagtctttttggactatggtattgttaaaaagactgcagccctctcagacttgagcgttaattggcttatttatttatggctttaaataaaatcgatttaacgttaaaaaaaaaaaaaaaaaaaaaaaaaaaaaaaaaaaaaaaaaaaaaaaaaaaaaaaa

SEQ ID NO: 25631 - DNA, 2282 bp, Homo Sapiens
cccgagctctcagccactccctagcactcacagggatcccgggtgcaaggggcacaagtttgcacacagtggcctggcttgccagctgccccagccctgcgaggcagatgaggggctgggtgaggaagaggatagcagctctgagcgaagctcctgcacctcatcctccacccaccagagagatgggaagttctgtgactgctgctactgtgagttcttcggccacaatgcgagaagtgaacgcttgggagtgatgaaggcagagtggaagcaaaaaggctctcagtcccccaagtgtgacagccagccgagggacaggccgtgagcacagacggcgccaggaaggaggctcagatcagagggcatgctggctctggccagggggaggaagcagtgcagaagtctcataagccacccgctgccccgacgagtcggaactataccgagatccgggagaagctccgctcgaggctgaccaggcggaaagaggagctgcccatgaaggggggcaccctgggcgggatccctggggagcccgccgtggaccaccgagatgtggatgagctgctggaattcatcaacagcacggagcccaaagtccccaacagcgccagggccgccaagcgggcccggcacaagctgaaaaagaaggaaaaggagaaggcccagttggcagcagaagctctaaagcaggcaaatcgtgtttctggaagccgggagccaaggcctgccagggagaggctcttggagtggcccgaccgggaactggatcgggtcaacagcttcctgagcagccgtctgcaggagatcaaaaacactgtcaaagactccatccgtgccagcttcagtgtgtgtgagctcagcatggacagcaatggcttctctaaggagggggctgctgagcctgagcctcagagtctacccccctcaaacctcagtggctcctcagagcagcagcctgacatcaaccttgacctgtcccctttgactttgggctcccctcagaaccacacgttacaagctccaggcgagccagccccaccatgggcagaaatgagaggcccccacccaccatggacagaggtgagggggccccctcccggtatcgtccccgagaacgggctcgtgaggagactcaacaccgtgcccaacctatcccgggtgatctgggtcaagacacccaagccgggctaccccagctccgaggagccaagctcaaaggaagttcccagttgcaagcaggagctgcctgagcctgtgtcctcaggtgggaagccacagaagggcaagaggcagggcagtcaggccaagaagagcgaggcaagcccagccccccggcccccagccagcctagaggttcccagtgccaagggccaggtcgctggccccaagcagccaggcagggtcctagagcttcccaaagtaggcagctgtgctgaggctggagaggggagccgggggagccggccaggaccaggttgggctggcagtcccaaaactgagaaggagaagggcagctcctggcgaaactggccaggcgaggccaaggcacggcctcaggagcaggagtctgtgcagcccccaggcccagcaaggccacagagcttgccccagggcaagggccgcagccgccggagccgcaacaagcaggagaagccagcctcctccttggacgatgtgttcctgcccaaggacatggacggggtggagatggatgagactgaccgagaggtggagtactttaagaggttctgtttggattctgcaaagcagactcgtcagaaagttgctgtgaactggaccaacttcagcctcaagaaaaccactcctagcacagctcagtgaggccctgcccaggctgagctgcttcagggcatcctgaggccctgactgccagctgaaggcgtataatttttccctctgtgtgccccacctacccgtccaagaccctctgtgctccccaccatcctggaccaaccaaaagctgaacggatgccacactgtgctggggccccttgacctcagcagagccgcttcctggtgctacgcagcctccacactcagagcccgtggactgggctggcctaagggccagggctgatggtactgctggcccaacactgctctctttgtgtttggtttttttgtttttgtttttattttgtttttttccaattctttacttttgatactgtgaagatctttcgtgccgaaagataaagcaacatttggacacaaaaaaaaaaaaaaaaaaaaaaaaaaaaaaaaaaaaaaaaaaaaaa

SEQ ID NO: 25632 - DNA, 2076 bp, Homo Sapiens
atgagtgtgagctcgtgagtgggcgccgccgccaccgcccccgccgccgtcgtctcggtagcagccttcgccacgccggggtcttcagctccactggggccatgtcagagcgagaagagcggcggtttgtggagatccctcgggagtctgtccggctcatggcggagagcacgggcctggagctgagcgatgaggtggcggcgctgctcgcagaggacgtgtgctatcgtctgagagaggccacgcagaatagctctcagttcatgaagcacaccaaacgccggaagctgacggttgaggacttcaacagggccctcagatggagcagcgtggaggctgtgtgtggttacggatcacaggaggcactgcccatgcgccccgccagggagggtgaactctactttcctgaggatcgagaggtgaacctggtggagctggccctggctaccaacatccccaaaggctgtgctgagacagctgtcagagttcatgtctcctacctggatggcaaagggaacctggcacctcaaggatcggtgcccagtgctgtgtcttcactgacagatgaccttctcaagtactatcaccaggtgactcgtgctgtgctaggggatgatccgcaactgatgaaggttgcactccaggacttgcagacgaactccaagattggggcactcctgccttactttgtttatgtggtcagtggggtgaaatctgtaagccatgacctggagcaactgcaccggctgctgcaggtggcacggagcctatttcgtaatccgcacctgtgcttggggccctatgtccgctgtctggtgggcagtgtcctctactgtgtcctggagccactggctgcctccatcaaccccctgaatgaccactggactctgcgggatggggctgccctcctgctcagccacatcttctggactcatggggaccttgtaagtggcctctatcagcatatcctgctatccctgcagaagatcctggcagatcctgtgcggccgctctgctgccactatggagccgtggtggggctgcatgctcttggctggaaggcagtagaacgagtcctgtacccacacctgtccacctactggacaaacttgcaggctgtgctggatgattattcagtatctaatgcccaggtcaaagcagatggacacaaagtctatggagccattctggtggcggtagagcgactgctgaagatgaaggcccaggcagcagagcccaacaggggtggcccaggtggcagggggtgccggcgcctggacgacctgccatgggacagccttctctttcaagagtcgtcctccgggggcggtgcagaacccagctttgggtccggcctcccgctgccgccagggggcgcggggccggaggacccttctctttcggtgaccctggccgacatctaccgggagctctacgccttcttcggtgacagcttggccacacgctttggcaccggctagcctgcacccacggctccgcggccgcccggggacaagaaggagccggcggcagccccggactcggtgcggaagatgccgcagctgacggcaagcgccatagtcagcccgcacggcgacgagagcccccggggcagcggcggaggcggccccgcgtcggcctctgggcccgccgcctctgagagcaggcccttgccgcgcgtgcatcgggcgcgcggggcaccccggcagcagggccccgggaccggcacccgcgacgttttccagaagagccgtttcgccccgcgcggcgccccgcactttcgtttcatcatagccgggcggcaggctgggaggcgctgccgcgggcgccttttccagactgccttccccgcgccgtacgggcctagcccggcctcgcgctacgtgcagaaactgcccatgatcggccgtaccagccgccccgcccgccggtgggcgctctcggactactcgctgtacttgccgctctgagtcagtggccccttcgttccttgtaaataaatcccgcccccggaaaaaaaaaaaaaaaaaaaaaaaaaaaaaaaaaaaaaaaaaaaaaaaaaaaaaaaaaaaaaaa

SEQ ID NO: 25633 - DNA, 4243 bp, Homo Sapiens
gtttaggaagcggctccgggtcggtggccccaggacagggaagagcgggcgctatggggagccggacgccagagtcccctctccacgccgtgcagctgcgctggggcccccggcgccgacccccgctgctgccgctgctgttgctgctgctgccgccgccacccagggtcgggggcttcaacttagacgcggaggccccagcagtactctcggggcccccgggctccttcttcggattctcagtggagttttaccggccgggaacagacggggtcagtgtgctggtgggagcacccaaggctaataccagccagccaggagtgctgcagggtggtgctgtctacctctgtccttggggtgccagccccacacagtgcacccccattgaatttgacagcaaaggctctcggctcctggagtcctcactgtccagctcagagggagaggagcctgtggagtacaagtccttgcagtggttcggggcaacagttcgagcccatggctcctccatcttggcatgcgctccactgtacagctggcgcacagagaaggagccactgagcgaccccgtgggcacctgctacctctccacagataacttcacccgaattctggagtatgcaccctgccgctcagatttcagctgggcagcaggacagggttactgccaaggaggcttcagtgccgagttcaccaagactggccgtgtggttttaggtggaccaggaagctatttctggcaaggccagatcctgtctgccactcaggagcagattgcagaatcttattaccccgagtacctgatcaacctggttcaggggcagctgcagactcgccaggccagttccatctatgatgacagctacctaggatactctgtggctgttggtgaattcagtggtgatgacacagaagactttgttgctggtgtgcccaaagggaacctcacttacggctatgtcaccatccttaatggctcagacattcgatccctctacaacttctcaggggaacagatggcctcctactttggctatgcagtggccgccacagacgtcaatggggacgggctggatgacttgctggtgggggcacccctgctcatggatcggacccctgacgggcggcctcaggaggtgggcagggtctacgtctacctgcagcacccagccggcatagagcccacgcccacccttaccctcactggccatgatgagtttggccgatttggcagctccttgacccccctgggggacctggaccaggatggctacaatgatgtggccatcggggctccctttggtggggagacccagcagggagtagtgtttgtatttcctgggggcccaggagggctgggctctaagccttcccaggttctgcagcccctgtgggcagccagccacaccccagacttctttggctctgcccttcgaggaggccgagacctggatggcaatggatatcctgatctgattgtggggtcctttggtgtggacaaggctgtggtatacaggggccgccccatcgtgtccgctagtgcctccctcaccatcttccccgccatgttcaacccagaggagcggagctgcagcttagaggggaaccctgtggcctgcatcaaccttagcttctgcctcaatgcttctggaaaacacgttgctgactccattggtttcacagtggaacttcagctggactggcagaagcagaagggaggggtacggcgggcactgttcctggcctccaggcaggcaaccctgacccagaccctgctcatccagaatggggctcgagaggattgcagagagatgaagatctacctcaggaacgagtcagaatttcgagacaaactctcgccgattcacatcgctctcaacttctccttggacccccaagccccagtggacagccacggcctcaggccagccctacattatcagagcaagagccggatagaggacaaggctcagatcttgctggactgtggagaagacaacatctgtgtgcctgacctgcagctggaagtgtttggggagcagaaccatgtgtacctgggtgacaagaatgccctgaacctcactttccatgcccagaatgtgggtgagggtggcgcctatgaggctgagcttcgggtcaccgcccctccagaggctgagtactcaggactcgtcagacacccagggaacttctccagcctgagctgtgactactttgccgtgaaccagagccgcctgctggtgtgtgacctgggcaaccccatgaaggcaggagccagtctgtggggtggccttcggtttacagtccctcatctccgggacactaagaaaaccatccagtttgacttccagatcctcagcaagaatctcaacaactcgcaaagcgacgtggtttcctttcggctctccgtggaggctcaggcccaggtcaccctgaacggtgtctccaagcctgaggcagtgctattcccagtaagcgactggcatccccgagaccagcctcagaaggaggaggacctgggacctgctgtccaccatgtctatgagctcatcaaccaaggccccagctccattagccagggtgtgctggaactcagctgtccccaggctctggaaggtcagcagctcctatatgtgaccagagttacgggactcaactgcaccaccaatcaccccattaacccaaagggcctggagttggatcccgagggttccctgcaccaccagcaaaaacgggaagctccaagccgcagctctgcttcctcgggacctcagatcctgaaatgcccggaggctgagtgtttcaggctgcgctgtgagctcgggcccctgcaccaacaagagagccaaagtctgcagttgcatttccgagtctgggccaagactttcttgcagcgggagcaccagccatttagcctgcagtgtgaggctgtgtacaaagccctgaagatgccctaccgaatcctgcctcggcagctgccccaaaaagagcgtcaggtggccacagctgtgcaatggaccaaggcagaaggcagctatggcgtcccactgtggatcatcatcctagccatcctgtttggcctcctgctcctaggtctactcatctacatcctctacaagcttggattcttcaaacgctccctcccatatggcaccgccatggaaaaagctcagctcaagcctccagccacctctgatgcctgagtcctcccaatttcagactcccattcctgaagaaccagtccccccaccctcattctactgaaaaggaggggtctgggtacttcttgaaggtgctgacggccagggagaagctcctctccccagcccagagacatacttgaagggccagagccaggggggtgaggagctggggatccctcccccccatgcactgtgaaggacccttgtttacacataccctcttcatggatgggggaactcagatccagggacagaggccccagcctccctgaagcctttgcattttggagagtttcctgaaacaacttggaaagataactaggaaatccattcacagttctttgggccagacatgccacaaggacttcctgtccagctccaacctgcaaagatctgtcctcagccttgccagagatccaaaagaagcccccagctaagaacctggaacttggggagttaagacctggcagctctggacagccccaccctggtgggccaacaaagaacactaactatgcatggtgccccaggaccagctcaggacagatgccacacaaggatagatgctggcccagggcccagagcccagctccaaggggaatcagaactcaaatggggccagatccagcctggggtctggagttgatctggaacccagactcagacattggcacctaatccaggcagatccaggactatatttgggcctgctccagacctgatcctggaggcccagttcaccctgatttaggagaagccaggaatttcccaggaccctgaaggggccatgatggcaacagatctggaacctcagcctggccagacacaggccctccctgttccccagagaaaggggagcccactgtcctgggcctgcagaatttgggttctgcctgccagctgcactgatgctgcccctcatctctctgcccaacccttccctcaccttggcaccagacacccaggacttatttaaactctgttgcaagtgcaataaatctgacccagtgcccccactgaccaaaaaaaaaaaaaaaaaa

SEQ ID NO: 25634 - DNA, 2759 bp, Homo Sapiens
ctttctcgggcgcaggaggttccgcaggcccaggccaggccaggggaggcagccgatccgtcgtcggggttgacagttaccatggcgccgcctctggccccgctccctccccgggacccaaacggggccggacccgagtggagggagccgggggctgtgagcttcgcggacgtggccgtgtacttctgccgggaggagtggggctgcttgcggccagcgcagagggccctgtaccgggacgtgatgcgggagacctacggccacctgagcgctctcggaatcggaggcaacaagccagctctcatctcctgggtggaggaggaggccgaactgtggggtccggctgcccaggatccggaggtggcgaaatgtcagacacaaacggacccagcagattccagaaacaagaaaaaggaaagacaaagggaagggacgggagccctggagaagcccgaccctgtggccgccgggtctcctgggctgaagtctccccaagccccctcggccgggcccccttatggttgggagcagctgtccaaggcaccgcaccggggacgcccctccctctgtgcccacccccctgtcccccgagctgaccagcgtcatggctgctacgtgtgcgggaagagctttgcctggcgctccacactggtggagcacgtctacagtcacactggcgagaagcccttccactgcactgactgcggcaagggcttcggccacgcttcctccctgagcaaacaccgggccatccatcgtggggagcggccccaccgctgtctggagtgtggccgggccttcacgcagcgctcggcgctgacttcgcacctgcgcgtccacaccggcgagaaaccctatggctgcgccgactgtggccgccgcttcagccagagctctgccctctaccagcaccggcgcgtgcacagcggcgagacccccttcccctgcccggactgtggccgcgccttcgcctacccctcggacctgcggcgccacgtgcgcacccacaccggcgagaagccctacccgtgcccggactgcgggcgctgcttccgccagagctcggagatggcagtccacaggcgcacccacagcggcgagaagccctacccctgcccgcagtgcggccgccgctttggccagaagtcagccgtggccaaacaccagtgggttcatcggcccggggccgggggccacaggggccgggtcgccgggcgtctgtctgtgaccctgacccctggccacggagacctggacccgcccgtgggcttccagctgtacccggagatattccaggagtgtgggtgacggccttaaaagtgactatctagacattacgggaggcccgagatgggctcaggggcccgaacctctgcggcggcctgcagggaggtcccagaatctagggcaagagctggccctggggtgcggacagtctgatcttgggcccttagcagcctcctctgccagcaccttgctccccactgcccagggctctccaaggccccctctactgaggcagggctgagttgagaacccccagacctacataaggggaaccaaaagctgtttctcagcccagaggtgctaagaggactgaggtagaggagaaccttgttttacccattgtctttttaaattttttatcattatttttattcttgtgaccctcccagaacacaatactcattgtctttttatttatttatttatttatttctgagacagcttcctgctctgtcacccaggctggagtgcagtggtgtgaacagggctaactgcagcctcaacctgcagtgctcaaggaatcctctcccatcagccttccaaatatctgagactacaggcgggcaacactacggccagctaatttttaaattttacatagagatgaggttctcactgttgtccaggctggtctcaaactccttggctgaagtgatcctgtcgtctcggcttccgcaagtgctgggattacaggcgtgagctaccaccatgcctggcttccattgtctttgtgtgtgtgtgtgtgtgatggggttttgctcttgttgcccaggctggagtgcaatagcgcaatctcagctcactgcaacctctgcctccagagttcaagcaattctccttcctcagcctcccaagtagctgggactacaggcacccaccacctccattgtctttttactgcccaagttaaaatcctgtgactgtgtactggatctggcctgcggttgtcatatttattgatctgagtccaggcagtgtttttaagtgatatgagttagtagtgaaaattgaaaaggatattttacaaccaaatacaggttttctggtgtcttttgaaaaatccaaagatttggcaactcgacctaggctccgacaaaaccacagttgttgggagctgagccggagccagaactcacaattcaccgtggcccggccacccatccccaccactcccgtgggctcctgaccaagcaccacgtgccattcatcatggcttgcttttagtgtttttggtgtttatcttaaagtacagcgaagaagaaagggaagtatttcttagacccatgtctctgtccaaataggcctttccatctggcatttcccgctcatttatatgacttgctgagttcctatggtcatttgagtttgcaaacagtggtctgtagcactcaggttttctggagttggagagaaagggtggcaagagagaagtaaaagttggttttattttaaaaaaaaaaaaaaaaaaaaaa

SEQ ID NO: 25635 - DNA, 3401 bp, Homo Sapiens
ggtacgggaagacagctttgggatgtcggaagatcctagaggtcccaaggtagctgacttgcgaagctgaggctccagccgagggctccaggcctctgaccggcccagcagtgagcgcggctgcccgacgcttcagggccgggagcagggagcgtgagtcgccatggcgacgccggcgggtctggagcgctgggttcaggacgagctgcactcggtgttggggctgagcgagcggcacgtcgcccagtttctgatcggtaccgcacagcgctgcacctctgccgaggagttcgtgcagcgcctacgagacactgataccttggatctcagtgggccggcccgggacttcgccctgagactctggaacaaggtaccacgaaaggcagtggtagaaaagccagctcgggcagcagagcgagaggcccgggccctgctggagaagaaccgatcttataggttactggaagacagtgaagagagcagtgaggagactgtgagtagggctggaagcagcctccagaagaaacgtaaaaagcggaaacacctcaggaagaagcgtgaggaagaagaggaggaagaggcttctgagaaagggaagaagaaaacaggggggagtaaacagcagacagagaagccagagtcggaagatgagtgggaacggacagagcgtgaacgccttcaggacctggaggagcgtgatgcctttgctgagcgggttcgacagcgggacaaggatcggactcgaaatgtcctggaacggtcagacaagaaggcttatgaagaggctcagaagcgcctcaagatggccgaggaagaccggaaggccatggtccctgagctgcggaagaaatctcgccgagagtacctggctaagcgggagcgagagaagcttgaggacctggaggcggagctggctgatgaggagttcctttttggggacgtggagctgagccggcacgagcggcaggagctcaaatataagcggcgagtgcgggatctcgcccgggagtaccgggcagctggggagcaggagaagctggaggccaccaatcgctaccacatgcccaaggaaacccgaggacagccagcccgagctgtggatctagtggaggaggaatcaggagcccctggggaggagcagcggcgctgggaggaggcgcggcttggggcagcgtccctgaagtttggggcccgagatgctgcctctcaggagcccaagtatcaactggtgctggaggaggaggagaccattgagtttgtccgggccactcagctccagggtgatgaggagccgtcagctccacccacttcaactcaggcccagcagaaagagtccatccaggccgtccgccgcagcctcccggtgttcccatttcgagaggagctcctggctgctattgcaaatcaccaagtcctcatcattgaaggcgagacaggctcagggaagaccacccagatcccgcagtatctctttgaggagggttatacaaacaagggtatgaagattgcctgcacccaaccccggagagtggctgccatgagtgtggccgcccgagtggcccgggagatgggtgtgaagcttgggaatgaggttggctacagcatccgctttgaggactgcacatcagagcgaactgtcctccgctacatgacagatgggatgcttctccgggagttcctctctgagcctgacctggcgagttacagcgtggtgatggtggatgaggcacacgaaaggaccctacacacagacattctctttggattgatcaaggatgttgctcgcttccgacctgagctcaaggtcctggtggcttcagccacaatggacactgcccgtttttccaccttctttgatgacgcccctgtgtttcgaatccccggacgcaggtttcctgtggacatcttctacaccaaggctccagaggctgactacttggaagcttgtgtagtatctgtgttgcagatccatgtgacccagccccctggggatatcctggtgttcctgacaggacaggaggagattgaggctgcctgtgagatgctccaggatcgctgccgccgcctgggctccaaaatccgggagctcctggtgctgcccatttatgccaatctgccctctgacatgcaggcccgtatcttccagcccacaccacctggggcacgaaaggtggttgtggcaacgaacattgctgagacatcactcaccattgagggcatcatttatgtgctggatccagggttctgtaagcagaagagctacaacccccgcacaggcatggaatcgctcactgtcacaccctgcagcaaggcctcagccaatcagcgagctggcagggcaggtcgggtggctgcagggaagtgcttccgcctgtataccgcctgggcctatcagcacgagcttgaggaaaccacagtgcctgagatccagaggaccagcttgggcaatgtcgtgttgctgctcaagagcttagggatccatgacctaatgcactttgatttcctggaccctccaccatatgagacactgctgctggctttggagcagctgtatgctctgggagccctcaaccaccttggggagctcaccacgtctggtcgaaagatggcagagctgccggtggaccccatgctgtccaaaatgatcttagcctctgagaagtacagctgttcagaggagatcctgacagtggctgccatgctctctgtcaacaactccatcttctaccgaccaaaggacaaggtcgtccatgctgacaatgcccgtgtcaacttctttctccctggcggtgaccacctggttctgctaaatgtttacacacagtgggctgagagtggttactcttcccagtggtgctatgagaactttgtacagttcagatcgatgcgccgagcccgggatgtgcgggaacagctggaagggctcttggaacgtgtggaagttggtctcagttcctgccagggggactatatccgtgtacgcaaggccatcactgctggttacttttaccacacggcacggttgactcggagtggctaccgcacagtgaaacagcagcagacagtcttcattcatcccaactcctccctctttgagcaacagccacgctggctgctctaccacgaacttgtcttgaccaccaaagagttcatgagacaggtactggagattgagagcagttggcttctggaggtggctccccattattataaggccaaggagctagaagatccccatgctaagaaaatgcccaaaaaaaaaataggcaaaacacgagaagagctagggtaagagaaggacgtaaacagaacctgacaccagctccttttccttctatacattatttaatacctattaaataaaattatttttggaaaaaaaaaaaaaaaaaaaaaaaaaa

SEQ ID NO: 25636 - DNA, 2941 bp, Homo Sapiens
cggcagagaggatatcttgggcgggggatgtgagcgctgagcccttggcagaagtcaatgtgattttaatttgaagcaaaactgaaatgggttcttcttcctcattctattcatgttgctttttgatggccatggcataaggaactctatcccaggaatacagctttgcattagcaccgaacaagatttgtgatgaaatggagcctggaacaaactcttttcgggtagaatttcctgatttttccagcaccattctacagaaactgaaccagcagcgccagcaaggacaattatgtgacgtctccattgttgtccaaggccacattttccgggcacacaaagccgttcttgctgccagttcaccctacttttgtgaccaggtactcctgaaaaacagcaggagaattgttttgcctgatgtgatgaacccaagagtgtttgagaacattctcctatctagttatacaggacgtctagtaatgcccgctccagaaattgttagttacttgacagcggcaagcttcctccagatgtggcatgtggtagacaaatgcactgaagttttagagggaaaccctacagtcctttgtcagaagctaaatcatggcagtgaccaccagtcaccaagcagcagtagttataatggcctggtagagagctttgagctgggctctgggggtcatactgattttcccaaagcccaagaactgagagatggtgaaaatgaagaggagagcaccaaagacgagctgtcatcccagctcaccgagcacgaatacctgcccagcaactcgtccacagagcatgaccgcctgagcacggaaatggcaagccaggatggggaggagggcgccagcgacagcgccgagttccactacacccggcccatgtacagcaagcccagcatcatggctcacaaacgctggatccacgtgaagcccgagcgcttagaacaggcttgcgagggcatggatgtgcacgcgacctacgacgagcaccaggtcacagagtccatcaacaccgtgcagacagagcacacggtgcagccttcgggagtggaggaggacttccacatcggggagaagaaagtggaagctgagtttgatgaacaggctgatgaaagcaattatgatgagcaggtggatttctatggctcttccatggaagagttttccggagagaggtcagatgggaatctaattgggcacagacaggaggctgccctcgcagcaggttacagtgagaatattgaaatggtaacagggattaaagaagaagcttcccacttaggattctcagccaccgacaagctgtatccttgtcagtgtgggaaaagtttcactcacaagagtcagagagatcggcacatgagcatgcacctcggtcttcggccttacggctgtggggtctgcggtaagaaattcaaaatgaagcaccatctcgtgggccacatgaaaattcacacaggcataaagccgtatgagtgtaatatctgtgcaaagaggtttatgtggagggacagtttccaccggcatgtgacttcttgtactaagtcctacgaagctgcaaaggctgagcagaatacaactgaggctaactaaaaataggatctggcccttgagtggcatgcacaaaaataaactatggtaattaatgcaaatctgggcacagatgatgcgtgctacttgctattatgagagaagcttaaaaaaaaaaaggaagatatttctgaaagaccagctaagtaggccaattaaaaaaatctaattcctcaaatttgtgtgttccagtcctggcctggaatgggtaatggggtgagttaacccaccgcccagctggcaagggaaaccttctgactggttgtgatcgaaacaggtggacagagacacctgcacttggaactggactccacccaccagttccattttgggtggcagcagctttggatcactcattattacaaggtcatgctgaaattttattttgctcttgctatagatacttaggtaatgtggatttgttttggtagctatttcactgaaggaagtgctacttatataaaagctagaaataatgtgattcctaggatgagaaattggttaacagagctctgttgtctggttttagtctttctaaaggatattttaactaaaactatggagatgctaagagagtgactttctaaatatgaaacagataatttacggtacaaggctgacatagtgcccttgtcagtttctgtaagatgccactactgtcacaaggtgtttcagactcttgataaggcagtgttttgtattttagttctaacattgagtttggacaattttatctaattgtaattctctagggtgccagagataggtatttctcattggtttgctttcccaaatcctgtttggttaattgtagcctccatacagtggggtcttctctgtggctggtagacaccaagctgctgtgactgaccacggtaccacgggctgccacagcccctgctctgtcttagattatggtgctttacaaagagagtggtccatgaccacacttagtgagaaggagccacaagttgtggctgagagttccctgtgaacttgagtagttcatagagtgctaaggtgacactccaccaaccagagtgagagggcagataggcaggattctatgagtggttatacttaagggggacaaaactgcccaagaagaatcttgagaatacactctttcaaggtgggggagatactctttagagggtacactgagctaatactaccagttctttatgagcactggaatgtgtttgtaaaaggagtcctaagtttagcaaggtagtctacagaaccatgctcccacattatagataaagctgcttaaacttaaaagtccacaaagctacgccgaccaaaaaaaaaaaaaaaaaaaaaaaaaaaaaaaaaaaaaa

SEQ ID NO: 25637 - DNA, 2264 bp, Homo Sapiens
gctgccgctgctttggctgctgcgtcatacgccccagagccgccgggacggaggggctgggcctggggaccccccggcctccgcctgcacgcccccccacgcccggacgtgccctctccgcgcgggggactcgcctaggtctcctacgtctgcccctgcccggctcccggcggccccagctgtcaccggcccccccaggatgcaatggcgcagcccccccggctgagccgctctggtgcctcctcactttgggacccagcttctcctgctcccacctctggccccaggcctcggctttgggagggtcaagatgtgctggccagatggactgatgggctgctatacttgggtaccatcaaaaaggtggacagtgctagggaggtgtgtctggtccagtttgaggatgattcgcagtttctggttctatggaaagacattagccctgctgccctccctggagaggaactcctctgttgtgtctgtcgctctgagactgtggtccctgggaaccggctggtcagctgtgagaagtgtcgccatgcttatcaccaggactgccatgttcccagggctccagcccctggagagggagagggcacatcctgggtatgccgccagtgtgtctttgcgatcgccaccaagaggggaggtgccctgaagaagggcccctatgcccgggccatgctgggtatgaagctttctctgccatatggactgaaggggctggactgggatgctggacatctgagcaaccgacagcagagttactgttactgtggtggccctggggagtggaacctgaaaatgctgcagtgccggagctgcctgcagtggttccatgaggcctgcacccagtgtctgagcaagcccctcctctatggggacaggttctatgaatttgaatgctgtgtgtgtcgcgggggccctgagaaagtccggagactacagcttcgctgggtggatgtggcccatcttgtcctgtatcacctcagtgtttgctgtaagaagaaatactttgattttgatcgtgagatcctccccttcacttctgagaattgggacagtttgctcctgggggagctttcagacacccccaaaggagaacgttcttccaagctcctctctgctcttaacagccacaaggaccgtttcatttcagggagagagattaagaagaggaaatgtttgtttggtctccatgctcggatgcctccccctgtggagccccctactggagatggagcactcaccagcttcccttcagggcagggccctgggggaggggtctcacgtcccctggggaagcgccggaggccggagccagagcccctgaggaggaggcagaaggggaaagtggaggagctggggccaccctcagcagtgcgcaatcagcccgagccccaggagcagagggagcgggctcatctgcagagggcactgcaggcctcagtgtctccaccatcccccagccctaaccagagttaccagggcagcagcggctacaacttccggcccacagatgcccgctgcctgcccagcagccccatccggatgtttgcttccttccacccttctgccagcaccgcagggacctctggggacagtggacccccagacaggtcacccctggaacttcacattggtttccccacagacatccctaaaagtgccccccactcgatgactgcctcatcttcctcagtttcatccccatccccaggtcttcctagacgctcagcacccccttctcccctgtgccgtagtttgtctcctgggactgggggaggagtccgaggtggggttggttacctgtcccgaggggaccctgtccgggtccttgctcggagagtacggcctgatggctctgtgcagtacctggttgagtggggaggagggggcatcttctgaacagcctgcctctgcccagctccccattcacacacaccggcactttcataccctgacctctgacctcacctacagctgggatgtacctggagagatagggggtagttctccctactgcccaggctggaatccaagagtggggagtggggaagaggccctcttctctaccctccttcatgattcctgacccctcccatccttcccatttcctttgatgttattttgttacagctttttaaatattttttaaaattatttaacccctgggggcagagactgaggagggaggatgataagggatcccggactctgtatgattgaaataaagagaaataaacaaaaaaaaaaaaaaaaaa

SEQ ID NO: 25638 - DNA, 2309 bp, Homo Sapiens
gggccgcccggatcgccgccgccgccgccgcacgtacgtggcatgcctggatgtccctgccctggctgtggcatggcgggcccaaggctcctcttcctcactgcccttgccctggagctcttgggaagggctgggggttcccagccggccctccggagccgggggactgcgacggcctgtcgcctggacaacaaggaaagcgagtcctggggggctctgctgagcggagagcggctggacacctggatctgctccctcctgggttccctcatggtggggctcagtggggtcttcccgttgcttgtcattcccctagagatggggaccatgctgcgctcagaagctggggcctggcgcctgaagcagctgctcagcttcgccctggggggactcttgggcaatgtgtttctgcatctgctgcccgaagcctgggcctacacgtgcagcgccagccctggtggtgaggggcagagcctgcagcagcagcaacagctggggctgtgggtcattgctggcatcctgaccttcctggcgttggagaagatgttcctggacagcaaggaggaggggaccagccaggcccccaacaaagaccccactgctgctgccgccgcactcaatggaggccactgtctggcccagccggctgcagagcccggcctcggtgccgtggtccggagcatcaaagtcagcggctacctcaacctgctggccaacaccatcgataacttcacccacgggctggctgtggctgccagcttccttgtgagcaagaagatcgggctcctgacaaccatggccatcctcctgcatgagatcccccatgaggtgggcgactttgccatcctgctccgggccggctttgaccgatggagcgcagccaagctgcaactctcaacagcgctggggggcctactgggcgctggcttcgccatctgtacccagtcccccaagggagtagttgggtgttctcccgctgcagaggagacggcagcctgggtcctgcccttcacctctggcggctttctctacatcgccttggtgaacgtgctccctgacctcttggaagaagaggacccgtggcgctccctgcagcagctgcttctgctctgtgcgggcatcgtggtaatggtgctgttctcgctcttcgtggattaactttccctgatgccgacgcccctgccccctgcagcaataagatgctcggattcactctgtgaccgcatatgtgagaggcagagagggcgagtggctgcgagagagaatgagcctcccgccagacaggagggaggtgcgtgtggatgtatgtggtgtgcacatgtggccagaggtgtgtgcgcgagaccgacactgtgatccctgtgctgggtccggggcccagtgtagcgcctgtccccagccatgctgtggttacctctccttgccgccctgtcaccttcacctcctggagtaagcagcgaggaagagcagcactggtcccaagcagaggccttgccctgctgggaccccgggagtgagagcagcccaaggatcccagggtgcagggaactccagagctgcccacctcccactgccccctcagcacacacacagtccccaggcggcctaggggccaaggctggggcggctttggtcccttttcctggcccttccttccccacttctaagccaaagaaaggagaggcaggtgctcctgtaccccagccccactcagcactgacagtccccagctcctagtagtgagctgggaggcgcttcctaagaccctttcctcagggctgccctgggagctcattcctggccaacacgccctggcagcaccagcagctcttgccacctccagctgccaaacagcagcctgccgggcagggagcagccccaggccagagaggcctcccggtccagctcagggatgctcctgccagcacaggggccagggactcctggagcaggcacatagtgagcccgggcagccctgcccagctcaggcccctttccttccccattgaggttggggtaggtgggggcggtgagggctccacgttgtcagcgctcaggaatgtgctccggcagagtgctgaagccataatccccaaccatttcccttggctgacgcccaggtactcagctggcccactccacagccaggcctggccctgcccttcaccgtggatgttttcagaagtggccatcgagaggtctggatggttttatagcaactttgctgtgattccgtttgtatctgtaaatatttgttctatagataagatacaaataaatattatccacataaaaaaaaaaaaaaaaaa

SEQ ID NO: 25639 - DNA, 1909 bp, Homo Sapiens
ctgggcttcactgatagctactctcagaaggctttctgtggcatctacagcaaagatggtcaaatattcatgtctgcttgccaagaccagacaatccgactctatgactgccgatatggccgtttccgtaaattcaagagcatcaaggcccgcgacgtaggctggagcgtcttggatgtggccttcacccctgatgggaaccacttcctctactctagctggtctgattacattcatatctgcaatatctatggtgagggagatacacacactgccctggatctcaggccagatgagcgtcgctttgctgtcttctccattgctgtctcctcagatggacgagaagtactaggaggggccaatgatggctgcctgtatgtctttgaccgagaacagaaccggcgcacccttcagattgagtcccatgaggatgatgtgaatgcagtggcctttgctgatataagctcccaaatcctgttctctgggggagatgatgccaaatcctgcaaagtgtgggatcgacgcaccatgcgggaggatgaccccaagcctgtgggtgcactggctggacaccaggatggcatcaccttcattgacagcaagggtgatgcccggtatctgatctccaactctaaagaccagaccatcaaactctgggatatccgacgcttttccagccgggaaggcatggaagcttcacgccaggctgccacacagcaaaactgggactatcggtggcagcaagtgcccaaaaaagcctggcggaagctgaagctcccaggggacagctccttgatgacctaccggggccacggagtgctgcacaccctcatccgctgccggttctcccccattcatagcactggccagcagttcatctacagtggctgctccactggcaaagtggttgtgtacgaccttctaagtggccacattgtgaagaagctgaccaaccacaaggcctgtgtgcgtgacgtcagttggcacccctttgaagagaagattgtcagcagttcgtgggacgggaacctgcgtctgtggcagtaccgccaggctgagtacttccaggatgacatgccagaatctgaggaatgtgccagcgcccctgccccagtgccccaatcctctacacccttttcctcaccccagtagatccaacctccagccccatatagggtgaacctcttgataagctctctgcctcctcctccctttctcccttgtggggaatgtttggaggaatcactggcatttgatggggaataacataagcctgggctctgagcctcagctgagccctggaagattctccccatggggcagagtggtctccttacgtgctcacacccagtcagcttgggtccctatctctggccagagtttggcaggactgccattatctggggtgtggcctctgccagcaagagaagtgtcctgggtgtttttaatcatgtttgaatgttaggggttggatcctagagtagatgcctgaggccacatctgaacagacctgtcagccaggcctgccaggtcttcacgttgaggattcaactggccaatcacaggacaggtgtcctggcctttcttcctgaggtctctaggggaggggcatgggtaagggtgtttcctcagcaccctcctggggtggggattatgtctgctgtcatgtctgggtctttagggtaggacaggctgtggtatgagaggcaggagtctccacaaggcttcatgtggccccttatagggcaggccctgccctctgggaaggtcccttcatgctggaggcacacagctttaaggaagtaggttgaagtaggactccttcgtcctctcactggctttggctccctcaataaactgtgtgggaacctgaaaaaaaaaaaaaaaaaaaaaaaaaaaaaaaaaaaaa

SEQ ID NO: 25640 - DNA, 497 bp, Homo Sapiens
gaccgaattgggaccgctggcttataagcgatcatgtttctccagtattacctcaacgagcagggagatcgagtctatacgctgaagaaatttgacccgatgggacaacagacctgctcagcccatcctgctcggttctccccagatgacaaatactctcgacaccgaatcaccatcaagaaacgcttcaaggtgctcatgacccagcaaccgcgccctgtcctctgagggtcccttaaactgatgtcttttctgccacctgttacccctcggagactccgtaaccaaactcttcggactgtgagccctgatgcctttttgccagccatactctttggcatccagtctctcgtggcgattgattatgcttgtgtgaggcaatcatggtggcatcacccataaagggaacacatttgacttttttttctcatattttaaattactacaagattattaaagataaaatgatttgaaaaactaaaaaaaaaaaaaaaaaa

SEQ ID NO: 25641 - DNA, 569 bp, Homo Sapiens
ggagcccatcatggcgacgccccctaagcggcgggcggtggaggccacgggggagaaagtgctgcgctacgagaccttcatcagtgacgtgctgcagcgggacttgcgaaaggtgctggaccatcgagacaaggtatatgagcagctggccaaataccttcaactgagaaatgtcattgagcgactccaggaagctaagcactcggagttatatatgcaggtggatttgggctgtaacttcttcgttgacacagtggtcccagatacttcacgcatctatgtggccctgggatatggttttttcctggagttgacactggcagaagctctcaagttcattgatcgtaagagctctctcctcacagagctcagcaacagcctcaccaaggactccatgaatatcaaagcccatatccacatgttgctagaggggcttagagaactacaaggcctgcagaatttcccagagaagcctcaccattgacttcttccccccatcctcagacattaaagagcctgaatgcctttgaaaaaaaaaaaaaaaaaaaaaaaaaaaaaaaaaaaaaaaa

SEQ ID NO: 25642 - DNA, 1589 bp, Homo Sapiens
caccttcggagacggcttctggaggaacggcttggccagaagacagggtgtgagtgagacagtggggcacaggttgggtttgccaaacgcctaattaccaggccaggaagcatgccaacaaagccacacgggtgtcctagccagcttcccttcacctggtgtcttgagtagggcgtctcctgtaattactgccttgccattctgcccctggacccttctctccggaccagggaggcgtccctccctaggagccacacattatactccaagtccctgccgggctccgcctttcccccaccctggctctcagggtgacgccacccacagagatttaatgagcgtgggcctggaccttccccagatgctgccaggcagcccctccccaagcctcaaagaagcatttgctgaggatggagaggcaggggagggaggcgggaggccgtcactggagtggcgtctgcagcagctgctgccccagcacccgctcagcctgtcctggctgctcacctccccgcagggcaccgggcctttcctgccctctgtggtcatctgccacctgctggatcaagtgctttctcttttacactcccctgtccccaccccagtgcactcttctggcccaggcagcaagcaagctgtgaacagctggcctgagctgtcgctgtggcttgtggctcatgcgccattcctggttgtctgttgaatctttctggctgctggaattggagataggatgttttgcttcccactgcaggagagctgccccctttcacggggttggggaagggtccccctggcctccagcaggagcacagctcagcagggtccctgctgcccacccctctgagccttttctccccagggtatggctcctgctgagtttcttgtccagcagggccttgacaggaatccagggagtagctcctggccagaaccagcctctgcggggcttgtgctctgcaaagactctgctgctggggattcagctctagaggtcacagtatcctcgtttgaaagataattaagatcccccgtggagaaagcagtgacacattcacacagctgttccctcgcatgttatttcatgaacatgacctgttttcgtgcactagacacacagagtggaacagccgtatgcttaaagtacatgggccagtgggactggaagtgacctgtacaagtgatgcagaaaggagggtttcaaagaaaaaggattttgtttaaaatactttaaaaatgttatttcctgcatcccttggctgtgatgcccctctcccgatttcccaggggctctgggagggacccttctaagaagattgggcagttgggtttctggcttgagatgaatccaagcagcagaatgagccaggagtagcaggagatgggcaaagaaaactggggtgcactcagctctcacaggggtaatcatctcaagtggtatttgtagccaagtgggagctattttcttttttgtgcatatagatatttcttaaatgaaaaaaaaaaaaaaaaaaaaaaaaaaaaaaaaaaaaaaaaaaaaaaaaaaaaaaaaaaaaaaaaaaaaaaaaaaaaaaaaaaaaaaaaaaaaa

SEQ ID NO: 25643 - DNA, 2937 bp, Homo Sapiens
gttagaagagacccgagaagccttggcaggacgagcatatgcagctgaacagatggaaggatttgaactgcagaccaagcagctgacccgtgaggtggaggagctgaaaagtgaactgcaggccattcgagatgagaagaatcagccagatccccggctgcaagaacttcaggaagaggctgcccgccttaagagccatttccaggctcagttacagcaggaaatgagaaagacagctcttgcagaggatcaactccgtcagcaatctcaggtagaagaacagagggtggcagccctggagaatcaaatatccgaggtgtctgagctgctaggcacctacgagaaagccaagcagaaggaccagctggccattcagaagctgaaggagcgcattctgcagctggacctggagaacaagacactggctctagcagcctccagcaggtcccctttagacagccatggagaggagtccagtctggatgtcaatgtcctgaaagataagatggagaagctgaagaggctgctgcaggttgcggccaggaaaagccaggtgaccctggatgtggagaagctctgtgacctggagataatgcccagctcggaggctgctgatggggagaaggctactgcactctattaccaacaggagctgaaacagctgaaggaagagtttgagaggtacaagatgagagcccaggttgtcctcaaaagcaagaataccaaagatggtaacctgggaaaggagctggaggcagcccaggaacagcttgcagagctgaaggagaagtatatttccctgcggctctcctgcgaggagctggagcaccaacaccagcaggaggctgatgactggaagcaggagctggcccggctgcagcagctccaccggcaggagctggagcggtgccagctggacttcagggaccgcacactgaaactggaggaggagctgcacaagcagcgggatcgtgccctagctgtgctcaccgagaaggacttggaactggagcaactgcgttctgtggccttggcctctgggctgccaggacgcagaagtcctgtgggtggtggcggtcctggggacccagctgacacatcatcctctgatagcctgacccaagcattacaacttgcagcggccaatgagcccactttctttctgtacgctgagcaactggcccgcaaggaggtggagatcacatcactgaggaagcagaagcacaggctggaggtcgaggtgcatcagctgcaggatcggctgctggaggagggcgaacggcatcgtgaggaggttgcagccctgcagagccacatcgaaaagaacatcagggaccagagcagggagggagccaatctggagtacctcaaaaacatcatctaccgcttcctgaccttacctgactccctgggccgccagcagactctcacagccatactgactatcttgcacttcagtccagaggagaaacaagtgataatgcgactcccaaccagtgccagctggtggccttctggcaagagatgatgccattttcatgaattcctggaatttctgtgcctcttttatgtgggaaagggcaggctctggtttctgctgcctcttctcttacattgtcatttatttcttcactgtgttgagctgggaggagtcttcaatgtgggaagggattttctgccaaatgccattaatgctgctttatccttaggccctagagatactgaaagtcctggggcagtatcttctgatggtgtgcatgtgaggagaagatgaggttaggactgagaagtgcagaagttggaacagtggtaaggctgttttaaaataagatgttttgttttaataatatgctcctggcacaaagctaggagtaaatgtgactccaaagggagttcagttaatctctgaaatgcacaaaacctagctattttctccctctcatcacagtctgagtctggtccattgctaccccaattctctggggacataaaaccaggctggaaagggaccaggaagtttgaaatagtgacatatcatccactagtcccaagggctaaggaatagtgagtttattctggaaggaactgggaagcttagtctaattagtgcctggggatgacctatgcaatcacaccgcttatgaccatcctagagagggccctgagcaccagcttgatcttagggatttccaaagtaacctgctttttgcctggatagggttaaaatagacctttcttgcctatccttgccttaacctatctgcctgaggttggcctgagattgtgagtcaacgactttgctatcttttcctcagtgttgaactttcattaagaaataaagtcctagcttcttacagagaggggtccaaatggtgaatgctcatcctgcctggattcaaggaattagctcagagattggcccctagcttttctgcctttgtagggacagcaaaaggggaaaatttgctgcagaaaattccaaaagattgctgtagctctcacagggaagtggtaaagatcagctaaacctgggttggggtgctttctgcccagtgggtcttggcataagtagattaatcctgctcttttaagaaaaggcaacttattcaggcagtctggaaagggggttctcagaaaactcagtttctttattccttcttttctcccaactactgttactggttatagaggtctttggactctaaagaccaatgtttggccactaactggactaatatgtatctttctgtgatttcatcatagaggtctgttttgtgagggtttggggtgcagaaaactttgattaaatcttaatgggaggctgggtgacctggattatctacagtgagcagacttaaatggaacagaagtttatgtgtccaaatgatggaatcattaaacctgagtgacttgaaaaaaaaaaaaaaaaaaaaaaaa

SEQ ID NO: 25644 - DNA, 2372 bp, Homo Sapiens
ggctcactctgcaaccaaggcacgtgcattccggtcatcccacgcggggagcgcgcgcaaggcccgcccagcccccacatgccagccccaccctccagtcggtccggacgccgacgcctttttgaccctcgctgtgcccggccctcctcatctggcctgcccagggcttggtgctggcggggtccagctgctccaatccctcctcctctgctctgccctgccctgccctggcctgccccggcgccctccctcagcccgggtatcaggcgagaggcggagctggcccggcgcgccccgcccccgctgtagaaagggccgggcgagtgttactcgcggtcatcccggcctgggccttttatctcggtgctgccgggggaggcgggaggaggagacaccaggggtggccctgagcgccggcgacacctttcctggactataaattgagcacctgggatgggtagggggccaacgcagtcaccgccgtccgcagtcacagtccagccactgaccgcagcagcgcccttgcgtagcagccgcttgcagcgagaacactgaattgccaacgagcaggagagtctcaaggcgcaagaggaggccagggctcgacccacagagcaccctcagccatcgcgagtttccgggcgccaaagccaggagaagccgcccatcccgcagggccggtctgccagcgagacgagagttggcgagggcggaggagtgccgggaatcccgccacaccggctatagccaggcccccagcgcgggccttggagagcgcgtgaaggcgggcatccccttgacccggccgaccatccccgtgcccctgcgtccctgcgctccaacgtccgcgcggccaccatgatgcaaatctgcgacacctacaaccagaagcactcgctctttaacgccatgaatcgcttcattggcgccgtgaacaacatggaccagacggtgatggtgcccagcttgctgcgcgacgtgcccctggctgaccccgggttagacaacgatgttggcgtggaggtaggcggcagtggcggctgcctggaggagcgcacgcccccagtccccgactcgggaagcgccaatggcagctttttcgcgccctctcgggacatgtacagccactacgtgcttctcaagtccatccgcaacgacatcgagtggggggtcctgcaccagccgcctccaccggctgggagcgaggagggcagtgcctggaagtccaaggacatcctggtggacctgggccacttggagggtgcggacgccggcgaagaagacctggaacagcagttccactaccacctgcgcgggctgcacactgtgctctcgaaactcacgcgcaaagccaacatcctcactaacagatacaagcaggagatcggcttcggcaattggggccactgaggcgtggcgcccgtggctgcccagcaccttcttcgacccatctcaccctctctcattcctcaaagcttttttttttttcctggctggggggcgggaagggcagactgcaaactggggggctgcgtacgtgcaggaggcgcggtggggctgcgtggaggagggggccacgtgtgagagagaagaaaatggtggccggagatgggagggcccaaggaacctcctgggagggggcctgcattctatgttggtgggaatgggactgggctgacgccctgcattcagcctgtgcctttcctggggtttcttttctgttcttttcggaggagagggcccgagaaggggccataccagggcgcggcgctgggttgccacacttgggaaagcagcccggagctgggtgctggggaaggcggggcgcgtagcctcccgccgccctgcggttgggccggtggaggcccaggcgttgctaggattgcatcagttttcctgtttgcactatttctttttgtaacattggccctgtgtgaagtatttcgaatctcctccttgctctgaaacttcagcgattccattgtgataagcgcacaaacagcactgtctgtcggtaatcggtactactttattaatgattttctgttacactgtatagtagtcctatggcacccccaccccatccctttcgtgccactcccgtccccacccccaccccagtgtgtataagctggcatttcgccagcttgtacgtagcttgccactcagtgaaaataataacattattatgagaaagtggacttaaccgaaatggaaccaactgacattctatcgtgttgtacatagaatgatgaagggttccactgttgttgtatgtcttaaatttatttaaaactttttttaatccagatgtagactatattctaaaaaataaaaaagcaaatgtgtcaactaaaaaaaaaaaaaaaaaa

SEQ ID NO: 25645 - DNA, 2096 bp, Homo Sapiens
gagcggcgtcctgcaggccttgggcagcgtgccagggcttcgaccggcggaggcaggcgagttcaccagacgggcgttcgccaatgggaagctgaacctgaccgaagtggaggggctggcggaccttatccacgcggaaacagaggcgcagcggcggcaggccctcaggcagctggacggagagctgggccacctctgccgtggctgggccgagaccctcaccaaagctctggcccacgtggaggcctatatcgatttcggcgaggatgacaacctggaggagggggtcctggagcaagccgacatcgaagtacgggcactgcaggtggccctgggtgcacatctacgagatgccaggcgcgggcagaggctccgctcaggggcgcacgtagtggtcactggaccccccaatgcgggcaagagcagcctagtgaacctgctcagtcggaagcctgtgtccatcgtgtccccggagccagggaccacccgtgacgtgctggagaccccagtcgacctggccggatttcctgtgctgctgagcgacacggctgggttgcgggagggcgtggggcccgtggagcaggagggcgtgcggcgcgcccgggagagttgcaacttcctggccaccgtcgtagcctctgtgggagcccagagccccagtgacagcagccagcgcctcctcctggtgctgaacaagtcggacctgctgtccccggagggcccaggtcccggtcctgacctgcccccgcacctgctgctgtcctgtctgacgggagaggggctggacggcctcctggaggcgctgaggaaggagctagctgcagtgtgtggggacccgtccacagatcccccgctgctgacccgagcaaggcaccagcaccacctccagggttgcctggatgccctcggccactacaagcagtcaaaagacctggccctggcggcagaggcgctgcgggtggcccggggtcacctgacccggctcacaggtggagggggtaccgaggagatcctggacatcatcttccaggacttctgtgtgggcaagtgacgggatccagggaagtcgcacccaagctgcgtggagacccaggagcctcgggggatctggaaacagtttaggccaattgggattctcattcgcctgggaaagaacttgattctcaaatagtgaagcaacacagctgagaggtagtgagatccctgcagggactccctggagattcaggccctggaatggggctgaatggaggtcccgttcgacccttgatgctggggcatccgggttgggatggagataggaggatctcagtatatttgtttcgtagttttttatttattttgcaaataccaaaggaatgtaaaaaaaactcaggtgatctagaagtgtttattttcttcccttcccttcccttccctttccttttccctttccctttccccttccccttccccttccccttccccttcccctacccttccctcctctgtctattgcccaggctggagtgcagtggtgcgaccttggctcactgcaacctccatctccggggctcaagcgcttctcctgcctcagcctcctgagtagctgggattacaggcatgtgccagcatgcccggctaatttttttctttttttgagacagagtctcgctctgtcacccaggctggagttcagtggtgcgacctcggcttactgcaacctccacctcccgggttcaagtgattctcctgcctcagcctcttgagtagctgggactacaggcgcacaccaccacgccaggctaatttttgtatttttagtagagacaaggtttcaccatgttgaccaggctggtcttgaactccttgacctcaggtaatctgcctaccttggcctcccaaagtgctgggatcacaggcgtgagctatcacacctggccccagaagtgtttcaacatggaaattttccttagcccttctgtggttgtcatggcttaatgtgtgtctttccagaactttgaatgtttgcatacttgtggatgtacctttcaaatatgtttgtcttgtgtatcatatataaatggtattgtgttcaaaaaaaaaaaaaaaaaaaa

SEQ ID NO: 25646 - DNA, 2767 bp, Homo Sapiens
tggccttgtgagccctgggcttaggagtcaccatggcaactgaagagttcatcatccgcatccccccataccactatatccatgtgctggaccagaacagcaacgtgtcccgtgtggaggtcgggccaaagacctacatccggcaggacaatgagagggtactgtttgcccccatgcgcatggtgaccgtccccccacgtcactactgcacagtggccaaccctgtgtctcgggatgcccagggcttggtgctgtttgatgtcacagggcaagttcggcttcgccacgctgacctcgagatccggctggcccaggaccccttccccctgtacccaggggaggtgctggaaaaggacatcacacccctgcaggtggttctgcccaacactgccctccatctaaaggcgctgcttgattttgaggataaagatggagacaaggtggtggcaggagatgagtggcttttcgagggacctggcacgtacatcccccggaaggaagtggaggtcgtggagatcattcaggccaccatcatcaggcagaaccaggctctgcggctcagggcccgcaaggagtgctgggaccgggacggcaaggagagggtgacaggggaagaatggctggtcaccacagtaggggcgtacctcccagcggtgtttgaggaggttctggatttggtggacgccgtcatccttacggaaaagacagccctgcacctccgggctcggcggaacttccgggacttcaggggagtgtcccgccgcactggggaggagtggctggtaacagtgcaggacacagaggcccacgtgccagatgtccacgaggaggtgctgggggttgtgcccatcaccaccctgggcccccacaactactgcgtgattctcgaccctgtcggaccggatggcaagaatcagctggggcagaagcgcgtggtcaagggagagaagtcttttttcctccagccaggagagcagctggaacaaggcatccaggatgtgtatgtgctgtcggagcagcaggggctgctgctgagggccctgcagcccctggaggagggggaggatgaggagaaggtctcacaccaggctggggaccactggctcatccgcggacccctggagtatgtgccatctgccaaagtggaggtggtggaggagcgccaggccatccctctagacgagaacgagggcatctatgtgcaggatgtcaagaccggaaaggtgcgcgctgtgatttgaagcacctacatgctgacccaggacgaagtcctgtgggagaaagagctgcctcccggggtggaggagctgctgaacaaggggcaggaccctctggcagacaggggtgagaaggacacagctaagagcctccagcccttggcgccccggaacaagacccgtgtggtcagctaccgcgtgccccacaacgctgcggtgcaggtgtacgactaccgagagaagcgagcccgcgtggtcttcgggcctgagctggtgtcgctgggtcctgaggagcagttcacagtgttgtccctctcagctgggcggcccaagcgtccccatgcccgccgtgcgctctgcctgctgctggggcctgacttcttcacagacgtcatcaccatcgaaacggcggatcatgccaggctgcaactgcagctggcctacaactggcactttgaggtgaatgaccggaaggacccccaagagacggccaagctcttttcagtgccagactttgtaggtgatgcctgcaaagccatcgcatcccgggtgcggggggccgtggcctctgtcactttcgatgacttccataagaactcagcccgcatcattcgcactgctgtctttggctttgagacctcggaagcgaagggccccgatggcatggccctgcccaggccccgggaccaggctgtcttcccccaaaacgggctggtggtcagcagtgtggacgtgcagtcagtggagcctgtggatcagaggacccgggacgccctgcaacgcagcgtccagctggccatcgagatcaccaccaactcccaggaagcggcggccaagcatgaggctcagagactggagcaggaagcccgcggccggcttgagcggcagaagatcctggaccagtcagaagccgagaaagctcgcaaggaacttttggagctggaggctctgagcatggccgtggagagcaccgggactgccaaggcggaggccgagtcccgtgcggaggcagcccggattgagggagaagggtccgtgctgcaggccaagctaaaagcacaggccttggccattgaaacggaggctgagctccagagggtccagaaggtccgagagctggaactggtctatgcccgggcccagctggagctggaggtgagcaaggctcagcagctggctgaggtggaggtgaagaagttcaagcagatgacagaggccataggccccagcaccatcagggaccttgctgtggctgggcctgagatgcaggtaaaactgctccagtccctgggcctgaaatcaaccctcatcaccgatggctccactcccatcaacctcttcaacacagcctttgggctgctggggatggggcccgagggtcagcccctgggcagaagggtggccagtgggcccagccctggggaggggatatccccccagtctgctcaggcccctcaagctcctggagacaaccacgtggtgcctgtactgcgctaactcctgattaatacaatggaagtttctgggcaaaaaaaaaaaaaaaaaaaaaa

SEQ ID NO: 25647 - DNA, 1625 bp, Homo Sapiens
aacccttcctgttgccttaggggaacgtggctttccctgcagagccggtgtctccgcctgcgtccctgctgcagcaaccggagctggagtcggatcccgaacgcaccctcgccatggactcggccctcagcgatccgcataacggcagtgccgaggcaggcggccccaccaacagcactacgcggccgccttccacgcccgagggcatcgcgctggcctacggcagcctcctgctcatggcgctgctgcccatcttcttcggcgccctgcgctccgtacgctgcgcccgcggcaagaatgcttcagacatgcctgaaacaatcaccagccgggatgccgcccgcttccccatcatcgccagctgcacactcttggggctctacctctttttcaaaatattctcccaggagtacatcaacctcctgctgtccatgtatttcttcgtgctgggaatcctggccctgtcccacaccatcagccccttcatgaataagttttttccagccagctttccaaatcgacagtaccagctgctcttcacacagggttctggggaaaacaaggaagagatcatcaattatgaatttgacaccaaggacctggtgtgcctgggcctgagcagcatcgttggcgtctggtacctgctgaggaagcactggattgccaacaacctttttggcctggccttctcccttaatggagtagagctcctgcacctcaacaatgtcagcactggctgcatcctgctgggcggactcttcatctacgatgtcttctgggtatttggcaccaatgtgatggtgacagtggccaagttcttcgaggcaccaataaaattggtgtttccccaggatctgctggagaaaggcctcgaagcaaacaactttgccatgctgggacttggagatgtcgtcattccagggatcttcattgccttgctgctgcgctttgacatcagcttgaagaagaatacccacacctacttctacaccagctttgcagcctacatcttcggcctgggccttaccatcttcatcatgcacatcttcaagcatgctcagcctgccctcctatacctggtccccgcctgcatcggttttcctgtcctggtggcgctggccaagggagaagtgacagagatgttcagttatgaggagtcaaatcctaaggatccagcggcagtgacagaatccaaagagggaacagaggcatcagcatcgaaggggctggagaagaaagagaaatgatgcagctggtgcccgagcctctcagggccagaccagacagatgggggctgggcccacacaggcgtgcaccggtagagggcacaggaggccaagggcagctccaggacagggcagggggcagcaggatacctccagccaggcctctgtggcctctgtttccttctccctttcttggccctcctctgctcctccccacaccctgcaggcaaaagaaacccccagcttcccccctccccgggagccaggtgggaaaagtgggtgtgatttttagattttgtattgtggactgattttgcctcacattaaaaactcatcccatggccaaaaaaaaaaaaaaaaaaaaaaaaaaaaaaaaaaaaaaaaaaaaaaaaaaaaaaa

SEQ ID NO: 25648 - DNA, 1595 bp, Homo Sapiens
gcttccttttccttcgatacccaggagcccacgtccccagctcacttctcccccaggacctaggcggctgggccccctgcccctgactccaggagcccaggagtttgaagcccaggcgcgttttgcctcagtcctggggtccaggctccctcctccctcagaccaggggtccaggccagaaggtccctcctgtctcacttcacctcccccaggatggaccctccagtccatctgcgtctctccatttgtggctgccgtttctgtccagtgcccctgaggccctcggctgctggggtccgcaggaagccgcgccatgaatgaccggagcagtcggaggcggacaatgaaggacgatgagaccttcgagatctccattcccttcgatgaggcaccccacctagacccacagatcttttacagtctgagcccctctcggagaaacttcgaggagcctccggaggctgcgtcctccgccctggctctgatgaacagcgtcaagacccagctgcacatggctctggagaggaactcctggctgcagaagcgcatcgaggacctggaggaagagagggacttcctgcggtgccagctggacaaattcatctcttctgctcggatggaggcagaggaccactgccggatgaagcctgggcccaggcggatggagggggacagccgtggtggggctgggggcgaggcctcggaccctgagtcagcagcctcctccctcagcggagcgtccgaagaaggcagtgccagtgagaggaggcggcagaagcagaagggaggtgctagtcggaggcgctttgggaagcccaaggcccgggagaggcagcgagtgaaggacgccgacggggtcctctgccggtacaagaagatcctgggcaccttccagaagctcaagagcatgtcgcgggccttcgagcaccaccgcgtggacaggaacaccgtggcgctgaccacgcccatcgccgagctgctcattgtggcccccgagaagctggccgaggtgggcgagttcgacccctccaaggagcgcctgctcgagtactcccgccgctgctttctggccctggacgacgagacgctcaagaaggtgcaggcgctcaagaagagcaagctgctgctgcccatcacctaccgcttcaagcggtgatcgcaccacgcctccgcgcctccacccgggccttcctcccccgtggaccccggtggatgacctgcccctctccccgccgcgcccctgcccctcctcctcgctccctgggttgggggctcccttagccgggcccccaagcgcgacggccccggaccggccgcggccccttcccgaacgccggcacccccttccgcttgggctgcccagccctgtcctcgccgggccccttcctcctggaaaaccaggcaggcgggtgccccccccctcgagtgggggactgtacagaccccgtctccgccctggccccgcggaggagctgcccacctgattcccggacagacctccccaactccgcgtgagacagagaattattcagataatttaaattaaaaaacgacgtgaaaatttggaataaaaaaaaaaaaaaaaaaaaaaaaaa

SEQ ID NO: 25649 - DNA, 1625 bp, Homo Sapiens; identical to SEQ ID NO: 25647

SEQ ID NO: 25650 - DNA, 1980 bp, Homo Sapiens
gcgtcacgggcgcccggcccgttaaaacgctgctggctggagccacctccctccctgcagcccgcaacgggaatggagtaaagggagacccgtcgacctggccacggggatcagcgatggaattaaagcaatctttgtccacccatctggaagccgagaagcctctgaggcgctatggggcggtggaggagacggcttggaaaacggagagactggggagaaatcagctggacatcatctccatggcggagacaaccatgatgccagaggagattgagctggagatggcaaaaattcagcgtctccgggaagtcttggtccgccgggagtctgagctcaggttcatgatggatgacatccagctctgcaaggacatcatggacttgaagcaggagctgcagaacttggtcgccatcccagaaaaagaaaaaaccaaactgcagaagcagagagaggatgagctaatccagaagatccacaaactggtgcagaagagagacttcctggtggacgatgcggaggtcgagcggttaagggagcaagaagaagacaaggaaatggctgatttcctgagaatcaagttaaaacctctagacaaagtaaccaaatctccagccagctcccgggcagagaagaaagcagagcccccacctagcaagcccacggtggccaagacggggctggcactgatcaaggattgttgcggggccacccagtgcaacatcatgtagcccccacgtggggtgccctgggccatggggacccccccccaccctcttgtctttatagcccccatttcaccggggcccaagagctctccaaggcagaaggggttgaaggcaagcccgtgactgtcaccagaggccatgggcacggcaggcgggcctggccaccctgtacagagtgtagcagtagggagtctctcaccgtcgcatggtcctccccagagcatgccgaacccaggagtctgtctcactgtttatccaaacaccaggaaaggtcctccctcaaaaaagcatatctccacttctctctagctgtatctaacccaccgtgtgaatgaactgggagaggggcatgctccccagctgtgtgtagtcgtgacttctcaacaatctagcaccatgtcggacacgttccccatccaccctcctagctctgctctcagagctaggcacatgggcacaggtcccctcccgtctgtcctctcccagcaactgtgccctggagggctccacatggcccccgtgtctctcgggcaccacccatatagcagtcccagagggcccatctgtaaagatcgagcttgtgtgtggtgtcgtggtcacatctcccgcttccccccatcctgtgtctgggcacagttcacatcaggacagcgtccattgtgctctcagtctgcctcaggtgtgtgcctggagggggcctggactggcatggatccagtgtgcagaagagccagcagggaaccggaagctctgatgtcaaggccagagcagttgagaatgggacccagagtagatgctgacctgggcactccaccattccggggccaccacagagatgccagcaggatgccactttgccagcccgacacacggacctttgtaaagaacagcaacaggcaggagaggcagcgtgtgaccagattgtgtcccgtcattgggtggcatatgttaactagctgccaaacaacttcaacccgtgtaattcatgtacatttgcaacagccagcccggtacagcctgtgtgacttctctgtatgtgtgtgtgtgtcgtgaccagcctaagtagttagcataactcaagatgctgatgtgcagtcacccatcagagaaaataaaaatggaaaccacgttcacagcattttaaaagtttttactttttttcttgattatggaagtaatccatgtacatagtaaatcattttaaaagtacaaaaagtatgaagaagtttgtcttaaaaaaaaaaaaaaaaaa

SEQ ID NO: 25651 - DNA, 1118 bp, Homo Sapiens
gcaattggtggctttgaaggcgcggcgagcgggaacagctcttgaggagtgagactgcaggagatgtgggccgtgccaaagagatggatgagactgttgctgagttcatcaagaggaccatcttgaaaatccccatgaatgaactgacaacaatcctgaaggcctgggattttttgtctgaaaatcaactgcagactgtaaatttccgacagagaaaggaatctgtagttcagcacttgatccatctgtgtgaggaaaagcgtgcaagtatcagtgatgctgccctgttagacatcatttatatgcaatttcatcagcaccagaaagtttgggatgtttttcagatgagtaaaggaccaggtgaagatgttgacctttttgatatgaaacaatttaaaaattcgttcaagaaaattcttcagagagcattaaaaaatgtgacagtcagcttcagagaaactgaggagaatgcagtctggattcgaattgcctggggaacacagtacacaaagccaaaccagtacaaacctacctacgtggtgtactactcccagactccgtacgccttcacgtcctcctccatgctgaggcgcaatacaccgcttctgggtcaggcgctgacaattgctagcaaacaccatcagattgtgaaaatggacctgagaagtcggtatctggactctcttaaggctattgtttttaaacagtataatcagacctttgaaactcacaactctacgacacctctacaggaaagaagccttggactagatataaatatggattcaaggatcattcatgaaaacatagtagaaaaagagagagtccaacgaataactcaagaaacatttggagattatcctcaaccacaactagaatttgcacaatataagcttgaaacgaaattcaaaagtggtttaaatgggagcatcttggctgagagggaagaacccctccgatgcctaataaagttctctagcccacatcttctggaagcattgaaatccttagcaccagcgggtattgcagatgctccactttctccactgctcacttgcatacccaacaagagaatgaattattttaaaattagagataaataaaaaaaaaaaaaaaaa

SEQ ID NO: 25652 - DNA, 1226 bp, Homo Sapiens
ccgggacgtggagacccggggtcccggcagccgggcggcccgcgggcccagggtggggatgcaccgccgcggggtgggagctggcgccatcgccaagaagaaacttgcagaggccaagtataaggagcgagggacggtcttggctgaggaccagctagcccagatgtcaaagcagttggacatgttcaagaccaacctggaggaatttgccagcaaacacaagcaggagatccggaagaatcctgagttccgtgtgcagttccaggacatgtgtgcaaccattggcgtggatccgctggcctctggaaaaggattttggtctgagatgctgggcgtgggggacttctattacgaactaggtgtccaaattatcgaagtgtgcctggcgctgaagcatcggaatggaggtctgataactttggaggaactacatcaacaggtgttgaagggaaggggcaagttcgcccaggatgtcagtcaagatgacctgatcagagccatcaagaaactaaaggcacttggcactggcttcggcatcatccctgtgggcggcacttacctcattcagtctgttccagctgagctcaatatggatcacaccgtggtgctgcagctggcagagaagaatggctacgtgactgtcagtgagatcaaagccagtcttaaatgggagaccgagcgagcgcggcaagtgctggaacacctgctgaaggaagggttggcgtggctggacttacaggccccaggggaggcccactactggctgccagctctcttcactgacctctactcccaggagattacagctgaggaggccagagaagccctcccctgactgcatgtggaagggcacacagcagcaggcagggaggaggcggaggtggcaaataaacctgggcaattttgtttatacaaaaaatagaaaaaaagttccaagtttttctttcttccctcattcttttatttttgaaaagtgccttcacgttgcatttttattggaggaaaacctcgctcgttcagtaagcataatctgattaacacagagaacggcaagcacatataaaatgatttttgtaggtcatctgcaagttcatggaagagctgggcctagaatgtgggttgtttcctggcctgtctagtctttgtagctgtgagacatagattacagcctatgctaattcaaaccttttaaataaaatgttccttatctcaaaaaaaaaaaaaaa

SEQ ID NO: 25653 - DNA, 1668 bp, Homo Sapiens
gcagggagccgccgccggggctgtaggcgccaaggccatgtccgactcgtgggtcccgaactccgcctcgggccaggacccagggggccgccggagggcctgggccgagctgctggcgggaagggtcaagagggaaaaatataatcctgaaagggcacagaaattaaaggaatcagctgtgcgcctcctgcgaagccatcaggacctgaatgcccttttgcttgaggtagaaggtccactgtgtaaaaaattgtctctcagcaaagtgattgactgtgacagttctgaggcctatgctaatcattctagttcatttataggctctgctttgcaggatcaagcctcaaggctgggggttcccgtgggtattctctcagccgggatggttgcctctagcgtgggacagatctgcacggctccagcggagaccagtcaccctgtgctgctgactgtggagcagagaaagaagctgtcttccctgttagagtttgctcagtatttattggcacacagtatgttctcccgtctttccttctgtcaagaattatggaaaatacagagttctttgttgcttgaagcggtgtggcatcttcacgtacaaggcattgtgagcctgcaagagctgctggaaagccatcccgacatgcatgctgtgggatcgtggctcttcaggaatctgtgctgcctttgtgaacagatggaagcatcctgccagcatgctgacgtcgccagggccatgctttctgattttgttcaaatgtttgttttgaggggatttcagaaaaactcagatctgagaagaactgtggagcctgaaaaaatgccgcaggtcgcggttgatgtactgcagagaatgctgatttttgcacttgacgctttggctgctggagtacaggaggagtcctccactcacaagatcgtgaggtgctgagcttcagcagcccgctcctgagcacacttcctctgccagttacgataacgtgcgtgaggaggaggcgaccatgggaaagcccggggaacgctctggtcagccttttcctgtgaggatgaggtcggaaggtgcgcccactgcagtatcctgttccgcctctggaagtcctgcaccaatgtttgtcccactcactgtgacctcctcctgtgtggagtctccccttgctcctccttccctgggtgtggttcaggctctagagctggccctgcctctcagccccccacatttctagaacacactgtagctgtgcctctacagactcccgctgcctggcctccacagatcctgctcagattcaccagtaggcaaagcttggccctatttgctttttctctccatggctctgtggagatgtgcggagacccttacaggtcgggaggcggaagctgaggagtgggggctgggtggaaggtggacatcggggtttggtggaaatggggctctggggtttgcttccctctagtgtgggcaggggaccttgaagtgaagtcttgagaaaccagtagaatttgccactgtttccaggccttgtcaaccttttcattctttattttgctcctcatttcccatccctcacagtaactgtttaactgctcaattaaatgtgttgtaccgttcggtacttttactgaaacagtgaataaagcactgtgtgatttcaaaaaaaaaaaaaaaaa

SEQ ID NO: 25654 - DNA, 1655 bp, Homo Sapiens
gtctggagggggctgaggtgctgggcaaccagcctgctcccacctgtgccgagcctcctcccgctatgggtacgatcgggtgggtgggagcacctgctggagagggttcaggggcccacccgcctaagggccctacccacctgggcacctttgtccacaggctccttgaacctgtatcatcccccagacccagagaaagaggtgtttccagccccaccagcaggtaccggcctcccctgagcccttgacgaggctgggagtgggtttgagtgtgcaggcccatcttgcccctgccccgtccctaagtgggagcctgaaggcatggcctctgctccccatgcttcacacaggtcccccagatgagccccaaagacaagctctgtgtcatccatcacccagccagggccccaaagcaatatctatgtcgtcccccaaaggggccccccaatggcaaggttcttgtggcatctcccaaacaggcccccaggcttgggctgggcccctcaggcagcagctgctctcagggcacccgcctgccgcccacaggtttccagatggccccatgcgggtgcttcttcgacccccgcatctatcggatcgagtggaccacccccgacctgggccagtcagccctgtataagctggcagcaagcagcggggggccagcgggggtcccctccgccccaggcagctacctcctggagcctcagccctacctcaaggccccggggctgcctccatacccccactaccagcaggcacccggggggccccagtttctcttgccctacttcccgcctgagggccccgggccagaggctctgggttttgtgggggacgcagggcccgccgccttcgtggagctgcccctaccgcccctagaggaaggcccggccccgctgccacccccaccccccaaggagaacaagccgccccctgtactcatcacgctgcctgcagagcccacactgcccccagacgcctacagccacctccagggtcacctcggccacttccctgggcccgaacccctggccttccccgtcaaggagctgcagggcagtggggcccgacctggggtgcccctgtacccaccgggcctcagcgagctcaaggtggccgaggtcaaggagggggccctgctgggagcaggcaaggccaaggcccccaagacggccagagctttggcactgcctgacaaggttctgctggaggacgccatgaagctcttcgactgcctgccaggcgcctctgagcctgagggtaccctgtgcgaggtccctgggccggccctgcctgacagcagtggtgggaactcagccgatgacatccgctcgctgtgcctgcccgaggagctgctgtcctttgactacagcgtgcctgagatcctggacaccgtgtccaacgttgactacttcttcaacttcaaggcgctcgacgaggagcagccgccccacccggggccccctgccaccaacaccccggcccccattctgtctggcaagagaaaggcctcgacggccaagaagggaaagccgggaaggaaggccaggcagccggcaggcccagccagcgccactcccccggggcccagggaggacctgggagccaccccgcattaaagcacatttgacctttcaaaaaaaaaaaaaaaa

SEQ ID NO: 25655 - DNA, 1306 bp, Homo Sapiens
ataagaggttgggctttggatagatagacagactcctgggtccggtcaaccgtcaaaatgtccaaagaacctctcattctctggctgatgattgagttttggtggctttacctgacaccagtcacttcagagactgttgtgacggaggttttgggtcaccgggtgactttgccctgtctgtactcatcctggtctcacaacagcaacagcatgtgctgggggaaagaccagtgcccctactccggttgcaaggaggcgctcatccgcactgatggaatgagggtgacctcaagaaagtcagcaaaatatagacttcaggggactatcccgagaggtgatgtctccttgaccatcttaaaccccagtgaaagtgacagcggtgtgtactgctgccgcatagaagtgcctggctggttcaacgatgtaaagataaacgtgcgcctgaatctacagagagcctcaacaaccacgcacagaacagcaaccaccaccacacgcagaacaacaacaacaagccccaccaccacccgacaaatgacaacaaccccagctgcacttccaacaacagtcgtgaccacacccgatctcacaaccggaacaccactccagatgacaaccattgccgtcttcacaacagcaaacacgtgcctttcactaaccccaagcacccttccggaggaagccacaggtcttctgactcccgagccttctaaggaagggcccatcctcactgcagaatcagaaactgtcctccccagtgattcctggagtagtgctgagtctacttctgctgacactgtcctgctgacatccaaagagtccaaagtttgggatctcccatcaacatcccacgtgtcaatgtggaaaacgagtgattctgtgtcttctcctcagcctggagcatctgatacagcagttcctgagcagaacaaaacaacaaaaacaggacagatggatggaatacccatgtcaatgaagaatgaaatgcccatctcccaactactgatgatcatcgccccctccttgggatttgtgctcttcgcattgtttgtggcgtttctcctgagagggaaactcatggaaacctattgttcgcagaaacacacaaggctagactacattggagatagtaaaaatgtcctcaatgacgtgcagcatggaagggaagacgaagacggcctttttaccctctaacaacgcagtagcatgttagattgaggatgggggcatgacactccagtgtcaaaataagtcttagtagatttccttgtttcataaaaaagactcacttaaaaaaaaaaaaaaa

SEQ ID NO: 25656 - DNA, 1281 bp, Homo Sapiens
ctggaaacaacagactcttaaactaacaattcaagcaggcgccaagtgctacgacagaggtgtgaataaaagcatcaggaaatcggatggagaaccaccattcacccaagggtcagaggaggtttcaaagaaaaggtgtcattggagcagtgttttgcagaatgagccagagttcaccaagcaggcaaggcaaggaagggtgttgcagagagggaacagcatatgcaaaggcatatcagttcatggcatcacatctttcactggggaagccagtttccacaggcagcatcccaaggttcaataaggccttatttaacaagcaagcaaaatgcaaaccaaaccattattcatttattggcttaagtatgctttctcctgaaaactttagcattgggtgcaaatattcagtatggttctcggagaccaaagggttttaagccagggcacaaccagaaaagtggctctctttggtagggagaggggctccaatatttcgttctctccccatggggcactgacagagaaatgaaatagttttatctggaaaattccagagctattatttactccttaccaagggaagttacttcttgtaaaaacttttaagccatttatcaacaagttcttgttgactcagggcataatgagttcctgagacatgcttttttgggggctggggctttaggtagaagaatttcaaggaaaagaattctcagcagagctcaagattgtagaaactcagcagaagctggtaaaaacatggggagcccggaggacaggctgctgtccagggcagaggccatgaagaagtgcttccgtggccgacagtctggaaatgaatccatcatacattagtgccatagagtttagtaaccgtccagcaagtgtcatcacttttacagaaaacaaggtccagtaatagcaagtcttagtacatcctcacttttattataaatgggtgttttttcataatttttactgacgctcagtaaccatgcaaaattgtgtatagcattaatgtatctacatacctacacctatctatatataagctcatggtagaaaaccatagctaagtagcatcgcagacttaagcgtacaaagtgatcttgttcacaagtaatctgttgacagtgccaataaatgataaaaaaaaaattaacatgtcacaatgtaacggatgaccatatgcacaattccatgaattaaatctgtttcctgtgttagtcagtattcttaaataaaatttataattgaaacatgaaaaaaaaaaaaaaaaaa

SEQ ID NO: 25657 - DNA, 1175 bp, Homo Sapiens
cccggtcgccgcggctgccgcgccgccgctgcaggatagctagcggccaggagaaatacagtggaaaatgcaaaacaacgaaattataaagcctgccaaatacttctcagaattggaaaagagcatcctgctggctttagtagaaaagtataaatatgtgctggaatgtaagaaaagtgatgcgcgaactattgcccttaagcagcgtacctggcaggcgctggcccacgaatacaactctcagcccagcgtgtccctgcgggatttcaaacagctgaagaagtgctgggagaacatcaaggctcggaccaaaaaaattatggcccatgaaaggagagagaaagtgaaacggagcgtcagccctctcctgagtacccacgtcctagggaaggagaagatcgccagcatgctgccggagcagctctacttcctgcagagccccccggaggaggagcccgaataccaccccgacgcctcagcccaagaatcatttgctgtttcaaatagagaactgtgcgatgatgagaaagagttcatacattttccagtatgtgaggggacctctcaacctgaaccctcgtgttcagctgtcagaataacagccaataaaaactacaggagcaaaacctctcaggaaggtgctttaaaaaagatgcatgaggaagaacaccatcaacaaatgtccatcttacaactgcaactgatacaaatgaatgaggtgcatgtggccaaaatccagcagatagagcgagagtgtgagatggcagaggaggaacacaggataaaaatggaagttctcaataaaaagaagatgtattgggaaagaaaactacaaacttttaccaaggaatggcctgtttcctcatttaaccggccctttcccaattcgccctaagactttgggggtggctctcttgtaattaatctgtgttggcaaagaatgtctggaacatggacttggcggtcagtaacctgtaacagagctacaactaggaaaattagagtggtagtagtcacttatttaagaattcattcaggtaaacagctgcaccctctgtaccccttaagtggcaaagaagctgttatagtcttctgaaaattatcactatgagtgctataattctgaatataatgtctcttaattagaattcatacaagaaaaaaaaaaaaaaaaa

SEQ ID NO: 25658 - DNA, 1706 bp, Homo Sapiens
cccccgccggccatgaacgccgctcgcaccggctaccgagtcttctcggccaactccacggccgcctgcacggagctggccaagcgcatcacagagcgccttggtgctgaattggggaagtctgttgtatatcaagagaccaatggagaaacaagagttgaaataaaagaatctgttcgtggccaagatattttcattatacagacaatacccagagatgtgaatacagctgtgatggagttgctcatcatggcttacgcactgaagactgcctgtgccaggaacattattggggtcatcccctacttcccctacagcaagcagagcaagatgaggaagaggggttccattgtgtgcaagctgctagcatccatgctggcgaaagcaggtttaactcacattatcactatggatcttcatcaaaaggaaatacaaggctttttcagctttcctgtggacaaccttagagcctcacctttcctgcttcagtatatccaggaagaaattccaaattacagaaatgcagtcattgtagctaagtctcctgatgctgcaaagagggcccagtcctatgcggagagactgcgtctgggtttggccgtcattcacggggaagctcagtgcacggaactggacatggacgatggtcgtcactccccgcctatggtcaaaaatgctactgtgcacccaggcctggagttgccattgatgatggccaaagagaagccaccgataactgtagttggagatgttggaggccgcatcgcaatcatcgtggatgacattattgacgatgtggagagttttgttgctgccgcggagatcctgaaagagagaggcgcctataagatctatgttatggccacccacggcatcctgtctgcagaggcccctcgcctgattgaggagtcctccgtagacgaggtggtggtgacgaatactgtccctcatgaggttcagaagctgcagtgtcccaagataaagactgtggatatcagtttgattctttctgaagccattcggagaatccacaatggagagtccatggcctaccttttccgaaacatcactgtggatgactagctttcacgagggtctcgaccctggacctcctgagggaaacatggaaaaagcagtgccatgagtgatacagtgtttccttgcaagggaggactcgaaacagcctggagttagatatcttcttttgcccggattgatggggaggagggattaaaagagtcaggaagaagacagagctaatggataaatatcataacatggccttacatgtctgctgtcatcagccctgttccttaaaagttctagctgctttcttaaaaataatctgaaaatcttattgatactaaagaggagttaaaggcacataaagtcttaactctataatgttcatttagttgtttcagctccagggaaatggaggtattgatgttgaacctggttagggaagctgagcgcctgtggccctattactatccagttggcctctcccaaatcaacttcaagtcttttatagagaatcgtatttttctttcagaaattgttatgcctacagccattgaaaaatgaagcattcatgttgttacatcttccaaggatgtcagattagaaaatagcatcccacctctgggtatctgagtggctctgaagttgcaaataaaataatttgttgtcaaaaaaaaaaaaaa

SEQ ID NO: 25659 - DNA, 3000 bp, Homo Sapiens
gggaatggctgctcgcggaggggcagtgtacgcggggccgctgtaggctgtccagcgatggatcccaccgcgggaagcaagaaggagcctggaggaggcgcggcgactgaggagggcgtgaataggatcgcagtgccaaaaccgccctccattgaggaattcagcatagtgaagcccattagccggggcgccttcgggaaagtgtatctggggcagaaaggcggcaaattgtatgcagtaaaggttgttaaaaaagcagacatgatcaacaaaaatatgactcatcaggtccaagctgagagagatgcactggcactaagcaaaagcccattcattgtccatttgtattattcactgcagtctgcaaacaatgtctacttggtaatggaatatcttattgggggagatgtcaagtctctcctacatatatatggttattttgatgaagagatggctgtgaaatatatttctgaagtagcactggctctagactaccttcacagacatggaatcatccacagggacttgaaaccggacaatatgcttatttctaatgagggtcatattaaactgacggattttggcctttcaaaagttactttgaatagagatattaatatgatggatatccttacaacaccatcaatggcaaaacctagacaagattattcaagaaccccaggacaagtgttatcgcttatcagctcgttgggatttaacacaccaattgcagaaaaaaatcaagaccctgcaaacatcctttcagcctgtctgtctgaaacatcacagctttctcaaggactcgtatgccctatgtctgtagatcaaaaggacactacgccttattctagcaaattactaaaatcatgtcttgaaacagttgcctccaacccaggaatgcctgtgaagtgtctaacttctaatttactccagtctaggaaaaggctggccacatccagtgccagtagtcaatcccacaccttcatatccagtgtggaatcagaatgccacagcagtcccaaatgggaaaaagattgccaggaaagtgatgaagcattgggcccaacaatgatgagttggaatgcagttgaaaagttatgcgcaaaatctgcaaatgccattgagacgaaaggtttcaataaaaaggatctggagttagctctttctcccattcataacagcagtgcccttcccaccactggacgctcttgtgtaaaccttgctaaaaaatgcttctctggggaagtttcttgggaagcagtagaactggatgtaaataatataaatatggacactgacacaagtcagttaggtttccatcagtcaaatcagtgggctgtggattctggtgggatatctgaagagcaccttgggaaaagaagtttaaaaagaaattttgagttggttgactccagtccttgtaaaaaaattatacagaataaaaaaacttgtgtagagtataagcataacgaaatgacaaattgttatacaaatcaaaatacaggcttaacagttgaagtgcaggaccttaagctatcagtgcacaaaagtcaacaaaatgactgtgctaataaggagaacattgtcaattcttttactgataaacaacaaacaccagaaaaattacctataccaatgatagcaaaaaaccttatgtgtgaactcgatgaagactgtgaaaagaatagtaagagggactacttaagttctagttttctatgttctgatgatgatagagcttctaaaaatatttctatgaactctgattcatcttttcctggaatttctataatggaaagtccattagaaagtcagcccttagattcagatagaagcattaaagaatcctcttttgaagaatcaaatattgaagatccacttattgtaacaccagattgccaagaaaagacctcaccaaaaggtgtcgagaaccctgctgtacaagagagtaaccaaaaaatgttaggtcctcctttggaggtgctgaaaacgttagcctctaaaagaaatgctgttgcttttcgaagttttaacagtcatattaatgcatccaataactcagaaccatccagaatgaacatgacttctttagatgcaatggatatttcgtgtgcctacagtggttcatatcccatggctataacccctactcaaaaaagaagatcctgtatgccacatcagcagaccccaaatcagatcaagtcgggaactccataccgaactccgaagagtgtgagaagaggggtggcccccgttgatgatgggcgaattctaggaaccccagactaccttgcacctgagctgttactaggcagggcccatggtcctgcggtagactggtgggcacttggagtttgcttgtttgaatttctaacaggaattccccctttcaatgatgaaacaccacaacaagtattccagaatattctgaaaagagatatcccttggccagaaggtgaagaaaagttatctgataatgctcaaagtgcagtagaaatacttttaaccattgatgatacaaagagagctggaatgaaagagctaaaacgtcatcctctcttcagtgatgtggactgggaaaatctgcagcatcagactatgcctttcatcccccagccagatgatgaaacagatacctcctattttgaagccaggaatactgctcagcacctgaccgtatctggatttagtctgtagcacaaaaattttccttttagtctagcctcgtgttatagaatgaacttgcataattatatactccttaatactagattgatctaagggggaaagatcattatttaacctagttcaatgtgcttttaatgtacgttacagctttcacagagttaaaaggctgaaaggaatatagtcagtaatttatcttaacctcaaaactgtatataaatcttcaaagcttttttcatctatttattttgtttattgcactttatgaaaactgaagcatcaataaaattagaggacactaaaaaaaaaaaaaaa

SEQ ID NO: 25660 - DNA, 2902 bp, Homo Sapiens
gcggcggggcagtggctgctgcgttttcgtgtctgagtccttcctgggttctaatgagggcgcggttctgctgtgcccggcccgcgaggtctaaggcatgggcttccagcctccggccgctcttcttttgaggcttttccttctgcagggcatcctgaggcttctgtggggggacctggctttcatccctccttttatccgaatgtccggccctgcggtcagcgcgtccctggtcggagacaccgagggtgtgaccgtgtccctggcagtgctgcaggacgaggcgggaatattgccaattccgacgtgtggagtgctgaacaatgagacggaagactggagcgtgactgtgatccccggtgcgaaggtgttggaagtgacagtgaggtggaagagaggtctggactggtgttcctccaatgagacagattccttctcagagtccccctgtatcctccagacccttctggtttcagcatctcataattcatcctgttcagcacatctactcattcaagtggaaatttatgccaactcttctctgacccataatgcctcagagaacgtgactgtcattcctaaccaggtgtatcagccccttggcccttgtccttgtaatttaacagctggagcctgtgatgttcgctgctgctgtgaccaggaatgctcatcaaatttaacaacgctgttcagacggtcctgcttcaccggcgtgtttggaggagacgtcaatcctccttttgatcagctctgctctgctgggacgacgacacgtggtgtccccgattggtttccctttctgtgtgtgcagtccccccttgccaacacacccttccttggttacttctatcatggtgctgtttcccccaaacaggactcttcctttgaagtatatgtggatactgacgcaaaagactttgcagactttggttacaaacaaggagatcccattatgactgtaaagaaggcatattttactattccgcaggtgtccctggctgggcagtgtatgcagaacgccccagtggcatttcttcacaattttgatgttaaatgcgttactaatttggaactataccaagaacgagatggtattatcaatgcgaagataaagaatgttgccttaggaggcatagttacaccaaaagtgatctatgaggaagcaactgacctagacaaattcatcaccaatacagaaactcctttaaataacggatcaacccctagaattgtgaatgtggaagaacattatattttcaaatggaataataataccatcagtgaaataaatgttaaaatttttagggcagagattaatgcccaccagaaagggataatgacacagagatttgtagtaaaatttttaagctataatagtggtaatgaagaagaattatctggaaatccaggttaccaacttggcaagcctgtccgagctctaaatatcaacaggatgaataatgtcacgactttacatctttggcaatcggctggaaggggtctgtgtacatcagcaactttcaaacccattttatttggagaaaatgtactctctggatgcctgttagaagtcgggattaatgaaaattgtactcagctcagggagaatgctgttgaaagacttgattcattaatacaagcgactcacgttgcaatgagaggcaactccgattacgctgatcttagtgatggctggctcgaaataatacgtgtagatgcccctgatccaggtgcagacccgctggctagcagtgtgaacggcatgtgcctggatattcctgctcacctgagcatccgcatcctcatctcggatgctggcgcggtggaagggattactcagcaggagatactcggtgtagagacaaggttctcctcagtgaactggcagtaccagtgtgggcttacctgtgagcacaaggccgaccttctccctatcagtgcatccgtccagtttattaaaattcctgcacagttaccccaccccctgacaagattccagatcaattatacagagtatgactgcaacagaaatgaggtgtgttggccgcagcttctatatccatggactcagtattatcaaggggagctgcattctcagtgtgttgctaagggcttactgttgctgttgttcctcacattggccttgttcctcagcaacccctggaccagaatatgcaaagcctatagttagacaaccacctggcttttatttttttgagatggagttttgctcttgttgcccaggctgaagtgatctcggctcaccacaacctcctcctcttgggttcaagcgattctcctgcctcagcctccggagaactgggattacaggcatgcaccaccacgcccggctaattttgtatttttagtagagacagggttccaccgtattggccaggctgctctcgaactcctgacctcatgatccgcccatcttggcctcccaaagtgctgagattacaggcatgagccaccgcacccggccttttttttttttttttttttttgaggcggggtctctgtcacccaggctggagtgcagtgcacaatctcggctcactgcaatctctgcctcccaagcaatcctcccacctcagcctctggtgtagctgggaccacagatgctccaccatgcctggctgtatttttggtaaagacggggtttcgccttgttgcccagggtggtctgtaactcctgagctcagatgatctgcccacctcggcctcccaaagtgctgggatcacagacgtgagccactgcgtccggtccatctgacttctcaaagactttagaccttgacttcagtgatttgttgtagtcttgtatgcttctctataaaattttaataaatgaaatgtcttatttttgtagaaaattaaaaaaaaaaaaaaaaaaaaaaaa

SEQ ID NO: 25661 - DNA, 3537 bp, Homo Sapiens
gcagaaggaaaaaaaggtggcaggaggggtgaaagaggagacacggcccagggccccgaagatcaataactgcatggactcactggaggccatcgatcaagagttgtcaaacgtaaatgcccaggctgacagggccttccttcagcttgagcgcaagtttggccgcatgcgaaggctccacatgcagcgcagaagtttcattatccagaatatcccaggtttctgggttactgcctttcgaaaccacccccagctgtcacctatgatcagtggccaagatgaagacatgctgaggtacatgatcaatttggaggtggaggagcttaaacaccccagagcaggctgcaaattcaagttcatctttcagggcaacccctacttccgaaatgaggggcttgtcaaggaatatgaacgcagatcctctggccgggtggtgtctctttccactccaatccgctggcaccgaggccaagacccccaggctcatatccacagaaaccgggaagggaacactatccctagtttcttcaactggttttcagaccacagccttctagaattcgacagaattgcagagattatcaaaggagaactgtggcccaatcccctacaatactacctgatgggtgaagggccccgtagaggaattcgaggcccaccaaggcagccagtggagagcgccagatccttcaggttccagtctggctaatctctgtcctgtgagaagcttctgcacaagtttccttaccacctcctcttggacctatgcttggccaacagcatgcagtcttccatctgctttctcttcatactgtggattatcttttccttggttctaaatcttcagtaatcggttgcaagattgttggcttacctgcctgtgccattcttcctctgggccttcatgcttttctgcattgtgttaacatgtttcaagtgcatggccttctacggcttctatgccaagcgtatgatactatagatatagtgtaccatactgcctttctttgcatggcttggaccctatctgtgaccatgctcttctcccaatttaagtggttctgtaccacaaagaatcttgatacattttcacaaataactgattgggcttcatactttatgctggctgtgtcctgatacccatgtacttatggtaagctatttgggtattaccactgcaagacaaaactgatatcttaacccggccatcaacccaaattggacattccagactaccaccaactggatcccagctgccttcctgggcttgtgccatccaccctactggttatctgatagaacaagctggtggctgatgggtgactgctaggcgtgactgaggtaatagatgaaaagtgttctatgttatcacattggttttcctgtacctttggttactctacgtcatgaccagctgctggtgagtatgaagcctgtgctatagcccacccctactcactctcaccttctggttgaactttgcttaggccaccattgtctgcctcatcaggaactatctgtagacgtagctcccagggagctcacagcaacaccccctaccaccaggatgggcagtaatatgtgacagagcccaaagcaaggctggaacgcagtcccttccagcttagtctttctgactcctagccaacaaaccatccttaatgtgagcaacttctttaggcatttcctcttttccccgcctgcacccactctgaacatgacaaaagttgccagagttggggcattgaggaagagatatttctggaatgtgagacttgttatgcctctgtctctttctctccctcctcctcccctctccctccccctctccctcccatcccttttcttccctttcactctgaagcagttttagcttattaacagaaaacaaaactggcaaagcaggctttttgtttaatttgctctttccctgattgtgttcagagagaaaggttatgattaaatgggctccagatctcttattgcccttattcctccaccccacttcttttagcaaggtctgaaagtttcaaagggagacctataggttaattgtttagttataggcagtgttaaattaggcagattttgacatatttatctttttaccccatccattctaccaaaacctgtgtatttcttgagtttttagtttgagaagctggaaagagagagaagggcctcacagtgatgggttcaggacgggtcaaaggcaaaggcctttgtgatgtgagcaaaggcaaccaaaacttagcctcactccacttttctaaagatggaaattcttttttgggccttggactgcttctagggtagcattttgtaggtcactcttctcctttgtactattttgtttctgccctgatgtcccttgggtctccatcctactgcctggctttcttggccctcatttctcagcttctgcatttccttccctgctcctaacaaatgaagaagcaggctgcagcctgcattgtggaagatctccagcctccttgtaggggataaggggatgtgcagcatctgtgtggattttcacggacaagttccagtaggtgggacagtgatgccgtcaaggcttagttatgatcatgtgtggtgataaagaccatccaccatcacccttttcccctttgggtttgaaggccttgccctaagctacctgagggtttaggaggtctgaacacacacagtggagaggttaatctaggttgggaaactgagtaaaagtccagagcaggaatgagcctgctgtggcgtgggtttggaaaggctcacaggaaagaacctgcaggatcaggggtgggaggggaggcccctgaggtgctctccagggaagaggggctggggtttaaatagcatgcttggaggaagattttccttcaatttttcctaagtccttgaattcaccagtagatttttgtaaacaaaatgtaagtcgatgttttctctcaattatcctaggagtgacctttatatgtgtggaagattaatggtatatgctccttatgtcactgtttttgagtaaaatccatttcctttctctgtttcagcctatgacaaaattgatgtttacaggcctgctttttgcttataattgacaacatgtgcaaaaataccaaatttgtgtcctgtgcagtatgaagaattcagtgaatattcattaatgtattagcttgttttgctctctgttcatatatggctctattcttagaaatataatttgaatgtgatctttcaatagtctgaatattttacaaattatagctatgtcttgtgaaaataacctcaaaaagaaaaatacgactctgttgtcttacttgatatttcttgccctagtaatgtacttgacatttatgttcctaagcagtgtaagtaccagtagaatttctctgtcaaactcaatgatcatttagtacttttgtcttctcccatgtgcttgaaggaaaaataaagtgtcactaccgtatttcttgttttcatcaaaaaataaaaataatttaaaaaaaaaaaaaaaaaaaaaaaaaaaaaaaaaaa

SEQ ID NO: 25662 - DNA, 1591 bp, Homo Sapiens
aacggtagtggtggcttgttgggatccgttgagtgatgggagagtgtgctctttaacttcggagagagatgcgctctcgtgtagccgtcagggcctgccataaggtctgcaggtgcctgttgtctgggtttgggggtcgagtagatgcggggcagccggagctgttgacggaaaggagtagccccaaaggagggcatgtgaagtcgcacgcggagctcgaggggaacggcgagcacccagaagcccccgggtctggagagggaagcgaggcgctgttagagatctgtcagagaaggcatttcctaagtggaagcaagcagcagcttagccgggattctcttctgagtgggtgccaccccggcttcggacccttgggcgtagagttgcggaagaacctggccgcagaatggtggacctcggtggtggtgttcagggagcaggtattcccggtggacgccctccaccacaaaccaggccctttgctacccggggacagtgccttcaggttagtttctgcagaaactctacgcgaaatcttgcaagacaaagagctgagtaaggaacagctagtagcatttcttgagaacgtattaaaaacttctgggaaactacgggagaaccttcttcacggtgccttggaacactatgttaattgcctggatctggtaaacaagaggctaccttatggccttgctcagattggagtgtgttttcatcctgtttttgacactaagcagatacgaaatggtgttaaaagtattggtgagaagactgaagcttcgttagtatggtttactcctccgagaacttcaaaccagtggcttgatttctggttacgtcatcgactccagtggtggagaaagtttgccatgagtccatctaacttcagcagcagtgactgtcaggatgaagaaggccggaaaggaaacaaactttactacaattttccctggggaaaggagttaatagaaaccctgtggaacctaggagatcacgaacttttacacatgtatcctggcaatgtgtctaaattacatggccgagatggacgaaaaaatgtggttccttgtgttctctctgtaaatggggacctagaccgaggcatgctggcctacctctatgattctttccagctgacagagaactcctttacaagaaagaaaaatcttcatagaaaggtacttaaacttcacccttgtttagcccctattaaggttgctttggatgtaggaagaggccccacattggaactaagacaggtttgtcaagggctatttaatgagttactagaaaatgggatttctgtgtggcctgcttatttggaaactatgcagtcctcattggaacaactttattcgaagtatgatgaaatgagtattctcttcacagttttggttactgaaactactttggagaatggattaatacatctgagaagcagagacaccacaatgaaggaaatgatgcatatatccaaattaaaagactttttgattaagtatatatcatcagctaagaatgtatagatttttatatttgtataataaatattcttctctcctaaaaaaaaaaaaaaaaaaaaaaaaaaaaa

SEQ ID NO: 25663 - DNA, 3028 bp, Homo Sapiens
ctggcgccgagcgcggtgggagaggagagggtacccggctggctcggctggcggcctctgcctggatctcggcgccgcagtcctgcgcctctcccgcccctgtctcccgctccgcagccccgggcacggcggaggcagcggagccctgggccatcgtacctggagtagaacagaaaaattattatgtctgtgttcccttgggactcattggaaattgtacagtgacatcttctgggatttagtctggattgtgcagactggtgcttaaaatggaagtcgatattaatggagagtctagaagtaccctgaccaccttgcccttccctggggctgaggccaactccccgggaaaggcggaggcagagaagccccgctgctccagcacaccctgctccccgatgcggaggaccgtgtcaggctaccagatcctacacatggactctaactatttggttggcttcacgactggcgaggaactcctgaagttagctcagaagtgcacaggaggtgaagagagcaaagcagaagccatgccatccttacgctccaaacagctagatgcaggacttgcccgttcctctcgtttgtataaaaccagaagtaggtactaccagccatacgagattccagctgtcaatggcaggaggcgaaggcggatgccaagctcaggagacaagtgcactaaatctttaccttatgaaccttacaaggccctccatgggcctctgcctctttgtcttcttaaaggtaagagggctcactccaaatctctggactacctcaatctagataaaatgatcaaggagccagctgatacagaagtgctacagtaccagcttcaacacctaaccctccgaggggaccgtgtgtttgctaggaataatacatgaatgacttggagagagcttaaaccaatttaggtcagcctacgcttggctagaaaaaacccactgctgtactctgtacatgactcttcacactatagatggttatatcagctaagtgttcctggaacataaaaattgtttgggtcaaatttgaatacaggaatgaaatcacaggtacttgggggggggatatcattctagagcacgcaactgcaaagaaaacagaatgttgactgttagtttgtatagctttttagctaggaaaaaaaggctttggtacagtaatttcatctttatgattctgacactcaaattgggaatgttacctgcttggttgttgctgacttgatatgattcattagaaatttatatcttcagtactcaagtacttcttgaatctctgtattttactataaaatgtatgtaatgatttgttttatgaaatttagaacttgaacattgctgaattggaccactttttatttttaaatattgagtttaaatattttataactggttttgcactgaaaaaattaacatttcagattgacaagagagtaatctttcttcacttgcctcaataatgttattgagcaatgaattttttatttccgcatggaaagttattgatctctatggctgtaaaatatttctttatagcgttattaaagtgtgtcttaataaaattaaatttgggatacaaagtatttattttacaatgggtgggcgggggaaacttttccagaaagtttccaatatgacgttttcataagttgaaaaaactctccttagtgcttattttctaacttaaaattcacctggaactttaaatgggaaaggattcttttaattgtggattataggcataatactgtttgcatctgaattttctgtaagtgaataatagtttaatagaggaactcatgatttgtactattgaatgattaaactaagtatgaagtgataccattcagcatggcatcaggtcattgcagttttagttctgtgtaacacaagcactcactgaaattccagtttctaggattagtgtaggagcctaacgtgcttctactgttttaatgggttaatcctggattacttaacaatttatgtcaattgcactggtttaatttgttgctaaagaaataatgccctgggtttagtaacaaatacagctcaactattcttgaatatattttgaaaaaaaaatgtatgtaacttaccttttgtaaacgttccatttcttttttccctcatttttgactcttaaaggtgcaatttattactgaattgggatttctggcagcacagaactgctttttattttggggtctgtgagtttcttaggtattagcaatcttgcttataaaataagaacaccttttaattaatgagtgggtcattcctggtgcaattgtgatttttctttagccagaatgaatggcaaactctatttagagcaaagtaagtattagaaaaccctaggaactcttaatcaacgtttattacactttcattaaggcaaactacgtgaaagagccttggggaagttggcccatatcttactaagttgatcagatttctcgttgggctggaaatgtttcgctgttgtatattttaaagtaaattgcacctttgtaacatattgtattgacgaatgatcactaagattagctatatctatacagtcattagtttgacaagaaatagaatcctgtcagatgccaaagagtgggatttttatgtttaatgattaaacaccattatttattgacaatttaccctgtggaactgtattatttctaactatgaaataaaggggtgatgtaaacacacattgttgtgtggtgctttaaactaggtccactatcaacaggctacttactgttcaagaattccactgaagcacttattttaaggccctatttttcttaaacaaaacagtgacaacaacaatcaaaccatttacttttgatgctcattggcattttatgataaaagatgtattcatggcaatgatatgtattcaccctattaggaaacacaactggttacctatgagacctgttctgtccgtgtgcctacgttccttaataatagctaaataaaaatttgtagcttttaaaaaaaaaaaaaaaaaa

SEQ ID NO: 25664 - DNA, 3325 bp, Homo Sapiens
gccaggctgaggggagggtagagggtgaaaagctcggatctgtgtttggggaaggccaggcttgcgctcctcgccgggttccgcgaaggttaaccttggctgacttggctcgcgagcaaagggcagcgtctgagctcccggcgttccaggagtggcctcttttgtaggagcacctgaaatgcagcgtctggtgcactaagccgtagcggcagcagcagccacagcgacagcgctggggccctgtgtagaagctccatcccccttgtctttgtgcttgcctgcgtccccagactcagagattatcttagaagacctaggactccaaaaatgtttcccctgaaggacgctgaaatgggagcctttaccttctttgcctcggctctgccacatgatgtttgtggaagcaatggacttcctctcacaccaaattccatcaaaattttagggcgctttcaaatccttaaaaccatcacccatcccagactctgccagtatgtggatatttctaggggaaagcatgaacgactagtggtcgtggctgaacattgtgaacgtagtctggaagacttgcttcgagaaaggaaacctgtgaggtatccctcgtacttggcccctgaggtaattgcacagggaattttcaaaaccactgatcacatgccaagtaaaaaaccattgccttctggccccaaatcagatgtatggtctcttggaatcattttatttgagctttgtgtgggaagaaaattatttcagagcttggatatttctgaaagactaaaatttttgcttactttggattgtgtagatgacactttaatagttctggctgaagagcatggttgtttggacattataaaggagcttcctgaaactgtgatagatcttttgaataagtgccttaccttccatccttctaagaggccaaccccagatgaattaatgaaggacaaagtattcagtgaggtatcacctttatataccccctttaccaaacctgccagtctgttttcatcttctctgagatgtgctgatttaactctgcctgaggatatcagtcagttgtgtaaagatataaataatgattacctggcagaaagatctattgaagaagtgtattacctttggtgtttggctggaggtgacttggagaaagagcttgtcaacaaggaaatcattcgatccaaaccacctatctgcacactccccaattttctctttgaggatggtgaaagctttggacaaggtcgagatagaagctcgcttttagatgataccactgtgacattgtcgttatgccagctaagaaatagattgaaagatgttggtggagaagcattttacccattacttgaagatgaccagtctaatttacctcattcaaacagcaataatgagttgtctgcagctgccacgctccctttaatcatcagagagaaggatacagagtaccaactaaatagaattattctcttcgacaggctgctaaaggcttatccatataaaaaaaaccaaatctggaaagaagcaagagttgacattcctcctcttatgagaggtttaacctgggctgctcttctgggagttgagggagctattcatgccaagtacgatgcaattgataaagacactccaattcctacagatagacaaattgaagtggatattcctcgctgtcatcagtacgatgaactgttatcatcaccagaaggtcatgcaaaatttaggcgtgtattaaaagcctgggtagtgtctcatcctgatcttgtgtattggcaaggtcttgactcactttgtgctccattcctatatctaaacttcaataatgaagccttggcttatgcatgtatgtctgcttttattcccaaatacctgtataacttcttcttaaaagacaactcacatgtaatacaagagtatctgactgtcttctctcagatgattgcatttcatgatccagagctgagtaatcatctcaatgagattggtttcattccagatctctatgccatcccttggtttcttaccatgtttactcatgtatttccactacacaaaattttccacctctgggataccttactacttgggaattcctctttcccattctgtattggagtagcaattcttcagcagctgcgggaccggcttttggctaatggctttaatgagtgtattcttctcttctccgatttaccagaaattgacattgaacgctgtgtgagagaatctatcaacctgttttgttggactcctaaaagtgctacttacagacagcatgctcaacctccaaagccatcttctgacagcagtggaggcagaagttcggcaccttatttctctgctgagtgtccagatcctccaaagacagatctgtcaagagaatccatcccattaaatgacctgaagtcagaagtatcaccacggatttcagcagaggacctgattgacttgtgtgagctcacagtgacaggccacttcaaaacacccagcaagaaaacaaagtccagtaaaccaaagctcctggtggttgacatccggaatagtgaagactttattcgtggtcacatttcaggaagcatcaacattccattcagtgctgccttcactgcagaaggggagcttacccagggcccttacactgctatgctccagaacttcaaagggaaggtcattgtcatcgtggggcatgtggcaaaacacacagctgagtttgcagctcaccttgtgaagatgaaatatccaagaatctgtattctagatggtggcattaataaaataaagccaacaggcctcctcaccatcccatctcctcaaatatgaagaaccaagagtgtgactgccaaaacttagtgtggcatcagcaccaacagcacagttcttcatatccacgccactctcagacaaaactagatgtccagattgttgcatttccgtaaagtttgtcacgagacattttttaaaatctcataacccacatgttcagttatccatgcaagaaacttgactctacatgtattgctgaaagaattttcttaacagtgaaatctgatcatatatttttaccacactgccacataaagcccaagaaattcagctgacaagacagatttagcattatcaagaaatcccatttgccctgaaaaagctgtcctccattgtactgaacagacagtcctgtcgattgtgttatttagaaacatacactgaatgtgggctgaaatcatcatctttccataatgaaaactgagaaactattcacaatgcattccttataaataaatgctacatttagtaactcatttcacccaaaaaaaaaaaaaaaaaa

SEQ ID NO: 25665 - DNA, 1158 bp, Homo Sapiens
ctgttctgggagggctgtgaggatgtcttgcagatgctctggatttctgcggaggcacctccattcctttctggcttttttttgcgggggagggctttgggcctctttctttgagggaacaccgtcaaagaaagcctgggagatcgaggcttcagtgagccaggatggaaacgcgtgtcccaagtgtccggagcaggcggcagaggcctcagtgcggcaaacacagccccagagcctgtgtggcaccagcagcatcttagagccccaggtatatgctgagatcttatctcacgctgtcctccagtgtctggggggcccaaatgatggcacagggtcaggtgggctggaggggcgcagatgcctgtgttcagggagggtggccaccatgggccgaggtctcacccaggaccccttgctctgctcctcagccttgcagtcacggcagcactatggtggactgcccatggccgtgtgactttgggggcaagtgggagggcgccctgaataatgattgcaaggacaacaggcagaggctaccctagagcaggacacagggtgtggtactgacaaccctagtgtcacctcaaatccatgtccccacactctgggcatgggtgggacttgtgaccctaccctgtcaggcggaccagtggcccaggagccatgaggacagttgtgtgccactggaagagaaactttttgaaaaaccctaaatcaggtagagaaagcaaaaaatctctggccgtaaaccgtgctctctaatttatcggcagcttctgtggatgacctctgatgagcccgggctgcgtccacgccctgggcaggtaggcgggagcttccctgcgtgggcctcatttcttgctgcagagaatcttttgcactaagtcatgctgtttcctcaaagaagctttgttttttgttaacgtattactcagagtcacccaagcctcttggctgagggtgaaggtgggacgggaggcgggagggggctggtggtgccgctcgtgcggtgtcaacgctgcagggagttgtggcaccttggtgccctctgagcacctggccgcctgctgtccccggtgcctgtgaaattcgtcatgccatgacccacctgcattaaacctatttttttaatgtgaaaaaaaaaaaaaaaaaaaaaaa

SEQ ID NO: 25666 - DNA, 1966 bp, Homo Sapiens
gaggggcgaaaggacatttttttttttcttgctcccgcctctgttcttcccccacctgccacgtacagagcccaagttctcgctaggcttgttgggtcagcgcgattggccggggcccgcgcgagcctgcgagcgaggtgcggcggtcgcgaagggcaaccgagggggccgtgaccaccgcctccccgcgacgccccagtccagtggcctcgcgtccgcccattcagcggagacctgcggagaggcggcggccgcggcctccgcaagccgtctttctctagagttgtatatatagaacatcctggagtccaccatgaacggacagttggatctaagtgggaagctaatcatcaaagctcaacttggggaggatattcggcgaattcctattcataatgaagatattacttatgatgaattagtgctaatgatgcaacgagttttcagaggaaaacttctgagtaatgatgaagtaacaataaagtataaagatgaagatggagatcttataacaatttttgatagttctgacctttcctttgcaattcagtgcagtaggatactgaaactgacattatttgttaatggccagccaagaccccttgaatcaagtcaggtgaaatatctccgtcgagaactgatagaacttcgaaataaagtgaatcgtttattggatagcttggaaccacctggagaaccaggaccttccaccaatattcctgaaaatgatactgtggatggtagggaagaaaagtctgcttctgattcttctggaaaacagtctactcaggttatggcagcaagtatgtctgcttttgatcctttaaaaaaccaagatgaaatcaataaaaatgttatgtcagcgtttggcttaacagatgatcaggtttcagggccacccagtgctcctgcagaagatcgttcaggaacacccgacagcattgcttcctcctcctcagcagctcacccaccaggcgttcagccacagcagccaccatatacaggagctcagactcaagcaggtcagattgaaggtcagatgtaccaacagtaccagcaacaggccggctatggtgcacagcagccgcaggctccacctcagcagcctcaacagtatggtattcagtattcagcaagctatagtcagcagactggacctcaacaacctcagcagttccagggatatggccagcaaccaacttcccaggcaccagctcctgccttttctggtcagcctcaacaactgcctgctcagccgccacagcagtaccaggcgagcaattatcctgcacaaacttacactgcccaaacttctcagcctactaattatactgtggctcctgcctctcaacctggaatggctccaagccaacctggggcctatcaaccaagaccaggttttacttcacttcctggaagtaccatgacccctcctccaagtgggcctaatccttatgcgcgtaaccgtcctccctttggtcagggctatacccaacctggacctggttatcgataaggaggctcctctacaccaattaatgtagctgctagctattggcctcccaaaagactccagtactattttaatttgtattgaagaagttcagaaatttaaaagcagagcattttttatgatatcattgttggtgttaattgaaagtataatttgctggaacacaaagaccaaaatgaaagttttttcctccctgcttaaaaatgtagcagcttcttagttactttggaacactactcttacatgtataaagtgattgacttgactttctagcttcccttgtccggaggatattaaaatgctagggtgaggtttagccatcttacttggctttttactattaacatgatgtactaaagtagagccctttgagaatacaagatattatgtataaaatgtaacactgatgataggttaataaagatgattgaatccaaaaaaaaaaaaaaaaaa

SEQ ID NO: 25667 - DNA, 2292 bp, Homo Sapiens
ggagaaaggcaggcagccggcgggcgctgcgtgtgtgtttgagtgtgcgagtgtgagtgagtgtgagtgccgggtcctgcctctcctggtgcccccagcagaggggcccggtggcctggggagggcgggcgggctgctcggaggcagaggcagcaagaggcggcggcggggagagccgagaaggaggaggaggagagaggaaagagcggagcagccattgttgagggaaaccttgcaaacaaagaaggctccggactccccgcggccccccgccccccaggccggccccctggcccccggcccccggcccagtggccattgtaactttcccccgggacagcggccgccgcggggcgggccgaggctgtgcgtgcgagtctttgtgcggccggcggactggagctcccagtcgggcctgcccgtcccactcgggacatgagctgctgaagttgtccccccgtcagccctcacccctgccaggactcctctgggcttgcagtcgctcccccgtacctctcctggccccctcagttctcccaggttgttcctcaaagtcattcaagctgtactcgccgaaggagcccccgaacggcaacgcctttccccccttccatcccggcaccatgctggatagggatgtgggcccaactcccatgtatccgcctacatacctggagccagggattgggaggcacacaccatatggcaaccaaactgactacagaatatttgagcttaacaaacggcttcagaactggacagaggagtgtgacaatctctggtgggatgcattcacgactgagttctttgaggatgatgccatgttgaccatcactttctgcctggaggatggaccaaagagatataccattggccggaccctgatcccacgctacttccgcagcatctttgaggggggtgctacggagctgtactatgttcttaagcaccccaaggaggcattccacagcaactttgtgtccctcgactgtgaccagggcagcatggtgacccagcatggcaagcccatgttcacccaggtgtgtgtggagggccggttgtacctggagttcatgtttgacgacatgatgcggataaagacgtggcacttcagcatccggcagcaccgagagctcatcccccgcagcatccttgccatgcatgcccaagacccccagatgttggatcagctctccaaaaacatcactcggtgtgggctgtccaattccactctcaactacctccgactctgtgtgatactcgagcccatgcaagagctcatgtcacgccacaagacctacagcctcagcccccgcgactgcctcaagacctgccttttccagaagtggcagcgcatggtagcaccccctgcggagcccacacgtcagcagcccagcaaacggcggaaacggaagatgtcagggggcagcaccatgagctctggtggtggcaacaccaacaacagcaacagcaagaagaagagcccagctagcaccttcgccctctccagccaggtacctgatgtgatggtggtgggggagcccaccctgatgggcggggagttcggggacgaggacgagaggctcatcacccggctggagaacacccagtttgacgcagccaacggcattgacgacgaggacagctttaacaactcccctgcactgggcgccaacagcccctggaacagcaagcctccgtccagccaagaaagcaaatcggagaaccccacgtcacaggcctcccagtaaaaggccctgctgtggccacccagtgctctgcctacctgccccacccctcacagccccagggagcagaagacagaatgaagagactgagcatctaaaatgggcagcctccatccacccgcttcagggaggaactggactctctgggggcaggtgccaagatttgcccccccagtggccctgggctgggcctggcctctacagagccttttagggggagggggtactcatgtggatgcctacttggaacctgggcctctgagacatgtcctgaccaccccccagggcatttgcctccatcttcaccccagattgtgggtttcccatccccctgactttacccctttcaagcctggggttgtctatacccacagcccttagggacttaaagttacggggcttcgttgaatgctccttcccctaggcagctggtaatagaggggtaaagctctgggcccctcctccctgctgccacttatcccagctccaagtttttttaaaaataatattattaaaaatgtaagttaaaaaaaaaaaaaaaaaa

SEQ ID NO: 25668 - DNA, 2521 bp, Homo Sapiens
cctgagtggaacatggcgacttgcgccgaaatcctgcggagcgagttccccgaaattgacggacaagtcttcgactacgtgaccggcgtcttgcacagcggcagcgcggacttcgagtctgtggatgacctggtggaagctgtaggggaactattgcaagaggtgtccggggacagcaaggatgacgcgggcatcagggccgtgtgccagcgcatgtacaacactctgcgtctggctgagccacaaagccagggaaatagccaggtgctactggacgcccctatccagttgtcaaagataacggagaactacgactgtggaaccaaacttccaggactgctaaagagggaacagtcctcgacagtgaatgcaaagaagttagagaaggccgaggctcgacttaaggcaaagcaggagaagcgctcagagaaggacacgctcaagaccagcaaccctctagtcttagaagaggcatcagccagccaggcaggcagcagaaaggagagtcggttggaatcatctggcaagaacaaatcctatgatgtgcgaattgagaactttgatgtgtcttttggcgatagagtactgctggctggagcggatgtgaacctggcatggggccgccgttacgggctggtggggcggaatgggttggggaagacaacgttactgaagatgctggccacccggagtctgcgggttccagcccacatttccctgctgcacgttgagcaagaggttgctggagatgacactcctgccctgcagagtgtgctggagagtgacagtgtgcgagaggatttgttacggagggagcgggagctcactgcccagattgctgctggcagggcggagggctctgaagctgcagagctggcagaaatctatgccaaactggaggagattgaggctgacaaggcacctgccagggcatcagtcattctcgctgggcttggctttacccctaaaatgcagcagcagcccacccgggagttctcaggtggctggaggatgaggctggccctggcccgggccctctttgctaggccagatcttctgctgttagatgaacctacaaacatgctggatgtcagggccatcctgtggctggagaattacctgcagacgtggccctccaccatcctagtcgtctcccacgaccgcaacttcttgaatgccatcgccacagacatcatccacctgcacagccagcggctagatggttaccggggagactttgagaccttcatcaagagtaagcaggagcggctgctcaaccagcagcgtgaatatgaggcgcagcagcagtatcgccagcacatccaggttttcattgaccggtttcgctacaatgccaacagggcctctcaagtgcagagtaaactcaagatgctggagaagctgcctgagctgaagcctgtggacaaggaatcagaggtcgtaatgaagttccctgatgggtttgagaagttctcgccgccaattctgcagctagatgaggtggatttctactacgatccgaagcacgtcatcttcagtcgcctctctgtgtctgctgatctcgagtctcgcatctgtgtggttggagagaatggggctgggaagtctaccatgctgaagctgcttttgggggacctggcacctgttcggggcatcagacacgctcacaggaatctgaagattggctatttcagccagcaccatgtggagcagctggacctaaacgtcagtgctgtggaactgctggcacgcaagtttcctgggcggcctgaggaggagtaccgtcaccagctgggtcggtatggcatctccggagaactggccatgcgtcctcttgccagcctgtctgggggccagaagagccgagtggcctttgctcagatgactatgccctgccccaacttctacattctggatgaacccacaaaccacctggacatggagaccattgaggctctgggccgtgccctcaacaatttcaggggtggtgtgattctggtgtcccacgatgagcgctttatcaggctggtgtgccgggagttgtgggtatgcgaaggaggcggcgtcacccgtgtggaaggaggatttgaccagtaccgcgccctcctccaggaacagttccgccgcgaaggcttcctctagggccaccaggctgaggactcgcccaggacatggactggtctctcagacccctgggccaccatgtaggccaccactccaggccgtggacttcccccaacttggggacagccttattcccaaatgtctctatccttttgactggagcatcttctgcacaaccttgggagcccatccaagggttggtgaggactggtctcccgggggtgggggtctggggggtaccctctggggttatagattcccccactgccccagctctgactggaccccaagtggctgctatgtaaattaaatctctccccgcgtcaaaaaaaaaaaaaaaaaaaaaaaaaaaaaaaaaaaaaaaaaaaaaaaaaaaaaaaaaaaaaaaaaaaaaaaa

SEQ ID NO: 25669 - DNA, 2046 bp, Homo Sapiens
gctcaccgacttcatagggtgccgaattcttttttccccaggcttgccatggctagtcgaggggctcggcagcgcctgaagggcagcggggccagcagtggggatacggccccggctgcggacaagctgcgggagctgctgggcagccgagaggcgggcggcgcggagcaccggaccgagttatctgggaacaaagcaggacaagtctgggcacctgaaggatctactgctttcaagtgtctgctttcagcaaggttatgtgctgctctcctgagcaacatctctgactgtgatgaaacattcaactactgggagccaacacactacctcatctatggggaagggtttcagacttgggaatattccccagcatatgccattcgctcctatgcttacctgttgcttcatgcctggccagctgcatttcatgcaagaattctacaaactaataagattcttgtgttttactttttgcgatgtcttctggcttttgtgagctgtatttgtgaactttacttttacaaggctgtgtgcaagaagtttgggttgcacgtgagtcgaatgatgctagccttcttggttctcagcactggcatgttttgctcatcatcagcattccttcctagtagcttctgtatgtacactacgttgatagccatgactggatggtatatggacaagacttccattgctgtgctgggagtagcagctggggctatcttaggctggccattcagtgcagctcttggtttacccattgcctttgatttgctggtcatgaaacacaggtggaagagtttctttcattggtcgctgatggccctcatactatttctggtgcctgtggtggtcattgacagctactattatgggaagttggtgattgcaccactcaacattgttttgtataatgtctttactcctcatggacctgatctttatggtacagaaccctggtatttctatttaattaatggatttctgaatttcaatgtagcctttgctttggctctcctagtcctaccactgacttctcttatggaatacctgctgcagagatttcatgttcagaatttaggccacccgtattggcttaccttggctccaatgtatatttggtttataattttcttcatccagcctcacaaagaggagagatttcttttccctgtgtatccacttatatgtctctgtggcgctgtggctctctctgcacttcagcacagttttctgtacttccagaaatgttaccactttgtgtttcaacgatatcgcctggagcactatactgtgacatcgaattggctggcattaggaactgtcttcctgtttgggctcttgtcattttctcgctctgtggcactgttcagaggatatcacgggccccttgatttgtatccagaattttaccgaattgctacagacccaaccatccacactgtcccagaaggcagacctgtgaatgtctgtgtgggaaaagagtggtatcgatttcccagcagcttccttcttcctgacaattggcagcttcagttcattccatcagagttcagaggtcagttaccaaaaccttttgcagaaggacctctggccacccggattgttcctactgacatgaatgaccagaatctagaagagccatccagatatattgatatcagtaaatgccattatttagtggatttggacaccatgagagaaacaccccgggagccaaaatattcatccaataaagaagaatggatcagcttggcctatagaccattccttgatgcttctagatcttcaaagctgctgcgggcattctatgtccccttcctgtcagatcagtatacagtgtacgtaaactacaccatcctcaaaccccggaaagcaaagcaaatcaggaagaaaagtggaggttagcaacacacctgtggccccaaaggacaaccatcttgttaactattgattccagtgacctgactccctgcaagtcatcgcctgtaacatttgtaataaaggtcttctgacatgaaaaaaaaaaaaaaaaaaaaaaaaaaaaaa

SEQ ID NO: 25670 - DNA, 2153 bp, Homo Sapiens
gccaggctctccacccccacttcccaattgaggaaaccgaggcagaggaggctcagagagctaccggtggacccacggtgcctccctccctgggatctacacagaccatggccttgccaacggctcgacccctgttggggtcctgtgggacccccgccctcggcagcctcctgttcctgctcttcagcctcggatgggtgcagccctcgaggaccctggctggagagacagggcaggaggctgcgcccctggacggagtcctggccaacccacctaacatttccagcctctcccctcgccaactccttggcttcccgtgtgcggaggtgtccggcctgagcacggagcgtgtccgggagctggctgtggccttggcacagaagaatgtcaagctctcaacagagcagctgcgctgtctggctcaccggctctctgagccccccgaggacctggacgccctcccattggacctgctgctattcctcaacccagatgcgttctcggggccccaggcctgcacccgtttcttctcccgcatcacgaaggccaatgtggacctgctcccgaggggggctcccgagcgacagcggctgctgcctgcggctctggcctgctggggtgtgcgggggtctctgctgagcgaggctgatgtgcgggctctgggaggcctggcttgcgacctgcctgggcgctttgtggccgagtcggccgaagtgctgctaccccggctggtgagctgcccgggacccctggaccaggaccagcaggaggcagccagggcggctctgcagggcgggggacccccctacggccccccgtcgacatggtctgtctccacgatggacgctctgcggggcctgctgcccgtgctgggccagcccatcatccgcagcatcccgcagggcatcgtggccgcgtggcggcaacgctcctctcgggacccatcctggcggcagcctgaacggaccatcctccggccgcggttccggcgggaagtggagaagacagcctgtccttcaggcaagaaggctcccgagatagacgagagcctcatcttctacaagaagtgggagctggaagcctgcgtggatgcggccctgctggccacccagatggaccgcgtgaacgccatccccttcacctacgagcagctggacgtcctaaagcataaactggatgagctctacccacaaggttaccccgagtctgtgatccagcacctgggctacctcttcctcaagatgagccctgaggacattcgcaagtggaatgtgacgtccctggagaccctgaaggctttgcttgaagtcaacaaagggcacgaaatgagtcctcaggtggccaccctgatcgaccgctttgtgaagggaaggggccagctagacaaagacaccctagacaccctgaccgccttctaccctgggtacctgtgctccctcagccccgaggagctgagctccgtgccccccagcagcatctgggcggtcaggccccaggacctggacacgtgtgacccaaggcagctggacgtcctctatcccaaggcccgccttgctttccagaacatgaacgggtccgaatacttcgtgaagatccagtccttcctgggtggggcccccacggaggatttgaaggcgctcagtcagcagaatgtgagcatggacttggccacgttcatgaagctgcggacggatgcggtgctgccgttgactgtggctgaggtgcagaaacttctgggaccccacgtggagggcctgaaggcggaggagcggcaccgcccggtgcgggactggatcctacggcagcggcaggacgacctggacacgctggggctggggctacagggcggcatccccaacggctacctggtcctagacctcagcatgcaagaggccctctcggggacgccctgcctcctaggacctggacctgttctcaccgtcctggcactgctcctagcctccaccctggcctgagggccccactcccttgctggccccagccctgctggggatccccgcctggccaggagcaggcacgggtggtccccgttccaccccaagagaactcgcgctcagtaaacgggaacatgccccctgcagccaaaaaaaaaaaaaaaaaaaaaaaaaaaaaaaaaaaaaaaaaaaaaaaaa

SEQ ID NO: 25671 - DNA, 2708 bp, Homo Sapiens
ccgagccgcgccgagccgcgccgatcgccatccggcctcggcactcgcgcgcgatcccggccggcggcgcggcccggcgggccaggcggcgccacagcccatggagctcgagaacatcgtagcgaacacggtgctactcaaggcccgggaaggtggcggtggaaatcgcaaaggcaaaagcaagaaatggcggcagatgctccagttccctcacatcagccagtgcgaagagctgcggctcagcctcgagcgtgactatcacagcctgtgcgagcggcagcccattgggcgcctgctgttccgagagttctgtgccacgaggccggagctgagccgctgcgtcgccttcctggatggggtggccgagtatgaagtgaccccggatgacaagcggaaggcatgtgggcggcagctaacgcagaattttctgagccacacgggtcctgacctcatccctgaggtcccccggcagctggtgacgaactgcacccagcggctggagcagggtccctgcaaagaccttttccaggaactcacccggctgacccacgagtacctgagcgtggccccttttgccgactacctcgacagcatctacttcaaccgtttcctgcagtggaagtggctggaaaggcagccagtgaccaaaaacaccttcaggcaataccgagtcctgggcaaaggtggctttggggaggtgtgcgcctgccaggtgcgggccacaggtaagatgtatgcctgcaagaagctagagaaaaagcggatcaagaagcggaaaggggaggccatggcgctgaacgagaagcagatcctggagaaagtgaacagtaggtttgtagtgagcttggcctacgcctatgagaccaaggacgcgctgtgcctggtgctgacactgatgaacgggggcgacctcaagttccacatctaccacatgggccaggctggcttccccgaagcgcgggccgtcttctacgccgccgagatctgctgtggcctggaggacctgcaccgggagcgcatcgtgtacagggacctgaagcccgagaacatcttgctggatgaccacggccacatccgcatctctgacctgggactagctgtgcatgtgcccgagggccagaccatcaaagggcgtgtgggcaccgtgggttacatggctccggaggtggtgaagaatgaacggtacacgttcagccctgactggtgggcgctcggctgcctcctgtacgagatgatcgcaggccagtcgcccttccagcagaggaagaagaagatcaagcgggaggaggtggagcggctggtgaaggaggtccccgaggagtattccgagcgcttttccccgcaggcccgctcactttgctcacagctcctctgcaaggaccctgccgaacgcctggggtgtcgtgggggcagtgcccgcgaggtgaaggagcaccccctctttaagaagctgaacttcaagcggctgggagctggcatgctggagccgccgttcaagcctgacccccaggccatttactgcaaggatgttctggacattgaacagttctctacggtcaagggcgtggagctggagcctaccgaccaggacttctaccagaagtttgccacaggcagtgtgcccatcccctggcagaacgagatggtggagaccgagtgcttccaagagctgaatgtctttgggctggatggctcagttcccccagacctggactggaagggccagccacctgcacctcctaaaaagggactgctgcagagactcttcagtcgccaagattgctgtggaaactgcagcgacagcgaggaagagctccccacccgcctctagcccccagcccgaggcccccaccagcagttggcggtagcagctactccgagcgccgtttacagttttgcacagtgatcttccccattgtccactcaagtcgtggcctggggaacacagacggagctgtccccagtgtcctccgtccctcagcccctggcctggctgagtttggcagggcctgggccatccctgggacaaaggtgcgtcccttcagctcttctccgtggagctcggggctttctgtatttatgtatttgtacgaatgtatatagcgaccagagcattcttaattcccgccgcagacctggcgcccccgccttggctcctgggggcagccagccctggctgggagagcgggagctggcagaggagccactgccaaactcaaggctcctctggcccagcttggatggctgagggtggtcacacccctgagccttcagcactgtgctggccaccccggcctctgagtaagactcgtgcctccccctgctgccctgggctcaggctgctaccctctggggcccaaagctgtcccttctcagtgcttgtcagcgctgggtctggggcctctgtatgccctaggcctgtgccaaagtggccagagattgggctgcctgtgatacccatcagcccactgccccggccggcccagataggtctgcctctgccttccagctcccacagcctggtccctgatactgggctctgtcctgcagacacctctttcagaaacgcccaagcccagcccctaggagggggtggggcatccctggtcaaccctcaaacattccggactcccctcataacaatagacacatgtgcccagcaaaaaaaaaaaaaaaaaaaaaaaaaaaaaaaaaaaaaaaaaaaaaaa

SEQ ID NO: 25672 - DNA, 3431 bp, Homo Sapiens
gaaacttcggcgtgaagtgcagctccgctccggctccctctagctttctttccttctctggaatccgaggcgcggatcttcctcgccccaccgccctagttttttcgggagctcgccggtgccctctagggtgtcggctcgtgctgggaagtgccctccatcctggtaatggggggcggcgaggcaccgtaggagtggcgaggcggcgcccagggtggcactgccccggaacggggcgctgggtgcgcgcgggagggtccccgcgcgggctccgccgctgccgcagctgcgagcgcgccgcgccaccgagcctcctgcagcaatggctcgtccgtgaaacgcgagccacggctgctctttttaagagtgcctgcatcctccgtttgcgcttcgcaactgtcctgggtgaaaatggctgtctagactaaaatgtggcagaagggaccaagcagtggatattgagcctgtgaagtccaactcttaagctccgagacctgggggactgagagcccagctctgaaaagtgcatcatgaattccggagttgccatgaaatatggaaacgactcctcggccgagctgagtgagctccattcagcagccctggcatcactaaagggagatatagtggaacttaataaacgtctccagcaaacagagagggaacgggaccttctggaaaagaaattggccaaggcacagtgcgagcagtcccacctcatgagagagcatgaggatgtccaggagcgaacgacgcttcgctatgaggaacgcatcacagagctccacagcgtcattgcggagctcaacaagaagatagaccgtctgcaaggcaccaccatcagggaggaagatgagtactcagaactgcgatcagaactcagccagagccaacacgaggtcaacgaggactctcgaagcatggaccaagaccagacctctgtctctatccccgaaaaccagtctaccatggttactgctgacatggacaactgcagtgacctgaactcagaactgcagagggtgctgacagggctggagaatgttgtctgcggcaggaagaagagcagctgcagcctctccgtggccgaggtggacaggcacattgagcagctcaccacagccagcgagcactgtgacctggctattaagacagtcgaggagattgagggggtgcttggccgggacctgtatcccaacctggctgaagagaggtctcggtgggagaaggagctggctgggctgagggaagagaatgagagcctgactgccatgctgtgcagcaaagaggaagaactgaaccggactaaggccaccatgaatgccatccgggaagagcgggaccggctccggaggagggtcagagagcttcaaactcgactacagagcgtgcaggccacaggtccctccagccctggccgcctcacttccaccaaccgcccgattaaccccagcactggggagctgagcacaagcagcagcagcaatgacattcccatcgccaagattgctgagagggtgaagctatcaaagacaaggtccgaatcgtcatcatctgatcggccagtcctgggctcagaaatcagtagcataggggtatccagcagtgtggctgaacacctggcccactcacttcaggactgctccaatatccaagagattttccaaacactctactcacacggatctgccatctcagaaagcaagattagagagtttgaggtggaaacagaacggctgaatagccggattgagcacctcaaatcccaaaatgacctcctgaccataaccttggaggaatgtaaaagcaatgccgagaggatgagcatgctggtgggaaaatacgaatccaatgccacagcgctgaggctggccttgcagtacagcgagcagtgcatcgaagcctacgaactcctcctggcgctggcagagagtgagcagagcctcatcctggggcagttccgagcggcgggcgtggggtcctcccctggagaccagtcgggggatgaaaacatcactcagatgctcaagcgagctcatgactgccggaagacagctgagaatgctgccaaggccctgctcatgaagctggacggcagctgtgggggagcctttgccgtggccggctgcagcgtgcagccctgggagagcctttcctccaacagccacaccagcacaaccagctccacagccagtagttgcgacaccgagttcactaaagaagacgagcagaggctgaaggattatatccagcagctcaagaatgacagggctgcggtcaagctgaccatgctggagctggaaagcatccacatcgatcctctcagctatgacgtcaagcctcggggagacagccagaggctggatctggaaaacgcagtgcttatgcaggagctcatggccatgaaggaggagatggccgagttgaaggcccagctctacctactggagaaagagaagaaggccctggagctgaagctgagcacgcgggaggcccaggagcaggcctacctggtgcacattgagcacctgaagtccgaggtggaggagcagaaggagcagcggatgcgatccctcagctccaccagcagcggcagcaaagataaacctggcaaggagtgtgctgatgctgcctccccagctctgtccctagctgaactcaggacaacgtgcagcgagaatgagctggctgcggagttcaccaacgccattcgtcgagaaaagaagttgaaggccagagttcaagagctggtgagtgccttggagagactcaccaagagcagtgaaatccgacatcagcaatctgcagagttcgtgaatgatctaaagcgggccaacagcaacctggtggctgcctatgagaaagcaaagaaaaagcatcaaaacaaactgaagaagttagagtcgcagatgatggccatggtggagagacatgagacccaagtgaggatgctcaagcaaagaatagctctgctagaggaggagaactccaggccacacaccaatgaaacttcgctttaatcagcactcacgcaccggagttctgcccatgggaagtaaactgcagcaggccactggggacagaagggcccatgtacttgttgggaggaggaggaaagggaaggctggcaggtaggtcggcacttggacaatggagtgccccaactcaacccttggggtgactggccatggtgacattgtggactgtatccagaggtgcccgctcttccctcctgggcccacaacagcgtgtaaacacatgttctgtgcctgctcagcagagcctcgtttctgctttcagcactcactctccccctcctcttctggtctggcggctgtgcatcagtgggatcccagacatttgtttctgtaagattttccattgtatcctctttttggtagatgctgggctcatcttctaaaaaaaaaaaa

SEQ ID NO: 25673 - DNA, 3551 bp, Homo Sapiens
cgcgcgcacctaccgaggcgcgggcgctgcagaggctcccagcccaagcctgagcctgagcccgccccgaggtccccgccccgcccgcctggctctctcgccgcggagccgccaagatgggggacaagaaagatgacaaggactcacccaagaagaacaagggcaaggagcgccgggacctggatgacctcaagaaggaggtggctatgacagagcacaagatgtcagtggaagaggtctgccggaaatacaacacagactgtgtgcagggtttgacccacagcaaagcccaggagatcctggcccgggatgggcctaacgcactcacgccaccgcctaccaccccagagtgggtcaagttttgccggcagctcttcgggggcttctccatcctgctgtggatcggggctatcctctgcttcctggcctacggtatccaggcgggcaccgaggacgacccctctggtgacaacctgtacctgggcatcgtgctggcggccgtggtgatcatcactggctgcttctcctactaccaggaggccaagagctccaagatcatggagtccttcaagaacatggtgccccagcaagccctggtgatccgggaaggtgagaagatgcaggtgaacgctgaggaggtggtggtcggggacctggtggagatcaagggtggagaccgagtgccagctgacctgcggatcatctcagcccacggctgcaaggtggacaactcctccctgactggcgaatccgagccccagactcgctctcccgactgcacgcacgacaaccccttggagactcggaacatcaccttcttttccaccaactgtgtggaaggcacggctcggggcgtggtggtggccacgggcgaccgcactgtcatgggccgtatcgccaccctggcatcagggctggaggtgggcaagacgcccatcgccatcgagattgagcacttcatccagctcatcaccggcgtggctgtcttcctgggtgtctccttcttcatcctctccctcattctcggatacacctggcttgaggctgtcatcttcctcatcggcatcatcgtggccaatgtcccagagggtctgctggccactgtcactgtgtgtctgacgctgaccgccaagcgcatggcccggaagaactgcctggtgaagaacctggaggctgtagaaaccctgggctccacgtccaccatctgctcagataagacagggaccctcactcagaaccgcatgacagtcgcccacatgtggtttgacaaccagatccacgaggctgacaccactgaggaccagtcagggacctcatttgacaagagttcgcacacctgggtggccctgtctcacatcgctgggctctgcaatcgcgctgtcttcaagggtggtcaggacaacatccctgtgctcaagagggatgtggctggggatgcgtctgagtctgccctgctcaagtgcatcgagctgtcctctggctccgtgaagctgatgcgtgaacgcaacaagaaagtggctgagattcccttcaattccaccaacaaataccagctctccatccatgagaccgaggaccccaacgacaaccgatacctgctggtgatgaagggtgcccccgagcgcatcctggaccgctgctccaccatcctgctacagggcaaggagcagcctctggacgaggaaatgaaggaggccttccagaatgcctaccttgagctcggtggcctgggcgagcgcgtgcttggtttctgccattattacctgcccgaggagcagttccccaagggctttgccttcgactgtgatgacgtgaacttcaccacggacaacctctgctttgtgggcctcatgtccatgatcgacccaccccgggcagccgtccctgacgcggtgggcaagtgtcgcagcgcaggcatcaaggtcatcatggtcaccggcgatcaccccatcacggccaaggccattgccaagggtgtgggcatcatctctgagggcaacgagactgtggaggacatcgccgcccggctcaacattcccgtcagccaggttaacccccgggatgccaaggcctgcgtgatccacggcaccgacctcaaggacttcacctccgagcaaatcgacgagatcctgcagaatcacaccgagatcgtcttcgcccgcacatccccccagcagaagctcatcattgtggagggctgtcagagacagggtgcaattgtggctgtgaccggggatggtgtgaacgactcccccgctctgaagaaggccgacattggggtggccatgggcatcgctggctctgacgtctccaagcaggcagctgacatgatcctgctggacgacaactttgcctccatcgtcacaggggtggaggagggccgcctgatcttcgacaacctaaagaagtccattgcctacaccctgaccagcaatatcccggagatcacgcccttcctgctgttcatcatggccaacatcccgctgcccctgggcaccatcaccatcctctgcatcgatctgggcactgacatggtccctgccatctcactggcgtacgaggctgccgaaagcgacatcatgaagagacagcccaggaacccgcggacggacaaattggtcaatgagagactcatcagcatggcctacgggcagattggaatgatccaggctctcggtggcttcttctcttactttgtgatcctggcagaaaatggcttcttgcccggcaacctggtgggcatccggctgaactgggatgaccgcaccgtcaatgacctggaagacagttacgggcagcagtggacatacgagcagaggaaggtggtggagttcacctgccacacggccttctttgtgagcatcgttgtcgtccagtgggccgatctgatcatctgcaagacccggaggaactcggtcttccagcagggcatgaagaacaagatcctgatcttcgggctgtttgaggagacggccctggctgccttcctgtcctactgccccggcatggacgtggccctgcgcatgtaccctctcaagcccagctggtggttctgtgccttcccctacagtttcctcatcttcgtctacgacgaaatccgcaaactcatcctgcgcaggaacccagggggttgggtggagaaggaaacctactactgacctcagccccaccacatcgcccatctcttccccgtcccgcaggcccaggaccgcccctgtcagtccccccaattttgtattctggggggaggagccctctcttcctgtggccccaccttggcccccaccccctccactatctcctgccgcccccactctggctggcttctctcccctgccccaaacctctctcctctctcttttctgtgtcagtttctctccctctcctcacccctctatccattcctcccgccccagccacctccctgggctcttttttactccccttcagccccccggctgatgccatctctggttctggacaattatcaaatatatcagtggggagagagaaaaaaaaaaaaaaaaaaaaaaaaaaaaaaaaaaaaaaaa

SEQ ID NO: 25674 - DNA, 3821 bp, Homo Sapiens
ggcacgaggcacagctcacgaggctcagctgtcctccatccttccccctgtcctttggtgcctctgtttgcaagatgtgcagaaacaccagagggccagaggagaccctccttttactgaatgctggcagcctcctgagaaccacgtctgccagcagcagagagcagagagtgtggacgagcatgggcgactgaggtcccaaatggcgcgagccgctgggccctcctgcttgtgccgatgtctcaggctcgattgaagctggaagaaaccaaggacaatgtgtcctttaaaagtgtaaggttagaaggtgccctgactccagccgacctggaaaaggacgtgtcctgcatatctggaggtggcccacagggtccgggaaagatcggctgccttgcctgcatcccagggcgcttcccggcctccattaagaggtgaccattgcatccacgtgatttcttttgctccactatttccaggcacagtgcaactgactccctcttgaagctagaatgccctgcacacccgggatggacttctctcccctttcaaagatcgagtgaagtttgcaaatgtgaaaggaaggaattgcatttccagtggtaacctttgaaggggaatgaaattgtcacaggacgtcaggagccacgtgggggagcccggtgtcctctgagtctcaacgccccttgcttcccgcttggtgacggtcgatggctgtgtccagcggtgaacgctttaccacaggactctacggtggggtaggcagcgccacttcaatgtgaagacaaatgaactggcgtctcttgagataggcccctgcctccaggacctctcaggccccgggccctggttactgccgtggaagctgcctgttcagacgtcatctctatcaccccttgaagggagacagagaggtgtttgcgagttggatgttttatcttgtctttcctgattctttgttagaacacccccagggcttggtttttgttctcaacctgtgattagaaataagatcctaaagtgtcagatctggaaggcccatgagagctgaggagatcaaatgcccggagctcgggagatcagatgacctggggtgtctggagccagtggtggcctcatctgcagcatcttcctctgtcctgcccaccacagagtccctgctggccccggggggcccctcctccgccacagggcccctgagcattgctgcgtttgtttctccagctcctccttcctgcagaagcagttcccagaggggcaatttctccagcctgcctggttggttgtgttgattggttatagttgctctttcaggtgaccgcagaccctctgaaggctgtggccgtgggtgtggctctatggccacctctctctcttctcctctcccaggtcgcgtctccttcttcacctcggggtccgagaacctacaccgcgtggagaaggtccactggggcacccgttacgccattaccatcgccttcagctgcaaccccgaccatggcatcgaggacccagcgttcccgtagccagcagccgggccaaggtaacttcaggagggcccgtgtggaggcagccgcgccagtcgtgcacccacccccacgtccacccgctcctgttgcacagagtgccttaggaattctctgattttgatttgctgacgtgttaatcttttcatctgtgagtaaatgaagggaaccagcttttcacttctccagcatcatgtgtgcttgggctgtaggcctgggagcctgaggtggaggccaggaaagggacccagcaggacggggcacaagtccccatctgtgaatggacgggactcatccacccaggttcagcaaccccccgggactcgtccaggttcagcaaccccccggcccatcaaagactggctaaagcatcagccataaatggggacaaacgtggggccagcagcttctgttcggggtctcggcatcagcaaaccgcagcagctttggagaagggtccgtgagtggcggctctggaggcagcaacggggtcctttggggtgggtgggagttctgctggattcaggtggaggtgaacatctgccgttcccacagccctgcgtgcacccccaatgctgctggcccacaaatcaccgtgggccacggccccaccacaccaggcttggccctgtcagcggccagcatcccgagggccagggtccgagtgtcctcaccaaggaggctcttggcgtcgctgtgccggctcccatgggccttctgctgggtcgagggtaggtctcctcctccccctttgccctggcattaaactgatggtcaggctgggcgcggtggctcacacctgtaatctcagcactgcgggaggccgaggcaggaggatcacttgaggtcaggagttcaagaccagcctggccaacatggcgaaaccctgtctctactaaaaacacaaaaacaaattaatcccagctactggggaggctgaggcaggagaatcgcttgaacccagggggcagaagttgcagtgagccgagatcgtgccactacactccagcctgggtgacagagtgagactccatcttaaaaatataaaaataaagtggtggtcagaggagccccgaatagaccagttgtggagaggcctgggtggggtggctggcagggagggcaggccaagcccagtttctgcccacagtcacctcgaggtgactgtccagggctttgggcaccttcccgggagggggacggccgcccaccctgagtggtgttggaagctgggctctcctggatgccctgacccagctgcctggggagagccctgggcccctcctccctcagcacctcctccctcagcccctcctgcctcggtccctcctcccttagcctgtctggcatagatccatgttccctagcccctggcacaggtgcctctgactggaggaggccccacctgtggcccgggagctgctctgggggttgataaagggcagcattattgggtcctgggaaggagcgggcgtgaggccagctgaggcatggtgacccctgggaaggagcgggcgtgaggccagctgaggcatggtgacccctgggaaggagcgggcgtgaggccagctgaggcatggtgacccctgggaaggagcgggcgtgaggccagctgaggcatggtgacccctgggaaggagcgggcgtgaggccagctgaggcatggtgacccctgggtatgggggacttgggggccgcaccttggtttgcccagggcccctcctgcaccacgggccacatgcggaggacggcgtgggataggctccctgggtccacagcttctgcccgtgtatggggaaccctccttggtcagggctgcaggctctgggcagatggggcaggaaccctgaggctcccgcgccctcccatggcctctgatgtgggacactggagcgaggcacgattctgaaggactccatggatctgggaggatgaggcccacctccggttggtggccaaagccgtccttgcggggccggctgcttcacggacactctccgggtcgggctggtgggccccatcgtgggtgggaagtcgcctgagcctgggccgcccttgagcttctcccagtcttgactttccagagggtccgtggctgtggtcatggtcggggcaggtggaaaatgctgcatggaaacctgatcctgtcaccttggagtaaatgatgatgtcgccggcttctcgccacgtctaaaggataaatgcatttgaagaaagtgggtgttgggtttgttatgggttaaagtgcttttgaaataagtaaattattagtttgattttcaaaaaaaaaaaaaaaaa

SEQ ID NO: 25675 - DNA, 1564 bp, Homo Sapiens
attccttctcagtggacagtattctgatttggcttctctgggttgtatttctcggtattcagcaggtagtgtctattactatccctcttaccatcatcagcacaacccagtccaagtacagaaattacagaaggaactacagagataccttactcggaagattggctttgaggcagtcatgaggattcggtgcaccaaaggtctttccattcatactttccatggaaacttctttgttaggtcaaccgacttactgtctttgcctaacgtcaacccagacgctgggtatgcagtacagatgtcagtggaagagagtcttactgacactcagttggtttcttttcagtcagcactcttgtatacatccagcaaaggcgaaagaagaattcgtgttcatactttgtgtttgccagtagtttcgactctgaatgatgtctttcttggagctgatgttcaagcaatttcagggttattggccaatatggctgttgacagatctatgactgccagtctgagtgacgctcgggatgctctagtgaatgcagtcattgactccctttcagcttaccgttcttcagtcttaagtaaccagcagcctggactcatggttcctttttctttgcggcttttcccactttttgtgttggctctccttaaacagaaatcattccagactgggacaaatgcacgtctagatgaacgcatttttgctatgtgtcaagtgaaaaaccagcccttggtttaccttatgctcacaactcatcccagtttgtatagagttgacaatctctcagatgagggagcactcaacatcagtgatagaaccatacctcagccccccattcttcagctttcagtggagaagctgagcagagatggagctttcctcatggatgcaggctctgtactgatgctttgggttggaaaaaattgtacacagaattttctcagccaagttctaggagttcaaaactatgcatcaattccacagcctatgacagaccttccagaacttgatacaccagaatctgccagaataatagctttcatctcttggcttagagagcagagaccatttttcccaatactttatgtaataagggatgagagtccaatgaaagcaaacttccttcaaaacatgatagaagacagaacagaatctgcattatcatattatgaattcctgttgcatatacagcaacaagtgaataaatgaatgaatgaagaaatttgacttatttttaaggaatgtcacgatagtgcagaatacctggaaatgtgtaataccttctttttctattatgtttgtggactaatgtgatgattgagatgttctcactgtgatttcaacaacctatagcaaataaaagaccacagcagagaatcaaacatgcaactctgaaatactgtatttttcaaatcagaatatagctacgtatgattggatacttttttcttgccaattatgtttgagttgttatggattaaaataagaatattgcagaggcaaagtacattttgtaaaataaagatttctgtgttctacaaaaaaaaaaaaaaaaaa

SEQ ID NO: 25676 - DNA, 2751 bp, Homo Sapiens
cccaggccgcctccatcacggtgggcctcccctcctctaaaaacctcccctcagctcagggtgccccctcctacctcagtcgtcacagccctcacacctacctcaggggagctggctccccctggcccggccccatctccaccaccccctgaagacctgggcccagacttcgaggacatggaggtggtgtcaggactgagtgctgctgacctggacttcgcggccagcctgctggggactgagcccttccaggaagagattgtagccgctggggccatggggagcagccacgggggcccgggggacagctccgaggaggagtccagccccacctcccgctacatccacttccctgtgactgtggtgtccgcccctggtctggcccccagcgctacccctggagccccccgcattgaacagctggacggcgtggacgacggcactgacagtgaggctgaggcggtgcagcagcctcggggccagggcacgcctccttcggggccaggagtagtccgggcaggggtccttggggctgcaggggacagggcccggcctcctgaggacctgccatcggaaattgtggattttgtgttgaagaacctagggggtcctggggatggaggtgctggccctagagaggagtcactccccccggcgcctcccctggctaatggcagccagccctcccaaggcctgaccgccagcccagctgaccccacccgcacatttgcctggctcccaggggccccaggggtccgggtgttaagccttggccctgcccctgagccccccaaacccgccacatccaaaatcatacttgtcaacaagctggggcaagtatttgtgaagatggctggggagggtgaacctgtcccacccccagtgaagcagccacctttgccccccaccatttcccccacggctcccacctcctggactctgcccccaggccccctcctcggcgtgctgcccgtggtcggagtggtccgccctgccccgcccccgccaccccctcccctgacgctggtgctgagcagtgggccagccagcccgccccgccaggccatccgcgtcaagagggtgtccactttctccggccggtccccgccagcacctcccccatacaaagccccccggctggatgaagatggagaggcctcagaggatacccctcaggttccagggcttggcagtggcgggtttagccgtgtgaggatgaaaacccccacagtgcgtggggtccttgacctggatcggcctggggagcccgctggggaagaaagtcctgggcccctccaggaacggtcccctttgctgccacttccggaagatggtcctccccaggtccccgatggtcccccagacctgctgcttgagtcccagtggcaccactattcaggtgaggcttcgagctctgaggaagagcctccatccccagatgataaagagaaccaggccccaaaacggactggcccacatctgcgcttcgagatcagcagtgaggatgggttcagcgttgaggcagagagcttggagggggcgtggagaactctgatcgagaaagtgcaagaggcccgagggcatgcccgactcagacatctctcctttagtggaatgagtggggcgagactcctgggcatccaccatgatgctgtcatcttcctggccgagcagctccccggagcccagcgttgccagcactataagttccgttaccaccagcagggagagggccaggaggagccgcccctgaatccccatggggctgctcgggcagaggtctatctccggaagtgcacctttgacatgttcaacttcctggcctcccagcaccgggtgctccctgagggggccacctgtgatgaggaagaggatgaggtgcagctcaggtcaaccagacgtgccaccagcctggagctgcccatggccatgcgttttcgtcaccttaagaagacgtccaaagaagctgtgggtgtctacagatcagccatccacgggcgaggcctgttctgtaagcgcaacatcgacgcgggggagatggtcatcgagtactctggcattgtcatccgctcggtgttgactgacaagcgggagaagttctacgatgggaagggcatcgggtgctatatgttccgcatggatgactttgatgtagtggacgccacgatgcatggcaatgccgcccgcttcatcaaccactcctgtgagcccaactgcttctctcgggtcatccacgtggagggccagaaacacattgttatcttcgccctgcgccgcatcctgcgtggtgaggagctcacctacgactacaagttccccatcgaggatgccagcaacaagctgccctgcaactgtggcgccaagcgctgccgtcggttccttaactgaggccgtggctgcccaccacgacccctcacacctcctgctgccgtcgctgccatcttgcccctagcctgggggctccctagcccctcccagagcatctcacccccaccctcatgttcagggtggatgtgggcatgcaggtgacaagggccctgcctccacccctccagcccatccagcaatcgccccctttctgccctgggggcccaggatgtagatattgtacaaaggtttctaaatcccttcttttctatgcacttttttatttaagaggtggggtcccaggtgggaacccccccacaataaagtctgtcaatgtttggaaaaaaaaaataaaaaaaaaaaaaaaaaaaaaaaaaaaaaaaa

SEQ ID NO: 25677 - DNA, 2875 bp, Homo Sapiens
gtggtgtgtaaagttgtgaacacaaccaccctcacctgcctggcaccctctctgaccacggactaccgccctggcctggacactgtggaacgcccagatgagtttggatttgtctttaacaatgtccaatccttgctaatttacaacgacaccaagtttatctactaccccaacccgacctttgaactgcttagccctactggagtcttggatcaaaagccaggatcgcccatcattctgaagggcaaaaacctctgccctcctgcctctggaggggccaaactcaactacactgtgctcatcggagagaccccttgtgctgtcaccgtatctgagacccagcttctctgcgagcctcccaacctcaccgggcagcacaaggtcatggttcacgtgggcgggatggtgttctcgcctggctcggtgagtgtcatctcagacagcttgctgaccctgccagccatcgtcagcatcgcggccggcggcagcctcctcctcatcatcgtcatcatcgtcctcattgcctacaagcgcaagtctcgagaaaatgacctcactctcaagcggctgcaaatgcagatggacaatctggagtcccgtgtggctttggagtgcaaggaagcttttgctgagctccagacggatatcaatgagttgaccagtgacctggaccgctcaggaatcccttacctggactatcgtacctacgctatgcgagtcctgttcccgggcatcgaggaccaccccgtcctgcgggagctggaggtacaaggaaacgggcagcagcacgtggagaaggccctgaagctctttgcccagctcatcaacaacaaggtgttcctgctgaccttcatccgcaccctggagctgcagcgcagtttctccatgcgcgaccggggcaacgtggcttcgctcatcatgaccggcctgcagggccgcctggaatatgccactgatgtcctcaagcagctgctctctgacctcatcgataagaacctggagaacaagaaccaccccaagctgctactccggaggacagagtctgtggctgaaaagatgctgaccaattggttcgccttcctcctgcacaagttcctaaaggagtgcgcaggggagccactcttcatgctatactgtgccatcaagcagcagatggagaagggccccattgatgccatcacgggcgaggcccgctactccctgagcgaggacaagctcatccggcagcagatcgagtacaagaccctgatcctgaactgcgtcaaccctgacaacgagaacagtccagagatcccagtgaaggtgttaaactgtgacaccatcacacaggtcaaggagaagattcttgatgccgtgtataagaatgtgccctattcccagcggccgagggcagtggacatggacttggagtggcgccaaggccggatcgcccgggtcgtgctgcaagatgaggacatcaccaccaagattgagggtgactggaagcggctcaacacactgatgcattatcaggtgtcagacaggtcggtggtggctctggtccccaaacagacctcctcctacaacatccctgcctctgccagcatctcccggacgtccatcagcagatacgactcctccttcaggtatacgggcagccccgacagcctgcggtcccgggccccgatgatcaccccagacctggaaagtggggtcaaggtgtggcatctggtgaagaaccatgaccacggtgaccagaaggagggtgaccggggcagcaagatggtgtccgagatctacctgacccggctactggccaccaagggcaccctgcagaagtttgtggacgacttgtttgagaccttgctcagcactgtgcaccggggcagcgctctccccctggccatcaagtacatgtttgatttcctagatgagcaggcagacaggcacagcatccatgacacagatgtgcggcacacctggaaaagcaactgcctccctctgcgcttctgggtgaacgtgattaagaacccccagttcgtgtttgacatccacaagggcagcatcacggacgcctgcctctctgtggtggcccagaccttcatggactcttgttcaacgtcagagcaccggctgggcaaggactccccctccaacaagctgctctatgccaaggacatccccagctacaagagctgggtggagagatactacgcagacatcgccaagctcccagccatcagtgaccaggacatgaatgcctacctcgccgagcagtcccgcctgcacgccgtggagttcaacatgctgagtgccctcaatgagatctactcctatgtcagcaagtatagtgaggagctcatcggggccctagagcaggatgagcaggcacggcggcagcggctggcttataaggtggagcagctcattaatgccatgtccattgagagctgagaggaggagcctcgcattcctgggaagagggacctgtccaagctgtcacactgggagtctcagatggaaggacaagtgatggggatcaggccccagagcttgctgtcccctgagaccccatcctggggagaggggaggactcctctccctacgccagccaagtttcgtcatagccagttccagctgggagagacagtgggcgtcgtccatcctcagtgagaacaccagagaacccggggccgggagaaggtggttcttcaagccgagaggcacgagctggggacagttctgcctctgtgactgctgctttgcatgaaaactcatttgatgtatattggggaaataatgagaactttatttaatttttttaagaaaaagggaaaaaaacagaaataaaacaaaaagccgccctgttaaaaaaaataaaaaaaaaaaaaaaaaa

SEQ ID NO: 25678 - DNA, 719 bp, Homo Sapiens
gggaaatgtaggggagcagccggactgagctgcccaagggggtcggcgccccaggcttcttggtggcatgctggggagcggggagggggcgattcttacccgaaggctgccgagctacaggcggcggtcggtccgggcgtctgctgtaatccactaggcgctgcccggctgcgctcactctcggacgcagagacccgctcatgttggtgaagaagccgcgccagaaccgcgcggctgcagtcacctcgagcaggccggctgctcctggcaggcggtgtcggcgccggcgggggactcggcgcccagggccccttccaggccctccctcgccgggctccccaccagctccggaggtggcggcgatgcggaccgagtgagcggcggtggggccaggccgggcgccgggcgggagccgaggccgcggcggactccgcaatcccgcagccggtgactggagcccacctctgcagagacaaaggaactgctctggtgaactccccctgaaagtaaatgtccttggctggcctccagcattcccctcatgggcatagccatgcagccttcagaaccttcctgaaagagatgcccaaggattcagcaaacacgggggaagcagaggacacaagaagcttggatgtgaaatagcacttccttctgtgttacagaataaaacaatattttaaattacacaaaaaaaaaaaaaaaaaaaaaaaaaaaaa

SEQ ID NO: 25679 - DNA, 3016 bp, Homo Sapiens
gagacaccgtcagactctggaggctttttcgagagattctggatggattagcttatatccatgagaaaggaatgattcaccgggatttgaagcctgtcaacatttttttggattctgatgaccatgtgaaaataggtgattttggtttggcgacagaccatctagccttttctgctgacagcaaacaagacgatcagacaggagacttgattaagtcagacccttcaggtcacttaactgggatggttggcactgctctctatgtaagcccagaggtccaaggaagcaccaaatctgcatacaaccagaaagtggatctcttcagcctgggaattatcttctttgagatgtcctatcaccccatggtcacggcttcagaaaggatctttgttctcaaccaactcagagatcccacttcgcctaagtttccagaagactttgacgatggagagcatgcaaagcagaaatcagtcatctcctggctgttgaaccacgatccagcaaaacggcccacagccacagaactgctcaagagtgagctgctgcccccaccccagatggaggagtcagagctgcatgaagtgctgcaccacacgctgaccaacgtggatgggaaggcctaccgcaccatgatggcccagatcttctcgcagcgcatctcccctgccatcgattacacctatgacagcgacatactgaagggcaacttctcaatccgtacagccaagatgcagcagcatgtgtgtgaaaccatcatccgcatctttaaaagacatggagctgttcagttgtgtactccactactgcttccccgaaacagacaaatatatgagcacaacgaagctgccctattcatggaccacagcgggatgctggtgatgcttccttttgacctgcggatcccttttgcaagatatgtggcaagaaataatatattgaatttaaaacgatactgcatagaacgtgtgttcaggccgcgcaagttagatcgatttcatcccaaagaacttctggagtgtgcatttgatattgtcacttctaccaccaacagctttctgcccactgctgaaattatctacactatctatgaaatcatccaagagtttccagcacttcaggaaagaaattacagtatttatttgaaccataccatgttattgaaagcaatactcttacactgtgggatcccagaagataaactcagtcaagtctacattattctgtatgatgctgtgacagagaagctgacgaggagagaagtggaagctaaattttgtaatctgtctttgtcttctaatagtctgtgtcgactctacaagtttattgaacagaagggagatttgcaagatcttatgccaacaataaattcattaataaaacagaaaacaggtattgcacagttggtgaagtatggcttaaaagacctagaggaggttgttggactgttgaagaaactctgcatcaagttacaggtcttgatcaatttgggcttggtttacaaggtgcagcagcacaatggaatcatcttccagtttgtggctttcatcaaacgaaggcaaagggctgtacctgaaatcctcgcagctggaggcagatatgacctgctgattccccagtttagagggccacaagctctggggccagttcccactgccattggggtcagcatagctatagacaagatatctgctgctgtcctcaacatggaggaatctgttacaataagctcttgtgacctcctggttgtaagtgttggccagatgtctatgtccagggccatcaacctaacccagaaactctggacagcaggcatcacagcagaaatcatgtacgactggtcacagtcccaagaggaattacaagagtactgcagacatcatgaaatcacctatgtggcccttgtctcggataaagaaggaagccatgtcaaggttaagtctttcgagaaggaaaggcagacagagaagcgtgtgctggagactgaacttgtggaccatgtactgcagaaactgaggactaaagtcactgatgaaaggaatggcagagaagcttccgataatcttgcagtgcaaaatctgaaggggtcattttctaatgcttcaggtttgtttgaaatccatggagcaacagtggttcccattgtgagtgtgctagccccggagaagctgtcagccagcactaggaggcgctatgaaactcaggtacaaactcgacttcagacctcccttgccaacttacatcagaaaagcagtgaaattgaaattctggctgtggatctacccaaagaaacaatattacagtttttatcattagagtgggatgctgatgaacaggcatttaacacaactgtgaagcagctgctgtcacgcctgccaaagcaaagatacctcaaattagtctgtgatgaaatttataacatcaaagtagaaaaaaaggtgtctgtgctatttctgtacagctatagagatgactactacagaatcttattttaaccctaaagaactgtcgttaacctcattcaaacagacagaggcttatactggaataatggaatgttgtacattcatcataatttaaaattaaattctaagaagaggctgggtgcagtggctcacacctttaatcccagcactttgggaagccaaggcaggaagactgcttgaaaccaggagtttgagaccagcctgagcaacaaagcaagaccccatctctataaaaactaaaaaaattagttgggcatggtggcacatgcctgtagtcccagctactccagaggctgagatggatcatctgagcctcaggaggttgaggctgcagtgagctgtgactgcgccactgcactccagtctgggacaacagagcaagaccctgtcttaaaaaaaaaaagaaaaaaaaaatttttttgtaagaagctgtcctacaaagttgagctttgttagtttttcatgtgtaatatattataaatttatcttttgggatataataaatgctttcatataaaaaaaaaaaaaaaaaa

SEQ ID NO: 25680 - DNA, 2512 bp, Homo Sapiens
cagaggttgtggtaggaaccacaaggccagagacgctgcctggagatgtggctgtggccgttcatccagacgactcgcgatacacacatctacacgggcgacagcttcgtcaccccttgatggggcagcctcttcccctcatcacagactatgctgttcagccacatgtgggcacgggggcagtgaaggtgactccagctcacagtcctgccgatgctgagatgggggcccgacatggcttgagccccttgaatgtcattgcggaggatgggaccatgacctccctctgcggggactggttgcagggtcttcaccggtttgtggcccgggaaaagataatgtctgtgctgagtgaacggggcctattccggggcctccagaaccaccccatggtactgcccatctgcagccgttctggggatgtgatagaatacctgctgaagaaccagtggtttgtccgctgccaggaaatgggggcccgagctgccaaggctgtggagtcgggggccctggagctcagtccctccttccaccagaagaactggcagcactggttttcccatattggggactggtgtgtctcccggcagctgtggtggggccatcagattccagcctacctggttgtagaggaccatgcgcagggagaagaggactgttgggtggttgggcggtcagaggctgaggccagagaggtagcagcggaactgacagggaggccaggggcagagctgaccctggagagggatcctgatgtcctagacacatggttttcttctgccctgttccccttttctgccctgggctggccccaagagaccccagaccttgctcgtttctaccccctgtcacttttggaaacgggcagcgaccttctgctgttctgggtgggccgcatggtcatgttggggacccagctcacagggcagctgcccttcagcaaggtgcttcttcatcccatggttcgggacaggcagggccggaagatgagcaagtccctggggaatgtgctggacccaagagacatcatcagtggggtggagatgcagttgctgcaggaaaagctgagaagcggaaatttggaccctgcagagctggccattgtggctgcagcacagaaaaaggactttcctcacgggatccctgagtgtgggacagatgccctgagattcacactctgctcccatggagttcaggcgggcgacttgcacctgtcagtctctgaggtccagagctgccgacatttctgcaacaagatctggaatgctcttcgctttatcctcaatgctttaggggagaaatttgtgccacagcctgctgaggagctgtctccctcctccccgatggatgcctggatcctgagccgccttgccctggctgcccaggagtgtgagcggggcttcctcacccgagagctctcgctcgtcactcatgccctgcaccacttctggcttcacaacctctgtgacgtctacctggaggctgtgaagcccgtgctgtggcactcgccccgccccctggggccccctcaggtcctgttctcctgcgctgacctcggcctccgcctcctggccccactgatgcccttcctggctgaagagctctggcagaggctgccccccaggcctggttgcccccctgcccccagcatctcggttgccccctaccctagcgcctgcagcttggagcactggcgccagccagagctggagcggcgcttctcccgggtccaagaggtcgtgcaggtgctaagggctctccgagccacgtaccagctcaccaaagcccggccccgagtgctgctgcagagctcagagcctggggaccagggcctcttcgaggccttcttggagcccctgggcaccctgggctactgtggggctgtgggcctgttacccccaggcacagcagctccctccggctgggcccaggctccactcagtgacacggctcaagtctacatggagctgcagggcctggtggacccgcagatccagctacctctgttagccgcccgaaggtacaagttgcagaagcagcttgatagcctcacagccaggaccccatcagaaggggaggcagggactcagaggcaacaaaagctttcttccctccagctggaattgtcaaaactggacaaggcagcctctcacctccggcagctgatggatgagcctccagccccagggagcccggagctctaactcatcatccccatcagttttcctccctctcagacctgtctttgaggacaaacagatttgtcagctgtcagggtgcagtgggacgtcagagactatgtggtccatcgccttcattgtgtaaatgaggacacagactggcttggtcgcagtgactgtggtgtccttgagatgctcacattactgcccggcctgcctcccacctggaagtctgggaatgaggagattgagataaacttttgaaatcccaaaaaaaaaaaaaaaaaaaaaaaaaaaaaaaaaaaaaaaaaaaaaaaaaaaaaaaaaaaaaa

SEQ ID NO: 25681 - DNA, 3326 bp, Homo Sapiens
ctgagcctcccgtgccggccggccggccgggggaacaggcgggcgctcggggggcgctcggggggcggggggagttccggttccggttctttgtgcggctgcatcggcggctccgggaagatggcggcccgggcgggtttccagtctgtggctccaagcggcggcgccggagcctcaggaggggcgggcgcggctgctgccttgggcccgggcggaactccggggcctcctgtgcgaatgggcccggctccgggtcaagggctgtaccgctccccgatgcccggagcggcctatccgagaccaggtatgttgccaggcagccgaatgacacctcagggaccttccatgggaccccctggctatggggggaacccttcagtccgacctggcctggcccagtcagggatggatcagtcccgcaagagacctgcccctcagcagatccagcaggtccagcagcaggcggtccaaaatcgaaaccacaatgcaaagaaaaagaagatggctgacaaaattctacctcaaaggattcgtgaactggtaccagaatcccaggcctatatggatctcttggcttttgaaaggaaactggaccagactatcatgaggaaacggctagatatccaagaggccttgaaacgtcccatcaagcaaaaacggaagctgcgaattttcatttctaacactttcaatccggctaagtcagatgccgaggatggggaagggacggtggcttcctgggagcttcgggtagaaggacggctcctggaggattcagccttgtccaaatatgatgccactaaacaaaagaggaagttctcttccttttttaagtccttggtgattgaactggacaaagacctgtatgggccagacaaccatctggtagaatggcacaggaccgccactacccaggagaccgatggctttcaggtgaagcggccgggagacgtgaatgtacggtgtactgtcctactgatgctggattaccagcctccccagtttaaattagacccccgcctagctcgactcctgggcatccatacccagactcgtccagtgatcatccaagcactgtggcaatatattaagacacataagctccaggaccctcacgagcgggagtttgtcatctgtgacaagtacctgcagcagatctttgagtctcaacgtatgaagttttcagagatccctcagcggctccatgccttgcttatgccaccagaacctatcatcattaatcatgtcatcagtgttgacccgaatgatcagaaaaagacagcttgttatgacattgatgttgaagtggatgacaccttgaagacccagatgaattcttttctgctgtccactgccagccaacaggagattgctactctagacaacaagatccatgagacaatagaaaccatcaaccagctgaagactcagcgggagttcatgctgagctttgccagagaccctcagggtttcatcaatgactggcttcagtcccagtgcagggacctcaagacaatgactgatgtggtgggtaacccagaggaggagcgccgagctgagttctacttccagccctgggctcaggaggctgtgtgccgatacttctactccaaggtgcagcagagacgacaagaattagagcaagccctgggaatccggaatacatagggcctctcccacagccctgattcgactgcaccaattcttgatttgggccctgtgctgcctgcctcatagtatctgccttggtcttgcttggggcgttccaggggatgctgttggttcaaggacaacaccagaatgaagagggtctcacaagacacctgttatcctcttctttcaccctatctcttcccacccccagcttccctttgccccacaaagttcccatgtgcctgtaccctcccctggtctacataggacctctagatagtgttagagagagaacatgtagtggtaatgagtgcttggaatggattgggcctcaggccaggtggtcttcaaggggaccagctaactgatcctgcccttcagagacccaggagttgggagctttcgctccttctccaagactcaggcctgtgggcactctataagctagttgatcttggctctcctgataacagaatccaatttccttccttccctccacaggtttggaacaaactctcccttcacttgttgccctgtagcactacagaaaccctggttcttgggctccactgagccccaggtcagtccccagccctctgggttggcctgctgtcagtgcttctctcactccttagttggggtccacatcagtattggagttttgttctttattgctccctcccagacactccctgtggctgccctttgtgattccctcagatctgccctaatcccgggcatttgggtgggggaatcttgcctttccctttcagagccccagggatctcatctggggaactgtcattgccagcagaggctgttccttcctgctgtttggagatgtgactcattcattcactcactccaccctgcctctgcatcccttaatggagaaacgggcctaaaaccaaacgggtaaaaagccctgggccatccctgtcttcctgtcccttgtctgcccagttgacacctactggtgacttctagggcactgaggagtgaaagcgcctagggctggagaatagcgctgagttgggtttgtgactcttccctctccctgcctcacaggattgtgactccccagcccctgccctcaaagcttcagacccctcaggtagcagcaggaccttgtgatcttggccccttggatctgagatggtttttgcatctttccaggagagcctcacattcttcttccaggttgtatcacccccgagttagcatatcccaggctcgcagactcaacacagcaagggtgggagacagctgggcacaaagggggaattccgttcagcatgggctctaaacccacagaactgacaaagcccctgcttccccaccccctcctcaggctcctgcgagcacacccccacccccaaatccctccctgttctacactggggacagcagaattttctccccgtcttccccttcctgccattttccctcccttgaaaggttgacactggacaaccttggggcagctgagccctggccgcctcctggctggaaccatgagaaggaagctcagtacttcccacagtgtccctgttgataactgtttttattaactgaattgtttttttcatggaccaaacttttttttgtactgtccccttattgatgttacccagttttaataaaagaatcttctgaaaaaaaaaaaaaaaaaa

SEQ ID NO: 25682 - DNA, 2298 bp, Homo Sapiens
cggggatcgggatgtccctcctccttctcctcttgctagtttcctactatgttggaaccttggggactcacactgagatcaagagagtggcagaggaaaaggtcactttgccctgccaccatcaactggggcttccagaaaaagacactctggatattgaatggctgctcaccgataatgaagggaaccaaaaagtggtgatcacttactccagtcgtcatgtctacaataacttgactgaggaacagaagggccgagtggcctttgcttccaatttcctggcaggagatgcctccttgcagattgaacctctgaagcccagtgatgagggccggtacacctgtaaggttaagaattcagggcgctacgtgtggagccatgtcatcttaaaagtcttagtgagaccatccaagcccaagtgtgagttggaaggagagctgacagaaggaagtgacctgactttgcagtgtgagtcatcctctggcacagagcccattgtgtattactggcagcgaatccgagagaaagagggagaggatgaacgtctgcctcccaaatctaggattgactacaaccaccctggacgagttctgctgcagaatcttaccatgtcctactctggactgtaccagtgcacagcaggcaacgaagctgggaaggaaagctgtgtggtgcgagtaactgtacagtatgtacaaagcatcggcatggttgcaggagcagtgacaggcatagtggctggagccctgctgattttcctcttggtgtggctgctaatccgaaggaaagacaaagaaagatatgaggaagaagagagacctaatgaaattcgagaagatgctgaagctccaaaagcccgtcttgtgaaacccagctcctcttcctcaggctctcggagctcacgctctggttcttcctccactcgctccacagcaaatagtgcctcacgcagccagcggacactgtcaactgacgcagcaccccagccagggctggccacccaggcatacagcctagtggggccagaggtgagaggttctgaaccaaagaaagtccaccatgctaatctgaccaaagcagaaaccacacccagcatgatccccagccagagcagagccttccaaacggtctgaattacaatggacttgactcccacgctttcctaggagtcagggtctttggactcttctcgtcattggagctcaagtcaccagccacacaaccagatgagaggtcatctaagtagcagtgagcattgcacggaacagattcagatgagcattttccttatacaataccaaacaagcaaaaggatgtaagctgattcatctgtaaaaaggcatcttattgtgcctttagaccagagtaagggaaagcaggagtccaaatctatttgttgaccaggacctgtggtgagaaggttggggaaaggtgaggtgaatatacctaaaacttttaatgtgggatattttgtatcagtgctttgattcacaattttcaagaggaaatgggatgctgtttgtaaattttctatgcatttctgcaaacttattggattattagttattcagacagtcaagcagaacccacagccttattacacctgtctacaccatgtactgagctaaccacttctaagaaactccaaaaaaggaaacatgtgtcttctattctgacttaacttcatttgtcataaggtttggatattaatttcaaggggagttgaaatagtgggagatggagaagagtgaatgagtttctcccactctatactaatctcactatttgtattgagcccaaaataactatgaaaggagacaaaaatttgtgacaaaggattgtgaagagctttccatcttcatgatgttatgaggattgttgacaaacattagaaatatataatggagcaattgtggatttcccctcaaatcagatgcctctaaggactttcctgctagatatttctggaaggagaaaatacaacatgtcatttatcaacgtccttagaaagaattcttctagagaaaaagggatctaggaatgctgaaagattacccaacataccattatagtctcttctttctgagaaaatgtgaaaccagaattgcaagactgggtggactagaaagggagattagatcagttttctcttaatatgtcaaggaaggtagccgggcatggtgccaggcacctgtaggaaaatccagcaggtggaggttgcagtgagccaagattatgccattgcactccagcctgggtgacaaagcaagactccatctcaaaaaaaaaaaaaaaaaa

SEQ ID NO: 25683 - DNA, 1574 bp, Homo Sapiens
gtaccctgaggcgacagaaggcttctctgaagggtttttcgccaagtggtggcgctgctttcctgagcggtggttcccatttccttatccatggaggagacctctgaacagatcacaaatgttacgtgagctttttcctgttttcactcacctgccatttccaaaagatgcctctttaaacaagtgctcctttcttcacccagaacctgttgtggggagtaagatgcataagatgcctgacctatttatcattggcagcggtgaggccatgttgcagctcatccctcccttccagtgccgaagacattgtcagtctgtggccatgccaatagagccaggggatatcggctatgtcgacaccacccactggaaggtctacgttatagccagaggggtccagcctttggtcatctgcgatggaaccgctttctcagaactgtaggaaatagaactgtgcacaggaacagcttccagagccgaaaaccaggttgaaaggggaaaaataaaaacaaaaacgatgaaactgctttctgggggttggttacttagttacctgccctttgcatgcatgtgtgaaccagctgtgagctgcaaggcagtggccagagcctcgccctcctgactcttcctgcaggtggctcaggaaggattcagcctggccacttggctaggactctgccagcacccatctgagactgacctcttccgggcctttggacactatgaccttgatgctgcccttcaggcaggaaacagggctggtgcctttcttcacctgcatggccagcttccttccctggcagtggagagggcagccaacaggttctaatgtcagagccatcctttaccaggtgggcctgcttgtccccgtcttgcctgccacatcactctactttttggaaggccatggctgattaaagaagttcttgtagtttcccaagcaaagtggaatctagaaacagtgaaaaaagttcagataactttgaattgcattcaagaagtacacttctttcccattgtccgtggctcttggagtctccgtgatgccaggctagagtctgattatataataattcaaaatggtaactcccaaggtaatgctttcttccatttcatcaggttcttttatccccactgcaccccctccccttctcccttgcctatctggatggcttctcagaagctcggccctagtcctccctgccttggcggggccagagcccactactgctgaggcagcactgctctcgtcagctgtgttgcctttaccaagtgtcttcagagggttatgagttagagtagctggcctggggagagggtgcctccctgggtttgatctttagggtctgactttctgcagagaagatgttttacagatgtgtcaaagctgatgtaatgtggttgggggaggaaatccagacccaaagtgtttgtcagctgggtgtgcaactgcctatgtgatcctctgtcttaaaatgatttctgtctgtgctgcgaaacaaagacaaggtgaggtgtttttcttttttgtaataatataaagctgtgtgtttctgaaaaaaaaaaaaaaaaaa

SEQ ID NO: 25684 - DNA, 2860 bp, Homo Sapiens
gtgcgcacagcctagagcccgcctccgtgaaagactgccgggcgcatgcggtcggggttgttcactggctgtccggggctccgcgcgcgtcgccggcccagctctgtcgctgacgggaggatctgaagccggccgcaggtcaaagagtaaaatgaagtacattctggttactggtggtgttatatcaggaattggaaaaggaatcattgccagcagtgtgggcacaatactcaagtcatgtggtttacatgtaacttcaatcaaaattgacccctacattaacattgatgcaggaacattctctccttatgagcatggtgaggtttttgtgctggatgatggtggggaagtagaccttgacctgggtaactatgagcggttccttgacatccgcctcaccaaggacaataatctgaccactggaaagatataccagtatgtcattaacaaggaacggaaaggagattacttggggaaaactgtccaagttgtccctcatatcacagatgcaatccaggagtgggtgatgagacaggcgttaatacctgtagatgaagatggcctggaacctcaagtgtgtgttattgagcttggtggaaccgtgggggacatagaaagcatgccctttattgaggccttccgtcagttccaattcaaggtcaaaagagagaacttttgtaacatccacgtcagtctagttccccagccaagttcaacaggggaacagaagactaaacctacccagaatagtgttcgggaacttagaggacttgggctttccccagatctggttgtatgcaggtgctcaaatccacttgacacatcagtgaaggagaaaatatcaatgttctgccatgttgagcctgaacaagtgatctgtgtccacgatgtctcatccatctaccgagtccccttgttgttagaggagcaaggggttgtagattattttcttcgaagacttgaccttcctattgagaggcagccaagaaaaatgctgatgaaatggaaagagatggctgacagatatgatcgcttgctggagacctgctctattgcccttgtgggcaaatacacgaagttctcagactcctatgcctctgtcattaaggctctggagcattctgcactggccatcaaccacaaattggaaatcaagtacatagattctgcggacttggagcccatcacctcgcaagaagagcccgtgcgctaccacgaagcttggcagaagctctgtagtgctcatggagtgctggttccaggaggatttggtgttcgaggaacagaaggaaaaatccaagcaattgcctgggctcggaatcagaaaaagccttttttgggcgtgtgcttagggatgcagttggcagtggttgaattctcaagaaacgtgctgggatggcaagatgccaattctacagagtttgaccctacgaccagtcatcccgtggtcgtagacatgccagaacacaacccagggcagatgggcggaaccatgaggctgggcaagaggagaaccctgttccagaccaagaactcagtcatgaggaaactctatggagacgcagactacttggaagagaggcaccgccaccgatttgaggtgaatccagtctggaaaaagtgtttggaagaacaaggcttgaagtttgttggccaagatgttgaaggagagagaatggaaattgtggagttagaagatcatcccttttttgttggggttcagtaccaccctgagttcctgtccaggcctatcaagccctccccaccatactttggcctcctcctggcctctgtggggcggctctcacattacctccagaaaggctgcaggctctcacccagggacacctatagtgacaggattggaagcagctcccctgactctgaaatcaccgaactgaagtttccatcaataaatcatgactgatcttgtagcggatgattcttcaagagacccttcaaacttgggtagagtttacagctctgactttacactcggctttggagactttctttaaattatgtttttattaagattattttattatgcggaaaggtatttgggaaacttgtcacttgcatgtcccatcacgtgtactggctcctctgtggtgtctgcctgttgcgtgacactctccttgcagttcttgagttgcggcagaacatcgcgatgggaaccgatggtgggtggggctgcagagtgccccatcggtcaccttgtttctcaactacctcgcatcattgcagatgctagcgcgttgcctgtcgctttcccttggatacctagaccgttataaagtgtgccacatggacttaccgagcatggagagaggattttagctaggatttgaacacttggtgctgggaacctcagggtattgcttgccactaagccatgaaaccagagacaaaatctctatactgccctgagttggggggaattctcagtgccaactgtggctggtcctcattcaaagggacggtcagtttggtgtcaacatgaaacaccaagatgtctgtctctgaagcgtgattttaaaatccccatgcctgtggctgcgcttcctatttctagggctgggaaacactccttgcatcaaggggtcacttacagaacaaagaatcttttgggggaaacttcctctaaaaccctctcatatatagacagctttgactggagggtccatttttcttccaggatggtgttactgcagttgaaagggcaatatgaagttactttcttaatgtgacctagcaataggcatagctacgtggcactatattctggccagactcgatgtgtactctaacttaagaaataaatcagtaaggcagaacaagaaaaaaaaaaaaaaaaaaa

SEQ ID NO: 25685 - DNA, 2072 bp, Homo Sapiens
ggtgaccgcgagtgggtcggcaccgtctccggctccgggtgcgaacaatgctgactgatagcggaggcggcggcacctcctttgaggaggacctggactctgtggctccgcgatccgccccagctggggcctcggagccgcctccgccgggaggggtcggtctggggatccgcaccgtgaggctctttggggaggccgggccagcgtcgggagtcggcagcagcggcggcggcggcagcggcagcggtacgggcggaggggacgcggcgctggatttcaagttggcggctgccgtgctgaggaccgggggtggaggtggtgcctctggcagtgacgaggacgaagtgtccgaggttgaatcatttattttggaccaagaagatctggataacccagtgcttaaaacaacatcagagatattcttatcaagtactgcagaaggagcagacttacgcactgtggatccagagacacaggcacgactagaagcattgctagaagcagcagcttttgcagatcctgaggtactccggagactgacatcctcagttagttgtgcactggatgaagctgctgctgcactgacacggatgaaagcagaaaacagccacaatgcaggacaagtggacactcgcagtctagcagaagcttgttcagatggggatgttaatgctgttcgtaaattgctagatgaaggcagaagtgtaaatgaacatacagaagaaggagaaagcctgctgtgtttggcttgttcagcagggtattatgaattagcacaagtattgcttgctatgcatgctaatgttgaagatcgagggaataaaggagacataactcccctgatggcagcttccagtggaggttacttagatattgtgaaattattacttcttcatgatgctgatgtcaactcccagtctgcaacaggaaacactgcgctaacttatgcatgtgctggaggatttgttgacattgttaaagtgctccttaatgaaggtgcaaatatagaagatcataatgaaaatggacatactcccttaatggaagcagccagtgcaggtcatgtggaagttgcaagagttcttttagatcatggtgcaggcatcaacactcattctaatgaattcaaagaaagtgctctaacacttgcttgctacaaaggccatttggatatggttcgctttctacttgaagctggtgcagatcaagagcacaaaacagatgagatgcacactgccttaatggaggcctgcatggatggacatgtagaggtggcacgtttgcttttggatagtggtgctcaagtgaacatgcctgcagattcatttgaatctccattgacgctagctgcctgtggaggacatgttgaattggcagctctacttattgaaaggggagcaaatcttgaagaagttaatgatgaaggatacactcccttgatggaagctgcccgggaaggacatgaagaaatggtggcactactcttagcacaaggagcaaatataaatgcccagacagaagaaactcaagaaactgctcttactttggcttgctgtggaggattttctgaagttgcagactttcttattaaggcaggggctgatatagaacttggctgctccacacctctgatggaggcatctcaggagggacacctggaattggttaaatatttgctggcttctggcgctaatgtgcatgctacaacagcaacaggagacacagccttaacctatgcttgtgaaaatggacatacggatgttgcagatgttttacttcaagcaggggctgatttagacaagcaggaggacatgaagactattttggagggcatagatccggccaagcatcaggtgagggtggcctttgatgcttgtaagctactacgtaaagaatagatgttgtaggtaaccagaactctggatatctgaattccagccaagaagttccaggaccctgctgggtgacaaaggaaatcctcttcaattgaaaaagattatgaagtcccaataaaaagagatttgtattgctggtaaaaaaaaaaaaaaaaaaaaaaaaaaaaaaaaaaaaaa

SEQ ID NO: 25686 - DNA, 3949 bp, Homo Sapiens
aggaagcggggggctagcggcctggcgctgcggcgaccgaccggggcgtcaggatccctggcccccggagagcgaagggcgggcgggtcccggagcaagaagaattgtatagaaatgtaaaaaacatttatgtgtgcttcacatgtggcatgaaaaaaatgaggacctctggtcaaaattgcctgagttcagaatttcatgctggaaggaaagttagacgtaacttctaatttctagttccagtaagcatctcttcttggaaaatttccaaaaaagagtcctgctctgttgcccaggctggagtacattggtgtgatgatcatggttcactgcagcctcgacctcccaggctcaagcaattctcctacctcagcctcctgagtaactgggactataggatttctttgaagaaaaatgtgcttcttgaatcaactgcagtctctcctctgcataagagctcttaagggtactagcaggatagaagcaaatgaaactgaaagctcatctgcagctcagaaaagcaaagacatggaattttaaagagtgaaggtagcatggtgtcggccatgggtgaacaagacacagccagacaatgtggaccaatttcttcaaactacggcttttctgctgtctgcttgcagtgttgatggtggtggtgctggtcatcaatgttactcaggtagagtacttggaccatgagactgtttcagccactttcatcgacagcagtggacagtttgtttcctcccaggtgacaggaattagccgaaatccctactgtggctatgatcagcagaccctgtccagccaggagcgcatggaggaggactccttgctggctgccttgcaccggcaggttcctgatgtgggcccagtcccctttgtgaagagcactgacccttcttccagctactttgtcatcttgaactctgctgccttctttaaggtgggaagccagcttgaggtgctggttcatgtgcaggattttcaaagaaagcccaagaagtatggtggagactacctgcaggccagaattcactccctcaagctgcaggctggggctgtgggcagggtggtggattaccagaatgggttttacaaggttttctttactttgctatggccaggcaaagttaaagtatccgtatctctggtccaccccagtgaagggatcagagttcttcagcgcttacaggaagataaaccagacagggtctatttcaagagtctcttccgttcaggaagaatttctgaaactactgagtgcaacgtgtgtcttcctgggaatctgcccctgtgtaactttacagacctctacactggggagccctggttctgcttcaaaccaaagaagctcccttgcagcagcagaattacccatttcaaaggtggatacctgaaaggtctcctaaccgctgcagagagtgctttcttccagagtggtgtcaatatcaaaatgccagtcaactccagtggacctgattgggtaactgtgattcccaggagaataaaagaaactaacagtctagaactatctcaaggctcaggaacttttccttctgggtattattataaagaccagtggaggcccagaaagtttaagatgcgtcagtttaatgaccctgacaacattacagagtgcttacaaagaaaagtggtgcatttatttggtgactcaacaatcaggcaatggtttgaataccttactacatttgttccagatttagtggagtttaacttgggtagtcccaagaatgtgggtcccttccttgcagtggaccagaagcacaacatcctgctcaaataccgctgccatggtccacccatccgcttcacgactgtctttagcaatgagctccattatgtggcgaatgagctgaatggcattgtgggagggaagaacacagtggttgccatagctgtatggtctcacttcagcaccttccctttggaagtgtacatccggcggctcaggaacatccgtcgagcagtggttcggctcctcgatcgaagcccaaagaccgtggtggtcatccggacggccaacgcccaagagctgggacctgaggtgagccttttcaacagcgactggtacaactttcagctggacaccatccttcggaggatgttctcaggggttggagtatatctcgtcgatgcctgggagatgaccctggcccattatctaccgcacaagctgcatccagatgaagttattgtgaagaaccagctggacatgttcttgtcctttgtgtgccccttggaaacctagcctgtcttggaagggactggaggaatcatattcaatgaccttctcaattgacctgagttacagaaagtggccccagtgagagatgactgcccttaataagtataaaatttcaaaaagatctggacttaatatgatgacttataaggagcttagaaaatgcaggttacatttatatctacctataggattttatccaatgttgacttagccatggtagaactcttaactgcatctacacactatattgctcttgtaaccaaagatgctaatgagtgtatttgaattagcttctcctaggaggggtgactactttgctaaagagtatgaaaaatgttttgatggaagggacaagtttggttggtagtagagtgtttgtagcttatctggtaaaggaaattgagtgcatctgcatgcatagcacaagtaatccatcttctggcggttaactagagaaagcttatagtcagaggctcttgtgaatgcactgaagactgctgtgtctcaggagtttctcttgatgatctaccttttctgaattacttgaaaaggccaatgtgcttggttcgagttttttagtgaatatttacaatttcctgcttttatctagaaaagaagcaaaagggaaatatgaaagcagtatatataaaatctgtgctttggaattgatatttgcatttggtgattgttttttatttgattcagctaaattttatgtgttgaatacttactctagaataactacttttggaactggaagggggaaatctgtaaatggaaatttatttttatgttctgaaatttgagggtttaggaattgacttttgtgtaaagaatgctacggtattataaagctgtggaagttttttccactagtttcaggtgtttttttttttgttgttgttgttgttgttattttgaactacttaccaaaattagaagttaaaatctaattagaaattaataagatactaaaattcatgacagttttttgtttgtttgtttgtttgttttttggtatttcttgatttgggcataaaaggcacacccattctctcatgcttggaagaagctgctattcctactggctatctaagaagaatggaattattaattttatttgacttattaattttaaacgagtttaatttgggatcatttagtaagtactcttttctttttgagctgtgatagattatagtctagtttaagttgctcctaagtagacagatgaagaaactagggaggctttagagaggaagacagatgcttgaagtatgaacaatatatacccttagaagaatgggtcaaataatttgggtttttaatttaaaataggagggccccagatcttactttcctgtccttgaggaacaccttcaagtttttaaagtattttagggggaaagaagatttttaattgtttctgagcctaatgaggtaataaaatatattaaaatagtttaattttaatggtccttacgctttacagtacctaaggatcacttgtagtatctgacaaaaatgcagaattaaagagtcatggcagggtgtggtagctcaagcctgtaatcccagcactttgggaggccaggcaggaggattgcttgaggccaggagtttgagaccagcctgggcaacatagtaagacctcatctccacaaaaaaaaaaaaaaaaaa

SEQ ID NO: 25687 - DNA, 2031 bp, Homo Sapiens
aactagtggcgggctgaggacgccgtacccctcggaaggcagccctgcggtccctttgccgcccgttccctcccggacatggaggacgtggaggcgcgcttcgcccacctcttgcagcccatccgcgacctcaccaagaactgggaggtggacgtggcggcccagctgggcgagtatctggaggagctggatcagatctgcatttcttttgacgaaggcaagaccacaatgaacttcattgaggcagcgttgttgatccagggctctgcctgcgtctacagtaagaaggtggaatacctctactcactcgtctaccaggcccttgatttcatctctggaaagaggcgggccaagcagctctcttcggtgcaggaggacagggccaatggggttgccagctccggggtcccccaggaggcagagaatgagttcctgtcgctggatgacttccctgactcccggactaacgtggatctcaagaatgatcagacgcccagtgaggtcctcatcatccccctcctgcccatggccctggtggcccctgatgaaatggagaagaacaacaatcccctgtacagccgtcagggtgaggtcctggccagccggaaggatttcaggatgaacacgtgcgttccccaccccagaggggccttcatgttggagccagagggcatgtcccccatggaaccagcgggcgtttcccccatgccagggacccagaaggacaccgggaggactgaggagcagccaatggaagtttccgtgtgcaggagccctgtcccagcactcggcttctcccaggagccaggcccctctccagaaggcccgatgcccctgggtgggggcgaggacgaggatgcagaggaggcagtagagcttcctgaggcctcggcccccaaggccgctctggagcccaaggagttcaggagcccgcagcagagtgctgccctgcccaggaggtacatgctgcgggagcgggagggggccccagagcctgcatcctgcgtgaaggagactccagacccctggcagagcctggacccctttgactccttggagtctaagcccttcaagaaaggtaggccttactctgtgcccccctgtgtggaggaggctctgggacagaagcgcaagaggaagggcgctgccaagctgcaggacttccaccagtggtacctggctgcctatgcagaccatgccgacagcaggcggcttcggcgaaagggtccgtcctttgcagacatggaggtcctgtactggacacacgtgaaggagcagttggaaactctccggaagctgcagaggagggaggtggctgagcagtggctgcggcctgcagaggaggaccacctggaggattccctggaagacctgggggcagcagcagatgactttctagagcctgaggagtacatggagcccgagggagcagaccccagggaagccgctgaccttgacgcagtgccgatgtccctgagctacgaggagctggttcgaaggaatgtggagctcttcatcgccacctcccagaagtttgtccaggagacagagctgagccagcgcatcagggactgggaggacacagtgcagcctctgctccaggagcaggagcagcatgtgccctttgacatccacacctatggggaccagctggtctcacggttcccccagctcaatgagtggtgtccctttgcggagctggtggctggccagccggccttcgaggtgtgtcgttccatgctggcctccctgcagctggccaatgactacacagtggagataacccagcagcccgggctggagatggccgtggacaccatgtccctgagactgctcacgcaccagcgagcgcacaagcgcttccagacctacgctgccccctccatggcccagccctgagtggggagcaccgaggcaggggtgggggaatgtgtactgaggagccgtgtgtctgctcctggctggcccggcctaataaagcagtgttgccatctaaaaaaaaaaaaaaaaaaaaaaaaaaaaaaaaaaaaa

SEQ ID NO: 25688 - DNA, 2187 bp, Homo Sapiens
gcctgggaggggacccgggctgccaggcgcccagctgtgcccagatggatgggacagagacccggcagcggaggctggacagctgtggcaagccaggggagctggggcttcctcaccccctcagcacaggaggactccctgtagcctcagaagatggagctctcagggcccctgagagccaaagcgtgacccccaagccactggagactgagcctagcagggagaccgcctggtccataggccttcaggtgaccgtgcccttcatgtttgcaggcctgggactgtcctgggccggcatgcttctggactatttccagcactggcctgtgtttgtggaggtgaaagaccttttgacattggtgccgcccctggtgggcctgaaggggaacctggagatgacactggcatccagactctccacagctgccaacactggacaaattgatgacccccaggagcagcacagagtcatcagcagcaacctggccctcatccaggtgcaggccactgtcgtggggctcttggctgctgtggctgcgctgctgttgggcgtggtgtctcgagaggaagtggatgtcgccaaggtggagttgctgtgtgccagcagtgtcctcactgccttccttgcagcctttgccctgggggtgctgatggtctgtatagtgattggtgctcgaaagctcggggtcaacccagacaacattgccacgcccattgcagccagcctgggagacctcatcacactgtccattctggctttggttagcagcttcttctacagacacaaagatagtcggtatctgacgccgctggtctgcctcagctttgcggctctgaccccagtgtgggtcctcattgccaagcagagcccacccatcgtgaagatcctgaagtttggctggttcccaatcatcctggccatggtcatcagcagtttcggaggactcatcttgagcaaaaccgtttctaaacagcagtacaaaggcatggcgatatttacccccgtcatatgtggtgttggtggcaatctggtggccattcagaccagccgaatctcaacctacctgcacatgtggagtgcacctggcgtcctgcccctccagatgaagaaattctggcccaacccgtgttctactttctgcacgtcagaaatcaattccatgtcagctcgagtcctgctcttgctggtggtcccaggccatctgattttcttctacatcatctacctggtggagggtcagtcagtcataaacagccagacctttgtggtgctctacctgctggcaggcctgatccaggtgacaatcctgctgtacctcgcagaagtgatggttcggctgacttggcaccaggccctggatcctgacaaccactgcatcccctaccttacagggctgggggacctgctcggtactggcctcctggcactctgctttttcactgactggctactgaagagcaaggcagagctgggtggcatctcagaactggcatctggacctccctaactgggccccgctggtcccatttgctcattagaatttcctctcacatcagtgggatacagaattcagtttctcccttgccaggtccttgggatggttgacccctgcctctgcagtagccttttgtgagtctgctaaggtagctctcacacacctcggctctggggttgatacctgagcctgcaatagagccctgaaatcaagagcatggcttgagtgtgtgaatatgatgtgtgcacatgcttaatgagcgtgcaagtgtgcacacgtttgtggagaggagggtgttctggcctgagaaggtaaagaagaggcatgtccagtatgctttgcagggtgtgtttgctcttttccatgcccatgcaacccagattggggtggagcaggaaggagctcttttctgttcccaagcctcagaactcttgagctgtggcttacttgctgtcttcaccaggttcaagctccgtgggccacactgctgctgtgccaagaaggtgtacagcctccccaggatggggcctcatacaacccttcatctgcactcaacatttaatcgtgtccttgctgtctttttattttcctttttgtttgttagcaaaaacctctatttagatttcaataatcagagaagtgtaaaataaaacagattatattgtacttgaccaaaaaaaaaaaaaaaaaa

SEQ ID NO: 25689 - DNA, 1556 bp, Homo Sapiens
gtcgccgcagtcacggagcgcacgtcgggaaacctctcagcctcatctgtaaaatgtgatcataaataccgggtacctggaagtgctcgagacagatctcactatgttgaccgggctggtctcaaactcctggcctcaagcagtcctcctgcagcaacttcacagcaacactggaatgacagaagaactccactgaacattcattgaaggcccagatttagagtgagcggggcaaaccaagttttgtgctgggtggaaggaggggcggctgctgttcagcccacaggattcctgtgaggacaccacatgttcatagttgttaaaccatcttgcaaactcattgcctgatgttcagatctcccggctcagctggtgtctgtggaggacaggatttatgtttcagagagggcatgagcccagatgatgcctcaagactcaggttctaggagagaaagcagtgcttcagggactttgactgcccccgcccgaaatgcagtcgccatctgcaggtaaacagagctggagctggtgctgccggaaaagaaagaggagggctctccggcagcctgcggcttcctcaaggacttcccaggccaggcgctgtggctcacgcctgtaatcccagcactttgggaggccgaggcgggcagatcatgaggtcaggagatcgagaccatcctggctaacacagtgaaaccccatctctactaaaaatacaaaaattagccaggcgtagtggcgggcgcctgtagtcccagctactcaggaggctgaggcaggagaatggcgtgaacccaggaggcggagcttgcagtgagccgagatcgcgccactgcactccagcctgggtgacagagcgagactccgtctcaaaaaaaaaaaaaaaaaaaaactccacgcctgtaatcctagcactttgggaggctgaggcaggtggatcacctgaggtcaggagtttgagaccagcctggccaatatggtgaaaccccatctctacaaaatttgcaaaaagtagatgggtgtggtagtgggcgcctgtaatcccagctactcaggaggttgaggcagagaatcgcttgaacccggggggtggaggttgcagtgagctgagatcgcaccactgcactccagcatgaaagagcgagactcaatctcaaaaaaaaaaaaagtttctggcacctgaacaggaactggtttccatcatcaactcagaaagcactaaaatctaggtggtgattcagggaggagcaggggaagacagcctcctatggtggcatgaataagatgcttccagaactagtagggaaataactaacctcttcaggctttatcaggcctggaggggaaccttgctcatgttagcaagaaaggtatcctagagaagccactcaaaaggctccctaatccagcctgtctccacatacatactgaaaattcttccctactctgaggcagggtgtagtggtttaggggtttctccagactggaatcctacctatctgtaccgacaattgagcaaacaacagttgagagagtccaaaaaaaaaaaaaaaaaa

SEQ ID NO: 25690 - DNA, 1663 bp, Homo Sapiens
cgaacaccggccccggctccaccgaggcccgggtcccccagcccgtctcgccgccgccatggcggaccctaaatacgccgaccttcccggcattgccaggaatgagccagatgtttatgaaactagcgacctacctgaggatgatcaagcggagttcgatgcggaggagctgacaagcacaagtgtggaacacatcattgtcaatcctaatgctgcctatgacaagttcaaggacaagagagtggggacaaagggacttgatttctcagatcgtattggaaaaaccaagaggacaggatatgaatctggagaatatgagatgcttggagagggtctgggagtgaaggagacaccccagcaaaagtaccagcgcctactgcatgaggtccaagagctgacaactgaagttgaaaaaatcaagacgacagtgaaggagtcagccacagaggagaagctgacccctgtgttgctggctaaacagctggcagccctgaagcagcagctggttgcttcccacctggagaagctgctgggaccagatgctgcaatcaaccttaccgaccccgatggcgccctggctaagcgcctactactgcagctggaagcaacaaagaacagcaaagggggatcagggggaaaaaccactgggacccccccagatagcagccttgtcacttatgaactacattctcggcctgagcaggacaagttctctcaagctgccaaagtcgcagaacttgaaaagcgcctgacagagctggagacagctgtacgttgtgatcaggatgctcagaatcccctttctgcaggtctacagggagcctgtctcatggagactgtagagctgttgcaagcaaaggtgagcgccctagaccttgcagttttggatcaagtggaggctcggctacagagtgtcctgggaaaggtgaacgagattgccaagcataaagcctctgtagaagatgcagatacacaaagcaaggtgcaccagctatatgaaactatacagcgctggagccccattgcctccaccctccctgagctggtgcagagacttgtcaccatcaagcagctgcacgagcaagccatgcagtttggtcagctcctgacacacttggataccacccagcagatgattgctaattccttgaaggacaataccaccctcttgacccaggtgcagacaaccatgcgtgaaaacctggccacagttgaggggaactttgccagcattgatgaacggatgaagaagctgggaaagtgagcacatttgggagctggagaacaggggttatccctacccctgtgaactctgttaacagcttacatagggtttcccctttactataactctagcatccccatcccatttgacactgggggcaagggttcttcttgcatgtggggtttatacccctcccctgatgaatacagagtggtagctaggggttggttatcatcagaaggtggtctcccctcaggcctgggggataaggacgtgggcccagccacatgccaactcatgtccaatactgctttgcctggtgtggggaaggattgggtcttgtcccccaacacagcttctgtggctgactgtaatactgtacaactgtttctgaccattaaatgctgttgtactctgaaaaaaaaaaaaaaaaaaaaa

SEQ ID NO: 25691 - DNA, 2251 bp, Homo Sapiens
cgggagctgagcgatcagtcggtcctgggctggctgtggtgtagggcgttgcaggcagcgctcacctcctcaggccggcagaatgcgggtggctgtggctggctgctgccacggcgagctggataagatctatgagacgctggcgctggcagagcggcgcggcccggggcctgtcgacctcttgctgtgctgcggcgacttccaggcggtgcgcaacgaggcggatctacgctgcatggccgtgccgcccaagtatcgtcacatgcaaaccttctacaggtattactctggagagaaaaaggctccagttctcacgctcttcattgggggaaaccatgaagcctcaaatcatttgcaagagttaccctatggtggctgggtggcaccaaacatttattatttaggtttggctggtgtggtaaaataccgaggtgtaaggatcggtggaatctctggtatctttaaatctcatgactatcgaaaaggtcattttgagtgccccccttataattcatctacaatcaggagtatatatcatgtgagaaatattgaagtctataaattaaaacagctgaagcagcctatagatatattcttgtctcatgattggccaagaagtatatatcattatggaaataagaagcaacttcttaagactaaatcttttttccgacaagaagtggaaaataacacattaggaagtccagctgcctcagagcttttagagcatctcaaacctacttattggttttctgcccaccttcatgtgaagtttgccgccttgatgcagcatcaggcaaaggataaaggacagacagccagagcaaccaaatttttagccttggacaaatgcttaccacatagagattttcttcagatattagagatagaacatgaccccagtgctcctgattacttggaatatgatattgaatggctcactattctcagggctacggatgatcttattaatgtgactgggcgcctgtggaatatgccagaaaataatggcctgcatgcaaggtgggattatagtgcaacagaagaaggtatgaaagaagtattggaaaaattgaatcatgatctcaaggttccatgtaactttagtgtaacagctgcttgttatgatcctagcaagccacagacacaaatgcagctgattcataggatcaatcctcagactactgaattttgtgcccaacttggcatcatagacatcaatgttaggcttcagaagtccaaggaagaacatcatgtgtgtggtgaatatgaagaacaggatgatgtggagagtaatgactctggagaagaccagagtgaatataatacagacacatctgctctgtcttctattaatccagatgaaataatgttagatgaagaagaagatgaagatagtattgtaagtgcacatagtggcatgaatacaccatcggtagaaccttctgatcaagcttctgagttttctgcaagtttctctgatgtcaggatcttgccaggctctatgattgtatcttctgatgatacggtggattccacaattgatagagaggggaaacctggtgggactgtggagtcagggaatggagaggacttaaccaaggtgccattgaagaggctgagtgatgaacatgaacctgaacaaagaaagaaaattaagaggaggaatcaagccatttacgctgcagtggatgatgatgatgatgatgcagcttaagatgatttacttgttttgtttttgtgtttgttttgcttttttgagatggagtttcactcttgtcacctagactggagtgcaatggcgtgatctcggctcaccgcaacctccgcctcccaggttcaagcaattctcctgcctcagcctcccaagtaggtgggactacaggtgcccgccaccacacccggctaatttttgcatttttagtaatgacagggtttcaccatgttggccaggctggtctccaactcctgacctcaggcgatccacctgtcttggccttctaaagtgctgggattacaggcgtgagccactgtgcctggccgacaatttacttgtcttagtattatatgtagatatgtgattttttgagactgtatttttagagctgaatttttgactaaagacttaactttataataatgaagatacattagagaattttagttagatattgactttatctttaggcttttgtatgtttcagatgcaaacatattaaagtttcatatatttaaaaaaaaaaaaaaaaaa

SEQ ID NO: 25692 - DNA, 2061 bp, Homo Sapiens
gtgcgcccgagccccgccgaagcgaggccacccggagccgtgcccagtccacgccggccgtgcccggcggccttaagaacccggcaacctctgccttcttccctcttccacttggagtcgcgctccgcgcgccctcactgcagcccctgcgtcgccgggaccctcgcgcgcgaccgccgaatcgctcctgcagcagagccaacatgcccatcactcggatgcgcatgagaccctggctagagatgcagattaattccaaccaaatcccggggctcatctggattaataaagaggagatgatcttccagatcccatggaagcatgctgccaagcatggctgggacatcaacaaggatgcctgtttgttccggagctgggccattcacacaggccgatacaaagcaggggaaaaggagccagatcccaagacgtggaaggccaactttcgctgtgccatgaactccctgccagatatcgaggaggtgaaagaccagagcaggaacaagggcagctcagctgtgcgagtgtaccggatgcttccacctctcaccaagaaccagagaaaagaaagaaagtcgaagtccagccgagatgctaagagcaaggccaagaggaagtcatgtggggattccagccctgataccttctctgatggactcagcagctccactctgcctgatgaccacagcagctacacagttccaggctacatgcaggacttggaggtggagcaggccctgactccagcactgtcgccatgtgctgtcagcagcactctccccgactggcacatcccagtggaagttgtgccggacagcaccagtgatctgtacaacttccaggtgtcacccatgccctccacctctgaagctacaacagatgaggatgaggaagggaaattacctgaggacatcatgaagctcttggagcagtcggagtggcagccaacaaacgtggatgggaaggggtacctactcaatgaacctggagtccagcccacctctgtctatggagactttagctgtaaggaggagccagaaattgacagcccagggggggatattgggctgagtctacagcgtgtcttcacagatctgaagaacatggatgccacctggctggacagcctgctgaccccagtccggttgccctccatccaggccattccctgtgcaccgtagcagggcccctgggcccctcttattcctctaggcaagcaggacctggcatcatggtggatatggtgcagagaagctggacttctgtgggcccctcaacagccaagtgtgaccccactgccaagtggggatggggcctccctccttgggtcattgacctctcagggcctggcaggccagtgtctgggtttttcttgtggtgtaaagctggccctgcctcctgggaagatgaggttctgagaccagtgtatcaggtcagggacttggacaggagtcagtgtctggctttttcctctgagcccagctgcctggagagggtctcgctgtcactggctggctcctaggggaacagaccagtgaccccagaaaagcataacaccaatcccagggctggctctgcactaagagaaaattgcactaaatgaatctcgttcccaaagaactacccccttttcagctgagccctggggactgttccaaagccagtgaaatgtgaaggaaagtggggtccttcggggcgatgctccctcagcctcagaggagctctaccctgctccctgctttggctgaggggcttgggaaaaaaacttggcactttttcgtgtggatcttgccacatttctgatcagaggtgtacactaacatttcccccgagctcttggcctttgcatttatttatacagtgccttgctcggcgcccaccaccccctcaagccccagcagccctcaacaggcccagggagggaagtgtgagcgccttggtatgacttaaaattggaaatgtcatctaaccattaagtcatgtgtgaacacataggacgtgtgtaaatatgtacatttgtctttttataaaaagtaaattgttaaaaaaaaaaaaaaaaaa

SEQ ID NO: 25693 - DNA, 1600 bp, Homo Sapiens
ctcccttttcgcgcgcggcagcaggagccggcgcgggagccgcgagcggcggcgagccagcacccgggccggctaagccttgtccggagcccggagcccggagccccgcgcggggcagccccccggggaggagcctcgtgctctgggacgcgtgccgcgcactggcacggctggggcgcgagccaggctgcacgtttcctgtttagaaagttctgctccttcataaggaccttgaagtactaggaggaaaggtgctttgtgtgtggagttttccatgaagtgcagtcccaactaaaaggctgcgttaaagattcactgcgtgctgtcctcacttgttctacaatgagtgccaaatctgctatcagcaaggaaatttttgcacctcttgatgaaaggatgctgggagctgtccaagtcaagaggaggacaaagaaaaagattcctttcttggcaactggaggtcaaggcgaatatttaacttatatctgcctgtcagtgacaaacaagaaacccacacaggcgtccatcacaaaggtcaaacagtttgaaggctccacatcatttgttcggagatcacagtggatgctcgagcagcttcgccaggttaatggtatcgatcctaatggggattcggcagagtttgatttgttgtttgaaaatgcttttgaccagtgggtagccagcacagcgtcagaaaaatgcaccttcttccagatcctccaccatacctgccagaggtacctcacggacaggaagccagagtttattaactgccaatccaaaattatgggaggaaacagcatcctccattcagctgctgacagcgtgaccagcgcagtgcagaaggcaagccaggccttgaatgagcgtggagagcgattaggccgagcagaggagaagacagaagacctgaagaacagcgcccagcagtttgcagaaactgcgcacaagcttgccatgaagcacaaatgttgagaaactgcctatcctggtgactcttcttaagagaaactgaagagtttgttcagcagtttttacaagaattcgggacctccgcttgcttcttttttttccaatatttggacacttagagtggtttttgttttttcttttcagatgttaatgtgaaagaaagggtgttgcatttttacatttccctaatgatcttgctaataaatgctacaatagcatcagcttcattttgggtttttgcctcctcccactgtgtgtatgtgtgtatatgtatgttttgaatatgttttctttattaaaaaatattttttgtagtttgaatatgaaatttggaccaaatgataaactgcactgagtctaaactggcaacatgtatttttttctctgatattaagcaggaaggcattttaatgtggtgacatcagatgttatttttcctagatgaaaataaaagtcaagcagtgattagtttcagtcactgtcctagctacacttaatttgaagattaaaattctacattgtggaaaacaattgaatttattgggaaaaacagcagtcttagattttgctccttgcatagtaatcttttgcatgaaccatcaccagcgttcaaaaaaaaaaaaaaaaa

SEQ ID NO: 25694 - DNA, 2705 bp, Homo Sapiens
caggacaccgtcgccttcccggccgcgtcggagtccggcggcgacctgcctctgaaacatggcaggctcggatgctgagtgggtaaccattgccaataaccttctttttaagtgtcatatacatctgagaatacatgaacttcaagactgtgatgctaatgtttttattgctctttatcagtctattttgggagaaaaggtaccagacctcatagttattcctaggagtcaagaagatgatgcacacaatgtacaagcagtaattgattcactggccttggactacttgcaggtcagcttgtctcacataacaggagaaaatatagtgaaaggagataaagaatctattaagaatctcctggaaatatttgatggtttgttggagtatcttacagaacgcatcagtgaaacatctcatgagaaaagtgaaactgaacagtattttaaagaatctgatcgaggagaacgtttggaagagccagaaagtactaaagaatctaaatcatcatggaaaagagtttcttttgggaggtgctccttgtcttctgagatgttgggcccctcttgggatggagatgaagcagaatccactggtgaaatcattagacttggagacacagcacacaccttttctctaagaagtaatggtgctcaatgtcctaatgaaatgctgtctaaaaaagccttagcctcaccaagttctaaatcacatgaagatatgttgtaccctcctagtgttttgtccaagagtaggacatcctttgttgaagacacggaaaccctttctgtgagtgggattccaaatgctaggaagctaggggagcctatccgagcagctattcctttacatccaccctaccacccttcagagcctcgagcaccctgccccataggaaaagaatacttgcattcaagtcactgctccccagccgtaaattctactggagagcatacggaattttctggggatctagatgatggacttttcttaatttccaagttgcctaaaggcagcaaatgggaagtatatccagctcaggtccaagggcctaggacaaggaagcctcccaaaggaaaaagaaatgaaaacagagctacagcctcatcctgcaattcacctttcccccagaggccaagaaagagattaacagaacaagaattacatgatgtatcagaaaaactctctcagcggctttctgaactagattggatgttaaaaagtgctctgggtgatcggattaaagaaaagactgaccataaagaagaaaatactggaaatgaggaggtagaggatggaactgaggagacactgtctcagcacagtgatggcatcgtggagtatgggccaaagaagtcaaggccaggactttccatgcgtagaaagccaccctacagatcccattcgctctctccatctccagttaacaaacacaaacagttccacttggagagaaaaaggcagcgcaagccaagagaaacagatgtccgccaattccaagcacaggcgtttactgaagcatttgaaagggaactaagaagacataaagttcaagagaatattggacctctaagaatacatgagaaggaggaggaaacagaaaaaatatacagaggagaagctgttcgtaaaggaactccagaatgtagtcagccctggaagatttactctagaaaaaccacaacgcagagtctaagaggtggcctcccaaagccaaataaagcagttccaatgaaagtaagtgaacacagtctcctgccccttatgctggagcagtttccgtttctttatgtttctggcccaacactaagcaaaatgtggaaacagcaaattgcacaggttgaacagcttaagaaagaagcatgtagagaaaatcgatcaaagaagaaactccaagatgaaatagaagaagccctaagaaggcatgacctccttactacccttgtcaagaaagaatatgaacataacaagagactgcaagacttcaaggactgcattcgtaggcaaaggttgacccaatcaaagataaaagaaaatcgacagcaaatcgttcgtgctcgaaaatattatgatgattatagagttcagttgtgtgcaaaaatgatgagaatgaggacccgggaagaaatgatatttaagaaactgtttgaagaaggtttaaacattcaaaagcaaagattacgagacctaagaaactatgccaaagaaaagcgagatgaacaaaggagacgccaccaggatgaactggactccatggagaactactataaggaccagttttcattgctggcagaagccatatcacaggaacatcaagaacttaaagccagagagaaatctcaggcccagacattacataaggtgaagagggagctgagatctaagatggagaaggaaattcagcagctgcaggacatgataacacagaatgatgatgatgttttcttccgggaactggaagctgagcgcttcagatctcggcttcagctggcttcctttcagtacagtaaaagtccctccctatgaggccagacttgataatagtaggtgaaggttctggaggcctttaccaggacagagctagaatcgagccagtaaacagtctaagccagaaaaataattttcaaatgctttacctgtattttcattccagtactttttatgattttttaaataaaaattgttttctaaaaaaaaaaaaaaaaaa

SEQ ID NO: 25695 - DNA, 1069 bp, Homo Sapiens
ggaggacttcctgcggcaggtcggcgtgacggaaatgctacgtgcggccctgctgaaggtgctggaggcgcggcccgaggagccgatcgccttcctggctcactacttcgagaacatgggcctgcgctcgcctgtaaacggcggcgccggggagcccccgggccagctcctgctgcagcagcagcgcctgggccgcgcgctatggcaccttcgcctggcccaccactcccagagggccgccttcaacaacaacgtgagcgtggcctacgagtgcctgagcgccggcgggcgcaggaagaggccggggctggacgggcgcacctacagcgagctgctcaggcgcatctgccgggacggccaagcccccgaggaggtggtggcgccgctgctgcgcaaggtgcagtgccgtgaccacgaggcggtgccgctgagcgtcttccgcgcgggcacactcacctgcttcgtgctgctggagttcgtggcgcgcgccggcgcgctcttccagctgctggaggactcggccgccgccgtggccgaccgccgcgtgggccaggccgtgctggacaccctggagggcgcgctgcaggccagcgacgccgccgcgcccgcgcgcttcctggaggccggctcgcgcttggggcccgacagcctggcgctggcgctggaccgcgccgtcggggggcggcggcccagcgcgcccatgacccgcgaggagtttctggagagggccgccgcgctcttcatcgcgaaggtcaagccggtgggctgaggcccgtgggccgcgcggatccgggatctgcgctggggggtccccgcgtgcggggcgcgcggagccttcccttcgccctggtgaggccctgccataaccaggcgcccagccctgcggaggaggccggggctcccaggaagcggacgcccggtccccacacagcgccgcggccgcccctccacccccgcgggagcccctgccccacgctaataaaatgtgttgcgaggctgaaaaaaaaaaaaaaaaaaaaataaaaaaaaaaaaaaaaaaaaaaaaaaaaaaaaaaaaaaaaaaaaaaaa

SEQ ID NO: 25696 - DNA, 1700 bp, Homo Sapiens
cgcgccagcctcggcggtggcaagcgctgtcccccagcagaggtgtccctggatacaggatagcaaaacctgatctcataaaacctaggtcacaaaggacagccctgcaaaacagaccctatttggatcaagtgagccagttcctggaacctgaataatgactcctgaatcaagggatactacagatttgtctccagggggtacccaggagatggaaggcatcgtgatagtgaaggtggaggaggaagatgaagaagaccattttcaaaaggaaagaaacaaagtagagtcatcgccacaagttctcagtcgctctacaactatgaatgagagagccttattgtcatcgtatttagttgcatatagagtggcaaaagagaaaatggctcacacagcggctgaaaaaattatccttccagcatgtatggacatggtacggacaatttttgatgacaaatcagctgataaactaagaactatacctcttagtgataatacaatatctcgtcgaatctgtacgattgcaaaacatttggaagcaatgcttattacacggctgcagtccggtatagactttgcaatccaactcgatgagagcactgatattgcaagttgtcccacactcttggtttatgtcagatatgtgtggcaagatgattttgtagaggatctcttatgttgtttaaatttaaattcacatataactggattagatttatttactgaattagaaaactgccttcttggtcagtataaattaaactggaaacattgtaaaggaatttcaagtgatggaacagcaaatatgaccggaaaacacagcagacttactgaaaaattgttagaagcaacccacaacaatgctgtttggaatcactgttttattcatcgagaagctttggtatccaaagaaatttcaccaagtctgatggatgtattgaaaaatgcagtgaaaactgttaattttattaaaggaagctcactgaatagccgacttctcgaaatattttgttcagagattggagtgaaccacacccacttattgtttcatacagaagttcgttggctttctcaaggaaaagtattgagcagagtatatgaactcaggaacgagatttacatttttctcgttgaaaagcaatctcatttggcaaatatttttgaagacgacatttgggtaacaaaattggcatatttaagtgatatttttggcattcttaatgaattaagcctgaaaatgcaggggaaaaacaatgatatatttcagtatcttgaacatattctaggattccaaaagacgttattattgtggcaagcaagacttaaaagtaaccgccctagctactatatgtttccaacattattgcaacacatcgaagagaacattattaatgaagactgcttaaaagaaataaaattagagatattgttgcatctcacttctttgtctcaaacttttaattattactttccggaagagaaatttgaatcattaaaggaaaatatttggatgaaagatccatttgcttttcaaaacccagaatcaataattgagttaaacttggagcctgaagaagagaatgaattattgcagctcagttcatcattcacactaaagaattattataagatattaagtttatcagcattttggattaagattaaagatgactttccactgctaaaaaaaaaaaaaaaaa

SEQ ID NO: 25697 - DNA, 1372 bp, Homo Sapiens
gacagaactcaggctgcctccagccagcctttgcccgctagactcactggccctgagcacttgaaggtgcagcaagtcactgagaatgagcactttcttctcggacacagcatggatctgcctggctgtccccacagtactatgtgggacagtattttgcaaatacaagaagagctcagggcagctgtggagctggatggtctgcctggcaggcctctgtgcagtctgcctgctcatcctgtcccctttttggggcttgatcctcttctcggtgtcatgcttcctcatgtatacttacttatctggccaagaattgttacctgtggatcagaaggcagtcctggtgacaggtggtgattgcgggcttggccatgctttgtgcaagtatctggatgagctgggcttcacggtatttgccggagttttgaatgaaaatggcccaggagctgaggaattgcgaagaacctgctctccgcgcctctcggtgctccaaatggacatcacgaagccagtgcagataaaagatgcttacagcaaggttgcagcaatgctgcaggacagaggactgtgggctgtgatcaacaatgctggggtgcttggctttccaactgatggggagcttcttcttatgactgactacaaacaatgcatggccgtgaacttctttggaactgtggaggtcacaaagacgtttttgcctcttcttagaaaatccaaagggaggctggtgaatgtcagcagcatgggaggaggggccccaatggaaaggctggcatcttatggctcatcaaaggcggctgtgaccatgttctcatcagttatgagactggagctttccaagtggggaattaaagttgcttccatccaacctggaggcttcctaacaaatatcgcaggcaccagtgacaagtgggaaaagctggagaaggacattctggaccacctccccgctgaggtacaggaagactacggccaggactacatcttagcacagcggaatttcctcctattgatcaactcgttagccagcaaggacttctctccggtgctgcgggacatccagcatgctatcttggcgaagagcccttttgcctattacacgccagggaaaggcgcttacttgtggatctgccttgctcactatttgcctattggcatatatgattactttgctaaaagacattttggccaagacaagcccatgcccagagctctaagaatgcctaactacaagaaaaaggccacctaggcaatggaagccctcaaagaagtcggaatgtcatagtcttgaaatgaaagggaaactgggaaactgggtttctcattaaagttgtttcccactcaaaaaaaaaaaaaaaaaaaaaaaaaaaaa

SEQ ID NO: 25698 - DNA, 1336 bp, Homo Sapiens
gtcagtcgcgagcgaacgaccaagagggtgttcgactgctagagccgagcgaagcgatgcctaaatcaaaggaacttgtttcttcaggctcttctggcagtgattctgacagtgaggttgacaaaaagttaaagaggaaaaagcaagttgctccagaaaaacctgtaaagaaacaaaagacaggtgagacttcgagagccctgtcatcttctaaacagagcagcagcagcagagatgataacatgtttcagattgggaaaatgaggtacgttagtgttcgcgattttaaaggcaaagtgctaattgatattagagaatattggatggatcctgaaggtgaaatgaaaccaggaagaaaaggtatttctttaaatccagaacaatggagccagctgaaggaacagatttctgacattgatgatgcagtaagaaaactgtaaaattcgagccatataaataaaacctgtactgttctagttgttttaatctgtctttttacattagcttttgttttctaaatgttctccaagctattgtatgtttggattgcagaagaatttgtaagatgaatacttttttttaatgtgcattattaaaaatattgagtgaagctaattgtcaactttattaaggattactttgtctgcccaccacctagtgtaaaataaaatcaagtaatacaatcttaactgttgtggccttttttgatcataagagttggtactgtttaaggccaaaagtaacagtttttatagatcttttagtttcaactcagcttttacaataaaaaggatttgtattgcattgagtttataaacttttggtttgtgaacttcatatttgatcttttctcttccaatcaaatgtctaggcttgtttgacttccacccccaatggtttttcactctttttatttacttcattttcctttaataacttaatctcttcatgttcagtttttacttcactctttattcttttctttgattatggtatgcttatttggaaagtcagtgaaactgtcaaaatgttatctcaataagatacttatatgagaactacaatcaccgaatctactgtattcaatattagcagatctaatttgataaacaacatggcttgtgtgaaaactgagcaggtgtttgtttacccatagtgttctgtgtagttattgcttagtctgcagaaaataatgacttagatgagatgtctgacttgctttcacttattaaacatgttcaccatgggatgatgtctgtaacatcagatattgttcaactagactaggatttaataaaaattgtgaaagcttaaaaaaaaaaaaaaaaaaaaaaaa

SEQ ID NO: 25699 - DNA, 1609 bp, Homo Sapiens
ggcggttccgtccgggtctcggccaccgtcgagttccgtcgagttctgtcccggccctgctcacagcagcgccctcggagcgcccagcacctgcggccggccaggcagcgcgatcctgcggcgtctggccatcccgaatgctatggccgccgtcgccgtcttgcgggccttcggggcaagtgggcccatgtgtctccggcgcggcccctgggcccagctccccgcccgcttctgcagccgggacccggccggggcggggcggcgggagtcggagccgcggcccaccagcgcgcggcagctggacggcataaggaacatcgtcttgagcaatcccaagaagaggaacacgttgtcacttgcaatgctgaaatctctccaaagtgacattcttcatgacgctgacagcaacgatctgaaagtcattatcatctcggctgaggggcctgtgttttcttctgggcatgacttaaaggagctgacagaggagcaaggccgtgattaccatgccgaagtatttcagacctgttccaaggtcatgatgcacatccggaaccaccccgtccccgtcattgccatggtcaatggcctggccacggctgccggctgtcaactggttgccagctgcgacattgccgtggcgagcgacaagtcctcttttgccactcctggggtgaacgtcgggctcttctgttctacccctggggttgccttggcaagagcagtgcctagaaaggtggccttggagatgctctttactggtgagcccatttctgcccaggaggccctgctccacgggctgcttagcaaggtggtgccagaggcggagctgcaggaggagaccatgcggattgctaggaagatcgcgtcactgagccgtccggtggtgtccctgggcaaagccaccttctacaagcagctgccccaggacctggggacggcttactacctcacctcccaggccatggtggacaacctggccctgcgggacgggcaggagggtatcacggccttcctccagaagagaaaacctgtctggtcacacgagccagtgtgagtggaggcagaggagtgaggcccacgggcagcgcccaggagcccaccttcccctctggcccagccaccactgcctctcagcttcaacaggtgacaggctgctttcgtgacttgatattggtgtcatagcatttggcctacattaaaagccacaatttcatggggaaaggacaaaatggagagtgactgaggtgctgacctcagtgcaaggctggtgaaccctgcagcgggccagctatggtgggaagcctggcatttggggtgctccttgcaacgtcttaagcaagcgacccccctgacatagcaaaaggtggcaacccatggaggcagaaagaaggacgccagcctgacccttatctgaaacgtcctaagcagagttaatcctggctgctcaggagaggcgacacatttcaaatctccacgagatattctccacacagaaaatcttcttgattctatagagacttaatcatgcctatggctttgaataatcttatgtgatttaaataaattaaatctttatagaaaaaaaaaaaaaaaaaaaaaaaaaaaaaaa

SEQ ID NO: 25700 - DNA, 1823 bp, Homo Sapiens
attctagttctgattctgacacttgcaagtcatgcatcctccgagcctcggctttctcacctataaaatcttcaacgtgacctataaaaatccataaaatcacccctgcttcattgtttcccagggctcatagaaacatcatacaaggtggagaagagtacccaagaaggacaagcttggaatggggccccctccccaggctggagatcagacattgttggagaaggtatcattgcagccccctacatagcagagagatttgctgagttgcatagtctagagctggttgcaattattggacaagcaggaaacaaacctccacagcccatgcgagccacactgctgggttgagtgtatgagcatgtagaatgattgggtctccagtgcggacagaaggcatggatcgcgtggtgcctgtgttgggaggatactaagagggcgatcaccatgccaggacaagactagttgcctgggatcttctgggcacgtgactggagcagagtaccactggatctcctcacaccagccagacccaggaagagaagctcctttcacctgcactgttctctcagcaccctccacggagaaagcttcatgttatgcttagtgtacaggagaaatgctcatgggaatcctgtccattatcacagagcaggtattagtgggtgaatatggagctgagaagtaataagttgtaactggcatagatatcatggggatatttgaagaacgctgtgaacacatatgcatgggtccatgtattcatgagtgtgcacatatgtgtaattattcatacaattcatggtggatactacttcgagggtgttcacagaccccaggcagagagcgcctggagggaaaattatccaaggcaggcccattcatagttccaggacagccagaagaaagcctccgttaagcaccagaagtctccggggcaggtggggccaggcagcatgaaagaattggccgcaagagttccaaaccctgtcccaattatggagggtgacttttctttgtcctccttctccattcccttccatattgctcatgcatccaaagggagacctgaagactctctagcagggcaaggccattttcttttggcatttttctctccccagagtctagctgattatcagcttagacacacagcaggctatgtgctgtgaacaacaggcatcctgggttattttacaaactcatggatagtcattttgaaaccacctttgcaaaattgtgactgaaacagtgaaagagagctaacttaaccagctccatcttgtttctaacctccaagctgtctttgttcattcctgggcgtaggctgaactaactttgggagaaacttagtttgtagttatagtttaaacaaagactgtgacagccctttcccaatgcagacctccttcttgtctggggactagactaacattagccacaggattagaaattacggtttaggagtcacgcagctggaggctacaagattctgaccctccctaaactgcttctaagatcagtgcttgagacatgttgcagaccccgcacttgctggatcagctgacgccacacagatggataaactgcctcgtctgatcttgtggcccccacccgggaactgacgaagcgcaagaagacagcttcgactccctgtgagttcatccctgaccaaccagcactcctggctcactggcttccccctaccaagttatgcttaaaaattctgctccccgaattctcgaggagactgatttgagtgataataaaactccagtctcccgcaaaaaaaaaaaaaaaaaaaaaaaaaaaaaaaaaaaaaa

SEQ ID NO: 25701 - DNA, 897 bp, Homo Sapiens
attccagctatggagctagctttaaaaaggaacagtaaaaatattaatcggttagctgggtggaatggcccatgcctgtagtcccagctactcaggaggctcagcagcaggacgacttgagcccaagagttccagaccagcctggccaccttagtgagatcccttctcttaaaaataataacttattgccagatttggggcatttggaaagaagttcattgaagataaagcaaaagtaaaaaaaaaaaaaaaaaaacaaggggaaagggttggttaggcaatcattctagggcagaaagaagtacaggataggaagagcataatacactgtttttctcaacaaggagcagtatgtacacagtcataatgatgtgactgcttagcccctaaatatggtaactactctgggacaatatgggaggaaaagtgaagattgtgatggtgtaagagctaaatcctcatctgtcatatccagaaatcactatataatatataataatgaaatgactaagttatgtgaggaaaaaaacagaagacattgctaaaagagttaaaagtcattgctctggagaattaggagggatggggcaggggactgttaggatgcattataaactgaaaagcctttttaaaattttatgtattaatatatgcattcacttgaaaaactaaaaaaaaacaataatttggaaaaacccatgaaggtaactaacggaaggaaaaactaagagaatgaaaagtatttgcctctggaaagaacaactggcaggactgttgttttcattgtaagacttttggagccatttaattgtacttaaccattttcatctatttctttaataagaacaattccatcttaataaagagttacacttgttaataaaaaaaaaaaaaaaa

SEQ ID NO: 25702 - DNA, 2768 bp, Homo Sapiens
ctggagtgcagctcatactccatgcccagaattcctgcctcgccactgtcctgctgccctccagacatgctggggccctgcatgctgctgctgctgctgctgctgggcctgaggctacagctctccctgggcatcatcccagttgaggaggagaacccggacttctggaaccgcgaggcagccgaggccctgggtgccgccaagaagctgcagcctgcacagacagccgccaagaacctcatcatcttcctgggcgatgggatgggggtgtctacggtgacagctgccaggatcctaaaagggcagaagaaggacaaactggggcctgagttacccctggccatggaccgcttcccatatgtggctctgtccaagacatacaatgtagacaaacatgtgccagacagtggagccacagccacggcctacctgtgcggggtcaagggcaacttccagaccattggcttgagtgcagccgcccgctttaaccagtgcaacacgacacgcggcaacgaggtcatctccgtgatgaatcgggccaagaaagcagggaagtcagtgggagtggtaaccaccacacgagtgcagcacgcctcgccagccggcacctacgcccacacggtgaaccgcaactggtactcggacgccgacgtgcctgcctcggcccgccaggaggggtgccaggacatcgctacgcagctcatctccaacatggacattgacgtgatcctaggtggaggccgaaagtacatgtttcgcatgggaaccccagaccctgagtacccagatgactacagccaaggtgggaccaggctggacgggaagaatctggtgcaggaatggctggcgaagcgccagggtgcccggtacgtgtggaaccgcactgagctcatgcaggcttccctggacccgtctgtgacccatctcatgggtctctttgagcctggagacatgaaatacgagatccaccgagactccacactggacccctccctgatggagatgacagaggctgccctgcgcctgctgagcaggaacccccgcggcttcttcctcttcgtggagggtggtcgcatcgaccatggtcatcatgaaagcagggcttaccgggcactgactgagacgatcatgttcgacgacgccattgagagggcgggccagctcaccagcgaggaggacacgctgagcctcgtcactgccgaccactcccacgtcttctccttcggaggctaccccctgcgagggagctccatcttcgggctggcccctggcaaggcccgggacaggaaggcctacacggtcctcctatacggaaacggtccaggctatgtgctcaaggacggcgcccggccggatgttaccgagagcgagagcgggagccccgagtatcggcagcagtcagcagtgcccctggacgaagagacccacgcaggcgaggacgtggcggtgttcgcgcgcggcccgcaggcgcacctggttcacggcgtgcaggagcagaccttcatagcgcacgtcatggccttcgccgcctgcctggagccctacaccgcctgcgacctggcgccccccgccggcaccaccgacgccgcgcacccggggcggtccgtggtccccgcgttgcttcctctgctggccgggaccctgctgctgctggagacggccactgctccctgagtgtcccgtccctggggctcctgcttccccatcccggagttctcctgctccccacctcctgtcgtcctgcctggcctccagcccgagtcgtcatccccggagtccctatacagaggtcctgccatggaaccttcccctccccgtgcgctctggggactgagcccatgacaccaaacctgccccttggctgctctcggactccctaccccaaccccagggactgcaggttgtgccctgtggctgcctgcaccccaggaaaggagggggctcaggccatccagccaccacctacagcccagtgggtaccaggcaggctcccttcctggggaaaagaagcacccagaccccgcgccccgctgatctttgcttcagtccttgaatcacctgtgggacttgaggactcgggatcttcaggacgcctggagaagggtggtttcctgccaccctgctggccaaggaggctcctggggtggggatcaccagggggattttgacacagccttcggctgccccccactaagctaattccacacccctgtacccccccagggggccctctgcctcatggcaaaggcttgccccaaatctcaacttctcagacgttccatacccccacatgccaatttcagcacccaactgagatccgaggagctcctgggaagccctgggtgcaggacactggtcgagagccaaaggtccctccccagacatctggacactgggcatagatttctcaagaaggaagactcccctgcctccccagggcctctgctctcctgggagacaaagcaataataaaaggaagtgtttgtaatcccagcactttgggaggccgaggtgggcggatcacgaggtcaggagatggagaccatcctggctaacacggtgaaaccccttatctatgcgcctgtagtcccagctacccaggaggctgaagcaggataatcgcttgaacccgggcggcggagattgcagtgagccgaggtcatgccactgcactgcagcctgggcgacagagcgagattctgcctcaaaaataaacaaataaattttaaaaataaataaataataaaaggaaaaaaaaaaaaaaaaaa

SEQ ID NO: 25703 - DNA, 2247 bp, Homo Sapiens
gttcccctgcagttgtttgggctgtccctgtggctggttctggggtgtgcggccagccatggagcgctctgggcccagcgaagtgacaggctcagacgcgtcgggaccggacccgcagcttgcggtcaccatgggcttcacggggttcggtaaaaaagctcgcacatttgacttggaagcaatgtttgaacaaactcgaaggacagctgtggaaagaagtcgcaaaacactggaagcaagagaaaaagaggaagaaatgaacagagagaaagaattaagaagacaaaatgaagatattgagccaacatcctcaagatcaaatgtggtcagagattgctccaaatcatcttccagggatacgagcagcagtgaaagtgaacagagttctgactcttctgatgatgagttaattggccctcctttaccccctaaaatggtaggaaaaccagttaattttatggaggaagatatcctcggtcctttacctccacctcttaatgaagaagaagaagaagcagaggaagaagaagaggaagaggaggaagaggaaaatcctgttcacaagattcctgactcgcatgagataacgctgaagcatggcactaaaacagtgtctgctttgggtctggatccctcaggtgcccgtttggtgacaggaggatatgactatgatgttaagttttgggattttgctggaatggatgcttcttttaaggcatttcgatcccttcagccctgtgagtgccatcagatcaagtcattacagtatagtaacacaggagacatgattcttgttgtatctggaagctctcaggccaaggtgattgacagagatggttttgaagtaatggaatgtataaaaggagaccagtatattgtggacatggccaacaccaagggtcatacagcaatgcttcatactggctcatggcatcccaaaataaagggagaatttatgacttgctcaaatgatgcgactgtgaggacgtgggaagttgaaaatccaaagaagcaaaaaagtgtgtttaaaccacggacgatgcaaggcaaaaaagtcattcccactacgtgcacatatagtagagatggaaacctcatagcagctgcctgccagaatggaagcatacagatctgggaccgaaatttgactgttcatcctaagttccactataaacaggctcatgactcgggcacagacacttcttgcgtgactttttcctatgatggtaatgtccttgcctctcgtggaggtgacgattcattaaaattatgggacatccgacaatttaataaaccacttttttcagcctcgggtcttcccaccatgttcccaatgactgactgctgtttcagtccagatgataagctcatagtcactggtacatctattcaaagaggatgtggcagcggcaaacttgttttctttgagcgtaggactttccaaagggtgtatgaaatagacatcacagatgcgagtgttgttcgctgcctgtggcatccaaagctgaaccagatcatggttggaactggaaatggattggctaaagtctattacgaccccaacaagagtcagaggggagcaaaattatgtgtggttaaaacccagcggaaggcaaaacaagctgagactctaactcaggactacatcatcacccctcatgccttgcctatgttccgtgagccccgccaacggagtacaaggaaacagctggagaaggacagactggatcccctgaagtcgcataaacctgaacctcctgtagcaggcccaggtcgtggtggccgagttggaacccacgggggcactctctcttcctatattgtgaagaacattgctttggacaagaccgatgacagtaatcctcgggaagccattttgcgtcatgccaaagcagcagaagacagcccatattgggtttctccagcatattccaagactcagcccaaaaccatgtttgcccaagttgaatctgatgatgaggaagcaaagaatgagccagaatggaaaaaacgtaaaatttgaagaatctcatttgagagctgtttgcatgagtgggaggggtatgggacaggtttgggttttttttttatgctcatgaaattaaaaattcatttttatgaaaaaaaaaaaaaaaaaaaaaaaaaaaaaaaaaaaaaaaaaaaaaaaaaaaaaaaaaaaaaaaaaaaaaaaaaaaaaaaaaaaaaaaaaaaaaaaaaaaaaaaaaaaaaaaaaaaaaaaaaaaaaaa

SEQ ID NO: 25704 - DNA, 1125 bp, Homo Sapiens
actagttctagatcgcgagcggccggagcggacggcagacggggcgggcggcgtcagggtcgcagcgtctacagctgctcgggggcggtttcttggcggaggcttggccggctcctctctcccggctccgcggcggctgcgaaggcggcggctcctgccctctcgctttccctctcgcgtctctggctgcaggtgaaaggaaagcaagccaggatggatatttacgacactcaaaccttgggggttgtggtctttggaggattcatggttgtttctgccattggcatcttcctggtgtcgactttctccatgaaggaaacgtcatatgaagaagccctagccaaccagcgcaaggagatggcgaaaactcaccaccagaaagtcgagaagaaaaagaaggagaaaacagtggagaagaaaggaaagaccaagaaaaaggaagagaaacctaatgggaagatacctgatcatgatccagcccccaatgtgactgtcctccttcgagaaccagtgcgggctcctgctgtggctgtggctccaaccccagtgcagccccccattatcgttgctcctgtcgccacagttccagccatgccccaggagaagctggcctcctcccccaaggacaaaaagaagaaggagaaaaaagtggcaaaagtggaaccagctgtcagctctgtagtgaattccatccaggttctcacttcgaaggctgccatcttggaaactgctcccaaggaggtgccgatggtggtggtgcccccagtgggtgccaagggcaacacaccagccactggcactactcagggcaaaaaggcggaggggactcagaatcaaagcaaaaaggctgaaggagccccaaaccagggcagaaaggcagagggaaccccaaaccagggcaaaaagacagagggaaccccaaaccaagggaaaaaggcagagggaaccccaaaccaaggcaaaaaggcagaaggaaccccaaaccaaggcaaaaaggcggagggggcccagaaccagggtaaaaaggtagatacaaccccaaaccaggggaaaaaggtggagggggccccaacccagggcagaaaggccgagggggctcagaaccaggccaaaaaaaaaaaaaaa

SEQ ID NO: 25705 - DNA, 884 bp, Homo Sapiens
cagggcctgtccgtggccagcatccctgctgggcgattgagcagcgggaagctgcttggacccagtctcaaacttaaccctcatctagcacccgggcaggcctcctgggttgcagggacttgagaaaaggcagagttctcaggtcctaggaagctggggcacgctggcgtgacaagcgtcccggagaaagccaagccctcggggagctggggaccgcagcagggctgcagtcacatcctgcgcgggtgggcggcgggccaggccttcagttgtttcgggacgcgccgagcttcgccgctcttccagcggctccgctgccagagctagcctgagcccggttctggggcgaaaatgcctgcccttcacatcgaagatttgccagagaaggaaaaactgaaaatggaagttgagcagcttcgcaaagaagtgaagttgcagagacaacaagtgtctaaatgttctgaagaaataaagaactatattgaagaacgttctggagaggatcctctagtaaagggaattccagaagacaagaacccctttaaagaaaaaggcagctgtgttatttcataaataacttgggagaaactgcatcctaagtggaagaactagttgttttagttttcccagataaaaccaacatgctttttaaggaaggaagaatgaaattaaaaggagactttcttaagcaccatatagatagggttatgtataaaagcatatgtgctactcatctttgctcactatgcagtcttttttaagagagcagagagtatcagatgtacaattatggaaataagaacattacttgagcatgacacttctttcagtatattgcttgatgcttcaaataaagttttgtcttgggaaaaaaaaaaaaaaaa

SEQ ID NO: 25706 - DNA, 1475 bp, Homo Sapiens
ggagacgtgtctgtctgtgaggcgctgggtgcacgtccccagggctctgggctaggaaggcagcggcgaggtgcctccccacgtacccctcgcgggcccagccgagcaacgtggggcgaaggcggcggcgaaggcccgggctgggagcgttggcggccggagtcccagccatggcggagtctgtggagcgcctgcagcagcgggtccaggagctggagcgggaacttgcccaggagaggagtctgcaggtcccgaggagcggcgacggagggggcggccgggtccgcatcgagaagatgagctcagaggtggtggattcgaatccctacagccgcttgatggcattgaaacgaatgggaattgtaagcgactatgagaaaatccgtacctttgccgtagcaatagtaggtgttggtggagtaggtagtgtgactgctgaaatgctgacaagatgtggcattggtaagttgctactctttgattatgacaaggtggaactagccaatatgaatagacttttcttccaacctcatcaagcaggattaagtaaagttcaagcagcagaacatactctgaggaacattaatcctgatgttctttttgaagtacacaactataatataaccacagtggaaaactttcaacatttcatggatagaataagtaatggtgggttagaagaaggaaaacctgttgatctagttcttagctgtgtggacaattttgaagctcgaatgacaataaatacagcttgtaatgaacttggacaaacatggatggaatctggggtcagtgaaaatgcagtttcagggcatatacagcttataattcctggagaatctgcttgttttgcgtgtgctccaccacttgtagttgctgcaaatattgatgaaaagactctgaaacgagaaggtgtttgtgcagccagtcttcctaccactatgggtgtggttgctgggatcttagtacaaaacgtgttaaagtttctgttaaattttggtactgttagtttttaccttggatacaatgcaatgcaggatttttttcctactatgtccatgaagccaaatcctcagtgtgatgacagaaattgcaggaagcagcaggaggaatataagaaaaaggtagcagcactgcctaaacaagaggttatacaagaagaggaagagataatccatgaagataatgaatggggtattgagctggtatctgaggtttcagaagaggaactgaaaaatttttcaggtccagttccagacttacctgaaggaattacagtggcatacacaattccaaaaaagcaagaagattctgtcactgagttaacagtggaagattctggtgaaagcttggaagacctcatggccaaaatgaagaatatgtagataatggactgggatatattgtatttctcatgttaaagcctcttcccttgaaattaaaaaaaaattttaactgataaaaaaaaaaaaaaa

SEQ ID NO: 25707 - DNA, 1339 bp, Homo Sapiens
caaagtctcactgtgtcatgcaggctggagtgcagtggcatgatctcactgcaacctccatctcctgtctcagcctcctagataactgggattacaggtgcccaccaccatgcccggctaatttttgtatttttggtagagacagagtttcaccaggttggtcaggctggtctcaaactcttgacttcaggtaatccacccaccttggcctcccaaagtgctgggattacaggcatgagccaccatcttcagccagatgatttttttattgagagagtgaaatgctattttgttccccaaatggcgctagtgaatcactaggagggtcccactgataggccatgtttagcactggttgccagggattctctttttgagagagggaaagcaaaatgaatggaagtacccagctggaggtttcagggcttctggaggatgctctcgcatagctcgaggtcctctgcccacctcttctctccaaggaaaatgaggactgccccttccccctgcaggattggcccccagcctgcgcatgcaccctcctcttgcccaagtggggagcacagaggcggagaggaatcccttaccacacccacggcccagcttgctcacgagtgtcacctctgtgacggtcaccactgctcccttggagggccacttgagttactgttgcttcctcgcctgctggcttgatgagcaccgatggtgggatctgaccccgaggggcagagctgtcggtgactgaggactggactgtggtgaccatgccgatttgctcagggagaacgttgcaatgcacccagcagctcctggctctgcaggcggcacagcctggggccctgtgatcctctggtttcttccattggggcggagtcgggggtggagggagctggccacaacccactgctctgatgggtggtttgtccaaggatgctgaatgtaatgcctggtcaatgtggaagcccatgaggttgcccagggaagcctccaaaagctgggatgcttgagggtatccaagttgaaaaagacaaaatctgaccatcagccagtgacagtcctggcaaatgaaggtggggcggggcagtgaggggtgggagaaggtgaatgattcattattccaccccgaggtttgctggggtgaggggaagaatcgatgctgctttgggaactgaaggtttttctgttgggaaggccctcttggttttggagagaaagacaagttatgagtagctgctaccctggaacggtgggcagagagcctactaggaaatgtgcagaataaactattttttgaaggaaaaaaaaaaaaaaaaaaaaaaaaaaaaaaaaaaaaaaaaaa

SEQ ID NO: 25708 - DNA, 2418 bp, Homo Sapiens
agagacacattgagaaggaggaaactatggcctccaggcttccgacggcctggtcctgtgaaccagtgacctttgaagatgtaacactgggttttaccccggaagagtggggactgctggacctcaaacagaagtccctgtacagggaagtgatgctggagaactacaggaacctggtctcagtggaacatcagctttccaaaccagatgtggtatctcagttagaggaggcagaagatttctggccagtggagagaggaattcctcaagacaccattccagagtatcctgagctccagctggaccctaaattggatcctcttcctgctgagagtcccctaatgaacattgaggttgttgaggtcctcacactgaaccaggaggtggctggtccccggaatgcccagatccaggccctatatgctgaagatggaagcctgagtgcagatgcccccagtgagcagatccaacagcagggcaagcatccaggtgaccctgaggccgcgcgccagaggttccggcagttccgttataaggacatgacaggtccccgggaggccctggaccagctccgagagctgtgtcaccagtggctacagcctaaggcacgctccaaggagcagatcctggagctgctggtgctggagcagttcctaggtgcactgcctgtgaagctccggacatgggtggaatcgcagcacccagagaactgccaagaggtggtggccctggtagagggtgtgacctggatgtctgaggaggaagtacttcctgcaggacaacctgccgagggcaccacctgctgcctcgaggtcactgcccagcaggaggagaagcaggaggatgcagccatctgcccagtgacagtgctccctgaggagccagtgaccttccaggatgtggctgtggacttcagccgggaggagtgggggctgctgggcccgacacagaggaccgagtaccgcgatgtgatgctggagacctttgggcacctggtctctgtggggtgggagactacactggaaaataaagagttagctccaaattctgacattcctgaggaagaaccagcccccagcctgaaagtacaagaatcctcaagggattgtgccttgtcctctacattagaagataccttgcagggtggggtccaggaagtccaagacacagtgttgaagcagatggagtctgctcaggaaaaagaccttcctcagaagaagcactttgacaaccgtgagtcccaggcaaacagtggtgctcttgacacaaaccaagtttcgctccagaaaattgacaaccctgagtcccaggcaaacagtggcgctcttgacacaaaccaagttttgctccacaaaattcctcctagaaaacgattgcgcaaacgtgactcacaagttaaaagtatgaaacataattcacgtgtaaaaattcatcagaagagctgtgaaaggcaaaaggccaaggaaggcaatggttgtaggaaaaccttcagtcggagtactaaacagattacgtttataagaattcacaaggggagccaagtttgccgatgcagtgaatgtggtaaaatattccggaacccaagatacttttctgtgcataagaaaatccataccggagagaggccctatgtgtgtcaagactgtgggaaaggatttgttcagagctcttccctcacacagcatcagagagttcattctggagagagaccatttgaatgtcaggagtgtgggaggaccttcaatgatcgctcagccatctcccagcacctgaggactcacactggcgctaagccctacaagtgtcaggactgtggaaaagccttccgccagagctcccacctcatcagacatcagaggactcacaccggggagcgcccatatgcatgcaacaaatgtggaaaggccttcacccagagctcacaccttattgggcaccagagaacccacaataggacaaagcgaaagaagaaacagcctacctcatagctctcaagccagttgaagaaaccttgccttttcagcttgaccctgcaatataacatgcacaggcctgcttgtgaatcaggactgaatgtgaaagggaagtattgagtgaggacattcccaaaaccaaaggacaactgaggagactgcccagcacataatgaataaataagaaaatgagtgaggagttattaacatcatttggaaaaaagatttcccattcacttgatattgtttgttcactcatttagtcattaaaagtgagattaataaaatctgaaaatgttatataataactttaaaaagccaggtaattaataatctgcactgatattacatccacagtaccacagtatttatgtgtatgaattaaggattaaaagataatgtggataaataaactattgatctatgaaaaaaaaaaaaaaaaaaa

SEQ ID NO: 25709 - DNA, 1375 bp, Homo Sapiens
ggggctcacgaggccgtgggtacgaccggaagccgcagactgaatctcgctctgttgcccagcccatctcggcccactgaaacctccacctcccgggttcaagcgattctcctgcctcagcctcccgagtagctgagattacaggcgcccgccaccacgcccagcatgctgatcccattttcaatgaagaattgcttccagttactttgtaactgccaggtcccagcagctggctttaaaaaaacagtaaaaaatgggctcattttacagtcaatttccaatgatgtctatcaaaatctggctgtggaagactggatccatgaccatatgaatctagaaggcaaaccaattctattcttttggcagaattctccctctgttgtaattggtaggcatcaaaatccttggcaggaatgtaacctgaatctaatgagagaagaaggtataaaactggctcggagaagaagtggaggaggaacagtctaccatgatatgggtaatatcaatttgactttctttacaaccaaaaaaaagtatgatagaatggaaaatctgaaattaattgtgagagctctgaatgctgtccaaccccagctggatgtgcaggctaccaaaagatttgaccttttacttgatggacagtttaaaatctcaggaacagcttctaagatcggccggactactgcctatcaccattgcactttattatgtagtactgatgggacgttcttgtcttctttgctaaagagcccttaccaagggatcaggagcaatgccactgctagcataccttccttagtgaaaaatcttttggaaaaggatcccactctgacctgtgaagtactaatgaatgctgttgctacagagtatgctgcttatcatcaaattgataatcacattcacctaataaacccaacggatgagacactgtttcctggaataaatagcaaagccaaagaactgcaaacttgggagtggatatatggcaaaactccaaagtttagtataaatacttcctttcatgtgttatatgaacagtcacacttggaaattaaagtattcatagacataaagaatggaagaattgaaatttgtaatattgaagcacctgatcattggttgccattggaaatacgtgacaaattaaattcaagtcttattggcagtaagttttgcccaactgaaactaccatgctaacaaatatattacttagaacatgtccacaagaccacaaactaaacagtaaatggaatattctctgtgaaaaaattaagggaataatgtgattccaagtaaatgtcttaatacagtttcaattagaaaataaaatgtctcatacttgcgaaaaaaaaaaaaaaaaaaaaaaaaaaaaaa

SEQ ID NO: 25710 - DNA, 1033 bp, Homo Sapiens
ggggacttgagcgggcactcttctgcggcaagcaggtctaggaattcgcctggttcccacctcgcgtcccttgccttccttcctagtctacccactgtagtgccccctgcgtcccgctccctcctagccgactcagagcacaagaaggattgccacggtttccattgcagcagccgtggcgcctctgaccctttttttatatcgcggcgacggcgggctgtcgtcacgacgacgtgcggacgcagcggcgggggcacaggagacaatttatccagcatgttgctagaaaatctaactgataatgaaagtgaaaatactaatcttaagaagaaggtatttgaaaaggaggcccatatccaagaactttcttgtttgtttcagagtgaaaagagcttagaaaccaagatagccaagtggaacctgcaatcaagaatgaataagaatgaggctatagtgatgaaagaagcaagtaggcaaaaaactgtagctttaaaaaaaggcatctaaagtttacaaacaaaggcttgaccattttacaggagctattgaaaagcttacttcccaaattagagatcaggaagccaagttgtctgaaacaatttcagcttccaatgcctggaaaagtcattatgagaaaattgtaatagaaaaaaccgaattggaagtacagattgaaacaatgaaaaagcaaatcattaatcttttggaagatctgaagaaaatggaagaccatggaaaaaattcatgtgaagaaattcttagaaaagttcactcaattgaatatgaaaatgaaactctgaatcttgagaatacaaaattaaagactacacttgctgctttgaaggatgaagttgtatctgttgaaaatgaactctcagaattgcaagaagtagaaaaaaaacagaaaacccttattgaaatgtataaaactcaggtacaaaagttgcaagaagcagctgaaatagtaaaaagcagatgtgaaaatttgctacataaaaataaccaaaaaaaaaaaaaaaaaaaaaaaaaaaaa

SEQ ID NO: 25711 - DNA, 959 bp, Homo Sapiens
ggggaccctgctttctgcattcttctctccacatccctctctgtacttacagcccccaatggcccccaaaaagccagagcccaagaaggatgatgccaaggcagcccccaaggcagctccagctcccgcacctccccctgagcctgagcgccctaaggaggtcgagtttgatgcttccaagatcaagattgagttcacacctgagcagattgaagagttcaaggaagccttcatgctgttcgaccgcacacccaagtgtgagatgaagatcacctacgggcagtgtggggatgtcctgcgggcgctgggccagaaccccacacaggcagaagtgctccgtgtcctggggaagccaagacaggaagagctcaataccaagatgatggactttgaaactttcctgcctatgctccagcacatttccaagaacaaggacacaggcacctatgaggacttcgtggaggggctgcgggtcttcgacaaggagggcaatggcactgtcatgggtgctgagcttcgccacgtgctggccacgctgggtgagaggctgacagaagacgaagtggagaagttgatggctgggcaagaggactccaatggctgcatcaactatgaagcatttgtgaagcacatcatgtccagctaaacctcgtgcccaggaagcccagggaaggctgtgcagggacgtctcatctcccatgtgtgatgctgacaccagcggcctggagtcgtgggaaggaggggagccttaccaagactcctgcaaaaacccttggacctctccacgtggttgccgtctctggcccctctcaggctgtgcttacctgtgacagcagctctgtccccaccccatgggcctcatgaataaatggcttcttgccggcaaaaaaaaaaaaaaaaaaaaaaaaaaaaaaaaaaaaaaaaaaaagaaaaaaaaaaaaaaaaaaaaaaaaaaaaaa

SEQ ID NO: 25712 - DNA, 637 bp, Homo Sapiens
gggggagtgggcggtggcgattggtgttggcggtctggctcagctgggcagggggtaactttactgatttgggggtggtttttagtttaatttttcttttctagcttcccatcgacggtcagtgcgcacgttgtaatcagctgaggccatgtcaggagacggagccacggagcaggcagctgagtatgtcccagagaaggtgaagaaagcggaaaagaaattagaagagaatccatatgaccttgatgcttggagcattctcattcgagaggcacagaatcaacctatagacaaagcacggaagacttatgaacgccttgttgcccagttccccagttctggcagattctggaaactgtacattgaagcagaggttactattttattttattttttcttatatcagtattgcagcattcactgtagtgatagaaaacaagttaggaacatagccaattaggacaaggaggatttaaatgtgtcttacctttattttgtaaaataggtataaaggagtaattaaaatgaatttttgaaatttgggtcttttacaagctgatgattgttgcattttggagttgcaacaacattaaaacagtttcaatggtaaaaaaaaaaaaaaaaaaaaaaaaaaaaa

SEQ ID NO: 25713 - DNA, 3138 bp, Homo Sapiens
gtggaacctcgatattggtggtgtccatcgtgggcagcggactaataaaggccatggcgccagcagaaatcctgaacgggaaggagatctccgcgcaaataagggcgagactgaaaaatcaagtcactcagttgaaggagcaagtacctggtttcacaccacgcctggcaatattacaggttggcaacagagatgattccaatctttatataaatgtgaagctgaaggctgctgaagagattgggatcaaagccactcacattaagttaccaagaacaaccacagaatctgaggtgatgaagtacattacatctttgaatgaagactctactgtacatgggttcttagtgcagctacctttagattcagagaattccattaacactgaagaagtgatcaatgctattgcacccgagaaggatgtggatggattgactagcatcaatgctgggagacttgctagaggtgacctcaatgactgtttcattccttgtacgcctaagggatgcttggaactcatcaaagagacaggggtgccgattgccggaaggcatgctgtggtggttgggcgcagtaaaatagttggggccccgatgcatgacttgcttctgtggaacaatgccacagtgaccacctgccactccaagactgcccatctggatgaggaggtaaataaaggtgacatcctggtggttgcaactggtcagcctgaaatggttaaaggggagtggatcaaacctggggcaatagtcatcgactgtggaatcaattatgtcccagatgataaaaaaccaaatgggagaaaagttgtgggtgatgtggcatacgacgaggccaaagagagggcgagcttcatcactcctgttcctggcggcgtagggcccatgacagttgcaatgctcatgcagagcacagtagagagtgccaagcgtttcctggagaaatttaagccaggaaagtggatgattcagtataacaaccttaacctcaagacacctgttccaagtgacattgatatatcacgatcttgtaaaccgaagcccattggtaagctggctcgagaaattggtctgctgtctgaagaggtagaattatatggtgaaacaaaggccaaagttctgctgtcagcactagaacgcctgaagcaccggcctgatgggaaatacgtggtggtgactggaataactccaacacccctgggagaagggaaaagcacaactacaatcgggctagtgcaagcccttggtgcccatctctaccagaatgtctttgcgtgtgtgcgacagccttctcagggccccacctttggaataaaaggtggcgctgcaggaggcggctactcccaggtcattcctatggaagagtttaatctccacctcacaggtgacatccatgccatcactgcagctaataacctcgttgctgcggccattgatgctcggatatttcatgaactgacccagacagacaaggctctctttaatcgtttggtgccatcagtaaatggagtgagaaggttctctgacatccaaatccgaaggttaaagagactaggcattgaaaagactgaccctaccacactgacagatgaagagataaacagatttgcaagattggacattgatccagaaaccataacttggcaaagagtgttggataccaatgatagattcctgaggaagatcacgattggacaggctccaacggagaagggtcacacacggacggcccagtttgatatctctgtggccagtgaaattatggctgtcctggctctcaccacttctctagaagacatgagagagagactgggcaaaatggtggtggcatccagtaagaaaggagagcccgtcagtgccgaagatctgggggtgagtggtgcactgacagtgcttatgaaggacgcaatcaagcccaatctcatgcagacactggagggcactccagtgtttgtccatgctggcccgtttgccaacatcgcacatggcaattcctccatcattgcagaccagatcgcactcaagcttgttggcccagaagggtttgtagtgacggaagcaggatttggagcagacattggaatggaaaagttttttaacatcaaatgccggtattccggcctctgcccccacgtggtggtgcttgttgccactgtcagggctctcaagatgcacgggggcggccccacggtcactgctggactgcctcttcccaaggcttacatacaggagaacctggagctggttgaaaaaggcttcagtaacttgaagaaacaaattgaaaatgccagaatgtttggaattccagtagtagtggccgtgaatgcattcaagacggatacagagtctgagctggacctcatcagccgcctttccagagaacatggggcttttgatgccgtgaagtgcactcactgggcagaagggggcaagggtgccttagccctggctcaggccgtccagagagcagcacaagcacccagcagcttccagctcctttatgacctcaagctcccagttgaggataaaatcaggatcattgcacagaagatctatggagcagatgacattgaattacttcccgaagctcaacacaaagctgaagtctacacgaagcagggctttgggaatctccccatctgcatggctaaaacacacttgtctttgtctcacaacccagagcaaaaaggtgtccctacaggcttcattctgcccattcgcgacatccgcgccagcgttggggctggttttctgtaccccttagtaggaacgatgagcacaatgcctggactccccacccggccctgtttttatgatattgatttggaccctgaaacagaacaggtgaatggattattctaaacagatcaccatccatcttcaagaagctactttgaaagtctggccagtgtctattcaggcccactgggagttaggaagtataagtaagccaagagaagtcagcccctgcccagaagatctgaaactaatagtaggagtttccccagaagtcattttcagccttaattctcatcatgtataaattaacataaatcatgcatgtctgtttactttagtgacgttccacagaataaaaggaaacaagtttgccaaaaaaaaaaaaaaaaaaaaaaaaaaa

SEQ ID NO: 25714 - DNA, 1643 bp, Homo Sapiens
gggggactgattagaagcctcattcagtgcacctgggccccagcaggcccagccaggcgtggaggaagaggcattgaggactttccttacctgtttttccagctcacccactgccagcagagaatgctgtccagtttcaacgagtggttttggcaggacaggttctggttaccacccaatgtcacgtggacagagctagaagaccgggatggccgtgtctacccccacccccaggacttgttggcagccctgcccctggcgctggtcctcctggccatgcgccttgcctttgagagattcattggcctgcccctgagccggtggctgggtgtgagggatcagaccaggaggcaagtgaagcccaacgccacgctggagaaacacttcctcacggaagggcacaggcccaaggagccccagctgtctctcctggccgcccagtgtggcctcacgctgcagcagacccagcgatggttccggagacgccggaaccaggatcgaccccagctgaccaagaagttctgtgaggccagctggaggtttctcttctacctgtcctccttcgtgggcggcctctcggtcctgtaccacgagtcatggctgtgggcaccagtaatgtgctgggacaggtacccaaaccagactctgaagccatccctgtactggtggtacctcttggagctgggtttctacctctcactgctaatcaggctgccctttgatgtcaagcgcaaggatttcaaggagcaggtgatacaccacttcgtggcggtcatcctgatgaccttctcctacagtgccaacctgctgcgcattggctctctggtgctgctgttacatgattcctctgactacctgctggaggcctgtaagatggtcaactacatgcagtatcagcaagtgtgcgacgctctcttcctcatcttctcctttgtcttcttctacacccgactggtcctctttcccacccagatcctctacaccacatactacgagtccatcagcaacaggggccccttcttcggctactacttcttcaacgggcttctgatgttgctgcagctgctgcacgtgttctggtcttgcctcattctgcgcatgctctatagcttcatgaagaagggccagatggagaaggacattcgtagtgatgtagaagaatcagactccagtgaggaggtggcggcggcccaggaacctctgcagctaaagaacggggcagctggagggcccaggccagcccccactgatggccctcagagccgggtggccgggcgtctgaccaacaggcacacaacagccacatagccgggtggggctggctgtaaggggttgcccccccgccagtgccttggatatttctggggtgactggactggcgcccctgggccacctttctggagacagggagggccccacccggggtgggtgggaaggctgatgatctgtctccagccccttccttctgcccacccgcccttcttccctctgggcaactggacagatctgggagccagcagctggatgctgtggctggccagagacacctccaggctgtagcctgggggctggggggagccccaggctgaaaagggtccaattaaaacaaatggagccaaaaaaaaaaaaaaaaaaaaaaaaaa

SEQ ID NO: 25715 - DNA, 1438 bp, Homo Sapiens
gcgcctacgggagtccggcggcagcagctggtaccggcaaccacgggcagctctcagggaatctccgtcgtgaggccagaggctccagtccccgcgagtccagatgcctgtccagcctccaagcaaagacacagaagagatggaagcagagggtgattctgctgctgagatgaatggggaggaggaagagagtgaggaggagcggagcggcagccagacagagtcagaagaggagagctccgagatggatgatgaggactatgagcgacgccgcagcgagtgtgtcagtgagatgctggacctagagaagcagttctcggagctaaaggagaagttgttcagggaacgactgagtcagctgcggttgcggctggaggaagtgggggctgagagagcccctgaatacacggagccccttggggggctgcagcggagcctcaagattcgcattcaggtggcagggatctacaagggcttctgtctggatgtgatcaggaataagtacgaatgtgagctgcagggagccaaacagcacctggagagtgagaagctgctgctctatgacacgctgcagggggagctgcaggagcggatccagaggctggaggaggaccgccagagcctggatctcagctctgaatggtgggacgacaaactgcacgccagaggcagctccaggtcttgggactccctgccgcccagcaagaggaagaaggcacctctggtttctggcccatacatcgtgtacatgcttcaagagatcgacatcctggaggactggacagccatcaaaaaggctagggcagctgtgtcccctcagaagagaaaatcggatggaccttgaccctgctgttcacagccagggggaccctcagagcagctggcactgcacccaggattctcgtcttcctcctgcagacaggcggacccacaggcccctcagggtctgcccagccaggctcctgtggtgctgctgggccctcccactccatctggcactggcctggactcctcctctgccctcctcgaggcctgcacagctgtggccgtggagctgacctgaccaggcaaggctgctgtctccatccctgagccgcctgccacctcccactcctgaagatccatctcttggggctcccctgacagagaagacagccgaagtcaaagccacatcctcttgctgatgttggatgcaggctgtccggcctcagggccagggagccagtttccactgtgcgggaactctgagtcagacgtgattatctgggggtctgtccaccctggctggatctggaggcaagatgccaggccccccaggtgttctcagggcagttcttggtgtctgcttctcagattccaaggactggaattaaaacctttcctgggaaaaaaaaaaaaaaaaaaaaaaaaaaaaaaaaaaaaaaaaaaaaaaaaaaaa

SEQ ID NO: 25716 - DNA, 2831 bp, Homo Sapiens
ggcagcccagcgcctccggccgcacttccagctctctgcgcagcccgccgcgcagcccgccgccccagccatggcgaagcccctgacggaccaggagaagcggcggcagatcagcatccgcggcatcgtgggcgtggagaacgtggcagagctgaagaagagtttcaaccggcacctgcacttcacgctggtcaaggaccgcaacgtggccaccacccgcgactactacttcgcgctggcgcacacggtgcgcgaccacctggtggggcgctggatccgcacgcagcagcactactacgacaagtgccccaagagggtatattacctctctctggaattttacatgggccgaacattacagaacaccatgatcaacctcggtctgcaaaatgcctgtgatgaggccatttaccagcttggattggatatagaagagttagaagaaattgaagaagatgctggacttggcaatggtggtcttgggagacttgctgcctgcttcttggattccatggcaaccctgggacttgcagcctatggatacggcattcggtatgaatatgggattttcaatcagaagatccgagatggatggcaggtagaagaagcagatgattggctcagatatggaaacccttgggagaagtcccgcccagaattcatgctgcctgtgcacttctatggaaaagtagaacacaccaacaccgggaccaagtggattgacactcaagtggtcctggctctgccatatgacacccccgtgcccggctacatgaataacactgtcaacaccatgcgcctctggtctgctcgggcaccaaatgactttaacctcagagactttaatgttggagactacattcaggctgtgctggaccgaaacctggccgagaacatctcccgggtcctctatcccaatgacaatttttttgaagggaaggagctaagattgaagcaggaatactttgtggtggctgcaaccttgcaagatatcatccgccgtttcaaagcctccaagtttggctccacccgtggtgcaggaactgtgtttgatgccttcccggatcaggtggccatccagctgaatgacactcaccctgcactcgcgatccctgagctgatgaggatttttgtggatattgaaaaactgccctggtccaaggcatgggagctcacccagaagaccttcgcctacaccaaccacacagtgctcccggaagccctggagcgctggcccgtggacctggtggagaagctgctccctcgacatttggaaatcatttatgagataaatcagaagcatttagatagaattgtggccttgtttcctaaagatgtggaccgtctgagaaggatgtctctgatagaagaggaaggaagcaaaaggatcaacatggcccatctctgcattgtcggttcccatgctgtgaatggcgtggctaaaatccactcagacatcgtgaagactaaagtattcaaggacttcagtgagctagaacctgacaagtttcagaataaaaccaatgggatcactccaaggcgctggctcctactctgcaacccaggacttgcagagctcatagcagagaaaattggagaagactatgtgaaagacctgagccagctgacgaagctccacagcttcctgggtgatgatgtcttcctccgggaactcgccaaggtgaagcaggagaataagctgaagttttctcagttcctggagacggagtacaaagtgaagatcaacccatcctccatgtttgatgtccaggtgaagaggatacatgagtacaagcgacagctcttgaactgtctgcatgtgatcacgatgtacaaccgcattaagaaagaccctaagaagttattcgtgccaaggacagttatcattggtggtaaagctgccccaggatatcacatggccaaaatgatcataaagctgatcacttcagtggcagatgtggtgaacaatgaccctatggttggaagcaagttgaaagtcatcttcttggagaactacagagtatctcttgctgaaaaagtcattccagccacagatctgtcagagcagatttccactgcaggcaccgaagcctcggggacaggcaatatgaagttcctaaatggggccctaactatcgggaccatggatggggccaatgtggaaatggcagaagaagctggggaagagaacctgttcatctttggcatgaggatagatgatgtggctgctttggacaagaaagggtacgaggcaaaagaatactatgaggcacttccagagctgaagctggtcattgatcaaattgacaatggctttttttctcccaagcagcctgacctcttcaaagatatcatcaacatgctattttatcatgacaggtttaaagtctttgcagactacgaagcctatgtcaagtgtcaagataaagtgagtcagctgtacatgaatccaaaggcctggaacacaatggtactcaaaaacatagctgcctcggggaaattctccagtgaccgaacaattaaagaatatgcccaaaacatctggaacgtggaaccttcagatctaaagatttctctatccaatgaatctaacaaagtcaatggaaattgaactctagaattgtctctagaaaacatagcttcttactgaacttgaacatttttacaacattcactggtttttgttttgttagctaataatctataatagttgagtatctctgggaatggggagggaaattatatgtaatagagcttaaaaataaagtgtcaatttccaagggcaaaaaaaaaaaaaaaaaaaaaaaaaaaaaaaaaaaaaaaaaaaaaaa

SEQ ID NO: 25717 - DNA, 2776 bp, Homo Sapiens
cagccgccgagcggccgcgatttcccggggactgctggggcgcagcggggaggcgggccggggggcggcggggcgcgagcagagcgcggttgacctccctttctctgctcagctccagcgtcatttcggcctcttagttcttctgaaccctgctcctgagctaggtaggaaacatgagcggcaccaacttggatgggaacgatgagtttgatgagcagttgcgaatgcaagaattgtacggagacggcaaggatggtgacacccagaccgatgccggcggagaacccgattctctcgggcagcagccgacggacactccctacgagtgggacctggacaaaaaggcttggttccccaagattactgaagatttcattgctacatatcaggccaattatggcttctctaacgatggcgcatctagttctaccgcaaatgttgaagatgtccatgctaggactgcagaggaacctccacaagaaaaagccccggaacccactgatgccagaaagaagggagaaaaaagaaaggctgagtcaggatggtttcatgttgaagaagacagaaatacaaatgtatacgtgtctggtttgcctccagatattacagtggatgaatttatacaacttatgtccaagtttggcattattatgagagatcctcagacagaagaatttaaggtcaaactttacaaagataatcaaggaaatcttaaaggagacggtctttgctgttatttgaaaagagaatctgtggaacttgcattaaaacttttggatgaagatgaaattagaggctacaaattacatgttgaggtggcaaagtttcaactgaagggagaatatgatgcctcaaagaagaagaagaagtgcaaagactataagaagaagctgtctatgcaacaaaagcagttggattggagacctgagaggcgagccggaccatcccggatgcgccatgagcgagttgtcatcatcaagaatatgtttcatcctatggattttgaggatgatccgttggtgctgaatgagatcagagaagaccttcgagtagagtgttcgaagtttggacaaattaggaaactccttctctttgataggcacccagatggtgtggcctctgtgtcctttcgggatccagaggaagctgattattgtattcagactctcgatggaagatggtttggtggccgtcaaatcactgcccaggcatgggatgggactacagattatcaggtggaggaaacctcaagagaaagggaggaaaggctgagaggatgggaggctttcctcaatgctcctgaggccaacagaggccttaggcgttcagattctgtctctgcttccgaaagggcagggccttctagagcaaggcatttttcagagcaccccagcacatctaaaatgaatgctcaagaaactgcaactggaatggcgtttgaagaacctatagatgagaagaagtttgaaaagacagaagatgggggagaatttgaagaaggtgcttctgaaaacaatgctaaggaaagtagccccgaaaaagaggctgaagaaggctgccctgaaaaagaatctgaagagggctgccccaaaagagggtttgaaggcagctgctcccaaaaagagtctgaagaaggcaatcccgtaagaggatctgaagaggatagtcctaaaaaagagtctaaaaagaagacactcaaaaatgattgtgaagagaatggccttgcaaaggaatctgaagatgacctcaacaaggagtctgaagaggaggttggccccacaaaagagtccgaagaagatgactcagagaaagagtctgatgaagactgctctgaaaaacagtctgaagatggctccgaaagagaatttgaagaaaatggtctcgagaaagatttggacgaggaaggttctgaaaaggagcttcatgaaaatgttcttgacaaagagttagaagaaaatgactctgaaaactccgaatttgaagatgacggctctgaaaaagtgttagatgaggaaggctctgagagagagtttgacgaagattcagatgaaaaggaagaagaggaggatacatatgaaaaagtatttgatgatgagtctgatgagaaagaggatgaagaatatgcagatgaaaaggggcttgaagctgctgataaaaaggcggaagaaggtgatgcagatgaaaagctgtttgaagagtcagatgacaaggaagatgaagatgcagatggaaaggaagttgaagatgctgacgaaaagttgttcgaagatgatgattccaatgagaagttgtttgatgaggaggaagattccagtgagaagttgtttgacgattctgatgagagggggactttgggtggttttgggagtgttgaagaagggcccctatccactggcagcagctttattctcagtagcgatgatgatgacgatgatatttaatcccttaaacttgctttttagggagagtcctccatctacatttgcctgtgcttcagggtaattactagtagtgttacatgaacatgtgcatagtggtaggatgccatcagattaaagcattgaagtgtttcattgttacctgtacctaatggttttaaatatatgttaattgattgtttagttaaaatgtcatagttacaatgcaagtaaactggatacttgttcttttgtcagatttgttaaatgcatgcagaataatatttttaagagtattgattgaagtttgtgatattcatcaataaaaatgagttgataataaaaaaaaaaaaaaaaaa

SEQ ID NO: 25718 - DNA, 1873 bp, Homo Sapiens
cggcgaggaggtggaggccggcgctccgctccgctccagctcggtttcatgtcccgccaggcgaaggatgacttcctgcggcactacacagtgtcggaccccaggactcaccccaagggctacaccgagtacaaagtaaccgcgcagttcatctcaaagaaggacccagaggatgtcaaagaggtggtggtctggaagcggtacagcgacttccgcaagctgcatggagacctggcctacacccaccgcaacctcttccgccgcctcgaggagttccccgctttcccccgggcccaggtgtttggccggtttgaagcctcagtgatcgaggagcggcgaaagggggcagaggacctgcttcgcttcactgtgcacatacctgcgctcaacaacagcccccagctcaaggagttcttccggggtggggaggtgacccgacccttggaggtgtccagggacctacacatcctgccaccccctctgatccccaccccgccccctgatgacccccggctatcccaactgctccctgcagaaaggaggggcctcgaggaattggaggtgccagtggaccccccaccatccagccctgcccaggaggccctggatctcctctttaactgtgagagcaccgaggaggcatctggttcccctgcccgaggccccctcaccgaggctgagcttgccctcttcgaccccttctccaaggaagaaggcgcagcccccagccccacccatgtggctgagctggcaacgatggaggtggagtctgcaaggctggaccaggaaccctgggagccaggagggcaggaggaggaagaggatggggaaggagggcccacccctgcctacctaagccaggccacagagctcatcacccaggccctgcgggatgagaaggcaggcgcttacgctgctgcactccagggctatcgagacggcgtgcacgtcttgcttcagggagtccccagtgacccgttgcctgcccgccaggaaggtgtgaagaagaaggcagctgagtacctgaagcgggcagaggagatcctgcgcctgcacctgtctcaactcccaccctaacagggagtgggccattccctgggactctcactcctgcactgccagccccttctcctctccccagggcctggccctacctcctggtcttgtaattacaggagccatttctgtaggtaactggaccaagaatgagaaaaataatgaattcttagctccctgattacacctgccaccttggaatccaggactcacacttctgaccctgcctgtctttttggggtttttttgagttggagtctcgctgtgtcgcccagactggagtgcagtggtgggatcacggctcactgcaacctccacctcccaggttcaagcagttctcctgtctcagcctccccagtagctgagattgcaggcacatgccaccacgcccagctaatattttgtattttcagtagggacggggttacaccatgttggccaggctggtctcgaactcctgacctcaagtgatccacccgcctcagtctcccaaagtgctgagattacaggcatgagtcactacgcccggcccatgtctgtctgtcttgatgtgtgagcagcagctgtggtcattaaaccattagtttacccctctagaactggggtctgcaaactcccacctgcagccaaatctggcccacctcctttttaatgtaagggctgtgagagtggtttttacttttttaatgattaaaaaaatcaaaataatattctgtgacaatgacaggtgaaatttatatgtgacaagtgaaaattatatgaaatttaagagtccataaataaaatttgttggaacacaaaaaaaaaaaaaaaaaaa

SEQ ID NO: 25719 - DNA, 2295 bp, Homo Sapiens
ctgactcctcaggagcaaaaaacataacctgaagagggaggaagtggatttggggttcaccatttcttggggcacacttgattgaaaactgagacttctgaagagaaggccagaagatacaaagacagaccatcccagttgaatgctgtcttccaagaacagaagaaaatgatccaggcccaggaatccataacactggaggatgtggctgtggacttcacttgggaggagtggcaactcctgggcgctgctcagaaggacctgtaccgggacgtgatgttggagaactacagcaacctggtggcagtggggtatcaagccagcaaaccggatgcactcttcaagttggaacaaggagaacaactgtggacaattgaagatggaatccacagtggagcctgttcagacatatggaaagttgatcatgtgctggagcgcttgcagagtgaaagcctggtgaacagaaggaaaccatgtcatgaacatgatgcatttgaaaatattgttcattgcagcaaaagtcagtttctgttagggcaaaatcatgatatatttgacttacgtggaaaaagtttgaaatccaatttaactttagttaaccagagcaaaggctatgaaataaagaactctgttgagtttactggaaatggggactcctttcttcatgctaaccatgaacgacttcatactgcaattaaattccctgcaagtcaaaaactcatcagcactaagtcccaattcatcagtcccaagcatcagaaaacacgaaaattagagaagcatcatgtgtgcagtgaatgtgggaaagccttcatcaagaagtcttggctaactgatcaccaggtaatgcatacaggagagaaaccccacagatgtagtctatgtgagaaagccttctccagaaagttcatgcttactgaacatcagcgaactcatacaggagaaaaaccttatgaatgccctgaatgtggcaaagcctttctcaagaaatcacggctcaacatacatcagaaaacacataccggagagaaaccctatatatgcagtgaatgtggaaaaggcttcatccagaaaggaaatctcattgtacaccagcgaattcatacaggtgagaaaccttatatatgcaatgaatgtggaaaaggcttcattcagaagacgtgtctcatagcacatcagagatttcacacaggaaagacgccctttgtgtgcagtgaatgtggaaaatcctgttctcagaaatcaggtctcattaaacatcaaagaattcacacaggagagaaaccctttgaatgtagtgaatgtgggaaagcctttagcacaaagcaaaagctcattgtccatcaaaggactcatacaggagagagaccctatggctgtaacgagtgtgggaaagcgtttgcgtatatgtcgtgtctggttaagcataagagaatacacacaagggagaaacaagaggcagccaaggtggaaaatcctcctgcagagaggcacagctcattacacaccagtgatgtcatgcaggagaaaaactctgctaacggggcgactacacaagtgccttctgtggcccctcagacatcattaaacatcagcggcctcctcgcaaacaggaacgtagtccttgtgggacagccagtggtcagatgtgcagcctcaggagataacagaggatttgcacaggacagaaaccttgtgaatgcagtgaatgtggttgtgccttccgtgatcaattatgtcttattttatgttacagaaaacccataggaagaaaactcagatctatgtggaaaagggttgagcaaaaatttgtagttcattatgtggccgaaaagcatatactgagagaacatgtataaggctgagatagcctgataaactcatcctattaaaatgtatgctgtgatacacaggcaaatttgatgttaacctaagcacatacacagcaattgctcgactgtgtcaattaaatgagtaaaggaagcccaagtacttttaagtggaggaaatgaagtactgtgaatttttaaaacagatgagataattggtgtcgggagtgttgcagtgactgaaaagcttcataaggggcagttggtgggaaagggctaatactgtaatggtggaatgtgggacacatatgtgtcaattcagtttccttagaccagtgccagtgtggaggattaattgaaaaccaggaccataaactttcagaactttgtattatgcagagggatctgtgaaactagtcaatttgtttcattaaacaaatattttaaaaaaaaaaaaaaaaaaaaa

SEQ ID NO: 25720 - DNA, 931 bp, Homo Sapiens
ctgggttcgttttattcagcggcagtggtgctttcccgaatctcagaatgcctgttaaaagatcactgaagttggatggtctgttagaagaaaattcatttgatccttcaaaaatcacaaggaagaaaagtgttataacttattctccaacaactggaacttgtcaaatgagtctatttgcttctcccacaagttctgaagagcaaaagcacagaaatggactatcaaatgaaaagagaaaaaaattgaatcaccccagtttaactgaaagcaaagaatctacaacaaaagacaatgatgaattcatgatgttgctatcaaaagttgagaaattgtcagaagaaatcatggagataatgcaaaatttaagtagtatacaggctttggagggcagtagagagcttgaaaatctcattggaatctcctgtgcatcacatttcttaaaaagagaaatgcagaaaaccaaagaactaatgacaaaagtgaataaacaaaaactgtttgaaaagagtacaggacttcctcacaaagcatcacgtcatcttgacagctatgaattccttaaagccattttaaactgaggcattaagaagaaatgcactcaccatgagcaccaacttctgcatctgcctgatcatatttaaaggaacagagaaatatttgtaattaatctgcccagtaaataccagctcgtagcagttggcaggtgcatgtctagataaaatttcttgcagctaatttaaactttctacacgcaccagtagataatctcaatgtaaataatacatttcttcttggctctttaatgtaagccaacatggagaggaagatcttgacttatattctgtaccacatacacttctgtggacttttagcatttgtgggtagacttaataaagcatgtataaaagtgaaaaaaaaaaaaaaaaaa

SEQ ID NO: 25721 - DNA, 2605 bp, Homo Sapiens
gccttccgagcagctgggactacaggagcctgccaccacatctggcgaatttttgtatttttagtagagaagggggttcagcatgttgtccaggttggtcttgaactcctgacctcaggtgatccagccactttggcctcacaaagtgctgggattataggcaagagcgatggcgcccggcccactcagcaggattcctagaatgggcacgagctctgccctcatcacagtccaaaagtgagcacctgcctggagctgcccagaaacagccttgtggggtggggttggtgtctgacctccctccccgggggccttcgcaggcttctctgctggtgcttctgtgcctgtgggtctggattcctccagggcctgatcctgggtgcagatgcagctggaagccctgaacctgctgcacacactagtctgggcacggagtctctgccgtgccggagctgtgcagacacaggagcggctgtcaggcagtgccagccctgagcaagtgccagctggtgagtgctgtgctctgcaggagtatgaggccgccgtggagcagctcaagagcgagcagatccgggcgcaggctgaggagaggaggaagaccctgagcgaggagacccggcagcaccaggccagggcccagtatcaagacaagctggcccggcagcgctacgaggaccaactgaagcagcagcaacttctcaatgaggagaatttacggaagcaggaggagtccgtgcagaagcaggaagccatgcggcgagccaccgtggagcgggagatggagctgcggcacaagaatgagatgctgcgagtggagaccgaggcccgggcgcgcgccaaggccgagcgggagaatgcagacatcatccgcgagcagatccgcctgaaggcgtccgagcaccgtcagaccgtcttggagtccatcaggacggctggcaccttgtttggggaaggattccgtgcctttgtgacagaccgggacaaagtgacagccacggtggctgggctgacgctgctggctgtcggggtctactcagccaagaatgcgacagccgtcactggccgcttcatcgaggctcggctggggaagccgtccctagtgagggagacgtcccgcatcacggtgctggaggcgctgcggcaccccatccaggtcagccggcggctcctcagtcgaccccaggacgtgctggagggtgttgtgcttagtcccagcctggaagcacgggtgcgcgacatcgccatagcaaccaggaacaccaagaagaaccggggcctgtacaggcacatcctgctgtatgggccaccaggcaccgggaagacgctgtttgccaagaaactcgccctgcactcaggcatggactacgccatcatgacaggcggggacgtggcccccatggggcgggaaggcgtgaccgccatgcacaagctctttgactgggccaataccagccggcgcggcctcctgctcttcatggatgaagcagacgccttccttcggaagcgagccactgaggagataagcaaggacctcagagccacactgaacgccttcctgtaccacatgggccaacacagcaacaaattcatgctggtcctggccagcaatctgcctgagcagttcgactgtgccatcaacagccgcattgacgtgatggtccacttcgacctgccgcagcaggaggagcgggagcgcctggtgagactgcattttgacaactgtgttcttaagccggccacagaaggaaaacggcgcctgaagctggcccagtttgactacgggaggaagtgctcggaggtcgctcggctgacggagggcatgtcgggccgggagatcgctcagctggccgtgtcctggcaggccacggcatatgcctccaaggacggggtcctcactgaggccatgatggacgcctgtgtgcaagatgctgtccagcagtaccgacagaagatgcgctggctgaaggcggaggggcctgggcgcggggtcgagcaccccctatccggagtccaaggcgagaccctcacctcatggagcctggccacggacccctcctacccctgccttgccggcccctgcacatttaggatatgctcctggatggggactgggctgtgcccagggcctctgtcccccaggatgtcttgtggtggcggtcggccgttctgccccccagggcaccccctgttgtaggcactggctagggaggggcaggcctccttcctgcccctcgagacactcttgggagatgcattttccgtctggctcacagggggagggtgaggctttgtaccccagcccctgcccaggccactgtgagggtgggtgctggctgagcccctggggcagaaggagtggggcaggcggggtctttgttctcggctcccacagcagagccaggtgagggggggcctgccaggactagacagaagtggggcggcctgaaccctgcttccagccatggccaggggccacggaacccggcaggggtgtctgaggccgccctgtcagctggccggtccaagcctgtggctggagctggtgtgtgtttatctaataaagtcccacaggtgcctcaccaaaaaaaaaaaaaaaaaaaaaaaa

SEQ ID NO: 25722 - DNA, 2139 bp, Homo Sapiens
gcccggccgggctccgaggcgagaggctgcatggagtggccggcgcggctctgcgggctgtgggcgctgctgctctgcgccggcggcgggggcgggggcgggggcgccgcgcctacggaaactcagccacctgtgacaaatttgagtgtctctgttgaaaacctctgcacagtaatatggacatggaatccacccgagggagccagctcaaattgtagtctatggtattttagtcattttggcgacaaacaagataagaaaatagctccggaaactcgtcgttcaatagaagtacccctgaatgagaggatttgtctgcaagtggggtcccagtgtagcaccaatgagagtgagaagcctagcattttggttgaaaaatgcatctcacccccagaaggtgatcctgagtctgctgtgactgagcttcaatgcatttggcacaacctgagctacatgaagtgttcttggctccctggaaggaataccagtcccgacactaactatactctctactattggcacagaagcctggaaaaaattcatcaatgtgaaaacatctttagagaaggccaatactttggttgttcctttgatctgaccaaagtgaaggattccagttttgaacaacacagtgtccaaataatggtcaaggataatgcaggaaaaattaaaccatccttcaatatagtgcctttaacttcccgtgtgaaacctgatcctccacatattaaaaacctctccttccacaatgatgacctatatgtgcaatgggagaatccacagaattttattagcagatgcctattttatgaagtagaagtcaataacagccaaactgagacacataatgttttctacgtccaagaggctaaatgtgagaatccagaatttgagagaaatgtggagaatacatcttgtttcatggtccctggtgttcttcctgatactttgaacacagtcagaataagagtcaaaacaaataagttatgctatgaggatgacaaactctggagtaattggagccaagaaatgagtataggtaagaagcgcaattccacactctacataaccatgttactcattgttccagtcatcgtcgcaggtgcaatcatagtactcctgctttacctaaaaaggctcaagattattatattccctccaattcctgatcctggcaagatttttaaagaaatgtttggagaccagaatgatgatactctgcactggaagaagtacgacatctatgagaagcaaaccaaggaggaaaccgactctgtagtgctgatagaaaacctgaagaaagcctctcagtgatggagataatttatttttaccttcactgtgaccttgagaagattcttcccattctccatttgttatctgggaacttattaaatggaaactgaaactactgcaccatttaaaaacaggcagctcataagagccacaggtctttatgttgagtcgcgcaccgaaaaactaaaaataatgggcgctttggagaagagtgtggagtcattctcattgaattataaaagccagcaggcttcaaactaggggacaaagcaaaaagtgatgatagtggtggagttaatcttatcaagagttgtgacaacttcctgagggatctatacttgctttgtgttctttgtgtcaacatgaacaaattttatttgtaggggaactcatttggggtgcaaatgctaatgtcaaacttgagtcacaaagaacatgtagaaaacaaaatggataaaatctgatatgtattgtttgggatcctattgaaccatgtttgtggctattaaaactcttttaacagtctgggctgggtccggtggctcacgcctgtaatcccagcaatttgggagtccgaggcgggcggatcactcgaggtcaggagttccagaccagcctgaccaaaatggtgaaacctcctctctactaaaactacaaaaattaactgggtgtggtggcgcgtgcctgtaatcccagctactcgggaagctgaggcaggtgaattgtttgaacctgggaggtggaggttgcagtgagcagagatcacaccactgcactctagcctgggtgacagagcaagactctgtctaaaaaacaaaacaaaacaaaaaaaaaaaaaaaaaa

SEQ ID NO: 25723 - DNA, 2676 bp, Homo Sapiens
ggtcagcggagggtttgctccgtctcttggtgaacttgaacagaggcagaggcaaaagcaaaacatttctgcgccaggagatgaggggcggtagagccctggaatggagatgtccttgacgcctgggcagaggctgcagctgcaggaccctgtggccactggagataagtaatggtgccatttgaacacctactggaaacggggcaggaacagtgagtgaccccaggcgagcacaggcaggtgccaggagccaggatgcaaggatgacgcctccggaggccctggcctcactcccacctgggcgctaggagccatcccggggctccagccaggagccctgctgcccaggggcatggccaaacctttcttccgactccagaagtttctccgccgaacacagttcctgctgttcttcctcacggctgcctacctgatgaccggcagcctgctgctgctgcagcgggtccgcgtggctctcccacagggcccccgggcacccggccccctgcagaccttgccagtggccgccgtggcgctgggcgtgggcttgctggacagcagagccctgcacgaccctcgagtcagcccagagctgctgctgggtgtggacatgctgcagagccccctgacccggccccggcccggcccccgctggctccggagccgcaactcggagctgcgtcagttgcgtcgccgctggttccaccacttcatgagtgactcccagggaccgcccgccctgggccccgaggctgccaggcccgccatccacagccgaggcacctacattggatgcttcagtgacgatggccacgagaggactctgaaaggagctgtgttttatgacttgagaaagatgactgtctcccactgccaggatgcgtgtgctgagcggtcctatgtctacgccggcttggaggccggggcggagtgttactgcgggaaccggctgccagcggtgagcgtggggctggaagagtgtaactatgagtgcaaaggcgagaagggctctgtgtgcggggctgtggaccggctctccgtgtaccgtgtggacgagctgcagccgggctccaggaagcggcggaccgccacctaccgcggatgcttccgactgccagagaacatcacacatgccttccccagctccctgatacaggccaatgtgaccgtggggacttgctcgggcttttgttcccagaaagagttccccttggccattctcaggggctgggaatgctactgtgcttaccctaccccccggttcaacctgcgggatgccatggacagctcagtatgtggccaggaccctgaggcacagaggctggcagaatactgtgaggtctaccagacacctgtgcaagacactcgttgtacagacaggaggttcctgcctaacaaatccaaagtgtttgtggctttgtcaagcttcccaggagccgggaacacgtgggcacggcacctcattgagcatgccactggcttctatacagggagctactactttgatggaaccctctacaacaaagggttcaagggcgaaaaggaccactggcggagccgacgcaccatctgtgtcaaaacccacgagagtggcaggagggagattgagatgtttgattcagccatcctgctaatccggaacccatacaggtccctggtggcagaattcaacagaaaatgtgccgggcacctgggatatgcagctgaccgcaactggaagagcaaagagtggccggactttgtcaacagctacgcctcgtggtggtcctcgcacgtcctggactggctcaagtacgggaagcggctgctggtggtgcactacgaggagctgcggcgcagcctggtgcccacgttacgggagatggtggccttcctcaacgtgtctgtgagcgaggagcggctgctctgcgtggagaacaacaaggagggcagcttccggcggcgcggccggcgctcccacgaccctgagcccttcaccccggagatgaaagacttgatcaatggctacatccggacggtggaccaagccctgcgtgaccacaactggacggggctgcccagggagtatgtgcccagatgataggcctggcccacgccgccgcccccgctgagtgacgcaatcgcaccacggggctcaccctggtgctgcctcccgcacaaggagacctggacacaacagacacacatcacaaggcgaacacaaatggacacacatacctggccacgaacccacacctcctcagacactcagacaccactccaggctcatagccccgtcttgatgcagagaagccacccacgtggggtgtgccaggcacccccagatacaaatgcagccacgcacagacgtaacacacaggtgccaggccgtgtgctcctggaggctggctggctgtctctctcacacagatacacgtgcgctccctgggatccgggaggccctgggcttcctgtgtgtagccctggcatagacttgctcgtcagggtgttcgactctgggatgctgggccgggcagacatttatgctctgagcagcaaggaccattgggatggaggtgggcacaaagactgctgcttccagggtgtgcggccctggccgtgtgtctgacatcccataaatgtgtgtgtggtgtgactacgggcaccacaaactccgcaaaaaaaaaaaaaaaaaaa

SEQ ID NO: 25724 - DNA, 2099 bp, Homo Sapiens
ccacctcagccccaaccccaaccccagccgcatcccctgccccagctgacgggtcaaagcctcaggagagtgtggctctccccaggcgctaccaggaggggcaggtctcagccagctggggaaaccttattgccatggttcttagaagccaccccttccccaggcaagacaggccccaagggagtgtcccgagggcggttcccgggagccccgtgggtcccagcacttccacacactctgaggacagacacggcccctcttcttcagtggggacagtcatagggacaggtacagggggcctggttgaggctggaggtcagccacagccaagaagctccgagaccaacggatcgcccagcccagaccctcccccaggcctaagaggagagggaaccagggagaaaagtctagacccgctgccccaagccgcgatgcccaggggccccgcacagccccccgcgcagaggccgcctggccccgcggcctcctcctctgcgaggcgctcacagccggtaccccagctacggaaacgcagcaggtgcgaaatcgccccgagctcggagcaggaggtcaggccggccgcctcgggggaccctcaaggggaggcgccgggggaggggggcagccctgccggccgcagcggggcgctcacggaaaagcaggaggaggcccggaagctcatggtgtttctgcagaggcccgggggttggggggtggtggaggggccccggaagcccagctcccgggccctggagcccgccacggcggcagccctgcggcggcggctggacctgggcagttgcctggacgtgctggcctttgcccagcagcacggagagcccggcctggcgcaggagacctacgcgctgatgagcgacaacctgctgcgagtgctgggagacccgtgcctctaccgccggctgagcgcggccgaccgcgagcgcatcctcagcctgcggaccggccggggccgggcggtgctgggcgtcctcgtactgcccagcctctaccaggggggccgctcagggctccccaggggccctcgtggcgaggagcctcctgcggcggcccctgtgtccctgcctctacctgcgcacctgcatgtgttcaacccccgggagaacacctggcggcccctgacccaggtgcccgaggaggccccgcttcggggctgcggtctctgcaccatgcacaactacctgtttctggcggggggcatccgtggctccggtgccaaggccgtctgctccaacgaggtcttctgctacaaccctctgaccaacatctggagccaggttcggcccatgcagcaggcccgagcccagctcaagctggtggccctggacgggctgctctatgccatcggtggcgaatgcctgtacagcatggagtgctacgacccgcgaacagacgcctggaccccacgcgcgccactccccgcaggcaccttccctgtggcccacgaggctgtggcctgccgtggggacatctacgtcaccgggggtcacctcttctaccgcctgctcaggtacagccccgtgaaggatgcttgggacgagtgcccatacagtgccagccaccggcgttccagcgacatcgtggcactggggggcttcctgtaccgcttcgacctgctgcggggcgtgggcgccgccgtgatgcgctacaacacagtgaccggctcctggagcagggctgcctccctgcccctgcccgcccccgccccactgcactgcaccaccctgggcaacaccatttactgcctcaacccccaggtcactgccaccttcacggtctctggggggactgcccagttccaggccaaggagctgcagcccttccccttggggagcaccggggtcctcagtccattcatcctgactctgccccctgaggaccggctgcagacctcactctgagtggcaggcagagaaccaaagctgcttcgctgctctccagggagaccctcctgggatgggcctgagaggccggggctcagggaaggggctgggatcggaacttcctgctcttgtttctggacaactttccccttctgctttaaaggttgtcgattattttgaaaaaaaaaaaaaaaaaaa

SEQ ID NO: 25725 - DNA, 2660 bp, Homo Sapiens
gagacagagctgcgattccgtgctttcagcgctgaggtccaggagcgcctggcccaggcacgggaggccctggctctggaggagaatgccacctcccagaaggtgctggatatctttgaacagcggctggagcaggttgagagtggcctccatcgggccctgcggctacagcgcttcttccagcaggcacatgaatgggtggatgagggctttgctcggctggcaggagctgggccgggtcgggaggctgtgctggctgcactggccctgcggcgggccccagagcccagtgccggcaccttccaggagatgcgggccctggccctggacctgggcagcccagcagccctgcgagaatggggccgctgccaggcccgctgccaagagctagagaggaggatccagcaacacgtgggagaggaggcgagcccacggggctaccgacgacggcgggcagacggtgccagcagtggaggggcccagtgggggccccgcagcccctcgcccagcctcagctccttgctgctccccagcagccctgggccacggccagccccatcccattgctccctggccccatgtggagaggactatgaggaagagggccctgagctggctccagaagcagagggcaggcccccaagagctgtgctgatccgaggcctggaggtcaccagcactgaggtggtagacaggacgtgctcaccacgggaacacgtgctgctgggccgggctagggggccagacggaccctggggagtaggcaccccccggatggagcgcaagcgaagcatcagtgcccagcagcggctggtgtctgagctgattgcctgtgaacaagattacgtggccaccttgagtgagccagtgccaccccctgggcctgagctgacgcctgaacttcggggcacctgggctgctgccctgagtgcccgggaaaggcttcgcagcttccaccggacacactttctgcgggagcttcagggctgcgccacccaccccctacgcattggggcctgcttccttcgccacggggaccagttcagcctttatgcacagtacgtgaagcaccgacacaaactggagaatggtctggctgcgctcagtcccttaagcaagggctccatggaggctggcccttacctgccccgagccctgcagcagcctctggaacagctgactcggtatgggcggctcctggaggagctcctgagggaagctgggcctgagctcagttctgagtgccgggcccttggggctgctgtacagctgctccgggaacaagaggcccgtggcagagacctgctggccgtggaggcggtgcgtggctgtgagatagatctgaaggagcagggacagctcttgcatcgagaccccttcactgtcatctgtggccgaaagaagtgccttcgccatgtctttctcttcgagcatctcctcctgttcagcaagctcaagggccctgaaggggggtcagagatgtttgtttacaagcaggcctttaagactgctgatatggggctgacagaaaacatcggggacagcggactctgctttgagttgtggtttcggcggcggcgtgcacgagaggcatacactctgcaggcaacctcaccagagatcaaactcaagtggacaagttctattgcccagctgctgtggagacaggcagcccacaacaaggagctccgagtgcagcagatggtgtccatgggcattgggaataaacccttcctggacatcaaagcccttggggagcggacgctgagtgccctgctcactggaagagccgcccgcacccgggcctccgtggccgtgtcatcctttgagcatgccggcccctcccttcccggcctttcgccgggagcctgctccctgcctgcccgcgtcgaggaggaggcctgggatctggacgtcaagcaaatttccctggccccagaaacacttgactcttctggagatgtgtccccaggaccaagaaacagccccagcctgcaacccccccaccctgggagcagcactcccaccctggccagtcgagggatcttagggctatcccgacagagtcatgctcgagccctgagtgaccccaccacgcctctgtgacctggagaagatccagaacttgcgtgcagcttctcctctcagcacactttgggctgggatggcagtggggcataatggagccctgggcgatcgctgaatttcttccctctgcttcctggacacagaggaggtctaacgaccagagtattgccctgccaccactatctctagtctccctagcttggtgccttctcctgcaggagtcagagcagccacattgcttgccttcataccctggaggtggggaagttatccctcttccggtgctttcccatcctgggccactgtatccaggacatcactcccatgccagccctccctggcagcccatgttctcctcttttctcaccccctgactttccctgagaagaatcatctctgccaggtcaactggagtccctggtgactccattctgaggtgtcacaagcaatgaagctatgcaaacaataggagggtgtgacaggggaaccgtagactttatatatgtaattactgttattataatactattgttatattaaatgtatttactcacaaaaaaaaaaaaaaaaaa

SEQ ID NO: 25726 - DNA, 1886 bp, Homo Sapiens
gctgagagggcccgcgggtaggcatggcggcgcaccttaagaagcgggtttatgaggaattcacgaaagtggttcagccacaggaggaaattgctactaagaaactccgactaacaaaaccaagtaaatctgcagcactccacatagatctgtgtaaagctacctccccagcagatgctttgcaatacttgctccagtttgccaggaagcctgtcgaggcggaaagcgtagagggagtagtcaggattctcttggaacattattacaaggagaatgatccatctgtgagactgaaaattgcatcattgttgggtttattatcaaagacagcaggattttcaccagactgcattatggatgatgccatcaacatcctgcagaatgaaaagtctcatcaagtcctagctcaactgctggatactttgcttgcaattggcactaagctaccagagaatcaagctatccaaatgcgattagttgatgtggcctgcaagcatctgacagatacgtctcatggtgtaagaaataagtgcctgcagttacttggcaatcttggctctttggagaaaagtgtcacaaaagatgcagaaggcctagctgccagagatgtccagaagattataggggattacttcagtgaccaagacccacgtgtcagaacagcagctataaaagccatgttgcagctccatgaaagaggactgaaattacaccaaacaatttataatcaggcctgtaaattactctctgatgactatgaacaagtgcgcagtgctgcagtccagcttatctgggtcgtcagtcagctctatcctgaaagcattgtcccaattccttcttctaatgaagaaatacgcttagttgatgatgcgtttggcaaaatttgtcacatggtcagtgatggctcttgggtggttcgtgttcaggcagcaaaactgttgggctctatggagcaagtcagttctcatttcttggagcagacccttgacaagaagctgatgtcagatctgaggaggaaacgtactgcacatgagcgtgccaaggaactttacagttcgggggagttttccagtggcagaaagtggggagatgatgctcccaaggaagaagtagataccggggctgtgaacttgattgagtcaggagcttgtggagcttttgttcatgggttggaagatgagatgtatgaggttcgtattgctgctgtggaggccctctgcatgttggcccagtcttcaccctcttttgctgagaagtgccttgatttcctagttgacatgttcaacgatgaaattgaggaagtacgtctgcagtctatacataccatgagaaaaatctctaacaacatcaccctccgagaagatcagcttgacactgtcctggctgtgctagaggattcatccagagatattcgagaggctcttcatgaactcttatgctgtactaatgtttcaaccaaagaagggattcatcttgcattggtggagctgctgaaaaatttaaccaagtaccctactgatagggactccatatggaagtaatgacttttttgcccatttactcactgagtcccataatgtggtaaatgtataatgctgacatttgttccgtccttatagattgaggatagtacggccctgaattttgcctttactttagaaacctgattcaacttaaccgaactctcaggaatctgattcctaagctgagtatcacattttagattacttactaatttgtgcatctatccacctagcaaatattatgtgcctgctgtgtgctgactatgcaccaacccttgtggtagctgttacaagtatagaaataaattaattagatttcctcaaaaaaaaaaaaaaaaaaaaaaaaaaaaaaaaaaaaaaaaa

SEQ ID NO: 25727 - DNA, 1254 bp, Homo Sapiens
gtcggtcctgcctgtaacggcggcggcggctgctgctccagacacctgcggcggcggcggcgaccccgcggcgggcgcggagatgtggcccctggtagcggcgctgttgctgggctcggcgtgctgcggatcagctcagctactatttaataaaacaaaatctgtagaattcacgttttgtaatgacactgtcgtcattccatgctttgttactaatatggaggcacaaaacactactgaagtatacgtaaagtggaaatttaaaggaagagatatttacacctttgatggagctctaaacaagtccactgtccccactgactttagtagtgcaaaaattgaagtctcacaattactaaaaggagatgcctctttgaagatggataagagtgatgctgtctcacacacaggaaactacacttgtgaagtaacagaattaaccagagaaggtgaaacgatcatcgagctaaaatatcgtgttgtttcatggttttctccaaatgaaaatattcttattgttattttcccaatttttgctatactcctgttctggggacagtttggtattaaaacacttaaatatagatccggtggtatggatgagaaaacaattgctttacttgttgctggactagtgatcactgtcattgtcattgttggagccattcttttcgtcccaggtgaatattcattaaagaatgctactggccttggtttaattgtgacttctacagggatattaatattacttcactactatgtgtttagtacagcgattggattaacctccttcgtcattgccatattggttattcaggtgatagcctatatcctcgctgtggttggactgagtctctgtattgcggcgtgtataccaatgcatggccctcttctgatttcaggtttgagtatcttagctctagcacaattacttggactagtttatatgaaatttgtggcttccaatcagaagactatacaacctcctaggaataactgaagtgaagtgatggactccgatttggagagtagtaagacgtgaaaggaatacacttgtgtttaagcaccatggccttgatgattcactgttggggagaagaaacaagaaaagtaactggttgtcacctatgagacccttacgtgattgttagttaagtttttattcaaagcagctgtaatttagttaataaaataattatgatctatgttgtttgcccaaaaaaaaaaaaaaaaaaaaaaaaaaaaaaaaaaaaa

SEQ ID NO: 25728 - DNA, 2179 bp, Homo Sapiens
gttcacgctctttcctgggctgacatacctattcctttccatttgttggactcctattcatgcttcaaagtccagctttcttaagcccttctttaggaagccttcccacacagccaaccctgctgctctctgcctcctttaaattcttgatacagctgctgcttgttctgatgttttatggtattgattctgttttcctgtgtatatgccagtttttctagctagactgtaaactccttaaggacagagactacaccttgtactttttgtgcatgacctggacctgctaaggaaaaaaaaaatcttgtggattgattgctttgccatccccacagcagcttttgcaaattgctttccaaactcacttgaatgatgacattgttatggacctgggttctggacctgatctgccacttcaagctgtgtaatttttggcaagttgctttctttgcctggtcctcagtttgcccatcaatataatgggtggattggatgatttttttttttttaattgagatggagtcttgcactgtcacccaggctggagtgcagtggcgcgatcttggctcactgcaacccccgccgcctaggttcaagtgattctcatgcctcagcctcccaagtagctgggactacaggtgtgcaccactactcctggatatttttttgtgtttttagtagagatggggtttcgccatgttggccaagctggtcttgaactcctgacctcaggtgatccacccgcctcgggctcccaaagtgctgggattacagacgtgaggcaccacaaccagcctggatgattcttaagggcccttctaggaccaaagttctgggaatttctagcttattctgccccctcatagcccttggcctatctatctttatccacatgcagaaacatctggcaaccccacatggctgagatgacctggtcctaggacacccttggacagaagactggcctacctagcagacctggatttttcttcctgatctgctgcttccaagttgtgtgaccttggctaagtcacttaacctttctgattgtcatttcgctttttaataaagtgggtctggtgaacaagaaatgtaataaacacgtggcttgccattcaagagatgagtctgaccattcactttctgtgtgccagagaagagagatcatgggtatagaccagcccctggaaaggctgctttggtcaaggctgagagcagctttgctcaaggaaattattcacgaaggtgaccactgtctttctgacctggcacagaggaaatgttggctgtgaatgtgaccaatagaaagaagcccgtatttctcagtcagtcctagaaccctggtaagtaattaacagagaataaaaatgtgtttgttaaatgacaaagcagcagtttttcaattgtaaggtctgcttgagagcctttgatgtgtgtttcttttcctgacttttcctttctttagaatttttgatggtctcacctggtgggtggggctttcagggtatgcccacaatgtacatttctcggcatctgtgcctcagtttcctcatttataaaatccctatgatctctgtctcacctactttacagggttgctgtgaagatcgcatactacacacaggaatgctcatcagtttttaaattttatttaatttttatttatttttttttaaatgtaattttttcagagagataaggtcttgctatgttacccagcctagtcttgaactcctggcctcaagtgatcctcctgccttggcctcccatgctgctgggattacaggtgtgaactaccatgcccagccagctcctaagtcttaaggctctgtgttagtgatagatgtggccatggtgtaggcagtgcaatgtcttcgagtgagagtgaaggtggtaactcattgcatggattctagagttctgtttattctaatccaagttcttccacttaaaaacaatgttcttcctctcattgagtctcattcctcatctataggatgggaataagagcatgtacctggcaggttgttgtaaggattaaatggtgtaaaaaaatgtcaagtgcttgcaactttgaataccaaacttgagtgaaagctcaataaattgttacttaaaaaataaaaaaaaaaaaaaaaaaaaaaaaaaaaaaaaaaaaaaaaaaaaaaaaaaaaaaaaa

SEQ ID NO: 25729 - DNA, 1511 bp, Homo Sapiens
cagacagctgcaagtcaccatggacgctgaaggcctggcgctgctgctgccgcccgtcaccctggcagccctggtggacagctggctccgagaggactgcccagggctcaactacgcagccttggtcagcggggcaggcccctcgcaggcggcgctgtgggccaaatcccctggggtactggcagggcagcctttcttcgatgccatatttacccaactcaactgccaagtctcctggttcctccccgagggatcgaagctggtgccggtggccagagtggccgaggtccggggccctgcccactgcctgctgctgggggaacgggtggccctcaacacgctggcccgctgcagtggcattgccagtgctgccgccgctgcagtggaggccgccaggggggccggctggactgggcacgtggcaggcacgaggaagaccacgccaggcttccggctggtggagaagtatgggctcctggtgggcggggccgcctcgcaccgctacgacctgggagggctggtgatggtgaaggataaccatgtggtggccgccggtggcgtggagaaggcggtgcgggcggccagacaggcggctgacttcgctctgaaggtggaagtggaatgcagcagcctgcaggaggccgtgcaggcagctgaggctggtgccgaccttgtcctgctggacaacttcaagccagaggagctgcaccccacggccaccgtgctgaaggcccagttcccgagtgtggctgtggaagccagtgggggcatcaccctggacaacctcccccagttctgcgggccgcacatagacgtcatctccatggggatgctgacccaggcggccccagcccttgatttctccctcaagctgtttgccaaagaggtggctccagtgcccaaaatccactagtcctaaaccggaagaggatgacaccggccatgggttaacgtggctcctcaggaccctctgggtcacacatctttagggtcagtggccaatggggcacatttggcactagcttgagcccaactctggctctgccacctgctgctcctgtgacctgtcagggctgacttcacctctgctcatctcagtttcctaatctgtaaaatgggtctaataaaggatcaaccacatggggttctgcggtgataatgagcacatagtgaggggtcagcaaatgtcagaagttacctgggacagccgggcacgatggctcacacctgtaatcccagcactttgggaggctgaggcgggaagatcacttgagttcaggagtttgagaccagcctggccaacatggtgaaaccccatctctaccaaaaatagaagaattagctgggtgtggtggcacgcgcctgtaatcccagctacttaggaggctgaggcaggagaatcgcttgaacccaggaagtggaggttgcagtgagctgatggtgccactgcactccagcctgggtgatagagcgagactctgtctccaaagaagaaaaaaaaaaaaaaaaaa

SEQ ID NO: 25730 - DNA, 2123 bp, Homo Sapiens
gttggtcgcttccctgcgccaaagtgagcagtagccaacatgtcagggtgggagtcatattacaaaaccgagggcgatgaagaagcagaggaagaacaagaagagaaccttgaagcaagtggagactataaatattcaggaagagatagtttgatttttttggttgatgcctccaaggctatgtttgaatctcagagtgaagatgagttgacaccttttgacatgagcatccagtgtatccaaagtgtgtacatcagtaagatcataagcagtgatcgagatctcttggctgtggtgttctatggtaccgagaaagacaaaaattcagtgaattttaaaaatatttacgtcttacaggagctggataatccaggtgcaaaacgaattctagagcttgaccagtttaaggggcagcagggacaaaaacgtttccaagacatgatgggccacggatctgactactcactcagtgaagtgctgtgggtctgtgccaacctctttagtgatgtccaattcaagatgagtcataagaggatcatgctgttcaccaatgaagacaacccccatggcaatgacagtgccaaagccagccgggccaggaccaaagccggtgatctccgagatacaggcatcttccttgacttgatgcacctgaagaaacctgggggctttgacatatccttgttctacagagatatcatcagcatagcagaggatgaggacctcagggttcactttgaggaatccagcaagctagaagacctgttgcggaaggttcgcgccaaggagaccaggaagcgagcactcagcaggttaaagctgaagctcaacaaagatatagtgatctctgtgggcatttataatctggtccagaaggctctcaagcctcctccaataaagctctatcgggaaacaaatgaaccagtgaaaaccaagacccggacctttaatacaagtacaggcggtttgcttctgcctagcgataccaagaggtctcagatctatgggagtcgtcagattatactggagaaagaggaaacagaagagctaaaacggtttgatgatccaggtttgatgctcatgggtttcaagccgttggtactgctgaagaaacaccattacctgaggccctccctgttcgtgtacccagaggagtcgctggtgattgggagctcaaccctgttcagtgctctgctcatcaagtgtctggagaaggaggttgcagcattgtgcagatacacaccccgcaggaacatccctccttattttgtggctttggtgccacaggaagaagagttggatgaccagaaaattcaggtgactcctccaggcttccagctggtctttttaccctttgctgatgataaaaggaagatgccctttactgaaaaaatcatggcaactccagagcaggtgggcaagatgaaggctatcgttgagaagcttcgcttcacatacagaagtgacagctttgagaaccccgtgctgcagcagcacttcaggaacctggaggccttggccttggatttgatggagccggaacaagcagtggacctgacattgcccaaggttgaagcaatgaataaaagactgggctccttggtggatgagtttaaggagcttgtttacccaccagattacaatcctgaagggaaagttaccaagagaaaacacgataatgaaggttctggaagcaaaaggcccaaggtggagtattcagaagaggagctgaagacccacatcagcaagggtacgctgggcaagttcactgtgcccatgctgaaagaggcctgccgggcttacgggctgaagagtgggctgaagaagcaggagctgctggaagccctcaccaagcacttccaggactgaccagaggccgcgcgtccagctgcccttccgcagtgtggccaggctgcctggccttgtcctcagccagttaaaatgtgtttctcctgagctaggaagagtctacccgacataagtcgagggactttatgtttttgaggctttctgttgccatggtgatggtgtagccctcccactttgctgttccttactttactgcctgaataaagagccctaagtttgtactataaaaaaaaaaaaaaaaaaaaaaaaaaaaa

SEQ ID NO: 25731 - DNA, 1736 bp, Homo Sapiens
agctggtggaggccaaaaacatggtgatgagttttcgagtctccgaccttcagatgctcctgggtttcgtgggccggagtaagagtggactgaagcacgagctcgtcaccagggccctccagctggtgcagtttgactgtagccctgagctgttcaagaagatcaaggagctgtacgagacccgctacgccaagaagaactcggagcctgccccacagccgcaccggcccctggaccccctgaccatgcactccacctacgaccgggccggcgctgtgcccaggactccgctggcaggccccaatattgactaccccgtgctctacggaaagtacttaaacggactgggacggttgcccgccaagaccctcaagccagaagtccgcctggtgaagctgccgttctttaatatgctggatgagctgctgaagcccaccgaattagtcccacagaacaacgagaagcttcaggagagcccgtgcatcttcgcattgacgccaagacaggtggagttgatccggaactccagggaactgcagcccggagttaaagccgtgcaggtcgtcctgagaatctgttactcagacaccagctgccctcaggaggaccagtacccgcccaacatcgctgtgaaggtcaaccacagctactgctccgtcccgggctactacccctccaataagcccggggtggagcccaagaggccgtgccgccccatcaacctcactcacctcatgtacctgtcctcggccaccaaccgcatcactgtcacctgggggaactacggcaagagctactcggtggccctgtacctggtgcggcagctgacctcatcggagctgctgcagaggctgaagaccattggggtaaagcacccggagctgtgcaaggcactggtcaaggagaagctgcgccttgatcctgacagcgagatcgccaccaccggtgtgcgggtgtccctcatctgtccgctggtgaagatgcggctctccgtgccctgccgggcagagacctgcgcccacctgcagtgcttcgacgccgtcttctacctgcagatgaacgagaagaagcccacctggatgtgccccgtgtgcgacaagccagccccctacgaccagctcatcatcgacgggctcctctcgaagatcctgagcgagtgtgaggacgccgacgagatcgagtacctggtggacggctcgtggtgcccgatccgcgccgaaaaggagcgcagctgcagcccgcagggcgccatcctcgtgctgggcccctcggacgccaatgggctcctgcccgcccccagcgtcaacgggagcggtgccctgggcagcacgggtggcggcggcccggtgggcagcatggagaatgggaagccgggcgccgatgtggtggacctcacgctggacagctcatcgtcctcggaggatgaggaggaggaggaagaggaggaggaagacgaggacgaagaggggccccggcccaagcgccgctgccccttccagaagggcctggtgccggcctgctgaccccggccgcacactcgactttcctggtgctcaccacgcagaggggcacgggccagcctcgggcgcagagggaggagtgacctttctttttctttttattgtcgttcgttttgtttttccacccttttgcctggctcctggcacctgtacctctggactctcctatcgggggattaaaaaaaaaagtaaaatgacaaaaaaaaaaaaaaaaaa

SEQ ID NO: 25732 - DNA, 1271 bp, Homo Sapiens
gccgcctccccggaccgaggcaggacctcaccccgcgcgtgttccccgggcgcccctctgcgaaccccaggcccttcccaggtttgcgcgcgggggccatccagaccctgcggagagcgaggcccggagcgtcgccgaggtttgagggcgccggagaccgagggcctggcggccgaaggaaccgccccaagaagagcctctggcccgggggctgctggaacatgtgcggggggacacagtttgtttgacagttgccagactatgtttacgcttctggttctactcagccaactgcccacagttaccctggggtttcctcattgcgcaagaggtccaaaggcttctaagcatgcgggagaagaagtgtttacatcaaaagaagaagcaaactttttcatacatagacgccttctgtataatagatttgatctggagctcttcactcccggcaacctagaaagagagtgcaatgaagaactttgcaattatgaggaagccagagagatttttgtggatgaagataaaacgattgcattttggcaggaatattcagctaaaggaccaaccacaaaatcagatggcaacagagagaaaatagatgttatgggccttctgactggattaattgctgctggagtatttttggttatttttggattacttggctactatctttgtatcactaagtgtaataggctacaacatccatgctcttcagccgtctatgaaagggggaggcacactccctccatcattttcagaagacctgaggaggctgccttgtctccattgccaccttctgtggaggatgcaggattaccttcttatgaacaggcagtggcgctgaccagaaaacacagtgtttcaccaccaccaccatatcctgggcacacaaaaggatttagggtatttaaaaaatctatgtctctcccatctcactgactaccttgtcattttggtataagaaatttgtgttatttgataggccgggcatggtggctcatgcctgtaatcccagcactttgggaggccaggagttcgagaccagcctggccaacatggtgaaacccggtctctactaaaaattcaaaaattacctaggcgtcatggggcatgcctgtagtcccacctacttgggaggctgaagcaggagaattgctcgaacctgggaggcagaggttgcagtaagctgagatcacgccactgcattccagcctgggcgacagagcaagactccatctcaaaaataaaataaaaaaaaaaaaaaaaaa

SEQ ID NO: 25733 - DNA, 3796 bp, Homo Sapiens; identical to SEQ ID NO: 25398

SEQ ID NO: 25734 - DNA, 1606 bp, Homo Sapiens
ccgcgccgccgccgccgccgccgccgccgccgccgcctccgccgcggaggaagacagcgccgcccgcgcaccgccagcgacccccgccgcagagtcccaccgccacaggcctcgggccagcggccaggagctgcctcccccagcccccgtcccgcggcccccagccgcccccaaccctgccccacgggcccggcgccatgagtgagctggagcaactgagacaggaggccgagcagctccggaaccagatccgggatgcccgaaaagcatgtggggactcaacactgacccagatcacagctgggctggacccagtggggagaatccagatgaggacccggaggaccctccgtgggcacctggcaaagatctatgccatgcactgggggaccgactcaaggctgctggtcagcgcctcccaggatgggaagctcatcatctgggacagctacaccaccaacaaggtccacgccatcccgctgcgctcctcctgggtaatgacctgtgcctacgcgccctcagggaactttgtggcctgtggggggttggacaacatctgctccatctacagcctcaagacccgcgagggcaacgtcagggtcagccgggagctgcctggccacactgggtacctgtcgtgttgccgcttcctggatgacaaccaaatcatcaccagctctggggataccacctgtgccctgtgggacattgagacaggccagcagacagtgggttttgctggacacagtggggatgtgatgtccctgtccctggcccccgatggccgcacgtttgtgtcaggcgcctgtgatgcctctatcaagctgtgggacgtgcgggattccatgtgccgacagaccttcatcggccatgaatccgacatcaatgcagtggctttcttccccaacggctacgccttcaccaccggctctgacgacgccacgtgccgcctcttcgacctgcgggccgatcaggagctcctcatgtactcccatgacaacatcatctgtggcatcacctctgttgccttctcgcgcagcggacggctgctgctcgctggctacgacgacttcaactgcaacatctgggatgccatgaagggcgaccgtgcaggagtcctcgctggccacgacaaccgcgtgagctgcctcggggtcaccgacgatggcatggctgtggccacgggctcctgggactccttcctcaagatctggaactaatggccccacccccactgggcccaggccaggaggggccctgcccatgcccacactacaggccagggctgcggggctggcgcaatcccagcccccttccccgggccacggggccttgggtccctgccctcccacccaggtttggttcctcccggggcccccactgtggagataagaaggggatggaatgggggaagaggaggagcaggaggccctcatccttctgctgccctggggttggggcctcacccctctggagggccggaggcaggaggtggaaaccccaggggctggcttttttaaaactggttttattttaatttttattatattttcagtttttccataaaggagccaattccaactctgaaaaaaaaaaaaaaaaaaaa

SEQ ID NO: 25735 - DNA, 1953 bp, Homo Sapiens
gcggtacttgtcatggagctggcactgcggcgctctcccgtcccgcggtggttgctgctgctgccgctgctgctgggcctgaacgcaggagctgtcattgactggcccacagaggagggcaaggaagtatgggattatgtgacggtccgcaaggatgcctacatgttctggtggctctattatgccaccaactcctgcaagaacttctcagaactgcccctggtcatgtggcttcagggcggtccaggcggttctagcactggatttggaaactttgaggaaattgggccccttgacagtgatctcaaaccacggaaaaccacctggctccaggctgccagtctcctatttgtggataatcccgtgggcactgggttcagttatgtgaatggtagtggtgcctatgccaaggacctggctatggtggcttcagacatgatggttctcctgaagaccttcttcagttgccacaaagaattccagacagttccattctacattttctcagagtcctatggaggaaaaatggcagctggcattggtctagagctttataaggccattcagcgagggaccatcaagtgcaactttgcgggggttgccttgggtgattcctggatctcccctgttgattcggtgctctcctggggaccttacctgtacagcatgtctcttctcgaagacaaaggtctggcagaggtgtctaaggttgcagagcaagtactgaatgccgtaaataaggggctctacagagaggccacagagctgtgggggaaagcagaaatgatcattgaacagaacacagatggggtgaacttctataacatcttaactaaaagcactcccacgtctacaatggagtcgagtctagaattcacacagagccacctagtttggttttagtttgtctttgtcagcgccacgtgagacacctacaacgagatgccttaagccagctcatgaatggccccatcagaaagaagctcaaaattattcctgaggatcaatcctggggaggccaggctaccaacgtctttgtgaacatggaggaggacttcatgaagccagtcattagcattgtggacgagttgctggaggcagggatcaacgtgacggtgtataatggacagctggatctcatcgtagataccatgggtcaggaggcctgggtgcggaaactgaagtggccagaactgcctaaattcagtcagctgaagtggaaggccctgtacagtgaccctaaatctttggaaacatctgcttttgtcaagtcctacaagaaccttgctttctactggattctgaaagctggtcatatggttccttctgaccaaggggacatggctctgaagatgatgagactggtgactcagcaagaataggatggatggggctggagatgagctggtttggccttggggcacagagctgagctgaggccgctgaagctgtaggaagcgccattcttccctgtatctaactggggctgtgatcaagaaggttctgaccagcttctgcagaggataaaatcattgtctctggaggcaatttggaaattatttctgcttcttaaaaaaacctaagattttttaaaaaattgatttgttttgatcaaaataaaggatgataatagatattattttttcttatgacagaagcaaatgatgtgatttatagaaaaactgggaaatacaggtacccaaagagtaaatcaacatctgtatacccccttcccaggggtaagcactgttaccaatttagcatatgtccttgcagaatttttttttctatatatacatatatattttttaccaaaatgaatcattactctatgttgttttactatttgtttgacatatcagtatatctgaaacaccttttcatgtcaataaatgttcttctctaacatttttaaaaaaaaaaaaaaaaaaaaaaaaaaaaaaaaaaaaaaaa

SEQ ID NO: 25736 - DNA, 2472 bp, Homo Sapiens
cggcgggccgcgagccggcgatcgaagcgggcagctcgcgcctgagtcatggacttcccctggcccctcctctaccactcccactccctcgccggacccccccgccggggctagcgtctgccgcggctccgagggggtggggctgctgggaatggctgtgcccccttcggcccctcagccgcgcgcgtcctttcacctgaggaggcacacgccttgcccgcagtgctcatggggcatggaggagaaggcggcggccagcgccagctgccgggagccgccgggccccccgagggccgccgccgtcgcgtacttcggcatttccgtggacccggacgacatccttcccggggccctgcgcctcatccaggagctgcggccgcattggaaacccgagcaagttcggaccaagcgcttcacggatggcatcaccaacaagctggtggcctgctatgtggaggaggacatgcaggactgcgtgctggtccgggtgtatggggagcggacggagctgctggtggaccgggagaatgaggtcagaaacttccagctgctgcgagcacacagctgtgcccccaaactctactgcaccttccagaatgggctgtgctatgagtacatgcagggtgtggccctggagcctgagcacatccgtgagccccggcttttcaggttaatcgccttagaaatggcaaagattcatactatccacgccaacggcagcctgcccaagcccatcctctggcacaagatgcacaattatttcacgcttgtgaagaacgagatcaaccccagcctttctgcagatgtccctaaggtagaggtgttggaacgggagctggcctggctgaaggagcatctgtcccagctggagtcccctgtggtgttttgtcacaatgacctgctctgcaagaatatcatctatgacagcatcaaaggtcacgtgcggttcattgactatgaatatgctggctacaactaccaagcttttgacattggcaaccatttcaatgagtttgcaggcgtgaatgaggtggattactgcctgtacccggcgcgggagacccagctgcagtggctgcactactacctgcaggcacaaaaggggatggccgtgacccccagggaggtgcaaaggctctacgtgcaagtcaacaagtttgccctggcgtctcacttcttctgggctctctgggccctcatccagaaccagtactccaccatcgactttgatttcctcaggtacgcagtgatccgattcaaccagtacttcaaggtgaagcctcaagcgtcagccttggagatgccaaagtgaccagccaccccatccctcccctacccatctgtctggccagacctgttctccagagctcaattctgcactctgggatccacacccttggacagggtgggagaggggacacatgggtgtccagggagaaggctctgtccctgccgccagaccccagtggttgccactgaagacctcattctcctgtctggaggggctgataggacccccttccgggggtccccttcaccccaccaggcttgggaggaagtgcctgcagccaggtcctgaaccataaccacccctgggaaacacatcattcccagcctcaggccctgctggaattggggctgccttatatgtgtgtttaccccttcctggcctggggaaggaggcggggagggctcctttctacctccagtgccctgagcctccagtccgtctccccctgcatgccccatgtgggaggtgctgagctccaaaccagcatcacaccaactctgacacatggatgtacctatcttggtgatgggtgggggccaagaattgagcatgacatcttccccagcagccacctcctctgagatccctcaccttctccaaaccagatccaatcaaacctcagcccgaggaaacatgctccccaacgtgctctcctgtgcttctgttttgtccccctgctggggggacaggagagggagtggtgaggccctgggcctccagagcctggctctgctttgtgctgtggcttagccggaggggacgtggccaagggtgaggtggccaaaaccagaaccagcagtctcctgccttgttccctccctggccctcaggccctccttccagggatgtctctccagctctactttatgtcctgaagctgacccgaggtcttcctatctggaatgactagagggagccaagaggatggggtgggggccagggccccccagggcctatcgtgggagagcctgggcaggatcccatcagaaaggtgctgactaaactggttgcccggacactcaacagcctccacctccctttctaccctcacagctcctggggccttcctggctctggcccagaaagtgattcatttgtaaattatcatggttttctttctgcattaaaatgctcatttccggaaaaaaaaaaaaaaaaaaaaaaaaaaaaaaaaaaaaaaa

SEQ ID NO: 25737 - DNA, 1956 bp, Homo Sapiens
catggcgcccgaggagaacgcggggaccgaactcttgctgcagagtttcgagcgccgcttcctggcggcacgcacactgcgctccttcccctggcagagcttagaagcaaagttaagagactcatcagattctgagctgctgcgggatattttgcacaagactgtgaagcatcctgtgtgtgtgaagcacccgccgtccgtcaaatatgcccggtgctttctctcagaactcatcaaaaagcacgaggctgtccacacagagcctttggacgagctgtatgaagcgctggcggagaccctgatggccaaggagtccacccagggccaccggagctatttgctgccctcgggaggctcggtcacactctccgagagcacggccatcatctcctacggtaccacaggcctggtcacatgggacgccgccctctaccttgcagaatgggccatcgagaacccggcagtcttcactaacaggactgtcctagagcttggcagtggtgctggcctcacaggcctggccatctgcaagatgtgccgcccccgggcatacatcttcagcgactgtcacagccgggtccttgagcagctccgagggaatgtccttctcaatggcctctcattagaggcagacatcactgccaagttagacagccccagggtgacagtggcccagctggactgggacgtcgcgacggtccatcagctctctgccttccagccagatgttgtcattgcagcagatgtgctgtattgcccagaagccatcatgtcgctggtcggcgtcctgcggaggctggctgcctgccgggaggaccagcgggctcctgaggtctacgtggcctttaccgtccgcaacccagagacgtgccagctgttcaccaccgagctaggccgggccgggatcagatgggaagtggaacctcgtcatgagcagaaactgtttccctacgaagagcacttggagatggcaatgctgaatctcaccctgtaggactcacacacgactccaacgggattgtgagaatcaagtcactctcatgggaagaatttttatatgggaaagcggataaaactttcattggactggaatgtttggagaatgttaatttccaaatcaggaaccacaaactgccctctaataagacatcggctatctaagcgtgtgggtgccccctttctgccagcagttctggttcttaagaaaatcaccataaatcagacatgaaaattctggctccaaaaacagcattttctttgtgcaaataaaaacgtgtgtatcaagtatgatgttcccccaacgtggacacactcagttcctcacaaagccaagcccactgcagctgccacatccctgggcttacggtgcagcaggtgcttttttcaagacaggaatcaaaatgttaggaacacggcagaaaggggacacctggagaccaaacgcaggatgaggagttctgcagaggtcacagggaagtcacagaacagtaatacgctagcaggggcatggggcgtgaagaacagaagaagagaggaagcgtttccaagcctccagagaagaaatcaaggccaaccaaagcttcccgggtcacagaaccaattcttttaccaggcagtaccactgctgtcatttcagcttctggccactgggaggtgctgctcgaaagggtttgccctgagactccaagaagaagctgcgggaaggacagcaggggtcctggggttttagcctctggcccaggagttatgtgtccataaccaaagggagcacagtctgcacccagctctcatcccatcggagctgctgcgactcccgcaggttcttccggaactggtttagcttgcccgcaggatcaggaaagtttgagaaaagcatctgcaaaaaaataaagagcagagcttacctcaaaaaaaaaaaaaaaaaaaaaaaaaaaaaaaaaaaaaaaaaaaaaaaaa

SEQ ID NO: 25738 - DNA, 1838 bp, Homo Sapiens
cggaactccgggtgccggttgaggttgctggtggacctgctctggtggtcttggatgaggccccatgagcgcggcgcccctggtgggctacagcagcagcggctccgaggatgagtccgaggacgggatgcggaccaggccgggggatgggagccaccgtcgtggccagagcccccttcccaggcagagatttccagtacctgacagtgtgctgaacatgttcccgggcaccgaggaggggcctgaagatgacagcacaaaacacgggggacgggtgcgcaccttcccccacgagcgaggcaactgggccacccacgtctatgtaccatgtgagtgatgtgtgaaagatgaagccaaggaggagttcctggatctgcttgatgtgttgctgccccatgcccagacatatgtcccccggctggtaaggatgaaggtgttccacctcagcctgtcccagagtgtggttctgcgccaccactggatcctccccttcgtgcaggctctgaaagcccgtatgacctccttccacaggtgccagaagcccatgccagaagcccaacccaaagtggcttaaaccaaagagaaatttataggctggtataactaaaagattcagaggtagcactggctcatgcatgagtggaccggggtgacaagatatcagatggcacctgactgtcaccaccacaggcagactgttcaccatctcagctctgtccccttcctttgtcacaatgacgaagccaccgcatctcccggctaatggtgtaccagcctggaaagacagcctccctctctgattggcttcagcacaagtcacaggaatgactgcctggtctgacccgtctcctgtgtgctttctttgggagtaaagagttaacaggcccttcccccttccacagagagtgcttcccttatcctgcggaagctctgcccctggatgaaggaggagagcggctatgttagtgctgatgactggcacactgcacttgcgctaggaagacagcatgaactgcacccctccagggaagccacggcctgggctcccctgcatacagtggttccttaactgggcacgagtcccttgctgggacttaggaaaactctgcctaaagtccattgcaagaaatactgatccctgtgggatgtatatgtggctggttcccttgctcactgagagactagaaaacagcacctggacccctgggctggttccctctgaggaaaggatctgtgtcatgagtgaagcccgggcaggtgtggtctgttcaactttgatcatctggttgagcctaaggtgaccaagagtgggcggtgcacccctgattctgttgctgtgactgaggaaatgctaagctctgtttggccaggcctgggcagcctgcctctggagtaggggtggagagccatcctgcaacacgaggttaccaggagaaggagttttggttgggcacagacatccagtgtccactccaggatgtttgggagacaccttgagaactcttcctaaaagctgcacttaaccaagctcctggtggttctgtgatcccttacattttctccagaggcagagagttggctgactgacttttgcccttgggcagattgtgaggctctacccagcatgctggtatattatgttccctcagatgggggtgagacccttggcctgggggctgtaaaatgatctgtttctgtgaggagactttccatggtgagattgctagtgtctcagagaataaaggacagaaccagtccaagtcaaaaaaaaaaaaaaaaaaaaaaaaaaaaaaaaaaaaaaaaaaaaaaaaaaaaaaaaaaaaaaaaaaaaaaaaaaa

SEQ ID NO: 25739 - DNA, 1956 bp, Homo Sapiens
gggggggtctccgcggatgacgagtggctggataacatggagtcgggcaagatggcgcctcccaagaacgctccgagagatgccttggtgatggcacagatcctgaaggatatgggaatcacagagtatgaaccaagggttataaatcaaatgttggaatttgctttccgttatgtgactacaattctggatgatgcaaaaatttattcgagccatgctaagaaacctaatgttgatgcagatgatgtgagactggcaatccagtgtcgtgctgaccaatcttttacctctcctcccccaagagattttttactggatatcgcaaggcagaaaaatcaaacccctttgccactgattaagccatatgcaggacctagactgccacctgatagatactgcttaacagctccaaactataggctgaagtccttaattaaaaagggacctaaccaagggagactagttccacgattaagtgttggtgctgttagtagcaaacctactactcctactatagcaaccccacaaacggtgtctgtcccaaataaagttgcaactccaatgtcagtgacaagccaaagatttacggtgcagattccaccttctcagtccacacctgtcaaaccagttcctgcaacaactgcagttcaaaatgttctgattaatccttcaatgattgggcccaaaaatattcttattaccaccaacatggtttcgtcacagaacacagccaatgaagcaaacccactgaagagaaaacatgaagatgatgatgacaatgatattatgtaaggaatatagtctagtctagatgcatttcaaaaggaaagttggttttgagcccagtatactgaactagaatattctagatcttgttttaccttaaaagactgaaatgtagctgcagtatttttcgtcagttaaaactgttagatctctttagtaaacatacaaatgtgtttttcagtaggcttcaattacaaacagttaagtacttgtttcttaatagtttcattaatgttgagtcctaatatggcaattctgtttttgagacacttttctgccttctatcactgatagtagcatttaagtttcagattctacagcctagtcagcagatttatctttgacagcataatttctgatctacatttaaatactactttattttataaggtaatatagttacttactgtcactagctaattttttttttttaccaaatctctcaatataggaaacattttttggaaaggatggatttagaggagagattctaaatccattttggatgtatttgtttctttgacttccttaacttccaaactcaactccctttctagatcccattcattttctgcacctcccccataggcttgtttctctccattgctattaaatgtagaaggccatacctggaattttaaaaatattattcctggtaatacagctcagtgtcattttcctatttttaaaacatgctctacatgcctaatgtttcgtgattcactttaacctgatggtttgcatttgctgtttttcactcttatgtcagagcagttgggttttaccccttagtttttatgcctgttaagctttactgtgcttttgacaggtagttttgggtcagttatattcagttttagtattgtattccaagttgataactcttccatgtttcacatttctaaatttaacagagatgctgtagcttaaaacatgttttgataagtaattacactggacctaggcaaaaccactgaagaacaagtgttcctttttaccacatacatattatgttttgatcactgctgcttgagccccgctattggtataattcagatcatattagcttgttgctgaggatgtcacatataagacaggatcaaacctgaaagacactaatggttcatcctctataaggccaaaaaaaaaaaaaaaaaaaaaaaaaaaaaa

SEQ ID NO: 25740 - DNA, 2209 bp, Homo Sapiens
gggggaagtggaggtgggagggagcgacaatggaaaaatcacctgaaaactgggacagaggaaggaagctacagttacgaaggagagctgcaaaagttgcagcagaaaggttgggagtcccgacaggttccgtagcccacagaaaagaagcaagggacggcaggactgtttcacacttttctgcttctggaaggtgctggacaaaaacatggaactaatttccccaacagtgattataatcctgggttgccttgctctgttcttactccttcagccgaagaatttgcgtagacccccgtgcatcaagggctggattccttggattggagttggatttgagtttgggaaagcccctctagaatttatagagaaagcaagaatcaagtatggaccaatatttacagtctttgctatgggaaaccgaatgacctttgttactgaagaagaaggaattaatgtgtttctaaaatccaaaaaagtagattttgaactagcagtgcaaaatatcgtttatcgtacagcatcaattccaaagaatgtctttttagcactgcatgaaaaactctatattatgttgaaagggaaaatggggactgtcaatctccatcagtttactgggcaactgactgaagaattacatgaacaactggagaatttaggcactcatgggacaatggacctgaacaacttagtaagacatctcctttatccagtcacagtgaatatgctctttaataaaagtttgttttccacaaacaagaaaaaaatcaaggagttccatcagtattttcaagtttatgatgaagattttgagtatgggtcccagttgccagagtgtcttctaagaaactggtcaaaatccaaaaagtggttcctggaactgtttgagaaaaacattccagatataaaagcatgtaaatctgcaaaagataattccatgacattattgcaagctacgctggatattgtagagacggaaacaagtaaggaaaactcacccaattatgggctcttactgctttgggcttctctgtctaatgctgttcctgttgcattttggacacttgcacacgtcctttctcatcctgatatccacaaggccattatggaaggcatatcttctgtgtttggcaaagcaggcaaagataagattaaagtgtctgaggatgacctggagaatctccttctaattaaatggtgtgttttggaaaccattcgtttaaaagctcctggtgtcattactagaaaagtggtgaagcctgtggaaattttgaattacatcattccttctggtgacttgttgatgttgtctccattttggctgcatagaaatccaaagtattttcctgagcctgaattgttcaaacctgaacgttggaaaaaggcaaatttagagaagcactctttcttggactgcttcatggcatttggaagcgggaagttccagtgtcctgcaaggtggtttgctctgttagaggttcagatgtgtattattttaatactttataaatatgactgtagtcttctggacccattacccaaacagagttatctccatttggtgggtgtcccccagccggaagggcaatgccgaattgaatataaacaaagaatatgacatctgttgggcctcacaaggaccagggccttctggaggagtggcactaccccacctggcagcacctagacctgagctctacaaaaacacactgcttcactttgttttaggacttagttcaagaacacattcaaatggtgcatgtgtttggtatcttcaacagtagaccaagaatctaacatcactctcagtaatatagagaccggaatacatggtttataggaaatgatcaaatgatccaaaaaaactccacattttttaagaagttggaatttgatttcatgcataactgtattaaaacattaaatagaaataatgtcatttgaatgaaaatcttatcacattaaattcactgtgaaggcagcatacttaaatttttattttgaaaagtctaaaaggcttagatttttaaaatttaataattatttctacaaattttctatttttcttgaggtgattctcaactagcaattggaactcctaggctctattaacataattctttattgtaaacgtatctaatgctaaaagtaataaaatggtagttttctgagacctgcgaaaaaaaaaaaaaaaaaaaaaaaaaaaaaa

SEQ ID NO: 25741 - DNA, 1849 bp, Homo Sapiens
gggggcgaaacactatgctaatggcatggtgccgcggtcctgtcttgctgtgcctgcggcaggggctcggaaccaattcattcctgcacggcctggggcaggagcccttcgagggagctcggtcactgtgttgcaggtcctcgcctagagacctgcgagatggagaaagagagcacgaggcggcacaaaggaaagccccaggagcagagtcttgcccatctctccctctgagcatctcggacattgggactggatgtctttcgtcactggaaaacctcagactgccgacgctgcgggaagagtcatcacctcgagagctcgaggactcgagcggagaccagggccggtgcggtcccacacaccagggatccgaggatccttcgatgctctcgcaggcccagtccgctaccgaggtcgaagagcgtcacgtctccccttcttgttcaacttccagagagagaccctttcaggctggggagctgattttagctgagactggggagggagaaacaaaatttaagaaattatttaggttgaacaacttcggactcttaaatagtaactggggggcagtcccgttcggcaagatcgtggggaagttccccggccagatactgaggagttccttcggtaagcagtacatgctgaggaggccagccttggaagactatgtagtattgatgaaaagagggactgccataacattcccaaaggatattaatatgattctctcaatgatggatatcaacccaggtgatactgttttggaagctggctcaggctctggtggaatgagcttatttttatccaaagcagttggatcacaaggacgagtcataagttttgaggtacgaaaagaccaccatgatctggctaagaagaattacaaacactggcgtgattcatggaaattaagtcatgtagaagagtggccagacaatgtggattttattcataaggacatttcaggagcaaccgaagacataaaatctttaacatttgacgcagtagctttggatatgttaaatcctcatgttactttgcctgttttttacccacatcttaagcatggtggtgtatgtgctgtatatgtagtaaacatcacacaggttattgaacttttagatggaattcgcacctgtgaacttgctctttcatgtgaaaagataagcgaggtcattgtcagagattggttggtttgccttgcaaaacagaaaaatggaattttagctcaaaaagtagaatctaaaatcaacacagatgtacaactagattctcaagagaaaattggagttaaaggtgagctgtttcaagaggatgaccatgaagaatcgcattctgattttccatatggatcatttccctatgttgctagaccagtacactggcaacctggtcatacagcttttcttgtcaagttgaggaaggtcaaaccacaacttaactgagtactccagatgacagtaactgacttgaagatggaaaaatatcaaaatagaactttatattgaaaatcactgcttccatagattggcatttttagctattactatgacttatataacttatacatataattttgaaaataacaactaaaagatgtataacatagcaaaactgcttaaacatcccattttgacacttgtcttgcagttagtttgacattttgtagttaatgattccaaattggtttagttgggccatctcattcttcacttcctgtaaaccactccatagatttgtctttcttcaagaaattagttttctttcctttatttgattgatggtcattgactactgaaataaaatatgcattttaagatgaaaaaaaaaaaaaaaaaaaaaaaaa

SEQ ID NO: 25742 - DNA, 2131 bp, Homo Sapiens
ggggcagtggcgggcacgcgcagccgagaagatgtctccgacgccgccgctcttcagtttgcccgaagcgcggacgcggtttacgaagtctaccagagaggccttgaacaacaaaaacatcaagccattgttaagtaccttcagccaggtacctggcagtgaaaatgaaaaaaaatgtacccttgaccaagctttcagaggtattctagaagaagaaattataaatcattcatcatgtgaaaacgttttagctattatttctcttgctattgggggagtaactgaaggtatttgtaccgcatctacaccttttgtattgttgggagatgttttggattgtcttcctttggatcagtgtgacacaatattcacttttgtggaaaaaaatgttgctacttggaaatcaaatacattctattctgctgggaaaaattacttactacgtatgtgcaatgatctcctaagaagattgtctaaatcccagaatacagtcttctgtggacggattcagctctttttggccaggcttttccctctgtctgagaaatcaggtcttaacttgcagagtcagtttaatctggaaaatgtcactgttttcaatacaaatgagcaggaaagcaccctgggtcagaagcacactgaagatagagaagaaggaatggatgtagaagaaggcgaaatgggagatgaggaagctccaacaacgtgctctattccaattgattacaacctgtatcgaaaattctggtcacttcaggattacttcaggaaccctgtgcaatgctatgagaagatttcatggaaaacttttctcaagtattctgaagaagttttagctgtttttaagagttataaattagatgatactcaggcctcaagaaaaaagatggaagaattgaaaacaggaggagaacatgtatattttgcaaaatttttaacaagtgaaaagctgatggatttacaactgagtgacagtaactttcgtcgacacatcctgttgcagtatctcattttattccaatatctcaaggggcaggtcaaattcaaaagttcaaactatgttttaactgatgagcaatcactttggattgaagatactacaaaatcagtttatcaactactatctgaaaacccccccgatggagaaagattttcaaagatggtagagcatatattaaacactgaagaaaactggaactcgtggaaaaatgaaggttgcccaagttttgtgaaagaaagaacatcagataccaaacctacgagaataattcggaagagaacagcacccgaggacttcctagggaaaggacccaccaaaaaaattctgatgggaaatgaggagttaacaaggctttggaatctttgccctgataatatggaagcctgtaaatcagagacaagggaacacatgcccactttggaggaattctttgaagaagccattgaacaggcagaccctgaaaatatggtggaaaatgaatataaggctgtgaacaattcaaattatggttggagagccctgagactattagcacggagaagccctcacttcttccagccaaccaaccagcagtttaaaagtttaccagaatatcttgaaaatatggtaataaagctagccaaggaattaccgcctccttctgaagaaataaaaacaggtgaggatgaagatgaggaagataatgatgctctactgaaggaaaatgaaagtcctgatgttcggcgagacaaacctgtaacaggagaacaaatagaggtatttgccaacaagctgggtgaacaatggaagattctggctccctacttggaaatgaaagactcagaaattaggcagattgagtgtgacagtgaagacatgaagatgagagctaagcagctcctggttgcctggcaagatcaagagggagttcatgcaacacctgagaatctgattaatgcactgaataagtctggattaagtgaccttgcagaaagtctaactaatgacaatgagacaaatagttagcttctttttttttctttttattaaaactgtgatagattttgttaccaagcagcatttgataagaggtccactggttttggtaaacaataaacatttttaaaaaaaaaaaaaaaaaaaaaaaaaaaa

SEQ ID NO: 25743 - DNA, 619 bp, Homo Sapiens
gggggattctagtagaacggagctgaccctatccgaacaggcccctgccctgcttggatagaggcctccgaacaggagtaaagaatggctgttgaacatccacaaggcacctgcaagatcccccacaggcgctgcctgagacccagctctgtgtctcctcgtcgtacagcttgtggagctccgactgcaaggccatcagcatgcccaggcaggggttaagctggagggccatggaggaggacaggccagcaggatgccgcttctgctccagggcatgcaccatgctggctcatgcctgtaatcccagcactttgggaggccgagatgggcagatcacctgaggttgggagttcaagaccagcctgaccagcatggagaaacaccgtctctactaaaaatacaaaaattagccgggcgtagtggcgcatgcctgtaatcccagctactcgggaggctgaggcaggagaatcgcttgaacccaggaggtggaggttgtggtgagccgagatcatgccattgtgctccagcctgggaaacaagagtgaaactctgtcccaaaaaaaaataaaaatttattgtctactacagcaaaaaaaaaaaaaaaaaaaaaaaaaaaaaa

SEQ ID NO: 25744 - DNA, 1522 bp, Homo Sapiens
gggtcagtcaccttgcgccagctccgtaatcgcctgtttcaagaaaactctgttctcagttcactccccctcaattctctgagtaggaacaatgaagttgacctgctctttctttctgaactgcaagtgctacatgatatttcaagcttgctgtctcgtcataagcatctagccaaggatcattctcctgatttatattcactggagctggcgggtttggatgaaattgggaagcgttatggggaagactctgaacaattcagagatgcttctaagatccttgttgacgctctgcaaaagtttgcagatgacatgtacagtctttatggtgggaatgcagtggtagagttagtcactgtcaagtcatttgacacctccctcattaggaagacaaggactatccttgaggcaaaacaagcgaacccagcaagtccctataaccttgcatataagtataattttgaatattccgtggttttcaacatggtactttggataatgatcgccttggccttggctgtgattatcacctcttacaatatttggaacatggatcctggatatgatagcatcatttataggatgacaaaccagaagattcgaatggattgaatgttacctgtgccagaattagaaaagggggttggaaattggctgttttgttaaaatatatcttttagtgtgctttaaagtagatagtatactttacatttataaaaaaaaatcaaattttgttctttattttgtgtgtgcctgtgatgtttttctagagtgaattatagtattgacgtgaatcccactgtggtatagattccataatatgcttgaatattatgatatagccatttaataacattgatttcattctgtttaatgaatttggaaatatgcactgaaagaaatgtaaaacatttagaatagctcgtgttatggaaaaaagtgcactgaatttattagacaaacttacgaatgcttaacttctttacacagcataggtgaaaatcatatttgggctattgtatactatgaacaatttgtaaatgtcttaatttgatgtaaataactctgaaacaagagaaaaggtttttaacttagagtagccctaaaatatggatgtgcttatataatcgcttagttttggaactgtatctgagtaacagaggacagctgttttttaaccctcttctgcaagtttgttgacctacatgggctaatatggatactaaaaatactacattgatctaagaagaaactagccttgtggagtatatagatgcttttcattatacacacaaaaatccctgagggacattttgaggcatgaatataaaacatttttatttcagtaacttttccccctgtgtaagttactatggtttgtggtacaacttcattctatagaatattaagtggaagtgggtgaattctactttttatgttggagtggaccaatgtctatcaagagtgacaaataaagttaatgatgattccagaaaaaaaaaaaaaaaaaaaaaaaaaaaaa

SEQ ID NO: 25745 - DNA, 1865 bp, Homo Sapiens
ggggcagtgggtgaccgcggctgcgagggactttgtcatcggtcctccaggatctggggagaaagagccccatcccttctctctctgccaccatttcggacaccccgcagggactcgttttgggattcgcactgacttcaaggaaggacgcgaacccttctctgaccccagctcgggcggccacctgtctttgccgcggtgacccttctctcatgaccctgcggtgccttgagccctccgggaatggcggggaagggacgcggagccagtgggggaccgcggggtcggcggaggagccatccccgcaggcggcgcgtctggcgaaggccctgcgggagctcggtcagacaggatggtactggggaagtatgactgttaatgaagccaaagagaaattaaaagaggcaccagaaggaactttcttgattagagatagctcgcattcagactacctactaacaatatctgttaaaacatcagctggaccaactaatcttcgaatcgaataccaagacggaaaattcagattggactctatcatatgtgtcaaatccaagcttaaacaatttgacagtgtggttcatctgatcgactactatgttcagatgtgcaaggataagcggacaggtccagaagccccccggaacggcactgttcacctttatctgaccaaaccgctctacacgtcagcaccatctctgcagcatctctgtaggctcaccattaacaaatgtaccggtgccatctggggactgcctttaccaacaagactaaaagattacttggaagaatataaattccaggtataaatgtttctctttttttaaacatgtctcacatagagtatctccgaatgcagctatgtaaaagagaaccaaaacttgagtgctctggataactatatggaatgctttctaagaacagctgaagctaatctaatttaaatttaacagcttgaagaggtagctaggtgtttaaagttcctccagatacttttacctgagtgatgcttcccttcctaaggctgaccaagacctgttgatccttttagattaaaaataaaatgtcgcatgtaaaggctgaagtcgcgttttatcagaatgccttgccttcttaggttcttttccattatgtcaaaggtccaggctccagtaggagagaaagaactcctcataggaatactgaagaagtgggaaggaaccaagctgacacaggcctcactgcaatttgatatgcctgctgatcagagtctcttgggcattttatattttgcattctgatgtacctaggagttttgttaaacagatgatgtatgtgagtatttatcccattttatgcaattaaccaaatcaaccaaaaaaagtgaccatgaagtcctgtatttgtctttttactacatgtaggaactctcatgtgaatgagtactgtagtaatccattctatgggagccttatttcagaaatatttcaaactggtgcaaatggaaaagactttctcttttcctttaaagctaaagacaagaatatcatgctatacaggtgcaactcaatccccgttaataaaaaccaatgtaggtataggcattctaccctttgaaatagctgtgtcccaacctgttgccattgattttttggaaatggctttagaaatatccaagttgtccttgaattgtctaaccatggacataaacagttgtctcccttctactgtgtagaatactttgacttaattttcttccagatacagggggatacctgcctgtttttcaaagtgtttatttactgctgttactatttgattagaatgtattaaataaaaaaaacctgatttctgcaaaaaaaaaaaaaaaaaaaaaaaaaaaaaaa

SEQ ID NO: 25746 - DNA, 2680 bp, Homo Sapiens
cacagcgtgggaagcagctctgggggagctcggagctcccgatcacggcttcttgggggtagctacggctgggtgtgtagaacggggccggggctggggctgggtcccctagtggagacccaagtgcgagaggcaagaactctgcagcttcctgccttctgggtcagttccttattcaagtctgcagccggctcccagggagatctcggtggaacttcagaaacgctgggcagtctgcctttcaaccatgcccctgtccctgggagccgagatgtgggggcctgaggcctggctgctgctgctgctactgctggcatcatttacaggccggtgccccgcgggtgagctggagacctcagacgtggtaactgtggtgctgggccaggacgcaaaactgccctgcttctaccgaggggactccggcgagcaagtggggcaagtggcatgggctcgggtggacgcgggcgaaggcgcccaggaactagcgctactgcactccaaatacgggcttcatgtgagcccggcttacgagggccgcgtggagcagccgccgcccccacgcaaccccctggacggctcagtgctcctgcgcaacgcagtgcaggcggatgagggcgagtacgagtgccgggtcagcaccttccccgccggcagcttccaggcgcggctgcggctccgagtgctggtgcctcccctgccctcactgaatcctggtccagcactagaagagggccagggcctgaccctggcagcctcctgcacagctgagggcagcccagcccccagcgtgacctgggacacggaggtcaaaggcacaacgtccagccgttccttcaagcactcccgctctgctgccgtcacctcagagttccacttggtgcctagccgcagcatgaatgggcagccactgacttgtgtggtgtcccatcctggcctgctccaggaccaaaggatcacccacatcctccacgtgtccttccttgctgaggcctctgtgaggggccttgaagaccaaaatctgtggcacattggcagagaaggagctatgctcaagtgcctgagtgaagggcagccccctccctcatacaactggacacggctggatgggcctctgcccagtggggtacgagtggatggggacactttgggctttcccccactgaccactgagcacagcggcatctacgtctgccatgtcagcaatgagttctcctcaagggattctcaggtcactgtggatgttcttgacccccaggaagactctgggaagcaggtggacctagtgtcagcctcggtggtggtggtgggtgtgatcgccgcactcttgttctgccttctggtggtggtggtggtgctcatgtcccgataccatcggcgcaaggcccagcagatgacccagaaatatgaggaggagctgaccctgaccagggagaactccatccggaggctgcattcccatcacacggaccccaggagccagccggaggagagtgtagggctgagagccgagggccaccctgatagtctcaaggacaacagtagctgctctgtgatgagtgaagagcccgagggccgcagttactccacgctgaccacggtgagggagatagaaacacagactgaactgctgtctccaggctctgggcgggccgaggaggaggaagatcaggatgaaggcatcaaacaggccatgaaccattttgttcaggagaatgggaccctacgggccaagcccacgggcaatggcatctacatcaatgggcggggacacctggtctgacccaggcctgcctcccttccctaggcctggctccttctgttgacatgggagattttagctcatcttgggggcctccttaaacacccccatttcttgcggaagatgctccccatcccactgactgcttgacctttacctccaacccttctgttcatcgggagggctccaccaattgagtctctcccaccatgcatgcaggtcactgtgtgtgtgcatgtgtgcctgtgtgagtgttgactgactgtgtgtgtgtggaggggtgactgtccgtggaggggtgactgtgtccgtggtgtgtattatgctgtcatatcagagtcaagtgaactgtggtgtatgtgccacgggatttgagtggttgcgtgggcaacactgtcagggtttggcgtgtgtgtcatgtggctgtgtgtgacctctgcctgaaaaagcaggtattttctcagaccccagagcagtattaatgatgcagaggttggaggagagaggtggagactgtggctcagacccaggtgtgcgggcatagctggagctggaatctgcctccggtgtgagggaacctgtctcctaccacttcggagccatgggggcaagtgtgaagcagccagtccctgggtcagccagaggcttgaactgttacagaagccctctgccctctggtggcctctgggcctgctgcatgtacatattttctgtaaatatacatgcgccgggagcttcttgcaggaatactgctccgaatcacttttaatttttttcttttttttttcttgccctttccattagttgtattttttatttatttttatttttatttttttttagagtttgagtccagcctggacgatatagccagaccctgtctgtaaaaaaaccaaaacccaaaaaaaaaaaaaaaaaaaa

SEQ ID NO: 25747 - DNA, 697 bp, Homo Sapiens
agagagagagagagagaactgtctcgagtttttttttttttttttttctctccttattctactctacagtcttttgacagtattcccaaacgaggttgacacagctccagtccacaccagcataccaggcttccttcccagggcagtttagaggaagctccttctgggcaaggtcaggcggtcctccttccctctctccttcccctttgtcccagcctcaactgactctggctgtgggaggtgtggagggtccttaggcttccctccccaacctggcctccaccaacacccctaacaggaggcccgtggaaggctcagcctctcctccgcatccctcctccttcctgcctatcggagggagccagggtcccctaggctgaccctgaatcctcttcctcccttcatgggaggggggcaggaatccagaggaggatgaagccagcgggaccacatggcttggtggcttggacaaacaagctcagggaggaaatgaggaggcggcggctgcagaggaatgcaaccctgttgggcacagaccatgcaatctggggctggccctggggccagctgggtcctgtcctccacctgctcaaccgtgcttccaccaaccagaggaaacccatttactagtttttctaataaatcaataatgctccaaaaaaaaaaaaaaaaaaaaaaaaaaaaaaaaaaaaaaaaa

SEQ ID NO: 25748 - DNA, 2798 bp, Homo Sapiens
gaggggccggaggcgtccccgctcccgctcgctactagcccgcgggccagcgccgcgtcccgagccccggcgggagccatggctctaaaaggacaagaagattatatttatcttttcaaggattcaacacatccagtggattttctggatgcattcagaacattttacttggatggattatttactgatattactcttcagtgtccttcaggcataattttccattgtcaccgagccgttttagctgcttgcagcaattattttaaggcaatgttcacagctgacatgaaagaaaaatttaaaaataaaataaaactctctggcatccaccatgatattctggaaggccttgtaaattatgcatacacttcccaaattgaaataactaaaagaaatgttcaaagcctgcttgaggcagcggatctgctacagttcctttcagtaaagaaggcttgtgagcggtttttggtaaggcacttggatattgataattgtattggaatgcactcctttgcagaatttcatgtgtgtccagaactagagaaggaatctcgaagaattctatgttcaaagtttaaggaagtgtggcaacaagaagaatttctggaaatcagccttgaaaagtttctctttatcttgtccagaaagaatctcagtgtttggaaagaagaagctatcatagagccagttattaagtggactgctcatgatgtagaaaatcgaattgaatgcctctataatctactgagctatatcaacattgatatagatccagtgtacttaaaaacagccttaggccttcaaagaagctgcctgctcaccgaaaataagatccgctccctaatatacaatgccttgaatcccatgcataaagagatttcccagaggtccacagccacaatgtatataattggaggctattactggcatcctttatcagaggttcacatatgggatcctttgacaaatgtttggattcagggagcagaaataccagattataccagggagagctatggtgttacatgtttaggacccaacatttatgtaactgggggctacaggacggataacatagaagctcttgacacagtgtggatctataacagtgaaagtgatgaatggacagaaggtttgccaatgctcaatgccaggtattaccactgtgcagtcaccttgggtggctgtgtctatgctttaggtggttacagaaaaggggctccagcagaagaggctgagttctatgatcctttaaaagagaaatggattcctattgcaaacatgattaaaggtgtgggaaatgctactgcctgtgtcttacatgatgttatctacgtcattggtggccactgtggctacagaggaagctgcacctatgacaaagttcagagctacaattccgatatcaacgaatggagcctcatcacctccagtccacatccagaatatggattgtgctcagttccgtttgaaaataagctctatctagtcggtggacaaactacaatcacagaatgctatgaccctgaacaaaatgaatggagagagatagctcccatgatggaaaggaggatggagtgcggtgccgtcatcatgaatggatgtatttatgtcactggaggatactcctactcaaagggaacgtatcttcagagcattgagaaatatgatccagatcttaataagtgggaaatagtgggtaatcttcccagtgccatgcggtctcatgggtgtgtttgtgtgtataatgtctaattgaatctgcagaaatgaccaagcaatcacttttttggagtatagttttataaaaaaagaatgcagggtttgaagttccttacctgataattgtgtctggcacatgataggggatcagtaaattgtaattcctaaccctactgtactcccaaacatggtgattcatggtcaagaaaaatcttatatatatatatacacacacatatatatgtgttcatatatatgtatacatatatgtgtatatatacgcatgtatgtatacatatatgtgtatatatacgcatgtatgtatgcatatgtgtgtatatatacgtatgtatgtatacatatgtgtatatatacgtatgtatgtatacatatatgtgtatatatgcgtatgtatgtatacatatatgtgtatatatacgtatgtatgtatacatatatgtgtatatatacgtatgtatgtatacatatatgtgtatatatacgtatgtatgtatacatatatgtgtgtatatacgtgtgtatgtatacatatatgtgtatatatacgtgtgtatgtatacatatatgtgtatatatgcgtgtgtatgtatacatatatgtgtatatatacgtgtgtatgtatacatatatgtgtatatatacgtgtgtatgtatacatatatgtgtatatatgcgtgtgtatatatatacacatatatacgtatatatgtatatatatatacacagttgaatcagtgggattaatacctataatctctggttttcaaaggtaatatggaatatttgacacttggtaaaaggtgaactacctttgtagtgaatcttttcctcttggtagcatcaacactggggataaatcagaaccattctgtggaatgaaatgtttctcaagagcctataatatagtagatagtgcatattaagatgtctggctgggcatggtggctcatgcctgtaatcccagcactttgggaggctgaggcgggaggatcacttgagcctagaagttggagactaacctggcgagaccctgtctcaaaaaaaaaaaaaaaaaa

SEQ ID NO: 25749 - DNA, 2773 bp, Homo Sapiens
tggggaccttcgaaatcgccgccgctctcacaatggcttgggtccagactgcgccacagcctctcgggagacgtgggccctcggaacctttttagtgccggactccgggccgcaggcagtcccgcggcagcaggatcacagaacctctggatggactcttcctgggaagctttgctactttgcagcagctggaccatgttcctcattaacatctgtctgtccgcttagtcatcacatcatttcactgtggtggcagggactcagctcggaattctgtatagaaaaagcacctggatcccagtctttcaatggcttcaagacaaccagaagtgcctgctcttgaggctagtgcgcctctaggcaagatgtccctgcccatcgggatataccgccgggcagtcagctatgatgataccctcgaggaccctgcgcccatgactcctcctccatcggacatgggcagcgtcccttggaagccagtgattccagagcgcaagtatcagcacctcgccaaggtggaggaaggagaggccagtctaccctcccctgccatgaccctgtcatcagccattgacagtgtggacaaggtcccagtggtgaaggctaaagctacccatgtcatcatgaattctctgatcacaaaacagacccaggaaagcattcagcattttgagcgacaggcagggctgagagatgctggctacacaccccacaagggcctcaccaccgaggagaccaagtaccttcgagtggccgaagcactccacaaactaaagttacagagtggagaggtaacaaaagaagagaggcagcctgcatcagcccagtccaccccaagcaccactccgcactcttcacctaagcagaggcccaggggctggttcacttctggttcttccacagccttacctggcccaaatcctagcaccatggactctggaagtggggataaggacagaaacttgtcagataagtggagcctctttggaccgagatcccttcagaagtacgattctggaagttttgccacccaggcctaccgaggagcccagaagccctctccattggaactgatacgtgcccaggccaaccgaatggctgaagatccagcagccttgaagccccccaagatggacatcccagtgatggaaggaaagaaacagccaccacgggcccataacctcaaaccccgtgacctgaatgtgctcacacccactggcttctagagccctctttccagggattctggtaaaggtggtttcttgcatcccactccccttttaccttggctttgacataggaaaggtatatttaaaaacttaatcagctgggcgtggtggctcacgcctgtaatcccagcactttgggaggccaaggtaggtggatacctgaggtcaggagttcaagaccagcctggccaacatggtgaaaccccgtctctactaaaaatacaaaaattagctgggcgtggtggtgggcgcctgtagtcccagctacttgggaggctgaggcaggagaatcgcctgaacccaggaagcagatgttgtaccgagctgagatcatgccattacactccagcctgggcgacagaacgagacgccatcaataaataaataaataaagtaaagtaaaaaacctattaaattgaggctagagctggagatgtaattggtttttgagaaacattagtataaagcttgcccttgttgtgtggaagaagccattttgtactgctttaaagttagactaatattctcagcacgggtgtatggggacctcattacctatttttttcatcatttaccctaggtaagaactttgatcactgcttactaggtaaagaatgtttgtactgttccaaaacccaggcttctttattcctttaccactatccatgtgagcattgacaaatcatggcttagaggtgctcactgactcgctaagacgactttggccctgttgatgactggtgctgtgctccagccttatcagttaggggacccaaggtttgtttgggacctgggtacaggtaaaagccagacttggcagggacccctctttctaggctgaaccttgagtccccctgctttttggcagacctaatggatcactgtcttgcagctagttcttcatgtggggcctcttaggccagtgccggaggaggcatgctcctctttctatgccacagaacaaacactactctagcagagcctttcttgcactttaaagtgagattaatttagctgtaatttggttaaaaacttcctaagagagaaaattaagtctactgatttggtataggtaaatggacattaaacttttttaaagtaaaggagatggtagataccgttagattatagtcttgaggttcatgtgaagccagtggtgttaacttactttgatttccttgttcaggtcagggcctggaacgcctgtgcggggaggtcactcaattcaaaattttctgtatgaaagcatttttcaccaaaatgagcctcatccctttatgcaacacataaccttactgagggagggaaatacggaagccacctttttatttctcttcactgtgtacaagttcacttgttgtcttgaacactgtctcaaatacctgctttttgttttggatagtaccttgtctgtataagaagctggcctttccatagagaggccctggagtctaaaattatgagaacaattaatttatttgtgtcttctattatgatctcgttttgacaataaaaatccttactactttaaaaaaaaaaaaaaa

SEQ ID NO: 25750 - DNA, 1519 bp, Homo Sapiens
ccacgtggcggacatggtgatttcagaaagtatggatatactcttcagaataagaggaggccttgatttggcttttcagctagctactcctaatgaaatttttctcaagaaggcactgaaacatgtgttgagtgacctgtcaactaagctgtcttcaaacgcccttgtgttcagaatttgccacagttcagtgtatatatggcctagcagtgacataaacaccattcctggagaactgactgatgcttctgcttgtaagaccatactgcgctttattcaatttgagccagaagaagatataaaaagaaaattcatgagaaagaaggacaaaaagttatcagacatgcatcaaatagtaaatatagatcttatgctggaaatgtcaacctccctggcagctgtaacgcccatcattgaaagggaaagcggaggacaccattatgttaatatgactttacctgtcgatgcagttatatctgttgctccagaagaaacatggggaaaagttcgtaaactcctggttgatgcaattcataatcaactaactgacatggaaaaatgtattttgaaatatatgaaaggaacatctattgtggtccctgaaccactgcactttttattaccagggaaaaaaaatcttgtaacaatttcatatccttcaggaataccagatggccagctgcaggcctataggaaggagttacatgatcttttcaatctgcctcacgacagaccctatttcaaaaggtctaatgcttatcactttccagatgagccatacaaagatggttacattagaaatccacatacttaccttaatccacctaacatggagactggtatgatttatgtggtccagggcatatatggctatcatcattatatgcaggatcgcatagatgacaatggctggggctgtgcttatcgatctctgcagactatctgctcttggttcaaacatcagggatacacagagaggtccattccaacacacagagaaattcagcaggctctagtcgatgccggggacaaaccagcaacatttgtcggatcgcggcaatggattggatctattgaggtgcagctggtactaaaccaattgatcggtataacgtcaaaaatcctgtttgtcagccaaggttcagaaattgcctctcaaggacgggaactggctaatcatttccaaagtgaaggaactccagttatgatcgggggaggagttttggcccacacaatactaggagttgcatggaatgagattacagggcagataaagtttctgattctagatccacattataccggtgctgaagacctgcaagttattttggaaaagggctggtgcggatggaagggcccagatttttggaacaaggatgcatactataacttatgtcttcctcagcgaccaaatatgatttaaaatatcttggagtcaaagactgcagtagagtggtattataaatttgtgaataaagaatcagtttaatttttcacattaaaaaaaaaaaaaaaaaaa

SEQ ID NO: 25751 - DNA, 1577 bp, Homo Sapiens
gttgaataacagtaatgatgataatatctgagctttattaagtacttactacatgctaagagctttttaagcacttatttaatcctcattaacaaattcataaggtaggtgctattgatagtttagccataaccagatatggcttgttatttgtaagttatcatgaaaaggtttatattcactattctttatttcagtgtagcacttttagagccaaaaaaactcaggcacaaagaagttaaataacttgccgggtgcggtggctcacccctgtaatcccagcactttgggaggccaaagcaggcggatcacctgaggtcaggagtttgagaccagccgggccaacatggtgcaacctcgtctttactaaaaatacaaaaacaaaaattagccaggggtggtggtatgcacctgcagtcccagcaacatgggaggctgaacaggagaatcgcttgaacccgcgacagggaggttgtgatgagccaaggtcatgccactgcactccagcctgggagacagagcaagactccatctcaaaaacaaaaacaaaacaaaacaacaacaaaaaaagaagttaaataacttgtttaagatcacacagctagtgcagttaccccctctcagtaattatgtttggcaaatatgaaatacaaggatctggcaaggttaggaagaggttaagaatatcagtgacagtactctgaggcatctgggcatgtcagatgaagatttattattcagaaaagttaagtcagctgttgcagggatcagttgttttattcctggaaaatgtttttcattttgctgcaaatctatatctgacctgctgaggaaatcgtttggtgaaatgaatccagaaagcagagaaaatgcttcattactttaaatagcagcattaagcccattatagcctctgaattgtcccttccttgagtttgctaatgcttccaacttagtcatttgaagcccaagagtctaattttatatgccctgccaatgtcctcatctattgcagaatgtataattatctatttgttttggactatatgttacaaaaatttaaaacataagatcctctctctatatttcattattggtgaacccacattgtgctgtgttttgtgatattttatcattttctagattcttatgtggatctaataacgaccacttgaacccagtttcacagaatccttatttttctgttcaaattaggaattagggacatggatgaaattggaaatcttcattctcagtaaactatcgcaaggacaaaaaaccaaacaccacatgttctcactcatagataggaattgaacaatgagaacacatggagacaggaaggggaacatcacactctagggactgttgtggggtgaggggaggggtgagggatagcattaggagatatacctgatgctaaatgacgagttagtgggtgcagcacaccagcatggcacatgtatacgtatgtaactaacctgcacatcgtgcacatgtaccctaaaacttaaagtataataataataaaataaaaaaaaaaggaattaggcaaaaaaaaaaaaaaaaaaaaaaaa

SEQ ID NO: 25752 - DNA, 1507 bp, Homo Sapiens
cgtgaatttgctgatctgagttctttggcttttcatacgtggttgtcctattgtactgcaggagctttgtgcttttactaagtttactactagaaaagccttgctaaaattctagtgtactctcagctacttctcttatagctgtgtcttggtgactaaagagaattcttcttccatgtagccagagagattaacagatgtccgagctgaaccccaaagcatccagccgtctttcccgctttgaccctgtaacctctcccctggttggcagtgtgcctgtgttgacagttctcctggttcagccaaaggtgaaagataattgcttgtggagtagcggctgggatggtatgtgtttttgtagcaagcatccccacccccgtctccaggcaaagccttgaatctggtgcatatttcaaagcatgtgttaaactttatgtgatactgattaaaatggagggctccagggtgaattggcagagtcccacaactgcatctgccaaatgacatacagagaaaatgtcttgctacaaatggaagggctgaaacctgtctatcttagcaatatgtaagcctgcaaaaggaaaggtgactccggccatgtgtatatacacagcctgtggaacatgcaagattctttagcaactcctttgttcctatggcattttaatgcaaaagaaagtctttttattttccttccccttcaaacaacaataacaacaaaacccatatggaaataatagtattacatgtcagtgctccattcccattgaacatttgtttaaaaatctaacttggaccaaaaatatggaggtggaagaattatctatcttctgaaactagatttgtgagtcactgagataagatctgtgaagttcactcttttattttattttttatttttttgagacagagtcttgctctgttacccacgctgtagtacagtggcgccatctcggctcactgcaacctccgcctcccggggtcaagcgattctcctgcctcagtttcctgagtagctgggattgcaggcgcccaccaccatgtctggctaattttagtatttttggtggagatgggattcccatgttggccaggctggtctcaagctcctgacctcaagtgatctgcctgtgaatgcctcttccaaagtgctgggattacaagtgtgagctaccatgccccaccagttcattcttgaaggaagaaagctcttttcaaagcagaaaatttgtatccagagcttttagattcaaggtctccttaggacattcttttagaaagaaatatgcatttatatcataggcatagatcaacacttcctcaaaagcaatgtagacaacattagtatctcatgtcacatttcctcaccctgcttttatgacaagttaggatagagaaaccatcagttccttaaagggatttggatatatttttttaggaaagcagaaaggataagaaatttagaggagtaaggatgagtggcacaaggaaaaaaaaaaaaaaaaaa

SEQ ID NO: 25753 - DNA, 1322 bp, Homo Sapiens
gcggactccgcggacaaggccaggcctagccttgagctccgtcgggcagggccgccgggattggtgtccggcagagcgtgagcccagcgggctggagtcggcgagcgggagtgaaagaagaaaagctagagagcgaaggcaaagcccgaggagagagggccacggtcggcggaggaatctgactgcacggttgcgtgcgctcactgccggagggctccctcagccgggcggctccgctagtggctaaaggcaaagcattccggggcgcggcgcatgaagttgagcttcgtccctgctagccgccgctttctccccaaaaatacatcctagccttaatgtttatgcctccattgccccagttcttatctgttttgctcaatgtctcatagctacaagaaggcaatttctgacgaagccctccgtcccttccaaatggattattttggcgggcttccacccggacagtatgccacccgaatgactggacaagtgcacgggagcggctgtcatttgcggagtgcgccttgcgatctaggcgcctcacagcgcaaattatccagtaatttctctgaaatcgatgctggtttgttttcccaaggcaaatcagcagcttatacagacattggggccacaaagccggtggaacaacgggagacggcttcctgagtgtcaggtcctccaagatgagcttaaacttcgggtggtgggcaggctcggtaggcgggaaaggcccgtgtccagatgaatgcagtccatgtttatattgatgaaagacacgtataccatttggtccagctcaaccattcttaacaagtgctggctgtgagcactggtgtgtgtgtgcctgcgtgcaaccagcaatgtaagtgatgaccagctgcatgatgccttaatttgagtggacaaagtcggtcaagaaccactttcaggcttctgggtctccaagtctttgtctccctgtatccaaacgaggcattccaagtttgacagcatggaacattgcatgtccgaaataccaaccgtgaaactgggtaaaaagcttcaggaggtgatattgatgtgtatagtttaggaaataaaacccaatacttacttcaaagaacgtaatttgtggctttttagagagaaggatactttgacagttttcatttgtcgtctacatgtatatggtacgtttcattctgccttttaattaatttggtattttactatgaaaactactttgtattaataaaataatgtatttccaatgttataagttgtgttataacagtttcaaaagccaaataaacaagatgcattttgaaaaaaaaaaaaaaaaa

SEQ ID NO: 25754 - DNA, 2500 bp, Homo Sapiens
gctgcagttggaacgatggcggcggcagctgccgccgggcctagcccggggtctggacctggggactccccagaagggcccgagggggaggctccggagcgtcggcggaaggcgcacgggatgctgaagctttactacggcctctcggaaggggaggcggcgggacgccccgcggggcccgaccccctggacccgactgatctgaacggggcgcacttcgacccggaagtttacctagacaagctgcgtagagagtgccctctggcccagttgatggacagtgagacggacatggtgcggcagatccgggctctagacagcgacatgcagaccctggtctatgagaactacaacaagttcatctcagccacagacaccatccggaagatgaagaacgatttccggaagatggaggatgagatggaccggctggccaccaacatggcagtgatcaccgacttcagcgctcgcatcagcgccacgctgcaggaccgccacgagcgcatcaccaagctggcaggggtccacgcgctgctgcggaagctgcagttcctctttgagctgccctcgcgcctcaccaagtgcgtggaactgggcgcctatgggcaggcggtgcgctaccagggccgcgcgcaggccgtgctgcagcagtaccaacacctgccctcgttccgcgccatccaggacgactgccaggtcatcacggcccgcctggcccagcagctgcggcagcgctttagggagggcggctcaggcgccccggagcaggcagagtgcgtggagctgctgctggccctgggcgagcctgcggaggagctgtgcgaggagttcctggcgcacgcccgcggccggctggagaaggagctgagaaacctggaggccgagctggggccctcacctccggctcccgacgtgttagagttcaccgaccatggaggcagtggcttcgtgggcggcctctgccaggtggcggcggcctaccaggagctgtttgcggcccagggcccagcaggtgccgagaagctggcggccttcgcccggcagctgggcagccgctattttgcgctggtggagcggcggctggcgcaggagcagggtggtggtgacaactcactgctggtgcgggcgctggaccgcttccaccggcgcttgcgggctcccggggccctgctggccgctgccgggctcgcagacgctgccacggagatcgtggaacgagtggcccgcgagcgcctgggccaccacctgcagggtctccgggcggccttcctgggctgcctgacagacgtccgccaggcgctggcagcacctcgcgtggctgggaaggagggccctggcctggccgagttgctggccaatgtggccagctccatcctgagccacattaaggcctctctggcagcagtgcaccttttcaccgccaaagaggtgtccttctccaacaagccctacttccggggtgagttctgcagtcagggtgtccgtgagggcctcatcgtgggcttcgtccactctatgtgccagacggctcagagcttctgcgacagccctggggagaaggggggtgccacaccacctgccctgctcctgctgctctcccgcctctgcctggactacgagacggccaccatctcctacatcctcactctcactgatgaacagtttctggtgcaggatcagttcccagtgacgcccgtgagcacgctgtgtgcagaggccagggaaacggcgcggcggctgctgacccactacgtgaaggtgcagggcctggtcatatcacagatgctgcgcaagagcgtggagactcgcgactggctcagcactctggagccccggaatgtgcgggccgtcatgaagcgggtggtggaggataccaccgccatcgacgtgcaggtggggctcctgtacgaagagggtgttcgcaaggcccagagcagcgactccagcaagaggactttctccgtgtacagcagctctcggcagcagggccgctacgcccccagctatacccccagtgccccgatggacaccaacctcttgagcaatatccagaagctattctctgaacgtattgatgtgttcagccctgtggagttcaacaaggtgtcggtgctgaccggcatcatcaagatcagcctgaagacgctgctggagtgtgtgcggctgcgcacctttgggcgcttcgggctgcagcaggtgcaagtggactgccactttctgcagctctacctgtggcgttttgtggccgacgaagaactcgtgcacttgctgctggacgaagtggtggcctctgctgccctgcgctgcccagaccctgtgcccatggagcccagtgtggttgaggtcatctgcgagcgcggctaggcgcagccgctgccatgcaccggtctgtccctgcaccccatggcacccaggatctggtctcggtggtccttccccgcaggcaggtgtcaggaccggcctaataaacatgtgtggcctcctcaaaaaaaaaaaaaaa

SEQ ID NO: 25755 - DNA, 1741 bp, Homo Sapiens
gcgggagccatctcctttggcatcgccccttgtctcgggccggtggggagtgggcgagggttatagtcactctcccgactcagggactgcccatcccggcacccagtcctcatcccatgggacgtgggggcagccagggagagggcaaaggcccccgttcccgtccaggtccatccgtccatggagggaaacatcgtggagatggaggtgcttctgtggggcgagaatgtggcctagaactacacccagagtgggggggttggggcagagagacatggtcatggactgggtcgtggctcaggtcagaatctgggctgctgatgggatgcaggtggcagcatgggcacctgcaagaccctcggggaggggtactgagtggggcccgaccaaaggtttgggacactctaagactgaggcccccaccctacagtcactcacttccctcaggacacagggctgcaggtgtgagctgagctgccgatggcttggggactgcaagagaggcctgggccaccggctgctgtgggtggctgctctctctggttcaggaagtgcctaggctggccaagtctggggaaagtgggctggcccggggctgctcctgagttctgccaggcagcaccgcacctgggatgggcaccaaccatgtccgtctcctcccttcctgcagtccagggccaaggcttgtgttcaatcgtgtgaatggccggcgggccccctccacgtccccatccttcgaggggacccaggagacctacacagtggcccacgaggagaatgtccgctttgtgtccgaaggtagcgagcggggccagagggtgcggcataggctgctgggtcgcaaaaccatggacccgggatggccccacttcaagctgacccacagccgctgcatggctgtgcttttccttggcactctgcccttgtgtcctgtgaccagccctgtgtggggctggagtccagggtgaccatcaggccctgggtgggcgatggggtgcctgggacctggctcagcccgactgccctcctcccacagcctggcagcaggtgcaacagcagctggatggtggcccagccggtgagggcgggccaaggcctgtgcagtacgtggagaggacccccaatccccggctgcagagtgagccccccaaccctgtccccccaggagagaccccccagcccctctgatcctgacccaggccctgccaggttcccaccccaggggatgagggaggggactcttgtgcagaaaccccttcttcccagcgcctgccgcactcggagtccgggtgagcggcttgtggttagctccaggggagacttgccggctggcctgggaggcagcatcactgcccagccttctctgcccacagactttgtgcccattgacctagacgagtggtgggcgcagcagttcctggcgagaatcaccagctgttcctagtggctgctgggagggggcgctgctacacggccgacctgtcgccaggagagaagcatggcgccctgcccacccactgcgcctggctgggtgccggccacacctgaagtgccagcatttggacttttgcacctttttttcccttggcccggctgtcccaaccaagctgccatggccaagggccgaacccgtctgacctcagccctgctcactgtgcccagggaccagcgaccagcccctggggctggcagggaggagctccaggctaataaagtggagaaactgtcaaaaaaaaaaaaa

SEQ ID NO: 25756 - DNA, 2038 bp, Homo Sapiens
ctcgccgccgccgccgccgccagcatctgggaccggccgattctgcacctccgtccggcgctgccctttgattcggatttccatcttgcattctccggctgatcgcgggacctggctcgtgcagaggaggggggccgatcgctatggagtatttcatggtgcccactcagaaggtgccctctttgcaacatttcaggaaaacagagaaagaagtgataggagggctctgtagccttgccaacattccactaacccccgagactcagcgggaccaggagcggcggattcggcgggagatcgccaacagcaacgagcggagacgcatgcagagcatcaacgcgggattccagtccctcaagaccctcatcccccacacagacggagagaagctcagcaaggcagccattctccagcagacagccgagtacatcttctccctggagcaggagaagaccaggctcttgcagcagaacacacagctcaagcgcttcatccaggagctgagcggctcgtcccccaagcgacggcgggcagaggacaaggacgaaggcataggctccccggacatctgggaggacgagaaggcggaggacctgcggcgggagatgattgagctgcggcagcagctggacaaggagcgctcggtgcgcatgatgctggaggagcaggtgcgctcgctggaggcccacatgtacccggaaaagctcaaggtgattgcgcagcaggtgcagctgcagcagcagcaggaacaggtgaggctgctgcaccaggagaagctggagcgggaacagcagcagctgcggacccagcttctgccccctccggcccccacccaccaccccacggtgatcgtgccagcaccgcctcctcctccctcccaccacatcaatgtcgtcaccatgggcccctcctcggtcatcaactctgtttccacatcccggcaaaatctggacaccatcgtgcaggcaatccagcacatcgagggcacccaggaaaagcaggagctggaggaggagcagcggcgagctgtcatcgtgaagcctgtccgcagctgcccggaggcccccacctctgacaccgcctccgactccgaggcctcagacagtgacgccatggaccagagccgggaggagccgtcgggggacggggagcttccctgactacccccccagccctcctctcccttctgggggctggagggagccggggcagccacagggagagacatgggcgaatgagtgagaaatttttacaaaattacgatgtcatttgggtctcttttatgacctctttttcaatactgtaaatcgacctttgaacgaagccactcaacccgaggtcccggggctggggtgtcgcagagcgtgtgggagcatcggcaccccagggcggggcctcggccccgggggctggaggaagctgacacggagatgcctggcctctctctgccaaaaagcattttttcctttaaatatgttttttaagaacagggaaaattaaacaaaaccccaggttatttcttccctgcccagagccagcctgggattgtcagccttcaatcccctttccttcctctttttgggttttcttctttctcctttaagcacttacatggttgggggtaagactaggctggggcattctgggggcccggaggtctccgttgcttcttggttggggtttgctgctgctgtgcccccctcccccttccccatctcggcactagaattcgccactctcccaccccccagcccccacctctgcctccaggtctcatcttccaccccaaaaatgtctgtctctctctttttgttttgtttgttgttggttttttatttctttttggtttgctttctgtttttgttttgtttttcttttttttctttctttttttttttttttacaattttgaggtcttcgtgttcaaggagaagctattatattttgttaagaaagtggggagaaaaaaaccaagaggccaccgtgcctttgtaaagaaacaaaataaagtttgtactttgttaaaaaaaaaaaaaaa

SEQ ID NO: 25757 - DNA, 3270 bp, Homo Sapiens
gttttgtttaaactgtccgagttactgatgtcattttgtttttgttttatgtaggtagcttttaagtagaaaacactaacagtgtagtgcccatcatagcaaatgcttcagaaacacctcaataaaagagaaaacttggcttgtgtgatggtgcagtcattttactggaccaacccacccaccttgactataccaaggcatcatctatccacagttctagcctaacttcatgctgatttctctgcctcttgatttttctctgtgtgttccaaataatcttaagctgagttgtggcattttccatgcaacctccttctgccagcagctcacactgcttgaagtcatatgaaccactgaggcacatcatggaattgatgtgagcattaagacgttctcccacacagcccttccctgaggcagcaggagctggtgtgtactggagacactgttgaacttgatcaagacccagaccaccccaggtctccttcgtgggatgtcatgacgtttgacatacctttggaacgagcctcctccttggaagatggaagaccgtgttcgtggccgacctggcctctcctggcctgtttcttaagatgcggagtcacatttcaatggtacgaaaagtggcttcgtaaaatagaagagcagtcactgtggaactaccaaatggcgagatgctcggtgcacattggggtgctttgggataaaagatttatgagccaactattctctggcaccagattctaggccagtttgttccactgaagcttttcccacagcagtccacctctgcaggctggcagccgaatggcttgccagtggctctgtggcaagatcacactgagatcgatgggtgagaaggctaggatgcttgtctagtgttcttagctgtcacgttggctccttccagggtggccagacggtgttggccactcccttctaaaacacaggcgccctcctggtgacagtgacccgccgtggtatgccttggcccattccagcagtcccagttatgcatttcaagtttggggtttgttcttttcgttaatgttcctctgtgttgtcagctgtcttcatttcctgggctaagcagcattgggagatgtggaccagagatccactccttaagaaccagtggcgaaagacactttctttcttcactctgaagtagctggtggtacaaatgagaacttcaagagaggatgttatttagactgaacctctgttgccagagatgctgaagatacagaccttggacaggtcagagggtttcatttttggccttcatcttagatgactggttgcgtcatttggagaagtgagtgctccttgatggtggaatgaccgggtggtgggtacagaaccattgtcacagggatcctggcacagagaagagttacgagcagcagggtgcagggcttggaaggaatgtgggcaaggttttgaacttgattgttcttgaagctatcagaccacatcgaggctcagcagtcatccgtgggcatttggtttcaacaaagaaacctaacatcctactctggaaactgatctcggagttaaggcgaattgttcaagaacacaaactacatcgcactcgtcagttgtcagttctggggcatgactttagcgttttgtttctgcgagaacataacgatcactcatttttatgtcccacgtgtgtgtgtccgcatctttctggtcaacattgttttaactagtcactcattagcgttttcaatagggctcttaagtccagtagattacgggtagtcagttgacgaagatctggtttacaagaactaattaaatgtttcattgcatttttgtaagaacagaataattttataaaatgtttgtagtttataattgccgaaaataatttaaagacactttttttttctctgtgtgtgcaaatgtgtgtttgtgatccattttttttttttttttaggacacctgtttactagctagctttacaatatgccaaaaaaggatttctccctgaccccatccgtggttcaccctcttttccccccatgctttttgccctagtttataacaaaggaatgatgatgatttaaaaagtagttctgtatcttcagtatcttggtcttccagaaccctctggttgggaaggggatcattttttactggtcatttccctttggagtgtagctactttaacagatggaaagaacctcattggccatggaaacagccgaggtgttggagcccagcagtgcatggcaccgttcggcatctggcttgattggtctggctgccgtcattgtcagcacagtgccatggacatgggaagacttgactgcacagccaatggttttcatgatgattacagcatacacagtgatcacataaacgatgacagctatggggcacacaggccatttgcttacatgcctcgtatcatgattgattactgctttgttagaacacagaagagaccctattttatttaaggcagaaccccgaagatacgtatttccaatacagaaaagaatttttaataaaaactataacatacacaaaaattggttttaaagttgactccacttcctctaactccagtggattgttggccatgtctccccaactccacaatatctctatcatgggaaacacctggggtttttgcgctacataggagaaagatctggaaactatttgggttttgttttcaacttttcatttggatgtttggcgttgcacacacacatccaccggtggaagagacgcccggtgaaaacacctgtctgctttctaagccagtgaggttgaggtgagaggtttgccagagtttgtctacctctgggtatccctttgtctgggataaaaaaaatcaaaccagaaggcgggatggaatggatgcaccgcaaataatgcattttctgagttttcttgttaaaaaaaaattttttttaagtaagaaaaaaaaaggtaataacatggccaatttgttacataaaatgactttctgtgtataaattattcctaaaaaatcctgtttatataaaaaatcagtagatgaaaaaaatttcaaaatgtttttgtatattctgttgtaagaatttattcctgttattgcgatatactctggattctttacataatggaaaaaagaaactgtctattttgaatggctgaagctaaggcaacgttagtttctcttactctgcttttttctagtaaagtactacatggtttaagttaaataaaataattctgtatgcaaaaaaaaaaaaaaaaaaaaaaaa

SEQ ID NO: 25758 - DNA, 1437 bp, Homo Sapiens
gtaactgtccggccgcggcgctggcttaagccatggctgagggtagccggattcctcaggcccgggcgctcctacagcagtgcctgcacgcccggctgcaaattcgcccagccgatggggacgtcgcggcccagtgggtggaggtccaaagaggactggtgatctacgtgtgctttttcaagggagctgataaagaacttcttcccaaaatggttaatacactgttaaatgtgaaattaagtgagacagaaaatggcaagcatgtctctatattggatctacctggcaacattcttattatccctcaagctacccttggaggaagactaaaaggaagaaacatgcaatatcactctaactctggaaaagaagaagggtttgaactttactctcaatttgtgactctatgtgaaaaagaagtagctgctaatagcaagtgtgctgaagctagggttgtagtggaacatggcacttatgggaacaggcaggtgttaaagctggacaccaacggaccattcacacacttaattgagttttgaaaatgaaaaactagtttctatagctgttttctggtatgaaatgatctaaagtataattagattttcttccccttaatcttgaatatactaatcttcagcatttttagacaggaaaatcttgggtttcatatataactctgcacctgctaattggatgactttgccaagtcacctaaactctggatctcagtcaccttttgtcctacattcctctacccttctacttgaaaatttgaaatatgctgtctattcacttcatagtcattaaggaaatgttcttaattgtttttttgtttttgttttttttttgagatggagtcttgctctgtcgccagactggagtgcagtggcgcaatctcggctcactgcaacctccacctcctggattcaagcgattctcctgcctcagcctcccaagtagctgggactacaggcatgagccaccgtgcccggcctcttagttgttttttaaaaattatgtacattttaagtattttgcaataaagaaattcatgcaaacaagaaaaacacatttcttataccaaaatttgtgtagcatgtaataaaaataactatttgtattaaaattaggtaaacttcagcactttgggaggccgaggtgggaggatcacttgagcccaggagtttgcgaccagcctgggcagaatagcaagacccagtctctaacatatacatatacatatagatatatatgtaatatagaagggttattgtgtgttatattactttccagggacattcaaatgttttacattactttaagaatctttacttgatataagaacaaagtataagggtttaaaagttgtttttattaaacatactatataaatgggttaaaaaaaaaaaaaaaaaaaaaaaaaaaaaaaaaaaaaaa

SEQ ID NO: 25759 - DNA, 2024 bp, Homo Sapiens
ggaagacatcaggatgtaccatctgcccttctgtcggaccccagggtacgtcccatgagcgcggccgagctgcgtcgagggcagcagagcgtgctgcactgctcagggacccggactctgcagtttctcctgcactgttttcacctttggccagacgggctctgggaagacctacaccctgactggaccccctccccagggggagggggtgcctgtaccccccagcctggctggcatcatgcagaggaccttcgcctggctgttggaccgcgtgcagcacctgggtgcccctgtcacccttcgcgcctcttatctggagatctacaatgagcaggttcgggacttgctgagcctggggtctccccggcccctccctgttcgctggaacaagactcggggcttctatgtggagcagctgcgggtggtggaatttgggagtctggaggccctgatggaacttttgcaaacgggtctcagccgtcgaaggaactcagcccacaccctgaaccaggcctccagccgaagccatgccctgctcaccctttacatcagccgtcaaactgcccagcagatgccttctgtggaccctggggagccccctgttggtgggaagctgtgctttgtggacctggcaggcagtgagaaggtagcagccacgggatcccgtggggagctgatgcttgaggctaacagcatcaaccgaagcctgctggccctgggtcactgcatctccctgctgctggacccacagcggaagcagagccacatccctttccgggacagcaagctcaccaagttgctggcagactcactgggagggcgcggggtcaccctcatggtggcctgcgtgtccccctcagcccagtgccttcctgagactctcagcaccctgcgatatgcaagccgagctcagcgggtcaccacccgaccacaggcccccaagtctcctgtggcaaagcagccccagcgtttggagacagagatgctgcagctccaggaggagaaccgtcgcctgcagttccagctggaccaaatggactgcaaggcctcagggctcagtggagcccgggtggcctgggcccagcggaacctgtacgggatgctacaggagttcatgctagagaatgagaggctcaggaaagaaaagagccagctgcagaatagccgagacctggcccagaatgagcagcgcatcctggcccagcaggtccatgcactagagaggcgtctcctctctgcctgctaccatcaccagcagggtcctggcctgaccccaccgtgtccctgcttgatggccccagctcccccttgccatgcactgccacccctctactcctgcccctgctgccacatctgcccactgtgtcgagtgcccctggcccactgggcctgcctgccaggggagcaccacctgccccaggtgttggaccctgaggcctcaggtggcaggcccccatctgcccggcccccaccctgggcacccccatgcagccctggctctgccaagtgcccaagagagaggagtcacagtgactggactcagacccgagtcctggcagagatgttgacggaggaggaggtggtaccttctgcacctcccctgcctgtgaggcccccgaagacatcaccagggctcagaggtggggccggggttccaaacctggcccagagactggaggccctcagagaccagattggcagctccctgcgacgtggccgcagccagccaccctgcagtgagggcgcacggagcccaggccaagtcctccctccccattgaaggccaagtgggaacccaggagactgctgtgtgacctcagactgggctccacactcttgggcttcagtctgcccatctgctgaatggagacagcagctgctactccacctgcagctgggctaggggcggggactgggggtgctatttaggggaacaaggggattcaggagaaaccaggcagcaggggatgaaatacatgaataaagagaggcatcagctccaaaaaaaaaaaaaaaaaaaaaaa

SEQ ID NO: 25760 - DNA, 3717 bp, Homo Sapiens
caacgacttcataaggcggcgtttctgggcgcagccgtgtcgctcctggacagttgctgtgcgacttggacagtagaggagcgcctcccaagttttcatccaactgccaaccccaaagcttccacccttctcccctcagagaggacgtttgatgccgggccccttgagaggctcattgacaagcctgcccctctgggtccccctgagcagagcctgctgacccaattgcccacctttgcggctttgatgcctagccatgtctgcctcatcctcaggcggctcccccaggtttccatcgtgtgggaagaacggagtaacgagtctcacgcagaaaaaggtcttgagagcaccttgtggcgcacccagtgtaactgtgacgttgagatcactgtgtagaaggatccgcctgctttccgctgtgcttcactaaatccaaggaggagctgtgcattccagcaggtttagaggagatccagccctaaggaccctggggccggcgtctgggatctgttctggaacggaagccaaccatgaaggaccgctcttcaactccccccttacatgttcacgtggatgagaacacccctgtccacgtccacataaaaaaactcccgaaaccatcagcgaccagcagccagaaatctcacaagcgaggaatgaaaggggacactgtgaatgtgcggcggagtgtccgggtgaaaaccaagaatccacctcattgcctggagatcacgccaccatcttcagaaaagctggtctcagtgatgcggttaagtgacctctctacagaagatgatgactcaggtcactgtaaaatgaaccgttatgataagaagattgatagtctaatgaatgcggttggttgtctgaagtctgaggtcaagatgcaaaaaggtgagcgccagatggccaaaaggttcctggaggaacggaaggaagagctggaggaggtggcccacgaactggctgagactgagcacgagaacacggtgttgaggcacaacatcgagcgcatgaaggaggagaaggacttcaccatacttcagaagaaacacctacaacaggagaaggagtgcctcatgtccaagctggtggaggcggaaatggatggggctgcggctgccaagcaggtcatggccttgaaggataccatcgggaagctgaaaacggagaaacaaatgacctgcacggacatcaacaccctgacaaggcagaaggaacttctcctgcagaagctgagcacatttgaggagaccaaccgcaccctccgagacctcctgagggaacagcactgcaaagaggattctgaaagactaatggagcaacaaggagcactgctgaaacggctggcggaggccgactcagagaaagcgcgcctgctgttactgctgcaagacaaggacaaggaggtggaagagctccttcaggaaatacaatgtgagaaggctcaagcaaagacagcctctgagctttctaaatccatggagtccatgcgtgggcatttgcaggcacagcttcggtccaaagaggctgagaacagtcgcctgtgcatgcagattaagaatctggagcgcagcgggaatcagcataaggcagaagtggaggccatcatggagcagctgaaggagttgaagcagaagggagaccgagacaaagagagcttgaagaaggccatccgagcccagaaggagcgagccgagaagagcgaggagtatgctgagcagctacacgtgcaactcgctgacaaggatctttatgtcgctgaagctttatccactctggaatcctggaggagccgctacaaccaagttgtaaaagaaaagggagaccttgagctggaaattattgtcctgaatgaccgggtaacagatcttgtaaaccaacaacaaaccctggaggagaagatgcgggaagaccgggatagcctggtggagagactacaccgtcagactgctgagtattccgcattcaagctggagaatgagaggctgaaggccagctttgctccaatggaggacaaactcaaccaggcacacctcgaggtccagcagctgaaggcctcagtgaagaactatgaggggatgattgacaactataagagtcaggtgatgaagaccagattggaggctgatgaagtagctgcccagctagaacgctgtgacaaagagaacaagatccttaaagatgagatgaacaaagagattgaggcggcacgaaggcagttccagtctcagctggctgacctgcagcagctccctgacatcctgaagatcacggaggcgaagctggctgagtgccaagaccaactgcagggctatgagcggaagaacatcgacctcacagccatcatatcagacctgcgcagccggatcgaacaccagggggacaagctggagatggcgagagagaaacatcaggcttcccagaaggaaaataaacagctgagtctgaaggtggatgaactggagaggaaactggaggcgaccagtgcccagaatatcgagttcctacaggtgattgccaagagggaggaggcaatccaccagtcccagctgcggctggaggagaaaacacgggaatgtgggaccctggcaaggcagttggagagtgccattgaagatgcgaggaggcaggtggaacaaaccaaggagcacgcactctccaaggagcgagcagcccagaacaaaatcctggaccttgagacccagctgagcagaaccaaaacggaattgagccagctgcggcggagccgtgatgatgcggaccgccgctaccagagccggctgcaagacctgaaagatcgcctggagcagtccgagagcaccaaccgcagcatgcagaactacgtccagttcctcaaatcatcatacgccaacgtgtttggggatggtccctattccaccttcctgactagctctcccatccgctcccgatctcctcctgcctgaggccacttatcagggcctggagccctgatggaagccataggaactccagagttgccaagccatagctgagaagcctggtggttttcctctcccagtgaaaaaatgggttcagggtcttgtccttagctactagctctagaaaagtcccaaaagcagcagaaggtgaagcaggaagcacttggttttctccttcctgatatagtcacctgttggaagtgttaaaatttcctcgacaggccttaaatttactactacattagggtaccacattttaacttaccatgactttgctccttcctttcctgagaaaatatttccactggattttttccaccagtccccttacagccctcattgttttaggaatctctctcaggtttttttctgacctaaaccagcaggaagtcgtcctgggctgtaagcaccatcacttgcttttttttttttctgatttcacaagtgtggtgttttcccaaggctcccttcccaagctcagtgcaaacctctcactcccaagtttctttgaggccacttgcccccaagcacttcacaatagaccctcgagggcttgtgtccatttggccttttacaagtgtaatgccaatttcattgatttttgtttcttttggcctgatttgtatctctggaatgcatttattcttgaaatatttgtgtgattttacaaaaagcttttgtaatcagttaaaaaaaaaaaaaaaaaaaaaaaaaaaaaaaaaaaaaaaaaaaaaaaaaaaaaaaaaaaaaaaaa

SEQ ID NO: 25761 - DNA, 3161 bp, Homo Sapiens
gcggcggccagagctactacgccggccgatggcgaggagcccgccccggaggctgaggctctggccgcagcccgggagcggagcagccgcttcttgagcggcctggagctggtgaagcagggtgccgaggcgcgcgtgttccgtggccgcttccagggccgcgcggcggtgatcaagcaccgcttccccaagggctaccggcacccggcgctggaggcgcggcttggcagacggcggacggtgcaggaggcccgggcgctcctccgctgtcgcctcgctggaatatctgccccagttgtcttttttgtggactatgcttccaactgcttatatatggaagaaattgaaggctcagtgactgttcgagattatattcagtccactatggagactgaaaaaactccccagggtctctccaacttagccaagacaattgggcaggttttggctcgaatgcacgatgaagacctcattcatggtgatctcaccacctccaacatgctcctgaaaccccccctggaacagctgaacattgtgctcatagactttgggctgagtttcatttcagcacttccagaggataagggagtagacctctatgtcctggagaaggccttcctcagtacccatcccaacactgaaactgtgtttgaagcctttctgaagagctactccacctcctccaaaaaggccaggccagtgctaaaaaaattagatgaagtgcgcctgagaggaagaaagaggtccatggttgggtagaagaatgtgtatgacaaccacacacagtgaagctcttttttcaaagtaaatttgaagaaatgctacaagtatgagatgagatctaagtaaaggtgttaagatatttttaagtggtatgtgatcgtgtcattatcatctgcacttcactcaagagcttactatgtgtctaagtcatgttctaggcagaattgggtatttaaagtaaattgaggacaggcttctcccagattgtgacatgtatatctcagatacatgggtgtggcattgaaccacataatgagaacattattctctttttagtccttgtgagacaaggatgaagtctcagttgctgatactcgctgagcttactggccctctaacccagtgtttttttttgttgttgttgtgtacatgttatatttattttgaaaccagtttaatgggatacaaccagcattttaaaaaatgaaatagaatacagcatggaaaatatcagtgtattgttttatgaaactttcacgtgtatatatagaccaaggatatgtgctgagttttgatgtcaaatatatttctctttcagggtcatgatcaaaaaatgaaaagtctgcttaactccaatttctcttttaaaaaagcagacttacagctttcaggcaactgaaattcatgttaacatgtttttatttttattgctttgtatttttgtggttaccttctaagacaagtgattgatctaaagttccttttaagtttataccgctaaacaaactgagttgatttctatcacaggcagtaagtaggtagagcaaaaatggtgaagtgacttgtgaagactgaagtttgatgaagtctggtttaaggcacaggtaaactgagtgtggatgcaaaagtaccaggagctagcttttaaccttgcccagcctcagtttcttttcttagaagaagctatgtttgggtgggaagggaagagagggataagaaaatacctttcttccttgtaaactccaatcaacaaacatattttgagtgccttttgtgttccttggcaccctgttgggtattgggtacttggcaccctgttgggtattgggtacaatggtgagccagacagacacagcgcctgtccttttgtaagaatatttatttttataaaaaagtataaagtatacagtgggatgttttgatatacattatgaaatgattgctacagctgagctaattaacacccatcacctcacatagttactgtcttgtttcttaatatggacatttgcagctatgaatttccctctgcacactgttgtcatcacacactctcagttttggtattttgtgtttttgttttcattcatctcaaagtattttctaatttcccttgtgatttcttctttgaccccttgattgtttagaaatctgttaatttccacacatttgtaaatgttccaatttttcttttgttattgccagcttcattccattgtgttcagagatgatacagtcagtgcctgttcttatgaagcaaacattctataatagtaggaccagtaccctgtctgtttcattcaccacagtcagcatgccccaagtgcccagcatggggcggatggccaggaatgagtgaaaacttcccttcctgggtagttgtgactagtagagaggaaaaataatataattgcctgcttactgcatgccaggcattgggctgggaatttttatattggatctaaaataactcttaagttaggcattatccccattttatagatggagaaactggccccaaaaggtgggaacttgtccaagacgtcacaggtagcaagaggtacttttacctggctccaaatctgtgttctttccactgacaaatgagatatgggatatggtgcatctttacagtactataataagtattggcgtataacattattttcaaggaactccaagggccacaggagctgacaggtttttcaattaatattcccaacatgaatgagatgcctcattcctcagtttcctcacgtgtactataaggctagtacctgctttgttggggtatggttggctcgtgtgcattaagtcaacaaatccctagttgatagggtttggctgtgtccccatccaaatctcatcttgaattgttcccgtaatccccacgtgacatgggagggacccagtgggaggtaatttaatcctcggggcggctacctccgtgctgttctcgtgatagcgagtgagttctcacgagatctgatggttttataaggggcttttccctcttgttcggcacttcctgctgccacgtggagaagggtgtgtttgtttccccatctgccatgattataagttttctgaggcatccccagccatgctgaactgtgagttattaaacttttcctttataaattaaaaaaaaaaaaaaa

SEQ ID NO: 25762 - DNA, 3289 bp, Homo Sapiens
ggctgggtcaaggccggaattcccgttccggaaggccggcggagctgaaggtcccaaaagacaggccacagggctcctcccgaagtaaaaccccaacgcccagtgtagagacgctcccgcacttgagacccttccctgccagcagccaccctcggacgcccacggaccctggcctggacagtgccctggagcccagtggtgacccacatgggaagtgtctcttcgacagttacaggctccatgatgaaagcaatcagcggacacttactctgtcctcttccaaagatgccaacattctttcggagcagatgagcctcaaagaagttctggatgcgagtgtgaaggaggtggggtccagctcctcagatgtctcgggaaaagagagcgtccccgtggaggagcctctgaggagcagggccagcctcattgaagtggacctctccgacctgaaggcccccgacgaggatggggagctggtaagcctcgatggctcggcggaccttgtcagcgaaggcgaccagaagccgggggtcggcttcttcttcaaggatgaacagaaagcggaagatgagctcgccaagaagcgggcggccttcctcctgaagcagcagcgcaaggccgaggaggcccgcgtgcgcaagcagcagctggaagcggaggtggagctcaagcgtgacgaagcccggcgcaaagctgaggaagaccgggtgcggaaggaggaggagaaggcgcggcgcgagctcatcaagcaggagtacctgcggaggaagcagcagcagatcctagaggagcaggggctcggcaagcccaagtcaaagccgaagaagccgcggccgaagtcggtgcaccgggaagagtcgtgcagcgactccggcaccaagtgctcctccacccctgataacttgagccggactcagtcaggctccagcctgtccttggcctctgcggcgacgacagaacccgagagcgttcattccgggggcacaccctctcagcgagtggaatcgatggaagccctgcccatactgagccgtaacccaagcaggagcacagaccgagactgggagaccgcgtcggcggcatcttccctggcctcagtggccgagtacacaggtcccaagctctttaaggagcccagtagtaaatcaaacaagccgattattcacaatgccatatcccattgctgcctggctggaaaagtgaacgaaccccacaagaattccatattggaggagctggagaagtgtgatgccaatcactacatcatactgtttcgtgatgctggctgccagttcagggcgctttactgctactatcctgatactgaggaaatctacaaactcactggcacggggccaaagaacatcaccaagaaaatgatcgacaaactgtataaatacagctcagaccgaaaacagtttaacttgatcccagccaaaaccatgtctgtcagtgtggacgcactcacaatccacaaccacctgtggcagcccaagcggcctgcagtgccaaagaaggcccagactcgtaaatgaccccggtgcagctggcgtccaaagggtgacccagactcgtaaatgatgcccttgtggctggcatccagagggtgccacggggtccttatttattgttttcatctatttgggtacgaagtgtgcaaagtcacagaccttttgcaaagaggtttctagacagcagaagaaaacccctctctcagcgctcatctcacgcagaggatgccaggcagggtgaggatgggggagtagatgccgcttttgcagtggctcgcactgctgtggccactgctgaccactgaggctcccagcggagggtgttcacagccaggtcccgggccacggagctcccttacttgaagttctccttcagcatagattagacgtgatccactttgctttcttgcttctcacctcgcccccttgcacattgcctgacaccctcatattggccagctgtaatctcgtgactatgggactgaggctcaatcttggcttggggtgtttgaatgtctatagcaaaggaattcataatgggaaatctttttcatttgagaaattgtatgatatttattggttgtgtctactgccaacatttatatccaattctaagatttctgaaaaaaaattcttatcccttgctgctcagaaaaagtttacggaaaacaccagttcactaaaagcaccgaaatctgcaaagcctgtcttccgctagaacaacgtctacaaatgtgaagatgatgacttctggcacgcggtcatgagggtggggaatggcactaggagctgatgtttgcctcatttaaagtaggcaagccgagccaactgcagccatcattcattaagttttgggtagtgctctaatggtttgttcactttaataaagacagattttggtaaagtagaatatttttcattctgagcatgtttgtcccaaaaggtgatgcacttaagctgacagtcccttcagtggttttgttaggtcacggcttgtcctgtctggattctgcatctggaagcgctgcatgctctcagaggagcgtgccgtttcccctgtagatggatacttttgttttgttgcctatttaaaaacaattaagtggttatttgcagttatttcagaactccaagtaagtggatggctttgggttctttctgccttggtcccaatggtgttgatgcttctgtggagcgcggacattcccaggagcaggtgcgtgccagccatggctgccagacactgctgcaactgaccagctgccggaagattctggagccactaacattagttttgcacatattttcttgggagtgttacttgaatctatctcaaactgcagaaaaaatcaaaagatcaataattgggagaaaaagagacaaatttaactgttacataattttagatagacaaaaaacatgagtgagtcgtgtacataaggagggaacatggtacagaaggctagaaggaattataggtcttattcccctttcctcagtcctttgaagagaagtacagtctcttgcgattttgtatatatcgtgttcgacacagccgctctctgtcctgtaaatagggaactaaaggctgtatgatttctcaagtgctgagttacacagtcctgagtgagctttctgttaccatactttcacacgtgggctttatttctcactgtatgtttgatatgatattactgtatttattttaagaaagcactaagatgtaataaagtgatgaactaatttgctttacattgaatcgtaaaaaaaaaaaaaaa

SEQ ID NO: 25763 - DNA, 2682 bp, Homo Sapiens
cgagccagggagaaaggatggccggcctggcggcgcggttggtcctgctagctggggcagcggcgctggcgagcggctcccagggcgaccgtgagccggtgtaccgcgactgcgtactgcagtgcgaagagcagaactgctctgggggcgctctgaatcacttccgctcccgccagccaatctacatgagtctagcaggctggacctgtcgggacgactgtaagtatgagtgtatgtgggtcaccgttgggctctacctccaggaaggtcacaaagtgcctcagttccatggcaagtggcccttctcccggttcctgttctttcaagagccggcatcggccgtggcctcgtttctcaatggcctggccagcctggtgatgctctgccgctaccgcaccttcgtgccagcctcctcccccatgtaccacacctgtgtggccttcgcctgggtgtccctcaatgcatggttctggtccacagttttccacaccagggacactgacctcacagagaaaatggactacttctgtgcctccactgtcatcctacactcaatctacctgtgctgcgtcaggaccgtggggctgcagcacccagctgtggtcagtgccttccgggctctcctgctgctcatgctgaccgtgcacgtctcctacctgagcctcatccgcttcgactatggctacaacctggtggccaacgtggctattggcctggtcaacgtggtgtggtggctggcctggtgcctgtggaaccagcggcggctgcctcacgtgcgcaagtgcgtggtggtggtcttgctgctgcaggggctgtccctgctcgagctgcttgacttcccaccgctcttctgggtcctggatgcccatgccatctggcacatcagcaccatccctgtccacgtcctctttttcagctttctggaagatgacagcctgtacctgctgaaggaatcagaggacaagttcaagctggactgaagaccttggagcgagtctgccccagtggggatcctgcccccgccctgctggcctcccttctcccctcaacccttgagatgattttctcttttcaacttcttgaacttggacatgaaggatgtgggcccagaatcatgtggccagcccaccccctgttggccctcaccagccttggagtctgttctagggaaggcctcccagcatctgggactcgagagtgggcagcccctctacctcctggagctgaactggggtggaactgagtgtgctcttagctctaccgggaggacagctgcctgtttcctccccatcagcctcctccccacatccccagctgcctggctgggtcctgaagccctctgtctacctgggagaccagggaccacaggccttagggatacagggggtccccttctgttaccaccccccaccctcctccaggacaccactaggtggtgctggatgcttgttctttggccagccaaggttcacggcgattctccccatgggatcttgagggaccaagctgctgggattgggaaggagtttcaccctgaccattgccctagccaggttcccaggaggcctcaccatactccctttcagggccagggctccagcaagcccagggcaaggatcctgtgctgctgtctggttgagagcctgccaccgtgtgtcgggagtgtgggccaggctgagtgcataggtgacagggccgtgagcatgggcctgggtgtgtgtgagctcaggcctaggtgcgcagtgtggagacgggtgttgtcggggaagaggtgtggcttcaaagtgtgtgtgtgcagggggtgggtgtgttagcgtgggttaggggaacgtgtgtgcgcgtgctggtgggcatgtgagatgagtgactgccggtgaatgtgtccacagttgagaggttggagcaggatgagggaatcctgtcaccatcaataatcacttgtggagcgccagctctgcccaaggcgccacctgggcggacagccaggagctctccatggccaggctgcctgtgtgcatgttccctgtctggtgcccctttgcccgcctcctgcaaacctcacagggtccccacacaacagtgccctccagaagcagcccctcggaggcagaggaaggaaaatggggatggctggggctctctccatcctccttttctccttgccttcgcatggctggccttcccctccaaaacctccattcccctgctgccagcccctttgccatagcctgattttggggaggaggaaggggcgatttgagggagaaggggagaaagcttatggctgggtctggtttcttcccttcccagagggtcttactgttccagggtggccccagggcaggcaggggccacactatgcctgcgccctggtaaaggtgacccctgccatttaccagcagccctggcatgttcctgccccacaggaatagaatggagggagctccagaaactttccatcccaaaggcagtctccgtggttgaagcagactggatttttgctctgcccctgaccccttgtccctctttgagggaggggagctatgctaggactccaacctcagggactcgggtggcctgcgctagcttcttttgatactgaaaacttttaaggtgggagggtggcaagggatgtgcttaataaatcaattccaagcctcaaaaaaaaaaaaaaaaaaaaaa

SEQ ID NO: 25764 - DNA, 3316 bp, Homo Sapiens
cggacgcgtgggctgccggcctccgcggtacccactgccggcctccgcgctacccggccgcagcgcgcgagtcacatggaagctcctgaggagcccgcgccagtgcgcggaggcccggaggccacccttgaggtccgtgggtcgcgctgcttgcggctgtccgccttccgagaagagctgcgggcgctcttggtcctggctggccccgcgttcttggttcagctgatggtgttcctgatcagcttcataagctccgtgttctgtggccacctgggcaagctggagctggatgcagtcacgctggcaatcgcggttatcaatgtcactggtgtctcagtgggattcggcttatcttctgcctgtgacaccctcatctcccagacgtacgggagccagaacctgaagcacgtgggcgtgatcctgcagcggagtgcgctcgtcctgctcctctgctgcttcccctgctgggcgctctttctcaacacccagcacatcctgctgctcttcaggcaggacccagatgtgtccaggcttacccagacctatgtcacgatcttcattccagctcttcctgcaacctttctttatatgttacaagttaaatatttgctcaaccagggaattgtactgccccagatcgtaactggagttgcagccaaccttgtcaatgccctcgccaactatctgtttctccatcaactgcatcttggggtgataggctctgcactggcaaacttgatttcccagtacaccctggctctactcctctttctctacatcctcgggaaaaaactgcatcaagctacatggggaggctggtccctcgagtgcctgcaggactgggcctccttcctccgcctggccatccccagcatgctcatgctgtgcatggagtggtgggcctatgaggtcgggagcttcctcagtggcatcctcggcatggtggagctgggcgctcagtccatcgtgtatgaactggccatcattgtgtacatggtccctgcaggcttcagtgtggctgccagtgtccgggtaggaaacgctctgggtgctggagacatggagcaggcacggaagtcctctaccgtttccctgctgattacagtgctctttgctgtagccttcagtgtcctgctgttaagctgtaaggatcacgtggggtacatttttactaccgaccgagacatcattaatctggtggctcaggtggttccaatttatgctgtttcccacctctttgaagctcttgcttgcacgagtggtggtgttctgagggggagtggaaatcagaaggttggagccattgtgaataccattgggtactatgtggttggcctccccatcgggatcgcgctgatgtttgcaaccacacttggagtgatgggtctgtggtcagggatcatcatctgtacagtctttcaagctgtgtgttttctaggctttattattcagctaaattggaaaaaagcctgtcagcaggctcaggtacacgccaatttgaaagtaaacaacgtgcctcggagtgggaattctgctctccctcaggatccgcttcacccagggtgccctgaaaaccttgaaggaattttaacgaacgatgttggaaagacaggcgagcctcagtcagatcagcagatgcgccaagaagaacctttgccggaacatccacaggacggcgctaaattgtccaggaaacagctggtgctgcggcgagggcttctgctcctgggggtcttcttaatcttgctggtggggattttagtgagattctatgtcagaattcagtgacgtggtaggaaagaaagtcaggtcaagtgatgcttttgagcttacacacaattcacaggcccaccagtgacaatttactgtgagttaatgtcattcaggtgtgcccatggattttgagggctggaaatgcaaagacacatttttctataaaaagaaaaagcaactaaggttaaaagctatattgtggcccaagacactgtctgaaagatgacatgagtagtaattcaccactatctgaaccaagcaaggatcaatgtgctgactgcattggccaatggctttgatacttctgctatttttttagacacaaacccataaactaactgcttaagaattcatactgcttgaattatgtaaaatatattttacagtatatctttccttgggccttagattactattcactgggcaaatggtatttgtttttgttttaattttttttttaatagacggaagtcttgctctgtcatgcaggctggagtgcggtggtgcgatcatagctcactgcagcctcgaactcttgggcttcaagcaatcctcctgtgtcagccaccagagtagctgagactacaggggtatgccaccatgcccagctggcatttgttaatcttcatttgaggtctagatctaggcactgtggacactgaaaaacagttgggaaatctttcgagctgtggaaatccaaacaaagactgataattcctggtaggggtgtgtgcgtgacgtactgcagcctcaacctcctgggctcaagtgatcctcccacctcagcctcctgagtagctgagaccacaggcgtgtgccaccacgcctagctaattttttataccagggtctaccctttgtttcccaggctggtcttgaattcctgggatcaagcaatccttccaccttgccctcccaaagtgttgggattatgggcatgagccaccacgactggccagaggacaaaattttaataaaggtcttagcttaagcagtaatcctacttcattaagccttcctggggtgcggtacacaccgttaattcagcaaccctcagtacatactaagtatgctcagtgctgtgaaagtggattacaccaaattaagtcattcttatcacacccaatcaaaagtcaagaagccagggataaaagcacctcaggcacataacattaatctagtaatgtaattctctgcacatccagctggtgaaactgcgtgctgtaagctgggaccagctttgtccataactgctgagagaacttgctgaagctctaggaataattttgcctgcccggttgctcaccagttgtagcttgccagctcccaacacccttcctggtgccaataaactttctcaaagagcaatactgacatttcttttgataaaacctccagccttctctgtgttgttccgacataccgaggaccaactggtctacatggatgccctgaacatgcaattctttcttccaaaataaaacattaaatagaaaaaaaaaaaaaaaaaaaaaaaaaaaaaaaaaaaaaaaaaaaaaaaaaa

SEQ ID NO: 25765 - DNA, 3507 bp, Homo Sapiens
ggcgctgaggcggccaccgcgactccggctctgcgctcggctgcctgacttcttcctgctgctgcttttcaggggctgcctgataggggctgtaaatctcaaatccagcaatcgaaccccagtggtacaggaatttgaaagtgtggaactgtcttgcatcattacggattcgcagacaagtgaccccaggatcgagtggaagaaaattcaagatgaacaaaccacatatgtgttttttgacaacaaaattcagggagacttggcgggtcgtgcagaaatactggggaagacatccctgaagatctggaatgtgacacggagagactcagccctttatcgctgtgaggtcgttgctcgaaatgaccgcaaggaaattgatgagattgtgatcgagttaactgtgcgagtgaagccagtgacccctgtctgtagagtgccgaaggctgtaccagtaggcaagatggcaacactgcactgccaggagagtgagggccacccccggcctcactacagctggtatcgcaatgatgtaccactgcccacggattccagagccaatcccagatttcgcaattcttctttccacttaaactctgaaacaggcactttggtgttcactgctgttcacaaggacgactctgggcagtactactgcattgcttccaatgacgcaggctcagccaggtgtgaggagcaggagatggaagtctatgacctgaacattggcggaattattgggggggttctggttgtccttgctgtactggccctgatcacgttgggcatctgctgtgcatacagacgtggctacttcatcaacaataaacaggatggagaaagttacaagaacccagggaaaccagatggagttaactacatccgcactgacgaggagggcgacttcagacacaagtcatcgtttgtgatctgagacccgcggtgtggctgagagcgcacagagcgcacgtgcacatacctctgctagaaactcctgtcaaggcagcgagagctgatgcactcggacagagctagacactcattcagaagcttttcgttttggccaaagttgaccactactcttcttactctaacaagccacatgaatagaagaattttcctcaagatggacccggtaaatataaccacaaggaagcgaaactgggtgcgttcactgagttgggttcctaatctgtttctggcctgattcccgcatgagtattagggtgatcttaaagagtttgctcacgtaaacgcccgtgctgggccctgtgaagccagcatgttcaccactggtcgttcagcagccacgacagcaccatgtgagatggcgaggtggctggacagcaccagcagcgcatcccggcgggaacccagaaaaggcttcttacacagcagccttacttcatcggcccacagacaccaccgcagtttcttcttaaaggctctgctgatcggtgttgcagtgtccattgtggagaagctttttggatcagcattttgtaaaaacaaccaaaatcaggaaggtaaattggttgctggaagagggatcttgcctgaggaaccctgcttgtccaacagggtgtcaggatttaaggaaaaccttcgtcttaggctaagtctgaaatggtactgaaatatgcttttctatgggtcttgtttattttataaaattttacatctaaatttttgctaaggatgtattttgattattgaaaagaaaatttctatttaaactgtaaatatattgtcatacaatgttaaataacctatttttttaaaaaagttcaacttaaggtagaagttccaagctactagtgttaaattggaaaatatcaataattaagagtattttacccaaggaatcctctcatggaagtttactgtgatgttccttttctcacacaagttttagcctttttcacaagggaactcatactgtctacacatcagaccatagttgcttaggaaacctttaaaaattccagttaagcaatgttgaaatcagtttgcatctcttcaaaagaaacctctcaggttagctttgaactgcctcttcctgagatgactaggacagtctgtacccagaggccacccagaagccctcagatgtacatacacagatgccagtcagctcctggggttgcgccaggcgcccccgctctagctcactgttgcctcgctgtctgccaggaggccctgccatccttgggccctggcagtggctgtgtcccagtgagctttactcacgtggcccttgcttcatccagcacagctctcaggtgggcactgcagggacactggtgtcttccatgtagcgtcccagctttgggctcctgtaacagacctctttttggttatggatggctcacaaaatagggcccccaatgctatttttttttttttaagtttgtttaattatttgttaagattgtctaaggccaaaggcaattgcgaaatcaagtctgtcaagtacaataacatttttaaaagaaaatggatcccactgttcctctttgccacagagaaagcacccagacgccacaggctctgtcgcatttcaaaacaaaccatgatggagtggcggccagtccagccttttaaagaacgtcaggtggagcagccaggtgaaaggcctggcggggaggaaagtgaaacgcctgaatcaaaagcagttttctaattttgactttaaatttttcatccgccggagacactgctcccatttgtggggggacattagcaacatcactcagaagcctgtgttcttcaagagcaggtgttctcagcctcacatgccctgccgtgctggactcaggactgaagtgctgtaaagcaaggagctgctgagaaggagcactccactgtgtgcctggagaatggctctcactactcaccttgtctttcagcttccagtgtcttgggttttttatactttgacagcttttttttaattgcatacatgagactgtgttgactttttttagttatgtgaaacactttgccgcaggccgcctggcagaggcaggaaatgctccagcagtggctcagtgctccctggtgtctgctgcatggcatcctggatgcttagcatgcaagttccctccatcattgccaccttggtagagagggatggctccccaccctcagcgttggggattcacgctccagcctccttcttggttgtcatagtgatagggtagccttattgccccctcttcttataccctaaaaccttctacactagtgccatgggaaccaggtctgaaaaagtagagagaagtgaaagtagagtctgggaagtagctgcctataactgagactagacggaaaaggaatactcgtgtattttaagatatgaatgtgactcaagactcgaggccgatacgaggctgtgattctgcctttggatggatgttgctgtacacagatgctacagacttgtactaacacaccgtaatttggcatttgtttaacctcatttataaaagcttcaaaaaaaaaaaaaaa

SEQ ID NO: 25766 - DNA, 2085 bp, Homo Sapiens
gttgtgcttgctgaggctgcacttgctgacactgcagctgcgacgcggctaagaggcgcagagcgaggagtcgggatttggtcgcgagcggcgacgagcatttgtgcagaatgtcatcagatgaggagaaatactcacttccagttgtgcaaaatgactccagtcgaggcagttctgtctcttcgaatcttcaggaagaatatgaagaactgcttcattatgctatagtgactccaaatattgaaccctgtgcttcacagtcatctcatcctaagggagaattggtgccagatgtcagaatttctacaattcatgatattcttcatagtcaaggaaataactctgaagtaagagaaactgcaatagaagttggaaaaggatgtgatttccatatttcaagtcattcaaagacagatgagtcatcaccagtgttatcgccaaggaagccttctcacccagtcatggattttttcagttcacatcttttagctgactcttcctcaccagcaacaaattctagtcatacagatgcccatgaaatacttgtgagcgattttcttgtttctgatgaaaaccttcagaagatggaaaatgtgcttgatctttggagttcaggtcttaagacaaacatcatatctgaactaagtaaatggagacttaattttattgactggcaccgaatggaaatgagaaaagagaaagaaaaacatgcagcacatttaaaacaactgtgtaatcagatcaatgaattgaaggagctgcaaaaaaacctttgaaatctccattgggagaaaagatgaggtgatttctagcttgtctcatgccataggcaagcaaaaggaaaagatagagttgatgagaacattcttccactggcgaatcggccatgtcagagccagacaggatgtttatgaaggtaaactagctgaccagtactaccagagaactttactgaagaaagtctggaaagtctggcgttccgtagtgcaaaagcagtggaaagatgtggtagaaagagcttgtcaagcaagagctgaagaagtttgtatccagatttccaatgattatgaagccaaagttgctatgttatctggagctttggaaaatgcaaaagctgagattcaaagaatgcaacatgaaaaagagcactttgaagattccatgaaaaaagctttcatgaggggtgtatgtgcattaaatcttgaagccatgactatatttcaaaacagaaatgatgcagggatagactccacaaataataaaaaggaagagtatggtcctggtgttcaaggaaaagaacattctgctcatttggatccttcagctcctccgatgcccttaccagttacatcaccactgctgccatccccaccagccgccgtcggaggagccagcgcgactgccgttccctcagctgcttcgatgacttctaccagggctgcttccgcatcttctgttcacgttcctgtttctgctcttggtgcaggatctgcagctactgctgcatcagaagaaatgtatgtgccaagagttgtaacctctgcacaacagaaagcaggaagaactattacagcccggatcacaggaagatgtgattttgcttcaaaaaatagaattagcagcagtttagctataatgggagtttctcctcccatgagctcagttgttgtggaaaaacatcatccagtcacagtgcaaaccattcctcaagcaactgcagcaaaatatccccggaccattcatcctgaaagtagtacctcagcttccagatcacttggaaccagatcagctcacacccagtctctcacaagtgttcattccataaaagtggttgactaaagtgaatatgtccatagtggggtcttttaatccctctggtcttaccaagggttagaagtcttttggttttaacttttccatattgttagaacatcatggagacatcatgttcatctgttcaaaattacaagaggctttttcaagctctaccatgctttgtaactatatgtagaaattattttaatgttattttttatttaagcaattaagtaaaacttttttaaattaaaaaaaaaaaaaaaaaaa

SEQ ID NO: 25767 - DNA, 3497 bp, Homo Sapiens
cactgctcctccggctcccgggaagccgcgagtttccgcagggaggcggcggcagctgcggcggggccggtctgtagcctttgctgagtcaacactactcacagtgaaagtgatgccttttctccatttgcacaacatgagtgtgacgtggttagccagaccaggagctcaacctcatgtagaatccagtccactgctctgatgccgaaggggaggcagaaagtgccacacttggatgcccccctgggcctgcccacctgcctctggctggaattagccgggctcttcttactggttccctgggtcatgggcctggcagggacaggtgggcctgatggccagggcacaggggggccgagctgggctgtgcacctggaaagcctggaaggtgacggggaggaagagactctggagcagcaggcggatgccttggcccaggcagcagggctggtgaatgctggacgcatcggagagcttcaggggcactacctctttgtccagcctgctgggcacaggccggccctggaggtggaggccatccggcagcaggtggaggctgtgttggctgggcatgaagctgtgcgctggcactcagagcagaggctgctaaggcgggccaagcgcagcgtccacttcaacgaccccaagtacccgcagcaatggcacctgaataaccgacggagcccgggcagggacatcaacgtgacgggtgtgtgggaacgcaatgtgactgggcgaggggtgacggtggtggtagtggatgacggagtggaacacaccatccaggacattgcacccaactatagccctgagggtagctatgacctcaactctaatgaccctgaccccatgccccacccggatgtggagaatggcaaccaccatggcacgcgatgtgcaggagagatcgcggctgtgcccaacaacagcttctgtgccgtgggcgtggcctacgggagccgcatcgcaggtatccgggtactggatggacctctcacagacagcatggaggcagtggcgttcaacaagcactatcagatcaatgacatctacagctgcagctggggaccagatgacgatgggaagacagtggatggcccccatcagcttggaaaggctgccttacaacatggggtgattgctggtcgccagggctttgggagcatctttgtggtagccagtggcaacggaggccaacacaacgacaactgcaactacgatggctacgccaactccatctacaccgtcaccataggagctgtggatgaggagggacgcatgcctttctatgcagaagaatgtgcctccatgctggcagtcaccttcagtggtggggacaagatgcttcggagcattgtgaccactgactgggaccttcagaagggcactggctgcactgagggccacacagggacctcagctgcagcgcctctggcagctggcatgatagccttaatgctgcaggtgcggccctgcctcacgtggcgtgacgtccagcacatcattgtcttcacagccacccggtatgaggatcgccgtgcagagtgggtcaccaacgaggcaggcttcagccatagccaccagcacggtttcggcctcctcaacgcctggaggctcgtgaatgcagccaagatctggacatctgtcccttacttagcatcctacgtcagtcccgtgttaaaagaaaacaaggcgattccgcagtccccccgttccctggaggtcctgtggaatgtcagcaggatggacctggagatgtcagggctgaagaccctggagcatgtggcagtgacagtctccatcactcacccacggcgcggcagcttggagctgaagctgttctgccccagtggcatgatgtccctcatcggcgccccccgcagcatggactcggatcccaacggcttcaatgactggaccttctccactgtgcgatgctggggggagagagcccgagggacctacaggcttgtcatcagggatgtcggggatgagtcattccaggtcggcatcctccggcaatggcagctgaccctatatggctctgtgtggagtgcagtagacatcagggacagacaaaggctgttagagagtgccatgagtggaaaatacctgcacgatgacttcgccctgccctgcccaccggggctgaaaattcctgaggaagatggttacaccatcacccccaacaccctcaagaccctggtgctggtaggctgtttcaccgtcttctggactgtttactacatgctggaagtatatttgagccagaggaatgtggcttccaatcaagtttgtaggagtggaccctgccactggccccatcggagccggaaagccaaggaggaagggacagagctagaatcagtgccactttgcagcagcaaggatccagacgaagtggaaacagagagcaggggccctcccaccacctctgacctccttgccccagacctgctggagcaaggggactggagcctgtcccagaacaagagcgccctggactgccctcatcagcacctagacgtaccgcacgggaaggaggagcagatctgctgacctcagggcctgacagtgtgggacaggctcttctttcccaaaattagggagctcttgacagaaagcagttctgatgcttacatctggaatctgaggcatcctctgactccactcaaagagggtgagggccttcttaagatacaaatggtggaggattgctgccagagaagtctggtcagagccacagggtctgcctccagccaaacgggagcttttggtgagaaggtgttggacaggggattggcgcccccctttggtttggcctccatcctcatctctcttgggccaagccagctgcctaggtcccccaagcatgggggaccccttcccacatataagttgagaaggtgcctgccatagccaggagcgcatctcaatggaaacatcactggggtcacttgggaagaggacttcggggtagaggctgggaggagcccctggacatgcctgtcctgaaagcggctgcctccattatccattcccaagatgcctgatcagaaaccaaccatgaatgaacccctggctccttcaccacccccacgattggtatgatgctgccggcacagctgggatacacacggctcccccaggcctgagctgcttcactagggaatcctgcggcaggactgcagagcagatggcagatgcacatgttggaggagagagccttgggagccactgccactccagtcctgccaccaccctgtcttcctctgcaagtgctcagggaaatggccttcccgccggaggccagctatctgcctgacaggctgtgactcttctctcaaccttggccttctcccctcttctgagctagttggttgaattttttttaatgcttaagatttgtttttctcttttcacagcaacattttcttgaatttttttctgcacagcttttccaaaataaaaaccttccaaacaaaaaaaaaaaaaaa

SEQ ID NO: 25768 - DNA, 2098 bp, Homo Sapiens
gcgagcgggagcgaggggcgccggctggggtgtgtgctcctgagctcttcagaaaccaggctgctttcaggaacattgctgtggattcccagggcctattccactagaagcaagatggctgaactcaatactcatgtgaatgtcaaggaaaagatctatgcagttagatcagttgttcccaacaaaagcaataatgaaatagtcctggtgctccaacagtttgattttaatgtggataaagccgtgcaagcctttgtggatggcagtgcaattcaagttctaaaagaatggaatatgacaggaaaaaaagaagaacaataaaagaaaaagaagcaagtccaagcagcatcaaggcaacaaagatgctaaagacaaggtggagaggcctgaggcagggcccctgcagccgcagccaccacagattcaaaacggccccatgaatggctgcgagaaggacagctcgtccacagattctgctaacgaaaaaccagcccttatccctcgtgagaaaaagatctcgatacttgaggaaccttcaaaggcacttcgtggggtcacaggcccaaatattgagaaatcagtgaaggatttgcaacgctgcaccgtttctctaactagatatcgcgtcatgattaaggaagaagtggatagttccgtgaagaagatcaaagctgcctttgctgaattacacaactgcatcattgacaaagaagtttcattaatggcagaaatggataaagttaaagaagaagccatggaaatcctgactgctcgtcagaagaaagcagaagaactaaagagactcactgaccttgccagtcagatggcagagatgcagctggccgaactcagggcagaaattaagcactttgtcagcgagcgtaaatatgacgaggagctcgggaaagctgcccggttttcctgtgacatcgaacagctgaaggcccaaatcatgctctgcggagaaattacacatccaaagaacaactattcctcaagaactccctgcagctccctgctgcctctgctgaatgcgcacgcagcaacctctgggaaacagagtaacttttcccgaaaatcatccactcacaataagccctctgaaggcaaagcggcaaaccccaaaatggtgagcagtctccccagcaccgccgacccctctcaccagaccatgccggccaacaagcagaatggatcttctaaccaaagacggagatttaatccacagtatcataacaacaggctaaatgggcctgccaagtcgcagggcagtgggaatgaagccgagccactgggaaagggcaacagccgccacgaacacagaagacagccgcacaacggcttccggcccaaaaacaaaggcggtgccaaaaatcaagaggcttccttggggatgaagacccccgaggccccggcccattctgaaaagccccggcgaaggcagcacgctgcagacacctcggaggccaggcccttccggggtagtgtcggtagggtttcacagtgcaatctctgccccacgagaatagaagtttccacagatgcagcagttctctcagtcccggctgtgacgttggtggcctgagctaggaggaaaaagagcagttttcactcagttttggttccctgcccgaggtgctgacccaattcgctgccaaaagagtgtcaatcagaatatacaaatcccgtatggttgtgtcatcctctcttaatcatttttactaattctaataatcagctctagcttgcttcataattttcatggctttgcttgatctgttgatgctttctctcatcaagactttgcagcattttagccaggcagtatttactcattattaggaaaatcaagatgtggctgaagatcagaggctcagttagcaacctgtgttgtagcagtgatgtcagtccattgattgtctttagagagttaatgttacaaaaaagaattcttaataatcagacaaacatgatctgctgaggacacatgcgcttttgtagaatttaacatctggtgtttttctgaaaaaatatatatacatatattgctttatttgaaacaaattaaaatatgctgcatttgaaaaaaaaaaaaaaa

SEQ ID NO: 25769 - DNA, 2655 bp, Homo Sapiens
tccggtcgcgtccgacacccggtgggactcagaaggcagtggagccccggcggcggcggcggcggcgcgcgggggcgacgcgcgggaacaacgcgagtcggcgcgcgggacgaagaataatcatgggccagactgggaagaaatctgagaagggaccagtttgttggcggaagcgtgtaaaatcagagtacatgcgactgagacagctcaagaggttcagacgagctgatgaagtaaagagtatgtttagttccaatcgtcagaaaattttggaaagaacggaaatcttaaaccaagaatggaaacagcgaaggatacagcctgtgcacatcctgacttctgtgagctcattgcgcgggactagggagtgttcggtgaccagtgacttggattttccaacacaagtcatcccattaaagactctgaatgcagttgcttcagtacccataatgtattcttggtctcccctacagcagaattttatggtggaagatgaaactgttttacataacattccttatatgggagatgaagttttagatcaggatggtactttcattgaagaactaataaaaaattatgatgggaaagtacacggggatagagaatgtgggtttataaatgatgaaatttttgtggagttggtgaatgcccttggtcaatataatgatgatgacgatgatgatgatggagacgatcctgaagaaagagaagaaaagcagaaagatctggaggatcaccgagatgataaagaaagccgcccacctcggaaatttccttctgataaaatttttgaagccatttcctcaatgtttccagataagggcacagcagaagaactaaaggaaaaatataaagaactcaccgaacagcagctcccaggcgcacttcctcctgaatgtacccccaacatagatggaccaaatgctaaatctgttcagagagagcaaagcttacactcctttcatacgcttttctgtaggcgatgttttaaatatgactgcttcctacatcgtaagtgcaattattcttttcatgcaacacccaacacttataagcggaagaacacagaaacagctctagacaacaaaccttgtggaccacagtgttaccagcatttggagggagcaaaggagtttgctgctgctctcaccgctgagcggataaagaccccaccaaaacgtccaggaggccgcagaagaggacggcttcccaataacagtagcaggcccagcacccccaccattaatgtgctggaatcaaaggatacagacagtgatagggaagcagggactgaaacggggggagagaacaatgataaagaagaagaagagaagaaagatgaaacttcgagctcctctgaagcaaattctcggtgtcaaacaccaataaagatgaagccaaatattgaacctcctgagaatgtggagtggagtggtgctgaagcctcaatgtttagagtcctcattggcacttactatgacaatttctgtgccattgctaggttaattgggaccaaaacatgtagacaggtgtatgagtttagagtcaaagaatctagcatcatagctccagctcccgctgaggatgtggatactcctccaaggaaaaagaagaggaaacaccggttgtgggctgcacactgcagaaagatacagctgaaaaaggacggctcctctaaccatgtttacaactatcaaccctgtgatcatccacggcagccttgtgacagttcgtgcccttgtgtgatagcacaaaatttttgtgaaaagttttgtcaatgtagttcagagtgtcaaaaccgctttccgggatgccgctgcaaagcacagtgcaacaccaagcagtgcccgtgctacctggctgtccgagagtgtgaccctgacctctgtcttacttgtggagccgctgaccattgggacagtaaaaatgtgtcctgcaagaactgcagtattcagcggggctccaaaaagcatctattgctggcaccatctgacgtggcaggctgggggatttttatcaaagatcctgtgcagaaaaatgaattcatctcagaatactgtggagagattatttctcaagatgaagctgacagaagagggaaagtgtatgataaatacatgtgcagctttctgttcaacttgaacaatgattttgtggtggatgcaacccgcaagggtaacaaaattcgttttgcaaatcattcggtaaatccaaactgctatgcaaaagttatgatggttaacggtgatcacaggataggtatttttgccaagagagccatccagactggcgaagagctgttttttgattacagatacagccaggctgatgccctgaagtatgtcggcatcgaaagagaaatggaaatcccttgacatctgctacctcctcccccctcctctgaaacagctgccttagcttcaggaacctcgagtactgtgggcaatttagaaaaagaacatgcagtttgaaattctgaatttgcaaagtactgtaagaataatttatagtaatgagtttaaaaatcaactttttattgccttctcaccagctgcaaagtgttttgtaccagtgaatttttgcaataatgcagtatggtacatttttcaactttgaataaagaatacttgaacttgaaaaaaaaaaaaaaaa

SEQ ID NO: 25770 - DNA, 2207 bp, Homo Sapiens
ggccaagagcgctgtcaagaagacccacacgcccccctccagcagctgaattcctgcagctcagcagccgccgccagagcaggacgaaccgccaatcgcaaggcacctctgagaacttcaggatgcagatgtctccagccctcacctgcctagtcctgggcctggcccttgtctttggtgaagggtctgctgtgcaccatcccccatcctacgtggcccacctggcctcagacttcggggtgagggtgtttcagcaggtggcgcaggcctccaaggaccgcaacgtggttttctcaccctatggggtggcctcggtgttggccatgctccagctgacaacaggaggagaaacccagcagcagattcaagcagctatgggattcaagattgatgacaagggcatggcccccgccctccggcatctgtacaaggagctcatggggccatggaacaaggatgagatcagcaccacagacgcgatcttcgtccagcgggatctgaagctggtccagggcttcatgccccacttcttcaggctgttccggagcacggtcaagcaagtggacttttcagaggtggagagagccagattcatcatcaatgactgggtgaagacacacacaaaaggtatgatcagcaacttgcttgggaaaggagccgtggaccagctgacacggctggtgctggtgaatgccctctacttcaacggccagtggaagactcccttccccgactccagcacccaccgccgcctcttccacaaatcagacggcagcactgtctctgtgcccatgatggctcagaccaacaagttcaactatactgagttcaccacgcccgatggccattactacgacatcctggaactgccctaccacggggacaccctcagcatgttcattgctgccccttatgaaaaagaggtgcctctctctgccctcaccaacattctgagtgcccagctcatcagccactggaaaggcaacatgaccaggctgccccgcctcctggttctgcccaagttctccctggagactgaagtcgacctcaggaagcccctagagaacctgggaatgaccgacatgttcagacagtttcaggctgacttcacgagtctttcagaccaagagcctctccacgtcgcgcaggcgctgcagaaagtgaagatcgaggtgaacgagagtggcacggtggcctcctcatccacagctgtcatagtctcagcccgcatggcccccgaggagatcatcatggacagacccttcctctttgtggtccggcacaaccccacaggaacagtccttttcatgggccaagtgatggaaccctgaccctggggaaagacgccttcatctgggacaaaactggagatgcatcgggaaagaagaaactccgaagaaaagaattttagtgttaatgactctttctgaaggaagagaagacatttgccttttgttaaaagatggtaaaccagatctgtctccaagaccttggcctctccttggaggacctttaggtcaaactccctagtctccacctgagaccctgggagagaagtttgaagcacaactcccttaaggtctccaaaccagacggtgacgcctgcgggaccatctggggcacctgcttccacccgtctctctgcccactcgggtctgcagacctggttcccactgaggccctttgcaggacggaactacggggcttacaggagcttttgtgtgcctggtagaaactatttctgttccagtcacattgccatcactcttgtactgcctgccaccgcggaggaggctggtgacaggccaaaggccagtggaagaaacaccctttcatctcagagtccactgtggcactggccacccctccccagtacaggggtgctgcaggtggcagagtgaatgtcccccatcatgtggcccaactctcctggcctggccatctccctccccagaaacagtgtgcatgggttattttggagtgtaggtgacttgtttactcattgaagcagatttctgcttccttttatttttataggaatagaggaagaaaggtcagatgcgtgcccagctcttcaccccccaatctcttggtggggaggggtgtacctaaatatttatcatatccttgcccttgagtgcttgttagagagaaagagaactactaaggaaaataatattatttaaactcgcaaaaaaaaaaaaaaa

SEQ ID NO: 25771 - DNA, 1460 bp, Homo Sapiens
caggaaggagacggccgcccagcagcccgtgggcaggcgcggcggagcgagcggggccggcggcgggcgccgagggacgccgagggacgccgaggcctcgggcgggggctggcccggggttccaggtctccagtgggggctgcagactaagcaaaatgaggcggttcctgaggccagggcatgaccctgtgcgggagaggctcaagcgggacctgttccagtttaacaagacggtggagcatggcttcccgcaccagcccagcgccctcggctacagcccgtccctgcgcatcctggccatcggcacccgttctggagccatcaagctctacggagccccaggcgtggagttcatggggctgcaccaggagaacaacgctgtgacgcagatccacctcctgcccggccagtgccagctggtcaccctgctggatgacaacagcctgcacctttggagcctgaaggtcaagggcggggcatcggagctgcaggaggatgagagcttcacactgcgtggacccccaggggctgcccccagtgccacacagatcaccgtggtcctgccacattcctcctgcgagctgctctacctgggcaccgagagtggcaacgtgtttgtggtgcagctgccagcttttcgtgcgctggaggaccggaccatcagctcggacgcggtgctgcagcggttgccagaggaggcccgccaccggcgtgtgttcgagatggtggaggcactgcaggagcaccctcgagaccccaaccagatcctgatcggctacagccgaggcctcgttgtcatctgggacctacagggcagccgcgtgctctaccacttcctcagcagccagcaactggagaacatctggtggcagcgggacggccgcctgctcgtcagctgtcactctgacggcagctactgccagtggcccgtgtccagcgaagcccagcaaccagagcccctccgcagcctcgtgccttacggtccctttccttgcaaagcgattaccagaatcctctggctgaccactaggcaggggttgcccttcaccatcttccagggtggcatgccacgggccagctacggggaccgccactgcatctcagtgatccacgatggccagcagacggccttcgacttcacctcccgtgtcatcggcttcactgtcctcacagaggcagaccctgcagccagtaggagagcttcgggagtgggtgcccagggttaggtgtgggaggcatggggcaggaccatcagtaaagacagggccaggtgcagtggctcctgcctgtaaccccagtgctgtgggaggccaaggtggtaggatcgcttgaacccaggagttcaagtccagcctggacaacgtagggagacccttgtctctacaaaaaataaaaaaattagccaggtgttgtggcacgtaaaaaaaaaaaaaaaaaaaaaaaaaaaaaaaaaaaaaaaa

SEQ ID NO: 25772 - DNA, 2282 bp, Homo Sapiens
taggcggcccggggccacaccgcggccgcccaagccagtgcaaggcccaggggcctgacatcgctcccagcgctcgaggaccgaggcctgctgtggagggcaccgtgctccctcgggacctgctctggattccggcccggacgtccccttggagctctgcatctccaacctggaacccaacccagaagtctcaagtttgacgcatcacgtggcgtgcggatccactgagggtccacagagaggggcgcccatctcctgcgtctcagttatcctggtaattgtgtatctgcccattgttcgttgcctcattaacttggctttctaggtgcacccaccttgccaccagagaagtccaaatcctgacttctctccaaggtgttgggaattctgtgccctaaagaattccgactcagatccgaacggggatctggtggaatcgagggtgaaagaccagagggacaatgttctactatcccaacgtgcttcagcgccacaccggctgctttgccaccatctggctggcggcgactcgcggcagccggttggtgaagcgcgaatacctgagggtgaatgtggtgaaaacctgcgaggaaatcctcaattacgtgctggtacgagtgcaacccccgcagcccggcctgccgcggccccgcttctccctctatctctcagcccaacttcagatcggtgtgatccgcgtctattctcaacaatgccagtacctcgtggaggacatccagcacatcttggagcgcctccaccgtgcccagctgcagatccgaatagatatggagactgagctacccagcctgctgcttcctaaccacctggccatgatggagaccctagaagatgctccagatcccttttttgggatgatgtctgtggatcccagacttcctagtcctttcgatatccctcagattcgacacctcttagaggctgcaatcccagagagagttgaagagatccctcctgaagttcctacagagcccagggagccagagaggattccggtcactgtgctgccacctgaggccatcacgatcctggaggcagagcccatacggatgctggagattgagggtgaacgggagctcccagaggtcagccgccgagaactggacctgctgatcgcagaggaagaagaagctatcttgttagaaatcccgcggctcccacctccagctcctgcagaggtggaaggaataggagaggcactgggtcctgaggagctgaggctgacaggctgggaacctggggccctactcatggaggtgacccccccggaggagctgcgtctgccagccccacccagcccagagaggaggcccccagtccccccacctcctcgccgccgccgtcgtcgccggttactgttctgggacaaggagactcagatctccccggagaaattccaggaacaactgcaaaccagagcccactgctgggaatgtcctatggtgcagccgcccgagaggaccatcagaggccctgcggagttgttcagaaccccaactctctctggctggctaccccctgaactactgggtctctggacccattgtgcccagccacccccaaaagccctcaggcgagagctgcctgaggaggcagccgctgaggaggaaaggagaaagattgaagttccaagtgagattgaggtcccgagggaggccctggagcccagtgttccccttatggtgtctttagagatctccctagaggcagctgaagaggagaagtcccgcatcagcctcatcccaccagaagaacggtgggcctggcctgaggtggaggcgccagaagctcctgcattgcccgtggtgcctgaactccctgaggtgcccatggagatgcctttggtgctgcccccagagctcgagctgctctcactggaagcagtgcacagggcagtggcactggagctgcaggctaacagggagcccgacttcagcagcctggtgtcacctctcagcccccgcaggatggctgcccgggtcttctacctgctcctggtgctctcagcgcaacagattcttcacgtgaaacaagaaaagccatatggtcgcctcctgatccagccggggcccagattccactgaggttagagtccatttacaaagctgccaggaaaccggccacttctagtaaaccacgtcgtgcctcactgggtcctgcttacctcatttctgaatgtgcatttccagccttcttgctctcagagctattgttcaagcagaaaacaagctgcttttattacaaaaaaaaaaaaaaaaaaa

SEQ ID NO: 25773 - DNA, 984 bp, Homo Sapiens
ggggcctgaagtgttctttggctgtttaacaattatttgtatgagtgttttattaaaataacggctgctgtctttggtaacatagatgagggtggatttttaaatggctttgtatcgacccctttctacaataatggagtagtctatgttgctccatataaattacagaatgaaaatagatggggcaaaagtttgactaaactttacctttttatagtttcactttttaagttatatttagaatatattgatagattataaattgattgtgaaactttttttctgaattttttcaacatgttttactcagttacatgagttaaaggatattttcagtcctgttatcttcaattgcagtctttaaaaaaacccaccctattgttctacttgttatatgtctattcatacagtaaattcatttcaaggtttatgccagtgggtattattggtgctttttgaagttgaggtgaaccatccaggaaggtcttgttaatgttatgttcatctataatggcataggggaaatatatatatttttaatattgtaaacatttgtactgaataacctttttttccccccctccgcaagcaaaactggttgaacagcggatgaagatatggaattcaaagctctaatggacctttttgaagagaagttgtggcttatgtggagtttacatgggcctctgatggaagaaagctaatctgtttagtatttgtgcattttactaaaatggcagcttaaagttgtgtatctgctattgtgatgccaatgccggtgttttaagtggaaaaaaaatgacctctttgatttgtgctgtgtacacaagatttctggaaaagtaaagaaaaaccctttttatggctcacacagcttaagagtagctgtctctcaaacgtgcgctcacagttgagctgcttttgttttattctaaataaattgtttcttttgacaaaaaaaaaaaaaaaaaaaaaaaaaaaaaa

SEQ ID NO: 25774 - DNA, 1508 bp, Homo Sapiens
gggggggctggcggaagaggcacgtgcgctgctgaatggagctggtcgctggttgctacgagcaggtcctctttgggttcgctgtacacccggagcccgaggcttgcggcgaccacgagcaatggactcttgtggctgacttcactcaccatgctcacactgcctccttgtcagcagtagctgtaaatagtcgttttgtggtcactgggagcaaagatgaaacaattcacatttatgacatgaaaaagaagattgagcatggggctctagtgcatcacagtggtacaataacttgcctgaaattctatggcaacaggcatttaatcagtggagcggaagatggactcatctgtatctgggatgcaaagaaatgggaatgcctgaagtcaattaaagctcacaaaggacaggtgaccttcctttctattcacccatctggcaagttggccctgtcggttggtacagataaaactttaagaacgtggaatcttgtagaaggaagatcagcattcataaaaaatataaaacaaaatgctcacatagtagaatggtccccaagaggagagcagtatgtagttatcatacagaataaaatagacatctatcagcttgacactgcatccattagtggcaccgtcacaaatgaaaagagaatttcctctgttaaatttctttcagagtctgtccttgcagtggctggagatgaagaagttataaggttttttgactgtgattcactagtgtgcctctgcgaatttaaagctcatgaaaacagggtaaaggacatgttcagttttgaaattccagagcatcatgttattgtttcagcatcgagtgatggtttcatcaaaatgtggaagcttgagcaggataagaaagttcccccatctttactctgtgaaataaacactaatgccaggctgacgtgtcttggagtgtggctagacaaagtggcagacatgaaagaaagccttcctccagctgcagagccttctcctgtaagtaaagaacagtccaaaattggcaaaaaggagcctggtgacacagtgcacaaagaagaaaagcggtcaaaacctaacacaaagaaacgcggtttaacaggtgacagtaagaaagcaacaaaagaaagtggcctgatatcaaccaagaagaggaaaatggtagaaatgttggaaaagaagaggaaaaagaagaaaataaaaacaatgcagtgaatcacagatgtctcctgaaagaactcttttagatgaaatcattctactcaaatgtaccttaattttttttttttttccctgagtaaaagcaagaaatttcttcctttggaaaaaatatatatattaaaaaaccacttttagatggttttttttaaaaaaaaaaaaaaaaactggtaaaattacttttggcaggcagtgttttatgaattatgtatcatgttgatatataatatgttgatgtgtcatgtaatttttactttgtacaaaaaaaaaaaaaaaaaaaaaaaaaaaaaa

SEQ ID NO: 25775 - DNA, 563 bp, Homo Sapiens
ggggagctgcggcgggcgggccggcgcggggagctgtgggcggcagctgcgtctcctgccaccgccctccctccgccacgatgccggggatcgacaagctgcccatcgaggagacgctggaggacagcccgcagacaaggtctttactaggtgtatttgaagaagatgccacagctatttccaactatatgaaccagttgtatcaagctatgcatcggatttatgatgcacagaatgaattaagtgcagcaacacacctgacctcaaaacttttaaaagaatatgaaaaacagcgttttccattgggaggtgatgatgaagttatgagctctacattgcaacagttttcaaaagttatagatgagcttagctcttgtcatgcagtgctttcaactcaacttgctgatgccatgatgttccccattacccagtttaaagaaagagatctgaaagaaatactaacattaaaggaagtatttcagattgcaagtaatgatcatgatgctgcgattaatagatatagccgtttatcgaaaaaaaaaaaaaaaaaaaaaaaaaaaaaa

SEQ ID NO: 25776 - DNA, 809 bp, Homo Sapiens
gggggaggcagtgtgtttccgcccagagctggagtctcccagctgccagccgaccccgaacccgcactcccgccaaccgcgctttttgtgggcggtcggaaaccacagcctccgttggatatgttcggtgcatgttataaacaaccacttaaaccctccggatctgagcctcccgcagaggaatgcagaatgacgccacggcacgcaggatgtgatgtcaccgagatgcagaggatactcagtcaaccaacatttactgagcatctacttcgtgccgtatgtcttgtcaacggaaaggggtccctatccagaccccaagagagcattcttggatctcttgcaagaaagaatttgaggcgaatccatagagtaagcttagtgatgtgtgtcagacctctgagcccaagcaaagccatcatatcccctgtgacctgcatgtatacatccagatggcctgaagcaagtgaagaatcacaaaagaagtgaaaagggccggttcctgccttaactgatgacattccaccattgtgatttgttcctgccccaccttaactgagcgattaacctgtgaacttccttctcctggctcagaagcttccccactgagcaccttgtgacccccgcccctgcctgccatagaacaaccccctttgattgtaattttcctttacctacccaaatcctataaaacggccccacccctatctcccttcgctgacactctctttggactcagcctgcctgcacctaggtgattaaaaagctttattgctcacgcataaaaaaaaaaaaaaaaaaaaaaaaaaaaa

SEQ ID NO: 25777 - DNA, 1620 bp, Homo Sapiens
ggggagctgattcatagccccggcccgggccgcctctgcacgtccgccccggagcccgcacccgcgccccacgcgccgccgaggactcggcccggctcgtggagcccttcgcccgcggcaaaaccagaactgatggctctatttgcagtctttcagacaacattcttcttaacattgctgtccttgaggacttaccagagtgaagtcttggctgaacgtttaccattgactcctgtatcacttaaagtttccaccaattctacgcgtcagagtttgcacttacaatggactgtccacaaccttccttatcatcaggaattgaaaatggtatttcagatccagatcagtaggattgaaacatccaatgtcatctgggtggggaattacagcaccactgtgaagtggaaccaggttctgcattggagctgggaatctgagctccctttggaatgtgccacacactttgtaagaataaagagtttggtggacgatgccaagttccctgagccaaatttctggagcaactggagttcctgggaggaagtcagtgtacaagattctactggacaggatatattgttcgttttccctaaagataagctggtggaagaaggcaccaatgttaccatttgttacgtttctaggaacattcaaaataatgtatcctgttatttggaagggaaacagattcatggagaacaacttgatccacatgtaactgcattcaacttgaatagtgtgcctttcattaggaataaagggacaaatatctattgtgaggcaagtcaaggaaatgtcagtgaaggcatgaaaggcatcgttctttttgtctcaaaagtacttgaggagcccaaggacttttcttgtgaaaccgaggacttcaagactttgcactgtacttgggatcctgggacggacactgccttggggtggtctaaacaaccttcccaaagctacactttatttgaatcattttctggggaaaagaaactttgtacacacaaaaactggtgtaattggcaaataactcaagactcacaagaaacctataacttcacactcatagctgaaaattacttaaggaagagaagtgtcaatatcctttttaacctgactcatcgaggtgagactagagttgtcacagcccaccgtggccactaacgtgtctttgtttcacagactgtgtgatcaagtaaatgtgctgtagatctttgcctcattcacagcggaggtgagagttagaatttatacctattgttcatgccacgtttctcctcatggatgcacgcatcccctattatttgtttcttttaataatgtcacgagcaccaatgagcttactacccaacttcaaaactaggactctaacaataacttctgtcatatctcatcctgtaacgcccccaccttcgctccttccgccaagataattatcactttaaattgtgtgcgtgtgtattctcatttcttatgtgatggtaaaaatgcctttattttgtttggttttaatgcatagaaaggacatcaagctgtatgtaataattcagtaattatgtttatataatattaaattgctaatatttgccctcaaaaaaaaaaaaaaaaaaaaaaaaaaaaaaa

SEQ ID NO: 25778 - DNA, 1088 bp, Homo Sapiens
gggggagtcgggaaaatggctgcgagtacctccatggtcccggtggctgtgacggcggcagtggcgcctgtcctgtccataaacagcgatttctcagatttgcgggaaattaaaaagcaactgctgcttattgcgggccttacccgggagcggggcctactacacagtagcaaatggtcggcggagttggctttctctctccctgcattgcctctggccgagctgcaaccgcctccgcctattacagaggaagatgcccaggatatggatgcctataccctggccaaggcctactttgacgttaaagagtatgatcgggcagcacatttcctgcatggctgcaatagcaagaaagcctattttctgtatatgtattccagatatctggtgagggccattttaaaatgtcattctgcctttagtgaaacatccatatttagaaccaatggaaaagttaaatcttttaaatagcttagcagtgggccactgaatgaatgtactttatacatagcaataataaaaaaaagatatcataaataaagttaaaaaggatggtagagaagaaaatattcttaggaatgactaacaggataagtaacaacctgattatttatttactttaggttatataaggttcttcatgcctgtgaattaatattattgtgtaagaattaagttaaaaagcctgggctgacttttaaatttataaattcatttatcatgtttatagtatatttattgtttttctttcatggctattaaaaagtatgactgtaaaggacaatgcaagtaaaccaacttaatactgtattgaataataagtacaatttattattttactttgaaacattatgaatttactttcctactttttcttagttgttatctatataaattgattaaaaaaacattttatgtacttctcatttcctagtacaggttgagtatcccttatttgaagtgcttgggaccaaaagtgtttcagatttcagatttttttcagattttggtatatttgcattatacttactggttgaaataaaaaatgctgcagtgataaaaaaaaaaaaaaaaaaaaaaaaaaaaaa

SEQ ID NO: 25779 - DNA, 1207 bp, Homo Sapiens
gggggagacattcctcaattgcttagacatattctgagcctacagcagaggaacctccagtctcagcaccatgaatcaaactgccattctgatttgctgccttatctttctgactctaagtggcattcaaggagtacctctctctagaactgtacgctgtacctgcatcagcattagtaatcaacctgttaatccaaggtctttagaaaaacttgaaattattcctgcaagccaattttgtccacgtgttgagatcattgctacaatgaaaaagaagggtgagaagagatgtctgaatccagaatcgaaggccatcaagaatttactgaaagcagttagcaaggaaaggtctaaaagatctccttaaaaccagaggggagcaaaatcgatgcagtgcttccaaggatggaccacacagaggctgcctctcccatcacttccctacatggagtatatgtcaagccataattgttcttagtttgcagttacactaaaaggtgaccaatgatggtcaccaaatcagctgctactactcctgtaggaaggttaatgttcatcatcctaagctattcagtaataactctaccctggcactataatgtaagctctactgaggtgctatgttcttagtggatgttctgaccctgcttcaaatatttccctcacctttcccatcttccaagggtactaaggaatctttctgctttggggtttatcagaattctcagaatctcaaataactaaaaggtatgcaatcaaatctgctttttaaagaatgctctttacttcatggacttccactgccatcctcccaaggggcccaaattctttcagtggctacctacatacaattccaaacacatacaggaaggtagaaatatctgaaaatgtatgtgtaagtattcttatttaatgaaagactgtacaaagtagaagtcttagatgtatatatttcctatattgttttcagtgtacatggaataacatgtaattaagtactatgtatcaatgagtaacaggaaaattttaaaaatacagatagatatatgctctgcatgttacataagataaatgtgctgaatggttttcaaaataaaaatgaggtactctcctggaaatattaagaaagactatctaaatgttgaaagatcaaaaggttaataaagtaattataactcaaaaaaaaaaaaaaaaaaaaaaaaaaaaa

SEQ ID NO: 25780 - DNA, 1713 bp, Homo Sapiens
gggggacacacacacacaagcacacacgcgctcacacacagagagaaaatccttctgcctgttgatttatggaaacaattatgattctgctggagaacttttcagctgagaaatagtttgtagctacagtagaaaggctcaagttgcaccaggcagacaacagacatggaattcttatatatccagctgttagcaacaaaacaaaagtcaaatagcaaacagcgtcacagcaactgaacttactacgaactgtttttatgaggatttatcaacagagttatttaaggaggaatcctgtgttgttatcaggaactaaaaggataaggctaacaatttggaaagagcaactactctttcttaaatcaatctacaattcacagataggaagaggtcaatgacctaggagtaacaatcaactcaagattcattttcattatgttattcatgaacacccggagcactacactataatgcacaaatggatactgacatggatcctgccaactttgctctacagatcatgctttcacattatctgtctagtgggtactatatctttagcttgcaatgacatgactccagagcaaatggctacaaatgtgaactgttccagccctgagcgacacacaagaagttatgattacatggaaggagaggatataagagtgagaagactcttctgtcgaacacagtggtacctgaggatcgataaaagaggcaaagtaaaagggacccaagagatgaagaataattacagtaagtaattttaagtactgctcatgaaccttagcaatctgttaatggatcaattttcaggtgacatgttttctcatcttccttttgcttcttggaaaaaaaattaaataaaatgtcacctaatttctctaaattgaactatgttgaactatgcccctaaaaatatctcttttaacagggcaaatctacttacattatagttggacctgataatccaagccaatttgaaaatatatactccttgtcctgaaaatgctcataagttaagcaaaatgtaaataatattattcacaccaaaatgtgacttaatattgtctaagcaaaactcattaagatatctaatttagaacttcataaattatcactaaaagctatttatcactagtttaaagagtagggaaattatttttattaatttgattttctttgaaataatattttcatgatgtaaattaaaatacttaatctgtgctaagatatgcattcctttgcaattgtgtataatgataaaatagaagggaatctgtggtatccttattcatttgagtcataatgagcttgtattaagttgatgacttatcaacttaggcagaaaaacagatctctcctaacgttttccttaactaaatcttttatgtcataaaagttctgtgctatcttaagaaaaatgtaaaggtgaggggaaaaaagtgggctggaagagatggtaattccatgtttttcaatttaaagccttacatttttcccaagaatcagttattcttcttatgttaaaatatcagggttgtgttttgcatttaatggttatgatgaataaccaacttcaatagtattaaatgtaatggaataagatacacacctcaacatgtacattaaggatttaaaatacttagtaaaaataaattttgtttacattactagcactcagaaaaaaaaaaaaaaaaaaaaaaaaaaaaa

SEQ ID NO: 25781 - DNA, 1482 bp, Homo Sapiens
gttttccagtggtaactgttactcttcaaaaagagggacagaaagtcaagacctaattgtggaaactcttttctctgccacgcttggtaataggaggcaacctctattaaatggacgataaaggctacttcatctaaagtgctttgagctcaagaaagagctgtcttcagcacctcaccatgtgtctacattttgttgcttagaaaagcctaggcatttctgtaacatttgcattccatattggaagaagagatttctacacatgaaaaaaatgcctttgtttagtaaatcacacaaaaatccagcagaaattgtgaaaatcctgaaagacaatttggccattttggaaaagcaagacaaaaagacagacaaggcttcagaagaagtgtctaaatcactgcaagcaatgaaagaaattctgtgtggtacaaacgagaaagaacccccgacagaagcagtggctcagctagcacaagaactctacagcagtggcctgctggtgacactgatagctgacctgcagctgatagactttgaggaaaaaaaagatgtgacccagatatttaacaacatcttgagaagacagataggcactcggagtcctactgtggagtatattagtgctcatcctcatatcctgtttatgctcctcaaaggatatgaagccccacagattgccttacgttgtgggattatgctgagagaatgtattcgacatgaaccacttgccaaaatcatcctcttttctaatcaattcagagatttctttaagtacgtggagttgtcaacatttgatattgcttcagatgcctttgctactttcaaggatttactaaccagacataaagtgttggtagcagacttcttagaacaaaattacgacactatttttgaagactatgagaaattgcttcagtctgagaattatgttactaagagacagtctttaaagctgctaggggagctgatcctggaccgtcacaactttgccatcatgacaaagtatatcagcaagccggagaacctgaaactcatgatgaacctccttcgggataaaagtcccaacatccagtttgaagcctttcatgtttttaaggtgtttgtggccagtcctcacaaaacacagcctattgtggagatcctgttaaaaaatcagcccaaactcattgagtttctgagcagcttccaaaaagaaaggacggatgatgagcagttcgctgacgagaagaactacttgattaaacagatccgagacttgaagaaaacggccccttgaagagctccccggcccctgtcacagtcagtcgtctcatttgtccagtttgtacagtgtgtcatttcagaaagtcatcattcttgggaagactttggaggtgcctattttttctgctgtaattgttctgggtagatggagtataaacatttgaatggaaaaaaaaaaaaaaaaaaaaaaaaaaaaaaaaaaaaaaaaaaaaaaaaaaa

SEQ ID NO: 25782 - DNA, 1813 bp, Homo Sapiens
actttttaagagagagacaggctcgctctgtcacccaggccggagtgcagtggcgcgatcatagttaccgcagcatcaaattcctggactggagcggtccttttgcctcggcctcgcggatagctgggaccacaagcagtagagacaagatctccgtatgttatacaggctggcctcaggtggatcctcttgccttggcctcccaaacaccgggattataggcgtgagcccccgtgcctggcctcaaattttattttagctcgaccctatggcagtttgtgtttggaaatcgtgatgtgaagtcatcagtatctgtgcatatccctaaactaatggtttaagcgttgaagcatgcgcaagcaacatgaacaactgaatacagaaagtaactgaaagcagcacagagactgtgtcgtccctacagacttctaaccctgcattcagcaacatcattcgacccgaagccagattcaaaccctatgtcttctagcaggttctgaatttagaggacaaataaggtgacaggtactaagagaagagtgaattaagtgaaaatcttccctttgttaaggagctttttaacaagagtgtctttgctgggtggtgattgggatgtaacagatcagttctactggacttgtagcttgatagtgaaataaggagcttgggctaaggtatcaatcaacacactgcttccttcctccagaaggtcttactgtgaaggaaaaaatgtcagttgaactaaattgtgcttcacgcctcggtagatttgcattctgatgcaagcccccaacctcacagaccaagaggatccctggctgcctgtgaatggcccacatttgagtggtgctaacttgatgtgagtaggcattaattatgggtgcagctactaagatgggaaaaactatcacgacagtggcaccacctgatttcatgatgtaccatatgcagtaacacatgtttgaggtacagaattgaagctgatttttctgcaaaagatgaatttctataaacaatcccatttttatattttattattaaaacaaaaatacctctctttgctagagagtatatgtatgacttaaattattagctatggtttgcatttagtacatggcagattgcctgtaagtctgttcattttaacaacatacggggctgggcacggtggctcacgcctgtaatcccagcactttgggaggttgcgggtggatcacttgaggtcgggagttcgagaccagcctggccaacatggcaaaaccccgtctctatgaagaatatagaaattggctgggcgtggtggcgggcacctgtggtcccagctactcgggaggctgaggcaggagaatcgcttgaacctgggaggtggatgttgcggtgagcagagatcgtgccattgcactccggcctgggaacaagagtgaaactctcaaaagcagaaacaaaaacccaacatatatgggctgttagatagtaattgtaatttcgtataaatagtaaatgagtacatcttgattaaaagctatgaattcagaattgcttttaaatatatagggggttttttgaaatttattacagtgcaattgaaaatacacttaaaatactgcaggatgcttagtgctcagtgttatgtatgaacttgtggactttacaatgcaggttgagaactgctaatgtatagaatgactaaacagctgtctttcagggtatctcatttttaaaggtataaggaacaaactttaatgtattgaaatgcataaataaaatttattttttataaaaaaaaaaaaaaaaaaaaaaaaaaaaaaaaaaa

SEQ ID NO: 25783 - DNA, 1988 bp, Homo Sapiens
ggggagtgcctgtgtggctgagggacacgtccaagctgcagtcggctctgtggttgtggacacctggcagaaccatgccttctctagtctgggtcatccaaacacacgtggggtgcaggggccaggtggagccctcttgtcgtttttgttatctaacggtaattacggagtccagaaagagaattggaaatgccggcagtttaattaaagctgaatggcaggagaggggcatttggaggctccctccctgccttcactccccgtcctgccgcccaggcaggatgtcagatgaggagacgttgagctcatcaaacacccaatgagaagtcttacaacatcagaagctgtctgccaatgcgcctgcgacagcttatagaaactgctgccgcctcgaatcaacctctctccccaggcattgcacgtcagtaggtaaccaggtcattgctgtggtcatggacctcttcactgatggtgatatctttcaagacattgtggatgctgcctgtaagcgccgggtcccagtgtacatcatcctggacgaggcaggagtgaagtatttcctggagatgtgtcaggacctgcagctcactgacttccggattcggaacatccgtgtccgctctgtgacaggcgtcggcttctacatgcccatggggaggatcaaggggaccctgtcatcaaggttcctgatggtggacggtgacaaagtggccactggatcttacaggttcacctggagttcctcccatgtggacagaaacctcctcctgctcctgacaggacagaacgtagagccctttgacacggagttccgggagctgtacgccatctccgaggaggtggacttgtaccggcagctgagcctggcgggcagggttggcctccattactcctccactgtggctcgaaagcttatcaaccccaagtacgccttggtgtcaggctgccgccacccgcctggggagatgatgcgctgggctgcccggcaacagtgggaggcgggcggcaacccggaggggcaggaggagggcgccagcggtggcgagtcggcctggcgcctggagagcttcctgaaagacctggttacggtggagcaggtgctgccccccgtggagcccatccccttgggagagctgagccagaaggatggcaggatggtctctcacatgcacagagacctgaagcccaaatcccgagaggcacccagccgaaacggcatgggagaagcggcccggggggaggccgcccccgccaggcgcttcagcagcaggctcttcagtcgccgagccaagaggcctgcggcgcccaatggcatggccagctctgtctccaccgagacctctgaagtggagtttctgacggggaagaggcccaacgagaattccagtgctgacatctcaggtaaaacaagtcccagttctgccaagcctagcaactgtgtgatttcctgagctgcgggatggtggtgggcaggacgtgtggatgcctgcctgccctgccctgtgctgtggagagcgcaggtcgcacactgcaccagtttgcacatcagacgccaactggccttctgccctgcagcctccgtcctggcctcagggacgctggatcccaaatgagagggtccgaagcatctcagtcacacgcctccaccggactgtcggtggctgggcaggggtcagtgccacggcctccttgtttacatgaagtggaagcttgaccagtgtctgctcgcctttgtgccccaccccctccgctgattgccagatggggtgagggcccattctttaaacctttatggggtggggtgtctggggcagctgcagtggcttctcctttcccaggcttcctggtgcttctggttccccacgccactccccacccaagagattggtggaataaaagggaagagggcagggccctgagcctggaaaaaaaaaaaaaaaaaaaaaaaaaaaaaaaaaaaaaaaaaaaaaaaaaaaaaaaaaaaaaaa

SEQ ID NO: 25784 - DNA, 2030 bp, Homo Sapiens
aggggagccgtctgtcacgcccaccctgtgaagcaacttctggcattcaggcagcttgggagaaactaagtgaacggaatgcagtactgaggttcaagaaagctgtacgccatttctttccaacttaaatccttcagtaacaacaaacaccactcacttcaagatgcattgccagccccgtggcttccctcagctcttggccacaacttgaaaactgtcttgaatgaagtacttggggagaagacaggccactgccctctgttccacagttttcttcatgcacggggtcctcctgttaacaattactgttgtgtacatataaggtatttttagagaagagaaacaggcctttattttcctatgtccttttttacgtttagaatagtcacccgaggggggatcagctcaactgtactgtgggagaaattcttttccaacaaacctcatgctcgtttttctgtggtgcaatttcaagggcaacgtgttctgtcctcacctcactctggtactcgcctcttggggcggctcagcccattcatggggatggcaccaagcggccatgctcagtcttccagccccgctgagggtaaaccgaggcctctggcagctgtgcacaggtgctggcctctggctccttcaaggagcactgcctgtcactcgctcctgggctgtctagccatgtctcccacccccactttaccgcagccagctgctgggatcaaagcaagtctgttcttatgttatttgcctgtatgaaatcatttctcattttatcacaattccttcaactcagcttactcgcgtggctgcctgttcatatttgaaagcagccaccgtgctgtggctttggtttggaaaagcatagcacgcacttcccttggttttcccttcccagagccgaccgcagctggtcagccctctcttcccgctcctgaacctttacttactgactttgagctctgtgactccgtcggttctcgcaggaattaactaacttaccaattggttcaatccacttgagcgccatagctctgagctcctctgtgtgacatgccacagatgactattgcacacctgggtcctgccccagcaggccatgcccctcccatgtgccgtgcctgttgctgcagctgccccccgaccccgccactggctgcaggaattcagcctttagaggcagaggcagctgcagcggcccctgaggtcaaaccccagtgtgactgcatagcagtgttagctggttggtttcaaactactggattccaggcaaaggcctacagattgaccttattatttttgaaaatatgttaagggttttttcatagagagagaaagaatggatttttttttaactgggaacctcctgattcttacggaaaattatccttctataagaagataccagagagatttattcaaggtaatttgataacctaaaatcaattctccattttttatcatatgtgggatttgttgctaagtcgtgttcaacaatagcttttatgttcctaacatatctgaaagcttatttatgaatggatatactggattattgatatactgattttttttttaatggggacatttgccattttcttcccagaaatatgtaatcccctggctgactaggactgttaaacatagtgtggactggatgatgccttcgacaaaccagagaagccaagttggggggagctggtgcctggagtgggccctgtgcacctcacctggcggaggctgggggggctctgtcagcaggaccctagaggagactctcattcgattttaaagaagcacaacgggtcattttcctttgtatgttcctagcgcagaactgtttctaaaacaacttgaagtatagttttgttatctaagcaatttttgttttaagtaagtaagtgtactagaatgcgaagccgttatggttcaggtttttaaaaactggtacagtattgtatctgtctcatctgttgcactgtatttcaatcatctgtaattaaaatgatcatatgtttaaaaaaaaaaaaaaa

SEQ ID NO: 25785 - DNA, 2521 bp, Homo Sapiens
accatgccgactgtcagcgtgaagcgtgatctgctcttccaagccctgggccgcacctacactgacgaagaatttgatgaactatgttttgaatttggtctggagcttgatgaaattgtatgtattggatatttgtctatttttcaaagattgtgtgcataagcttatttttcagggttatactgtatttcatctttgttaccttatagttagactaaggtgataatgtttgtgggccatgatttctgtgttcagagggctaagctccatgtctgtctgttgccttgactaaaatctcaaaaggagttcatgccttattccatctacaatcaccttgttaccaggctcatgcctataataccagcactttgggaggctgaggtggatggattacctgaagttgggagtttgagactagcctgaccaacatggagaaaccttctctctactaaaaatacaaaattaattggatgtggtgagtagctgggattacaggaaggagtccttatcttggacctgaggctgctttcttgaagaaaacttgactttatttcatttagtgggaagagcagcagcccagctaataagttctaatatgcaataggctgcaggctgtgaagtctgaagctaaggagctgagggcttaacaagtttctagaagctgccatcaacatgccaagtcagtaaaactgaaagctggtcagatttcaaggtctggggaggaatccactgcatagtgggtcttgagctctagagagctaggccttgctaaaataaaagaattaccttacctaccatctttgttccaggctccgtagaatttgtgacagccctggctgacctccgagcagaggctagctgtcccatctgtctggactacttgaaagacccagtgaccatcagctgtgggcataacttctgtctctcctgcatcattatgtcctggaaggatctagatgatagtttcccctgccccttttgccacttgtgctgtccagaaaggaaatttataagcaatccccagctgggtagtttgactgaaattgctaagcaactccagctaagaagcaagaggaagaggcaggaagagaagcatgtgtgtaagaagcataatcaggttttgactttcttctctcagaaagacctagagcttttatgtccaaggtgcagtttgtccactgatcaccagcatcgctgtgtttggcccataaagaaggctgcctcctatcaggaaaaaactggagcaatacaatgcaccgtggaaggagagagtggaactaattgaaaaagtcataactatacaaaccagaaaatcactggaactgaagaaaaaggtaaaacatacggcagaagaagtcaagtctgaatttgagcaacttaggttatttctgcaaaatgagcaagagactgtttttgggcaattacaagatgacgagatggatattttagcacaactaaatgaaagcctaacaaaattttcagattatacctcctcattaaaatatctactaaagaagatagagagcatatatgtgaagtcagaactggaattactggctgatgttaaggatatctatcacagacataagaatttaaaattccctaaaccttttttattcaaattaaaagaatatggttaccatctgtctccacaatattgtggccaaaacaaaattatcaagcgatttcaagtagatgtaattctagatcctgaagcagcacatcgtaaacttatagtctcagaagatagaaaaactgtgcgatatggaaatacaacacaaaacttacctcataacccaagaagattttatctgctcccagctgttctgggttctaagggataaaattgtggcaggcagtaccgggaagtagaagttaaagacatgcctgaatggattcttggtgtctgtagtgactctcctcccagaaggaggaagagtcaaccaattttagtacaggatggattatggagaatttggtaatctagtcggaataattatattgtattgggccataaggaaattattctgctgccaaaagtaacacctagtaagattggcatttttttagactgtgaaatgaatgaggtttccttttataatttgaatgatagatctcttctctgtacttttaatgatgattttacaggagaactttggccttatttttatactggaactgactcaaaacctcttaaaatttctacagtaacagattctgtattttctttcacctagtagacataactgagccagttaatctagttttggccattctgtattttgtccagtttttctcataaaaaaacaatattttttatctcaatttcagcaacttccaaaaaatgtgattatgggacctactttataataaattatggggtcaatgacaaagtactttagaaattctacggtaaaatacttgaaaaatatattactgaaggaacgtattatgtaagaaaatctattacttttgtaattgccaataaaagcccaatttttttctcaaaaaaaaaaaaaaa

SEQ ID NO: 25786 - DNA, 2493 bp, Homo Sapiens
cctgccagcaacaagcaggagctgaaaaccagaagttgaggcgtgagtttggccactccgtagtgtgcacttggtgagggcagcagctcgccacagctgccagccatctgtccattcacccatctgtcctctggcagcccgctgttcagacctgtctgtctgtccgcccatctgtaagcccatctctgtcccattgtctatctgaccatctttctcttactgtcctctttgtctagctatctggcctatctgtcgatccatcttcgtgtctgtcttcagcccccacctgtttgtccatctgtccaattacctgtgactctgtgcatcttcttgtccattcatctgcccacccatccgtccctccgtctgcccaccagccgcccctctcctcctgggctgcagagccatggcccggggctacggggccacggtcagcctagtcctgctgggtctggggctggcgctggctgtcattgtgctggctgtggtcctctctcgacaccaggccccatgtggcccccaggcctttgcccacgctgctgttgccgccgactccaaggtctgctcggatattggacgagccatcctccagcagcagggctcacccgtggatgccaccatcgcggctctggtctgcaccagcgtcgtcaaccctcagagcatgggcctgggcggaggggtcatcttcaccatctacaatgtgacaacagggaaggtggaggtcatcaatgcccgggagacggtgccggccagccacgccccgagcctgctggaccagtgtgcacaggctctgccactgggcacaggggcccagtggatcggggtgcccggggagctccgtggctatgccgaggcccaccgccgccatggccgcctgccctgggcgcagctgttccagcccaccatcgcgctgctccgaggggggcatgtggtggcccctgtcctcagccgtttcctgcacaacagcatcctgcggccttccttgcaggcgtcaaccctgcgccagctcttcttcaacgggacagaacccctgaggcctcaggacccactcccatggcctgcactggccaccaccctggagaccgtggccacagagggcgtggaggtcttctacacggggaggctgggccagatgctggtggaggacattgccaaggaagggagccagctgacgctgcaggacctggccaagttccagcccgaggtggtggatgccctggaggtgcccctgggggactataccctgtactcaccaccgccgcctgcagggggtgccattctcagctttatcctcaacgtgctaagagggttcaacttctcaacagagtctatggccaggcctgaagggagggtgaacgtgtaccaccaccttgtagagacgctcaagtttgccaaggggcagaggtggaggctgggggaccctcgaagccacccgaagctccagaatgcctcccgggacctgctgggggagaccctggcccagctcatccgccaacagatcgatggccggggggaccaccagctcagccactacagcttggccgaggcctggggccacgggacaggcacgtcccatgtgtctgtgctgggggaggatggcagcgccgtggctgccaccagcaccatcaacacaccctttggagcgatggtgtattcaccacggacaggcatcatcctcaacaacgagctcctggacttatgcgagcgatgcccccggggttccggcaccaccccctcacctgtgagtggagacagggtgggtggagctcccggaaggtgctggcccccagttccaggcgagcgttccccatcctccatggtgccctccatcttgatcaacaaagcccaggggtcgaagctagtgattggcggggctggcggggagctcatcatctctgctgtggcccaggccatcatgagcaagctgtggcttggctttgacctgagagcggccattgcagcccccatcctgcatgtcaacagcaagggctgtgtggagtacgagcccaacttcagccaggaggtgcagaggggactccaagaccgtggccagaaccagacccagaggcccttcttcctgaacgtggtccaggctgtgtcccaggagggggcctgtgtgtacgccgtctcggacctgaggaagagtggggaggccgcaggctactaagacactgctctgcccagagctgaagtctggccccaccatgagtcctgtgtccaggccggacatggctgggggaccaactactctggcaggatctggacccctggcaggggagtccagctgagagtggaagaggtggcggggaccagctgggcagatgagaggctgagcctcatccctaaccccctttcccagagcccctggtggtcctgaaccggcccctctatccctccgcaggcctcttgcctggggccactctcccaccctctcgatctgtatatcctccagtccaagattaaagaggcggactgtgaaaaaaaaaaaaaaaa

SEQ ID NO: 25787 - DNA, 2199 bp, Homo Sapiens
gagcctcccaagatggcggtgtgcatcgcggtgattgccaaggagaattaccccctctacattcgcagcacccctacggagaacgagctgaagttccactacatggtgcacacatctctggacgtggtggatgagaagatctccgcaatggggaaggccctggtcgaccagagggagctgtacctgggcctgctctaccccacggaggactacaaggtatacggctacgtcaccaactccaaggtgaagtttgtcatggtggtagattcctccaacacagcccttcgagacaacgaaattcgcagcatgttccggaagctacacaactcctacacagacgtgatgtgcaaccccttctacaacccgggggaccgcatccagtccagggcctttgataacatggtgacgtcgatgatgatacaggtgtgctgagtgagctgtgctgccagccatcgcagaggagcccgcgcacgactgtggtggggccgtcggtctgttctggttgcctcttcctgaatgggacgcctggggctttcagggcaggcagctgtgcatgttctctcaactaaaggtcttgtgagaggagatttggctttttccttccgtgtcagccaaggatttaattaagaagaattcaactaaggacttttctggggtgtgggcagaggtttgggatcagatggcgcaggtagcctgtcctcagttgtcccaaaggggcagaggcaggggtgcctggagccaagagttcctgagcctgcaggacctgtgaccatgtgggtcacccactggctgaacaggtgggctggtctggagggggtggcctcctgagcccagaaccagcctaggatctaggggcacaaggggagccggcgtggcttcccacaggggagggccctcctctttctggacttggcctccattctttgcatctggctcaatgtctggattccgcccggccttaaaaggagcccttgtgaaacctgggaagcctcgtggccccgcggcgttggctcagctgcagccctggtcctaaaccttggagcgcagacttgaggcaccccctcctgcctgttggtgctgagggggttgggtgctgtgtcacttgatgacgtggctgactaccacccagggcagcggccgagcccatagtggcgtcagtgccgccggcgtccttggggtccagcggtcaaggctcagcccgctgaggggacccccccggagttggttccagcactggtccaggactggagagtttctcaaggaccttgaggaccccagaagcccttgcagcaggaaaggctgtaagggggggtcagcctagggcaggacctagggaggggaactttcttgatacgtatttgccttttcatcccatctagcaagcacagtgttaattttagaaattatagaagaaaaaatcagcaaggagtgtgggaaaactgcatgccccaggcctcccccgccccagggtgaattggaagtcctggaatgggccgaggcacaccaggcagctgatctgggtgcatgtgggccacagaccactctcacaaggttaaatctttaacaagagcctcatgtttgttaggagaaggtgggaccccagcccaagcacttccccattgcagcctggcatgaaatctttgccttttagtggggatcactcctgcccgagtcctggctgtggtggggactctgcaagttgctaacccagcgtccattctctttcctccgtactaacagaaccccggtgcctctgcccagttccaatagcgggcagacgagagccatgtcctgggctcccttgcagcccggggtgtgcagctgtggcgtggaggtgggtggtgctgggagagacttgcagggaagctcctgtgaaggggactcagctgccacatgcaggacccttcccctttgccttcttcctgcctggaacatggatgtgatggctggtgctgggacagctgtcctgagagcgtgaggaaagggtcacaccctaaggacagtggagcagaacacaggaaggaccctgggcctttgctgacgcagaacgcgggaaggacgctgggcctttgctgacgcagaacgcgggaaggaccctgggcctttgctgacataccagccccagactacttaaattcagctttttttttaatgtgagaaaataaatgcacccctctctggtttaaaaaaaaaaaaaaa

SEQ ID NO: 25788 - DNA, 3775 bp, Homo Sapiens
ggcagctaggagggttgctccgggcttggtgctcactgcgacttcccgcgcagggcccggtcggactaggacccgcggcctgagagacgctggaggatgcggacgcggaggccgcctggggtagcggcggcgggagtcctggcgctctgcaggtcagaagttgagtagcaggggcctaggagggctcgaagccttcacagcgatggcagagaagcgacccctgagaaccctggggcctgtgatgtatggcaagctgccccgcttagagacagactccgggctcgagcacagcctgccccactctgttggtaaccaggatccctgcacctacaaggggtcctacttctcctgccccatggcgggtactcctaaggccgagtctgagcagttggcgtcctggaccccatacccacccttgtactctaccggtatggcaggacccccacttcaggcagacaacctgctgaccaactgcctgttctaccgctcgccagcagaaggccctgagaagatgcaggactccagccctgttgagctcctgcccttcagtccccaggctcactcctacccaggcccaccactggcagcacccaaacctgtctaccgcaaccctctgtgctatgggctctcaacttgtctgggggaaggagcagtgaagaggccactggatgttgactggactctggcgactgggcccctgttgccctcagctgacccaccctgctctctggccccagctcctagcaagggccagactctggatggcaccttcttgcggggggtgccagctgaggggtccagtaaagactcctcagggagcttctccccatgccagcccttcctggagaaatatcagaccatccacagcacgggcttcctggcctccaggtacacaggtccttaccctaggaactccaagcaagcaatgtctgaggggccctcaagtccttggacccagctggcccagcccctggggccaccctgtcaggacaccgggcccacccactacccaccaccccaccacccaccaccccaccctccacaggccctgccttgccctccagcctgtcgccacccagagaagcagggcagctacagcccagcactcccactgcagcctctggggggccacaaggggaccgggtaccaggctggtgggctgggcagcccctacctgaggcagcaggcagcccaggcaccttacattcccccactggggctggacgcttacccctacccctctgcccctctcccagcaccctctccaggcctcaagctggagccgcctctcactccacggtgcccattggactttgccccccagacactgagttttccttatgcccgggatgacctctctctctatggagcatcccctgggcttggagggacaccaccttcccagaacaatgtgagggctgtgccacagcccggtgccttccagagggcatgccagcctttgccagcgagccagccctgctcagagcctgtgaggcctgcacaggaagccgaagagaagacctggctgcccagctgcaggaaagagaagctccagccccggctcagtgagcactctgggccgcccatcgtcatccgagacagtccagttccctgtacccccccagcactgcccccctgtgcccgggagtgccagtctcttccacagaaggaggacgcaaggccacccagctctccaccaatgcctgtcattgacaatgtcttcagcctggccccctaccgtgactatctggatgtgccggcacccgaggccacaactgagcctgactctgccacagctgagcctgactcagccccagccaccagtgaaggtcaggacaaaggctgcagggggaccctgcctgcccaggagggcccctcagggagtaaacccctaaggggctcacttaaggaggaggtagccctggatttgagtgtgaggaagcccacagcagaggcctcccctgtcaaggcttcccgttctgtggagcatgccaagcctactgcagccatggatgtgccagatgtgggcaacatggtgtcagatctgccaggcctgaaaaagatagacacagaagcaccaggcttgcctggggtgccagtgaccacagatgccatgccaaggaccaacttccacagctctgtggccttcatgttccgaaagttcaagatcctccgtccggcacctttgcctgcagccgtggtcccgtccacgcccacctcagctcctgctcccacacagcctgcacccacccccacatctgggcccattggactgcggattctcgctcaacagcccttgtctgtgacctgcttcagcctggcactgcccagccctccagccgtagctgtggcctcccctgcccctgctccagctccatcccctgctccggctcgagctcaggctccagcttcagcccgggatccagctccagctccagctccagttgcaggccctgctccagcatctacttcagccccaggggactccctggagcagcattttacaggactacatgcgtccctgtgtgatgctatttctggctccgtcgcccactctcctccagagaagcttcgcgagtggctagagacggctgggccctggggccaggctgcgtggcaggactgccagggtgtgcaggggctgctggccaagctgctgtctcagctgcagcgcttcgatcgcacccaccggtgccccttcccccatgtggtgcgagctggcgccatcttcgtgcccattcacctggtgaaggagcggctcttccctcggctgccacccgcttctgtggaccatgtgctgcaggagcatcgtgtggagctgcggcccaccacgctgtcggaggagcgggcactgcgggagctcgccctgccaggctgcacctcacgcatgctgaagttactggcgctgcgccagctgccggacatttaccccgaccttctcggcctgcagtggcgcgactgtgtacgccgccagctgggtgactttgacactgaggctggagctgtgtcctcctcagagcccactgtggccagagatgagccagagagcctagccctggctcagaagtcaccggcccccaaggtcaggaagccaggcaggaagccaccaacccctggcccggagaaagcagaggcagctgctggggaagagtcctgtggtgcctcccctacccctgctaccagtgccagcccacctggccccacactgaaggcccgcttccgcagtctgctggagaccgcctggctcaatggcctggctctgcccacctggggccacaagtcctcaagaccagaccagccctcaccctgcccacagctgctggacagccagagccatcacctgtagcactggttgccagtgctgtgtgtatagcagtcactctccacccttcccttctgcctgcccagctgccccggggccacgagtggatgctggggctgtggctgctcccctggaggggttccatctctgaccctgtggcccattcagggtgggctgaagagcccctgagcttttaacgtgagggtctttattggataggactactccctatttcttgcctagagaacacacatgggctttggagcccgacagacctgggcttgaatcccggctcgtgttcttgctgcaggacctgggcaagaaacttcacctctgctgagccctcattccccatgtgtaaaatgggacaacgcaacctacctcacagggttgttgtggggatgctgcctgatacataccctgtccccaaaaaaaaaaaaaaaaaaaaaaaaa

SEQ ID NO: 25789 - DNA, 2466 bp, Homo Sapiens
ccgtctccgcctcgccgcagtcggggcagccgctcgcccctcttttccatgtatccgtccagagtttgagcggtgctgaactgtcagcaccatctgtccggtcccagcatgccttctgagaccccccaggcagaagtggggcccacaggctgcccccaccgctcagggccacactcggcgaaggggagcctggagaaggggtccccagaggataaggaagccaaggagcccctgtggatccggcccgatgctccgagcaggtgcacctggcagctgggccggcctgcctccgagtccccacatcaccacactgccccggcaaaatctccaaaaatcttgccagatattctgaagaaaatcggggacacccctatggtcagaatcaacaagattgggaagaagttcggcctgaagtgtgagctcttggccaagtgtgagttcttcaacgcgggcgggagcgtgaaggaccgcatcagcctgcggatgattgaggatgctgagcgcgacgggacgctgaagcccggggacacgattatcgagccgacatccgggaacaccgggatcgggctggccctggctgcggcagtgaggggctatcgctgcatcatcgtgatgccagagaagatgagctccgagaaggtggacgtgctgcgggcactgggggctgagattgtgaggacgcccaccaatgccaggttcgactccccggagtcacacgtgggggtggcctggcggctgaagaacgaaatccccaattctcacatcctagaccagtaccgcaacgccagcaaccccctggctcactacgacaccaccgctgatgagatcctgcagcagtgtgatgggaagctggacatgctggtggcttcagtgggcacgggcggcaccatcacgggcattgccaggaagctgaaggagaagtgtcctggatgcaggatcattggggtggatcccgaagggtccatcctcgcagagccggaggagctgaaccagacggagcagacaacctacgaggtggaagggatcggctacgacttcatccccacggtgctggacaggacggtggtggacaagtggttcaagagcaacgatgaggaggcgttcacctttgcccgcatgctgatcgcgcaagaggggctgctgtgcggtggcagtgctggcagcacggtggcggtggccgtgaaggctgcgcaggagctgcaggagggccagcgctgcgtggtcattctgcccgactcagtgcggaactacatgaccaagttcctgagcgacaggtggatgctgcagaagggctttctgaaggaggaggacctcacggagaagaagccctggtggtggcacctccgtgttcaggagctgggcctgtcagccccgctgaccgtgctcccgaccatcacctgtgggcacaccatcgagatcctccgggagaagggcttcgaccaggcgcccgtggtggatgaggcgggggtaatcctgggaatggtgacgcttgggaacatgctctcgtccctgcttgccgggaaggtgcagccgtcagaccaagttggcaaagtcatctacaagcagttcaaacagatccgcctcacggacacgctgggcaggctctcgcacatcctggagatggaccacttcgccctggtggtgcacgagcagatccagtaccacagcaccgggaagtccagtcagcggcagatggtgttcggggtggtcaccgccattgacttgctgaacttcgtggccgcccaggagcgggaccagaagtgaagtccggagcgctgggcggtgcggagcgggcccgccacccttgcccacttctccttcgctttcctgagccctaaacacacgcgtgattggtaactgcctggcctggcaccgttatccctgcacacggcacagagcatccgtctcccctcgttaacacatggcttcctaaatggccctgtttacggcctatgagatgaaatatgtgattttctctaatgtaacttcctcttaggatgtttcaccaaggaaatattgagagagaagtcggccaggtaggatgaacacaggcaatgactgcgcagagtggattaaaggcaaaagagagaagagtccaggaaggggcggggagaagcctgggtggctcagcatcctccacgggctgcgccgtctgctcggggctgagctggcgggagcagtttgcgtgtttgggttttttaattgagatgaaattcaaataacctaaaaatcaatcacttgaaagtgaacaatcagcggcatttagtacatccagaaagttgtgtaggcaccacctctgtcacgttccggaacattctgtcatcaccctgtgaagcaatcatttcccctcccgtcttcctcctcccctggcaactgctgatcgactttgtgtctctgttgtctaaaataggttttccctgttctggacatttcatataaatggaatcacacaaaaaaaaaaaaaaa

SEQ ID NO: 25790 - DNA, 1838 bp, Homo Sapiens
agctcagtcagaaatcagagcagtccagctttcctatctctacctcggtgctatgaagtcacttagtgctcttcttggctgtagtaaatatgctgagctcttgctgatcccaaaagttctcgctgaaaatggccacaactcagactgtgcaagttctccagttgttcacgaggatgtggagatgcgtgctgctctacagttcctgatgcggcacatggtgaagcgagcagtcatgcggtcacccataaagcgagcattggggttagctgatctggaacgggctcaagctatgatttacaaactggtggtccatgggcttttggaagaccagtttgggggcaaaattaagcaagagattgatcaacaagctgaagaaagtgaccaagcacagcaggcacagacaccagtgaccaccagcccgtcagcatccagcacaacttcctttatgagcagctccctcgaggacaccacaactgccaccactcctgtcacggacacagaaacggtgcctgcatctgagtcccctggagtgatgccacttagtcttctcaggcaaatgttttctagttatccaactaccactgtacttcctacacgccgtgcacagactcctccaatatcatcattaccagcctctccttctgatgaagtaggaagaaggcagagtttaacttctccagattcccagtctacaaggccagctaatcgcacagccttgtcagacccaagcagcagactttcaacgtcccctcctcccccagcaattgcagtccctttactggaaatgggcttctctcttcgacagattgctaaagccatggaagctacaggtgctcgaggagaggctgatgcccagagcatcactgttcttgctatgtggatgatagagcaccctgggcatgaggatgaggaggagccccagcctagcagcacagcagactccagacatggagcgacagttctggcaagtggtgggaagtcaaatgatccctgttatttacagtcaccaggagacataccatcagctgatgctgctgaaatggaggaaggctttagtgaaagccctgataatctggatcatacagagaacgcagcttctggaagtggaccaccaactagaggtcgctcaacagtaacaagaaggcacaaatttgacttagcagcgcgcactctgcttgcaagagcagcggggttataccgctctgtgcaggctcacaggaatcaaagtcggagagaaggaatatctttgcagcaagacccaggggcgttgtatgactttaatttagatgaggaattggaaattgatcttgatgatgaagcaatggaagctatgtttggacaagacctgaccagtgacaatgatattctgggaatgtggatcccagagcatgtttgtgagtctgaagacagggaagaagtggtcgtgtgtgaactttgtgaatgcaatgtcgtcagcttcaaccagcacatgaagagaaaccaccctggctgtgggcgcagtgcaaaccgccaggggtatcgcagcaatggctcctatgtggatggctggtttggtggtgaatgtgggagtggaaatccatactacctgctgtgtggcagctgcagggagaagtacttagccctgaagaccaagaccaagactacaaattctgaaaggtacaagggacaagccccagatctaatttatgcagacaggatagtgtgtatataataaatgaatgaataaataaataaataaataaaattttaaaaaaaaaaaaaaaaaaaaaaaaaaaaaaaaaaaaaaaaaaaaaaaaaaaaaaaaaaaaaaaaaaaaaaaaaaaaaaaaaaaaaaaaaa

SEQ ID NO: 25791 - DNA, 2315 bp, Homo Sapiens
gccaagcctcctgcctcgcaggtacctcctcccgcgcgcacgctccgcgcctgatggcagcgacaagtgccggctcgcggagagctagcggggctccctgggcccggtgcgcgcacaataacgcgtgaataactttttcttgcagcggtcccccgcgtcccggcctgcagcctccccgggcgccggcgcccccagcacgccccatcgggcaccccactctctccgaggtgtgggtgcggcgggctgatgaggtgatccctagcccgcctgggaggagcgcctggactcgcgggcggcggcgagcgcctttacaatggccctgaccctgtttgatacagatgaatatagacctcctgtttggaaatcttacttatatcagctacaacaggaagcccctcatcctcgaagaattacctgtacttgcgaggtggaaaacagaccaaagtattatggaagagagtttcatggcatgatctccagagaagcagccgaccagctcttgattgtggctgaggggagctacctcatccgggagagccagcggcagccagggacctacactttggctttaagatttggaagtcaaaccagaaacttcaggctctactacgatggcaagcactttgttggggagaaacgctttgagtccatccacgatctggtgactgatggcttgattactctctatattgaaaccaaggcagcagaatacattgccaagatgacgataaacccaatttatgagcacgtaggatacacaaccttaaacagagagccagcatacaaaaaacatatgccagtcctgaaagagacacatgatgagagagattctacaggccaggatggggtgtcagagaaaaggttgacatcacttgttagaagagcaactctgaaagaaaacgagcaaattccaaaatatgaaaagattcacaatttcaaggtgcatacattcagagggccacactggtgtgaatactgtgccaactttatgtggggtctcattgctcagggagtgaaatgtgcagattgtggtttgaatgttcataagcagtgttccaagatggtcccaaatgactgtaagccagacttgaagcatgtcaaaaaggtgtacagctgtgaccttacgacgctcgtgaaagcacataccactaagcggccaatggtggtagacatgtgcatcagggagattgagtctagaggtcttaattctgaaggactataccgagtatcaggatttagtgacctaattgaagatgtcaagatggctttcgacagagatggtgagaaggcagatatttctgtgaacatgtatgaagatatcaacattatcactggtgcacttaaactgtacttcagggatttgccaattccactcattacatatgatgcctaccctaagtttatagaatctgccaaaattatggatccggatgagcaattggaaacccttcatgaagcactgaaactactgccacctgctcactgcgaaaccctccggtacctcatggcacatctaaagagagtgaccctccacgaaaaggagaatcttatgaatgcagagaaccttggaatcgtctttggacccacccttatgagatctccagaactagacgccatggctgcattgaatgatatacggtatcagagactggtggtggagctgcttatcaaaaacgaagacattttattttaaatttttaatttgaggggaaaagaaatgttttacagatgaaggaatgttttatagtaatttaatttgctcctgtagctgcattatttcttgattagaggtttgggcatataaccagattaaagtgaaggaactttctgttgtttttgtagcaccgctcagctgtcttgtaaaacagtgaacacacgctttctggttctagtaatcctgggtgtttatcacgttcagagaaactcaagctattgcatgattagccccctatctggcaaggaaaccccatacagaagaaacaacaaacctgcgcctgcaccgcctctgcgtcctgggtagtctgtgcttgtaatccagcatgtttcacagagtaagcctgttgtgactttgcttttggggtctatgtcattggtttctgatgcttgtacaaacacgcacacacaaatggataaaacagcacctctggctgttacattaccataaaccatatcacatgcctacattttacaaatgatttctggtttctcttagttcttctctaacatagtactttctttccagcaaaagcaaaatgtgttttcagatttgttactttaataaaggttatccataccaataaaaaaaaaaaaaaaaa

SEQ ID NO: 25792 - DNA, 2327 bp, Homo Sapiens
cggctggagcgcatctggtcctccgcgcggaaagcgctgcttttgcctggccgccctagccgctggctcatccaagtggccttcgccgctctcttgcgtcccaaccagagcgctggccacctcgccgcccagctcacgccgcgcccgcgctcccaggctccgggttttcttaaatgttttcttggagccttaaagatggagatgacagaaatgactggtgtgtcgctgaaacgtggggcactggttgtcgaagataatgacagtggagtcccagttgaagagacaaaaaaacagaagctgtcggaatgcagcctaaccaaaggtcaagatgggctacagaatgactttctgtccatcagtgaagacgtgcctcggcctcctgacactgtcagtactgggaaaggtggaaagaattctgaggctcagttggaagatgaggaagaagaggaggaagatggactttcagaggagtgcgaggaggaggaatcagagagttttgcagacatgatgaagcatggactcactgaggctgacgtaggcatcaccaagtttgtgagttctcatcaagggttctcgggaatcttaaaagaaagatactccgacttcgttgttcatgaaataggaaaagatggacggatcagccatttgaatgacttgtccattccagtggatgaggaggacccttcagaagacatatttacagttttgacagctgaagaaaagcagcgattggaagagctccagctgttcaaaaataaggaaaccagtgttgccattgaggttatcgaggacaccaaagagaaaagaaccatcatccatcaggctatcaaatctctgtttccaggattagagacaaaaacagaggatagggaggggaagaaatacattgtagcctaccacgcagctgggaaaaaggctttggcaaatccaagaaaacattcttggccaaaatctaggggaagttactgccacttcgtactatataaggaaaacaaagacaccatggatgctattaatgtactctccaaatacttaagagtcaagccaaatatattctcctacatgggaaccaaagataaaagggctataacagttcaagaaattgctgttctcaaaataactgcacaaagacttgcccacctgaataagtgcttgatgaactttaagctagggaatttcagctatcaaaaaaacccactgaaattgggagagcttcaaggaaaccacttcactgttgttctcagaaatataacaggaactgatgaccaagtacagcaagctatgaactctctcaaggagattggatttattaactactatggaatgcaaagatttggaaccacagctgtccctacgtatcaggttggaagagctatactacaaaattcctggacagaagtcatggatttaatattgaaaccccgctctggagctgaaaagggctacttggttaaatgcagagaagaatgggcaaagaccaaagacccaactgctgccctcagaaaactacctgtcaaaaggtgtgtggaagggcagctgcttcgaggactttcaaaatatggaatgaagaatatagtctctgcatttggcataatacccagaaataatcgcttaatgtatattcatagctaccaaagctatgtgtggaataacatggtaagcaagaggatagaagactatggactaaaacctgttccaggggacctcgttctcaaaggagccacagccacctatattgaggaagatgatgttaataattactctatccatgatgtggtaatgcccttgcctggtttcgatgttatctacccaaagcataaaattcaagaagcctacagggaaatgctcacagctgacaatcttgatattgacaacatgagacacaaaattcgagattattccttgtcaggggcctaccgaaagatcattattcgtcctcagaatgttagctgggaagtcgttgcatatgatgatcccaaaattccacttttcaacacagatgtggacaacctagaagggaagacaccaccagtttttgcttctgaaggcaaatacagggctctgaaaatggatttttctctacccccttctacttacgccaccatggccattcgagaagtgctaaaaatggataccagtatcaagaaccagacgcagctgaatacaacctggcttcgctgagcagtaccttgtccacagattagaaaacgtacacaagtgtttgcttcctggctccctgtgcatttttgtcttagttcagactcatatatggatttcaaatctttgtaataaaaattatttgtatttttaagaaaaaaaaaaaaaaa

SEQ ID NO: 25793 - DNA, 1605 bp, Homo Sapiens
ggggaggcgggacccgcgaggagtcgcgcggaggacggaggccacgatacctgcgtggctggggctgcgggctccggggtcaccaccctgggcgacccggaggtggcgcctccgccggccgcagctggagaggagcgtgtccccaagccgggggagcaggacttgagcaggcacgcggggtcaccgccgggcagcgtggaggagccatctcctggaggagaaaactcacctggtggcggaggctccccttgtttgtcctcccggagcctggcgtggggttcttctgcgggaagagagagtgcgcgcggagatagcagtgtggaaacacgcgaggagtcggagggcacgggcggccagcgctcagcctgcgccatgggtggtcccgggaccaagagcggggagcctttgtgtcctccgttactgtgtaatcaggacaaagaaaccttgactctgctcattcaggtgcctcggatccagccgcaaagtcttcaaggagatttgaatcccctctggtacaaattacgcttctccgcacaagacttagtttattccttctttttgcaatttgctccagagaataaattgagtaccacagaacctgtgattagcatttcttcaaacaatgcagtgatagaactggcaaaatctccagagagccatggacattggagagagtggtattatggtgtaaacaacgattctttggagttgcaagaatgtagtaactctgatcagctacaaggaaaggaggaaagagtaaatgaagaaagtcatctaactgaaaaggaatatatagaacattgtaacacccctacaactgattctgattcatctatagcagttaaagcactacaaatagatagctttggtttagttacatgctttcaacaagagtctcttgatgtttctcaaatgatacttggaaaatctcagcaacctgagtcaaaaatgcaatctgaatttataaaagaaaaaagtgctacttgttcaaatgaggaaaaagataacttaaacgagtcagtaataactgaagagaaagaaacagatggagatcacctatcttcattactgaacaaaactacggttcacaatatacctggattcgacagcataaaagaaaccaatatgcaggatggtagtgtgcaggtcattaaagatcatgtgaccaattgtgcattcagttttcagaattctttgctatatgatttggattaattctatataattttggacttttaaatattaaggttaaaaaatacctgtatctaaaattgattctgttaactgttgtcttaaaactaaaggtattaaagtataaaattaaaatttgcaatttttttaaaaaaattgcaattttgattctcatgggggaaattggagataatttttttttttttgcctctggagtttaaagtttccttatggagataagttttgtgattcctgtaatagatgtgtatgttttctatttgagagttaaaacatttgagagttaaaacatttagttttaatacaacctatgtatatatacttctgtgttaaattttgctttgtcattaataaaatttaaaaatattcactaaaaaaaaaaaaaaaaaaaaaaaa

SEQ ID NO: 25794 - DNA, 2368 bp, Homo Sapiens
gcccaatggccgaaaggagtaccccatgtacagtggagagaaagcctacattcagggcctcaaggagaagtttccacaggaggaagctatcattgacaagtatataaagctggttaaggtggtatccagtggagcccctcatgccatcctgttgaaattcctcccattgcccgtggttcagctcctcgacaggtgtgggctgctgactcgtttctctccattccttcaagcatccacccagagcctggctgaggtcctgcagcagctgggggcctcctctgagctccaggcagtactcagctacatcttccccacttacggtgtcacccccaaccacagtgccttttccatgcacgccctgctggtcaaccactacatgaaaggaggcttttatccccgagggggttccagtcaaattgccttccacaccatccctgtgattcagcgggctgggggcgctgtcctcacaaaggccactgtgcagagtgtgttgctggactcagctgggaaagcctgtggtgtcagtgtgaagaaggggcatgagctggtgaacatctattgccccatcgtggtctccaacgcaggactgttcaacacctatgaacacctactgccggggaacgcccgctgcctgccaggtgtgaagcagcaactggggacggtgcggcccggcttaggcatgacctctgttttcatctgcctgcgaggcaccaaggaagacctgcatctgccgtccaccaactactatgtttactatgacacggacatggaccaggcgatggagcgctacgtctccatgcccagggaagaggctgcggaacacatccctcttctcttcttcgctttcccatcagccaaagatccgacctgggaggaccgattcccaggtggagagtgtgactgcaggatccccactcaccaaccagttctatctggctgctccccgaggtgcctgctacggggctgaccatgacctgggccgcctgcacccttgtgtgatggcctccttgagggcccagagccccatccccaacctctatctgacaggccaggatatcttcacctgtggactggtcggggccctgcaaggtgccctgctgtgcagcagcgccatcctgaagcggaacttgtactcagaccttaagaatcttgattctaggatccgggcacagaagaaaaagaattagttccatcagggaggagtcagaggaatttgcccaatggctggggcatctcccttgacttacccataatgtctttctgcattagttccttgcacgtataaagcactctaatttggttctgatgcctgaagagaggcctagtttaaatcacaattccgaatctggggcaatggaatcactgcttccagctggggcaggtgagatctttacgccttttataacatgccatccctactaataggatattgacttggatagcttgatgtctcatgacgagcggcgctctgcatccctcacccatgcctcctaactcagtgatcaaagcgaatattccatctgtggatagaacccctggcagtgttgtcagctcaacctggtgggttcagttctgtcctgaggcttctgctctcattcatttagtgctacgctgcacagttctacactgtcaagggaaaagggagactaatgaggcttaactcaaaacctgggcatggttttggttgccattccataggtttggagagctctagatctcttttgtgctgggttcagtggctcttcaggggacaggaaatgcctgtgtctggccagtgtggttctggagctttggggtaacagcaggatccatcagttagtagggtgcatgtcagatgatcatatccaattcatatggaagtcccgggtctgtcttccttatcatcggggtggcagctggttctcaatgtgccagcagggactcagtacctgagcctcaatcaagccttatccaccaaatacacagggaagggtgatgcagggaagggtgacatcaggagtcagggcatggactggtaagatgaatactttgctgggctgaagcaggctgcagggcattccagccaagggcacagcaggggacagtgcagggaggtgtggggtaagggagggaagtcacatcagaaaagggaaagccacggaatgtgtgtgaagcccagaaatggcatttgcagttaattagcacatgtgagggttagacaggtaggtgaatgcaagctcaaggtttggaaaaatgacttttcagttatgtctttggtgtcagacatacgaaaggtctctttgtagttcgtgttaatgtaacattaataaatttattgattccattgctttaacatttgaaaaaaaaaaaaaaaaaaaaaaaaaaaaaa

SEQ ID NO: 25795 - DNA, 3191 bp, Homo Sapiens
gtcaggatcctgcaggcccaggtgcctcctgtgttcctccaacagcagcagcagtaccagtacctgcagcaatctcaggagcacccccctcccccacatccagctgctctcggccatggccccctgagctccctcagtccacctgctgtggaggggccagtgagtgcccaggcctcctcagccacctcgggcagtgcccacctggcccagatggaggccgtgctgagggagaatgccaggctgcagagagacaatgagcggctgcagagggagctggagagctctgcggagaaggctggccgcattgagaagctggaaagcgaaatccagcggctctctgaggcccatgagagcctgaccagagcctcctccaagcgtgaggccctggagaagaccatgcggaacaagatggacagtgaaatgaggaggctgcaagacttcaaccgggatcttagagagagattggaatctgcaaatcgccgcctggcaagcaagacacaggaggcccaggccggcagtcaggacatggtggccaagctgcttgctcagagctacgaacagcagcaggagcaagagaagctggagcgagagatggcactgctgcgcggcgccatcgaggaccagcggcggcgtgccgagctgctggagcaggctctgggcaatgcgcagggccgggcagctcgagccgaagaggagctgcgcaagaagcaggcctatgtggagaaagtggagcggctgcagcaggcgctcgggcagctgcaggcagcctgtgagaagcgggagcagctggagctgcgtctgcggactcgcctggagcaggaactcaaggccctgcgtgcacagcagagacaggcaggtgccccaggtggtagcagtggcagtggtgggtctccagagctcagcgccctgcgactgtcagaacaactgcgagagaaggaggagcagatcctggcgctggaggccgacatgaccaagtgggagcagaagtatttggaggaacgtgccatgaggcagtttgccatggatgcggctgccacggctgctgctcagcgtgacaccactctcatccgacattccccccagccctcacccagcagcagcttcaatgagggtctgctcactggtggccacaggcatcaggagatggaaagcaggttaaaggtgctccatgcccagatcctggagaaggatgcagtgatcaaggtccttcagcagcgctccaggagagaccctggcaaggccatccagggctccctgcggcctgccaagtcggtgccatctgttttcgcggctgcggcagcaggaacccagggctggcaagggctctcttctagtgagcgacaaacagcagacgcccctgctcggctgactacagacagagcacccacagaggagccagtggtcacagctccccctgctgcccatgccaaacacgggagcagagatgggagcacccagactgagggccccccagacagcacctccacctgcctgccaccggagcctgacagccttctggggtgcagcagtagccagagagcagcctctctggactctgtagctacatccagagtccaggacttgtcagacatggtggagatactgatctgaaggaggtggtgcttcaggactctgagccattctctcccctcctctgccctgtgccactctcagccatttcagcagccccgtcaaccgctgctccgtccctttccccagccagacactcattcccattgaccatctggtcccaggagctcaggaggaggaccccaggggagaggagagctgtgagagcaccggcacccccagaagactctgcttcttagcccacattcctccgggccttatggagaatgaggattcagccttgacttcttgcccaaggcctgctactggggtagcaactgacagctcagaaaggagctgagctccctctgccctgccagttgtcagtcaggcagggagggagtggctgtgttggtttggggaactaatttccacggacggctgcccgtggacaccaggtggactggttcactaatcaagtcagccatattgttctctggctaagtttggttccagccaacgtcatctgctcttcagttcctcactgccttcttgggatactaagacttgaattttttggggactattaagggtgttagtcttggagaagacacagcctcaccttctcacttgctgtgggtgaggggccatttaagtggactgggagacagtgcgcagtttgtatataattccctttcttgtggaacagaagactgaggcctgcaggttccgatgtgtctccatgggctgtgctcccctcttcctactgtcagtttctgaaacttctgactggcctcccagttatgcctcctcctcaagttcctggcccgtggatgttaaagctgctcgattcccaggatctcggctgccttttcctctatcttgagccctataaatgcccacgggacccccaccaccagcctcttgaagtggctccacagctcctgtccctggaacatcctgtcagtttggtcataaaccctgagccagatgaaatgagccaccgtgaacagacatctgccatgcccccaggtgggcttcggtggccctacccggtaccagttctttctgagaaactggagatgtcttgttagcataagtgtcttcattcccacctggagggtttgggagaggagcaaagcagttgaaaactagttaatgagctacaagagtcaaatagtcctctgaatggagcccccatcacaaaacagtgcccaggaggctggctcctcaagctacccatgcccagcgccctaaagcagcaccagatgctttggaattggggtgaaacacccacatggcagcctgctagcagcagtgactttgacttctggtcttaaagagtccctcacttcagccccaggagctattggtgggttttagcagttttgtctttaccgtttttagttctccttgattctttgttttcttcctttatcgtttttaggtttggtatgtgttgttttatttccatggttcctcaagtttcctttttaaacatttgcatttgctggacaattgcaattttttttaaaaaattcccctacccctgtttaaagctgaaaaatacatttggttcatgtgcattgtttacaaagcaaaaagaaaaaaaaaaaaaaaaa

SEQ ID NO: 25796 - DNA, 1859 bp, Homo Sapiens
gtggagtcgaaaccggggtcggggccggggccggctgagtgaaagggtgggtgattatcccgggagataggccgaaagggcagaaccgcggcaggggccaagcctcctcaactatgacctcaaccggccaggattccaccacaaccaggcagcgaagaagtaggcagaacccccagtcgccccctcaggactccagtgtcacttcgaagcgaaatattaaaaagggagccgttccccgctctatccccaatctagcggaggtaaagaagaaaggcaaaatgaagaagctcggccaagcaatggaagaagacctaatcgtgggactgcaagggatggatctgaaccttgaggctgaagcactggctggcactggcttggtgttggatgagcagttaaatgaattccattgcctctgggatgacagcttcccggaaggccctgagcggctccatgccatcaaggagcaactgatccaggagggcctcctagatcgctgcgtgtcctttcaggcccggtttgctgaaaaggaagagctgatgttggttcacaggtgaaggcttgggagccttgtagggatggggaggagcctgccctggacaaaccagggcaagctaaacgctttgggaagcaatgtcatggtctctgcagccagccttgggcaagtcgctgagcctttctgaatctgtgtcatcgcctgtaacaaggggaccagtaaacataagttcctcaggagagtttgatgtgtgtcaggtgcttagaacagggcctgatatataatcagcccatgatgagctattactgttatcatgatctgattgtgtgaatagatggtggatgtgtggacagagtgatcggggttcccccaggggcttccagatttagaggcctagtgctatgtggcttgaggaaagctagcttccagagcaggtatctgagctgaactttaagaggagaaaaagagtgagtcagatgaagagggtgactgagggaagggaagaacagacagctgaaccagtgtggccaaaggcctgaaagtaggatttggtgtggctactgcaggggagcagagaacattacctgaactgaggcgggctagggaagaaacagaatgtgtcttatatcctggctattccttcaggttgacagttgggggagccaagccctaatttgaccagggggttggtgtatggacagctcagttggggaagagacagggccctgaatctcatctcccatctgtgtctagcctagaatatattgatctgatggaaacaacccagtacatgaatgagggagaactccgtgtcctagcagacacctacgactcagtttatctgcatccggtatggatgagaactctgcgggcagggaatggtggcaatcttggggtccccatccctatgcccaccccaccctgggggaagcagctgagtggatagggctgttctctcccttactccctttctggctccccactgtctctccagaactcatactcctgtgcctgcctggcctcaggctctgtcctcaggctggtggatgcggtcctgggggctgagatccggaatggcatggccatcattaggtaggactctacagcatttgactttttacattgttttaaagtccttccttcaagtgtaaaatgtattgatgggtaatatattcatgtgattcaagaatccaaaggtaaaaaagagaatataattaaaaatctgtctcccatccttgtcacccagacacctgcctcctctcatgggaggtagtcattggaaccactgactcatgtgtcctcccacaaagtcttattcaagaaataaataccatatttcattgaaaaaaaaaaaaaaaaaaaaaaa

SEQ ID NO: 25797 - DNA, 1697 bp, Homo Sapiens
gacacgttcaacccgttctgctggctcgagaacgaagtaggccgtctcgctctgggtctccaggcccgcgaccgtccgccagtcgtcccgaggccactcttcacctccaccatgagcctggacatccagagcctggacatccagtgtgaggagctgagcgacgctagatgggccgagctcctccctctgctccagcagtgccaagtggtcaggctggacgactgtggcctcacggaagcacggtgcaaggacatcagctctgcacttcgagtcaaccctgcactggcagagctcaacctgcgcagcaacgagctgggcgatgtcggcgtgcattgcgtgctccagggcctgcagaccccctcctgcaagatccagaagctgagcctccagaactgctgcctgacgggggccggctgcggggtcctgtccagcacactacgcaccctgcccaccctgcaggagctgcacctcagcgacaacctcttgggggatgcgggcctgcagctgctctgcgaaggactcctggacccccagtgccgcctggaaaagctgcagctggagtattgcagcctctcggctgccagctgcgagcccctggcctccgtgctcagggccaagccggacttcaaggagctcacggttagcaacaacgacatcaatgaggctggcgtccgtgtgctgtgccagggcctgaaggactccccctgccagctggaggcgctcaagctggagagctgcggtgtgacatcagacaactgccgggacctgtgcggcattgtggcctccaaggcctcgctgcgggagctggccctgggcagcaacaagctgggtgatgtgggcatggcggagctgtgcccagggctgctccaccccagctccaggctcaggaccctgtggatctgggagtgtggcatcactgccaagggctgcggggatctgtgccgtgtcctcagggccaaggagagcctgaaggagctcagcctggccggcaacgagctgggggatgagggtgcccgactgctgtgtgagaccctgctggaacctggctgccagctggagtcgctgtgggtgaagtcctgcagcttcacagccgcctgctgctcccacttcagctcagtgctggcccagaacaggtttctcctggagctacagataagcaacaacaggctggaggatgcgggcgtgcgggagctgtgccagggcctgggccagcctggctctgtgctgcgggtgctctggttggccgactgcgatgtgagtgacagcagctgcagcagcctcgccgcaaccctgttggccaaccacagcctgcgtgagctggacctcagcaacaactgcctgggggacgccggcatcctgcagctggtggagagcgtccggcagccgggctgcctcctggagcagctggtcctgtacgacatttactggtctgaggagatggaggaccggctgcaggccctggagaaggacaagccatccctgagggtcatctcctgaggctcttcctgctgctgctctccctggacgaccggcctcgaggcaaccctggggcccaccagcccctgccatgctctcaccctgcatatcctaggtttgaagagaaacgctcagatccgcttatttctgccagtatattttggacactttataatcattaaagcactttcttggcaaaaaaaaaaaaaaaaaaaaaaaaa

SEQ ID NO: 25798 - DNA, 1697 bp, Homo Sapiens
ggccagagcgagccttcgggtgcgtggagggcgcagcactggagcgggggatggggaagcgcgcggccttggagccgtctcttgggcccgcttcctcgccgagtggggaggggggccacagcctaaggagctgctcctcaaaagcccgggcggacggcggcgacggcgcgggttcctagcggcagcctcagctccaccacctccctcaccctccccgcgcttcctctccgcccctcgcgctccagccactcggccgcagccggcgctgtcctccgccccccggagccgccgcgccagaccctcgcccagacatgggggacctgccgggcctcgtgcgcctctccatcgcgctgcgcatccagcctaatgacggcccggtcttttacaaggtggacgggcagcgcttcggccagaaccgcaccatcaagctgctcaccggctcctcctacaaggttgaggtgaagattaaacccagcacgctgcaggtcgagaatatttccattggtggtgtgcttgtcccactggaactgaagtctaaagagcctgatggggacagagttgtttatacgggtacatatgacacagaaggtgtgaccccaacgaagagtggagaacggcaacccatccagatcaccatgccgttcacagacattgggaccttcgagacagtgtggcaagtcaagttctacaattaccacaagcgggatcactgccagtggggaagccccttctctgtcattgagtatgaatgcaagcccaacgagacacgcagtctgatgtgggtgaacaaggagtccttcctctgaaagtggctctttctgatgctactggacaatcttttcagaaatctacttttagataaaccagcgcaggccttaaacaaggcatgccacaccattgctgttccccatctggtactaatgacctactagccctggttattttgaaagtgtaattcccctctgacacaatatccctcacatacaagatggtgatgtaccactcccgagaatattcccatctgtattttgtgctgatgttcctgcatccagttgttctcggtcatacttttgaccacttgtgactggagttcagtggccctggcaggcttgtcctgctcttgaccattccactgactaactttggtgttttgtttccaagttaagtgattcctccttttttttgttcaatgttaaatttaaaaataacaatgtgtatgggtcctcccatgtgtaatatggtaacatgtaacttgcagtgtttgccagctttcaaagcaggctttgtgaaaatgtaatacaaacagcagtgaatgggactcaaatgttgtgcttcctataaacagctccgctctttcagggaaggatggtaacaaactagaaggacaaatatgtacgtatttataacgtattaaaactcttttaagtagcttaaggtattgtgcaatggcctagcctagtagaaatgggggaaaagcattgctgtggaccattgttaaagtgacaggagttgtagggttacccctttgacaagcttccatagtcttcagacacgcacattgatggcatccctacagtcttcttcacttgaactttgtaaaactgcatatggacctgtaatcaacttttgatatttcttaataaaggcgttgaaaatcaaaaaaaaaaaaaaaaaaaaaaaaaaaaaaaaaaaaaaaa

SEQ ID NO: 25799 - DNA, 1689 bp, Homo Sapiens
ggccagggtgccgcagacgcggggacgctggctcgctccctccctccctccctccgacgctgtgagtagagaagctaggccccgagccgggcgggactagggtggtggttgtgttctgccctcgcccgtcgccaacgctgggctgactgaaaacctggccctttgggtcgcgcgtcttcgactttcaccgccatgcggacatggggccgtgggagaaactctgggcgggattacggtgaaaattcttgtttgggcgggccctgcggcttctttcttccggctcgccctcggccccgccctcgccccgcccccgctccagctccagccgggtcctcgctcggccccgcacgcggcccgcggtagacggagggcctgggcacccaccgtctccatcccggccccagcccagtcgagcgtccactagaagggcgctccctgtccggccctaatcctcgctcctcacggaggctctttgtcacagcgaagactgacagcccgcagtcttctggacttcttttatggggctcctggcggtgctattcattcagtcattgattcgtcttgtaaatatggagcgcctgctctgtactcgacccggcactgggtaccggaagaaccagacagctcggtttttgccaccatttataagtctgtgtccttttcttgagtactgaaccgagatacagttttaaatgtgctgtgcggtctctgagcagcgactcacctgtgcagatcaaatgatgctgtttggaaaaatttcccagcagttgtgtggcgtaaagaaactcccatggtcatgtgactccagatacttctggggctggttgaatgcagtgtttaataaggtggattatgatcgcatcagggatgttggccctgatagggcggcatccgagtggttgctgcgctgtggggccatggtgcgctaccatggccaggagaggtggcagaaggactacaaccaccttccaacaggccctctggacaaatacaagattcaggcgatcgacgccaccgactcttgtatcatgagcattggatttgatcacatggaaacctcaaatatttgttgttaagtgatcttcctggagtaagagaaaaagaaaatcttgtccaagcctttaagacagcactgccttctctggaactaaaattacaattgaagtaaaataatgtgtcttatttcagtataaaggatcatttgaaactgttgattccaaacatcaactaatattatatagtcatcagtagaattataaggatgccatatcatgacattttagaagtggagagtgcatcatatgtagaaaataaatattcagacgtggctcattaatgttactaagttggaagtgagaatttatgaacattaattcattttaagaaaagtgcagccaggcgcagtggctcatgcctgtaatcctagcactttgggaggccaaagcgggcagatcacctgaggtcaggagttcaagaccaaccatggccaacatggtgaaaccccatctctactaaaaaaacaaaattagctgaatgtggtggtgcacgcctttaatcccagctactctggaggctgaggcaggagaatcacttgacttgggaggtggaggttgcagggacccgagattgtgccactgcactccagcctgggtgacagagcgagactgtctcaaaaaaaaaaaaaaaaaa

SEQ ID NO: 25800 - DNA, 1174 bp, Homo Sapiens
agcggccatgcgttccgggggccgcgggcgaccccgcctgcggctgggggaacgtggcctcatggagccactcttgccgccgaagcgccgcctgctaccgcgggttcggctcttgcctctgttgctggcgctggccgtgggctcggcgttctacaccatttggagcggctggcaccgcaggactgaggagctgccgctgggccgggagctgcgggtcccattgatcggaagcctccccgaagcccggctgcggagggtggtgggacaactggatccacagcgtctctggagcacttatctgcgccccctgctggttgtgcgaaccccgggcagcccgggaaatctccaagtcagaaaggcagccccggtgaccctgcaactgctcttcttggatggtgaagaggcgctgaaggagtggggacccaaggactccctttacggttcccggcacctggcccagctcatggagtctatacctcacagccccggccccaccaggatccaggctattgagctctttatgcttcttgatctcctgggagcccccaatcccaccttctacagccacttccctcgcacggtccgctggttccatcggctgaggagcattgagaagcgtctgcaccgtttgaacctgctgcagtctcatccccaggaagtgatgtacttccaacccggggagccctttggctctgtggaagacgaccacatccccttcctccgcagaggggtacccgtgctccatctcatctccacgcccttccctgctgtctggcacacccctgcggacaccgaggtcaatctccacccacccacggtacacaacttatgccgcattctcgctgtgttcctggctgaatacctggggctctagcgtgcttggccaatgactgtggagaggactgtgagagagaaggtcccagcgggggccagtgaagctcaggcaggatctgcctagggtgtgctggtttgtccttttcatacctttgtctcctaattgtgctacaattggaagaccttctttcttttgattgtctcaagctgccacccttcaaggacagggaagagaccactgtgggatgacagcctgggcaacggagcgggactccatctcaataaataaataaataaataaatattttttaaaaagaaaaaaaaaaaaaaaaaaaaaaaa

SEQ ID NO: 25801 - DNA, 3344 bp, Homo Sapiens
gcctgggcgcagcggtgcacccggacccggaacattctcaggcgaaagtgtctcttgcgtgcgtgggccggaggttagtgtgcggggcccgccgggcggttgaaaagtccgagagaatcaggatggaggccgtggcgacggcgacggcggcgaaggaacccgataagggctgcatagagcctggacctgggcactggggtgagctgagccggacaccagtcccatctaaaccccaggacaaagtggaagcagctgaggcaacaccagtggccctggacagtgacacctccggggctgaaaatgcagcagtgagtgctatgctgcacgctgtagccgccagccgcctgcctgtttgcagccagcagcagggtgaacccgacttgacagagcatgagaaagtggccatcctggcccagctgtaccacgagaagccactggtgttcctggagcgcttccgcacaggcctccgtgaggagcatctggcctgctttggccacgtgcgtggcgaccaccgtgcagacttctactgtgctgaggtggcccggcagggcactgcccggccccgcaccctgcgtacccgcctgcgtaaccggcgctatgctgccctgcgagagctgatccaagggggcgagtacttcagtgatgagcagatgcggttccgggcccccctgctatatgagcagtacatcgggcagtatctcacccaggaggagctcagtgcccgcaccccaacccaccagccccccaagcccgggtcccccgggagacctgcttgcccgctctccaacttgctgctccagtcctacgaggagcgggagctacagcagcgtctgctccaacagcaggaggaggaggaggcctgcttggaggaagaggaagaggaggaggacagtgacgaggaagaccagaggtcaggcaaggactcggaggcctgggttcccgactcggaggagaggctgatcctgcgagaggagttcaccagccgcatgcaccagcgcttcctagatggcaaggacggggactttgactacagcacagtagacgacaaccccgacttcgacaacctcgacatcgtggcacgggatgaggaggagaggtactttgatgaggaagaacctgaggatgcgcccagcccagagctggatggggactgatggccgccacccttcccaccgcctgccccatccccatccccaacaaggcagctgattccaggcctgctcagtgaccctttctctagggggacatcagggcagtgccccacaacccacacacaccaccatctcactgggtctagtctcatctcagacaacccccacccccactgtttctggggttccctttctcatctctcccaccctgtctcctgcctctgtctttcttggtgtctgtctgggcttctttctgtctctttctgtctttctgtctctctccctacccccgctccctctttccagtgctctggctggctgtctctccctttctccccctctctctctgccttaggctctgtctccaccgcagggcccaaggtgaaagtcctccccttgccggaggccagctggcagggcctttcgtggctggaagtggccagtttggttccggtgctgacccctaggccccagcgcagctgcctcccgtgctgtctgtctccccctctctgtttatgtctgcgctgtgtctcacactcagagcctccttgcttctgttaggttcccatctctccttctgcctcactctgggcctcttctttctacttgtacatttccacctctctaggcctctgctctcactgtccctctctgtctgtctctcagcctttatctctgggttttgatcccccactccaggctctgggccccttcttcccccttccctcaaacctggctgctataggcagcagaaccctgaccactgagtaatacagccccaggggagggaggagaccccaggcagggaggatgggggcagctctcttctctccccaggacccaggctgtggatcacggggcctgccagcttgagtgtagagggaggggggactctacccttctcagccccaccagcccccctctgcccaaccacaattttcccttcctccgccttcctctccctctcctgtttacactccccaaatgcgcacaggctgttatcatgggtcctgagtcatcccacacacagcctgccccagcgtccctgcccccagctggccgcagggcccgccccatggagccccctgccgccctgggctaatgggagccagatggccgcctggtgactcagccaccgggcctgtgggaacccaggcgtcccgccttcccatgcccccacacccggctcctgctcccccagcagacacacacaggagggcctggccactgttgagggggcacacagggcaagggtcaccaagtcggggcctagggactcctcatgcctctgagatggaatggtggtatcctgccgtggccaagcctgaaggaccctcaaaactgcctcctggagtccacggttcctgacctccgagcctcagctatgccctctgggtcaaccagaattagagccagacagggaaagtgagagctggatggaggcagacaagatgctcagagcgactattaaagaacgaaagcctctgctacggagcgcttctgtcctctgtcaggcccgagcgaagtgcctgacaccgggttggatcctcagatggccccatgaactagtgaagtgggtcaaaggaggcctggaaagatgttgcttcctcaaggccactcggccatcagaggcagaaatgaaacaggaacccaggcctagaatcacaaaggtcctagaaaccacttggctgtctggcctctcaggtgtcagggccatccagagtgagacagcattggagggacaagtgtgcatgcagatgtcctcagacgggaaggtttgagaagggtcagatggtaggcgggcctaacaagggctccgtgctagccactgtcccgcacacagacaggatcaggtcatcttgatatggagatcagtccccaaatcactgaattgtcccagcagtgctatgccctaggtactaccaatatcactcctctatttcccagaggaggaagcagcagctagactccaggaccttggggtcatatctctcagaaagccaagagtgcaggatgagagctgtctgtctcttacctgcctgtatttgtgccccatttttaaagagcagagggcctgggccacaggaaaggtatcagcccttggtgataggcacattttttaccagtctatcatttggtcattaaatttgtttacaatatactttgctataaaaaaaaaaaaaaaaaaaaaaa

SEQ ID NO: 25802 - DNA, 1539 bp, Homo Sapiens
gcccggactccggcagggaagcgagtgataaatcaggaagaattgcggcggttaatgaaggagaagcagcgtctgagcaccagtcggaaacggatagaatctccattcgcgaagtacaaccgtttggggcagctgagttgtgccctgtgtaacactccggttaagagcgagctcctgtggcagactcacgtcctgggaaagcagcaccgagagaaagtggccgagctgaaaggcgcgaaggaagccagccagggttcgtccgccagttcagcgcctcagtccgtcaagaggaaagcgccggacgcagacgaccaagatgtcaagagagcgaaggccaccttggtgcctcaggtacagccctccacatctgcgtggaccaccaactttgacaaaataggaaaggagttcattagagcgactcccagtaagccttcaggactcactttactccccgattatgaagatgaggaggaggaggaagaggaggaggaaggagatggagaaagaaaaaggggggacgccagcaagccgctctccgacgcacagggcaaggagcactcagtttcctcttcacgggaggtaacaagtagtgtgctgccaaacgatttctttagtactaatcctcccaaggcccccataattcctcattcagggtcaattgagaaagcagaaatacatgaaaaagtggtggaaaggagagaaaacaccgcggaagcgttaccggaaggtttttttgacgaccctgaggtagatgcaagagtacgaaaggttgatgctccaaaagatcagatggacaaagagtgggacgaattccaaaaagccatgaggcaggtcaacactatttccgaagccatagttgccgaagaggatgaggagggacggttggaccgccagattggggagatcgatgagcagatagagtgttaccgacgggtggaaaagctacggaatcgccaggatgaaataaaaaataaacttaaagaaatcctgaccataaaagaactgcagaaaaaggaagaagagaatgctgacagcgatgatgagggggaactacaggatttgttgtctcaggattggagggtgaaaggggcattgttatagggttttaaagacccaaggtttctaacagcctctgctgttgtataaaaagtgctgtctctcagtagtatagcggttacttcatgcctcaagatttgggtacctggattgctaaactggattgttgagataaaatgagccagtgagctacagcactttggaaaatttgtgtaacatgtttttgaggtaaagttgtttttgaaatttctgaagtgttatataccaaaatgccaacttttccacgacagacttaactgtataatttcgttgtaaaatctgtaagttgtaaatattgtacatagttaaatctgtattctgttttgaatttttttaattaatagaaagaccaaccggcaaactttcagatgaatgcttactgtggtatttggaatgtatgtatcttctgaaccctacatcaagttgaaaaaaaaaaaaaaaaaa

SEQ ID NO: 25803 - DNA, 2170 bp, Homo Sapiens
gtgcagcagagtgcgttcctcgtctgccagccggcttggctagcgcgcggcggccgtggctaaggctgctacgaagcgagcttgggaggagcagcggcctgcggggcagaggagcatcccgtctaccaggtcccaagcggcgtggcccgcgggtcatggccaaaggagaaggcgccgagagcggctccgcggcggggctgctacccaccagcatcctccaaagcactgaacgcccggcccaggtgaagaaagaaccgaaaaagaagaaacaacagttgtctgtttgcaacaagctttgctatgcacttgggggagccccctaccaggtgacgggctgtgccctgggtttcttccttcagatctacctattggatgtggctcaggtgggccctttctctgcctccatcatcctgtttgtgggccgagcctgggatgccatcacagaccccctggtgggcctctgcatcagcaaatccccctggacctgcctgggtcgccttatgccctggatcatcttctccacgcccctggccgtcattgcctacttcctcatctggttcgtgcccgacttcccacacggccagacctattggtacctgcttttctattgcctctttgaaacaatggtcacgtgtttccatgttccctactcggctctcaccatgttcatcagcaccgagcagactgagcgggattctgccaccgcctatcggatgactgtggaagtgctgggcacagtgctgggcacggcgatccagggacaaatcgtgggccaagcagacacgccttgtttccaggacctcaatagctctacagtagcttcacaaagtgccaaccatacacatggcaccacctcacacagggaaacgcaaaaggcatacctgctggcagcgggggtcattgtctgtatctatataatctgtgctgtcatcctgatcctgggcgtgcgggagcagagagaaccctatgaagcccagcagtctgagccaatcgcctacttccggggcctacggctggtcatgagccacggcccatacatcaaacttattactggcttcctcttcacctccttggctttcatgctggtggaggggaactttgtcttgttttgcacctacaccttgggcttccgcaatgaattccagaatctactcctggccatcatgctctcggccactttaaccattcccatctggcagtggttcttgacccggtttggcaagaagacagctgtatatgttgggatctcatcagcagtgccatttctcatcttggtggccctcatggagagtaacctcatcattacatatgcggtagctgtggcagctggcatcagtgtggcagctgccttcttactaccctggtccatgctgcctgatgtcattgacgacttccatctgaagcagccccacttccatggaaccgagcccatcttcttctccttctatgtcttcttcaccaagtttgcctctggagtgtcactgggcatttctaccctcagtctggactttgcagggtaccagacccgtggctgctcgcagccggaacgtgtcaagtttacactgaacatgctcgtgaccatggctcccatagttctcatcctgctgggcctgctgctcttcaaaatgtaccccattgatgaggagaggcggcggcagaataagaaggccctgcaggcactgagggacgaggccagcagctctggctgctcagaaacagactccacagagctggctagcatcctctagggcccgccacgttgcccgaagccaccatgcagaaggccacagaagggatcaggacctgtctgccggcttgctgagcagctggactgcaggtgctaggaagggaactgaagactcaaggaggtggcccaggacacttgctgtgctcactgtggggccggctgctctgtggcctcctgcctcccctctgcctgcctgtggggccaagccctggggctgccactgtgaatatgccaaggactgatcgggcctagcccggaacactaatgtagaaaccttttttttacagagcctaattaataacttaatgactgtgtacatagcaatgtgtgtgtatgtatatgtctgtgagctattaatgttattaattttcataaaagctggaaagcaaaaaaaaaaaaaaaaaaaaaaaaaaaaaaaaaaaa

SEQ ID NO: 25804 - DNA, 1240 bp, Homo Sapiens
cagagatcgcggagagacgcagaacgcagcccgctcctccagggccctccaggccctccggccccgggccggcgggtgaactggggggccccgggacaggccgagccctctgccctgcagataacggaggcctctgctgtggctgcccactggctgtgcccgcccactggctgtgcccagaccttgaagccgcagcgaacctctctttcccaccccacctcggtgactaatggcggccgtggcgtctcccagcccggaccccgccggcacccgggtctcccgacccaagcctcgacgaaacccccgcagagccgccgggacgcagcgcctttgggcggcgctgggcgtggtgggccgggaagtatggcggcagctcgaacgccgcgcggcggaggccattaaggcgtggacggcccgggaaggcggcctagggacgcaagcaggctcggccgcctctttaggccacggagccgcgcagatccggttcccgggtgaccactctgtcgccattgggcgagacctacctagtcctgacgacaacggacaaaggccttaaggggcctggaaggtgagcgaagtcccgaacgacgacgggtggaacggttagcggccatcgggcggttggtcttcattctaccagactttgctgtcggaagagagaaatggtagaatgacaggccacgtttggcccgttggaaatgcccaccaccctctgggaagatttactggccgtttatggaaggcctgtgtatataatatgaaaaagctgctctcaactccaccccaaccttttaatagaaaacatttgtcacatttagcccttctagatggaaagaggttgccgacgtatgataaaatagagttagaaagttacacatcttgtaaattctcatttgtttaaaagaaatcatagaaaatacatgtcttctggagatgacttttggaaatggagttgttaagacggcctctggaagcgatacgtccacgtttgttaagtgggttagatgacatggagctggaagacctgagaaggaagagaagaaggttctatgctagactggtcatatttagaagacattttcatattctatccattgttttgtgtgcattttattcctcactactgtgtatatagttgacaatgctaagcttttttgaaatgtctcttctttttagatgttctgaagtgcctgatatgttaaaattagaggtagcaaaatcaaaaaaaaaaaaaaaaaaa

SEQ ID NO: 25805 - DNA, 1652 bp, Homo Sapiens
ccttctccttgcttctgggggtcgtggccttgctcccgctgtgcgggaaaagaatccaggcccttccacgcgcgtgtgggtgcgggggccccgaagtgctcgtggttccccgctaggtctccgctggggcaggaaccggaatcatgggtgggaccaccagcacccgccgggtcaccttcgaggcggacgagaatgagaacatcaccgtggtgaagggcatccggctttcggaaaatgtgattgatcgaatgaaggaatcctctccatctggttcgaagtctcagcggtattctggtgcttatggtgcctcagtttctgatgaagaattgaaaagaagagtagctgaggagctggcattggagcaagccaagaaagaatccgaagatcagaaacgactaaagcaagccaaagagctggaccgagagagggctgctgccaatgagcagttaaccagagccatccttcgggagaggatatgtagcgaggaggaacgcgctaaggcaaagcacctggctaggcagctggaagagaaagaccgagtgctaaagaagcaggatgcattctacaaagaacagctggctagactggaggagaggagctcagagttctacagagtcaccactgaacaatatcagaaagctgctgaagaggtggaagcaaagttcaagcgatatgagtctcatccagtctgtgctgatctgcaggccaaaattcttcagtgttaccgtgagaacacccaccagaccctcaaatgctccgctctggccacccagtatatgcactgtgtcaatcatgccaaacagagcatgcttgagaagggaggataaaaactttcagaatgagcaaaacaccatcaacgttaattccagagatggaacattttttttcctagtgagaaaacaacccatttgaagagaagaccactaatgagaagaccactaaagagagacatcaagaatggattcagcagaatcatttcacgttttgaacagcagcagtttgaagggccaaagccttgatcagggatcagtcattaaaggacactcttgagtattagtaaaccctcttatgatgattaaaagagaagggcagccctctccaccttttggtactttctattcaacttgcactgaccataaaatgtttctcttctgaacaagccccatcatttggtgaacctccaccctaacaaagtaggatggggttgggggctaaattaattggagtggggcaaggagagagccagaaaacatagatccgagggcagcagtgctgggtggagagagccagaaaacagatctggaggcagcagtgctggatggaattgtctaggctgtggcatgttggttttgtctttcttttctcctttgattatgtaagagctatttcattataacttattatggtgattatacaggcaagaagacaaaaaggagagaaaatgtacctcttctactggaataatgtttatgattacaagtgagataaggtatttttatcaatatgaaggcaaccttggctgataaaacctctatagtgaatactcacatctttacttcactcactatcaataataaatatattttctgacaaaaaaaaaaaaaaaaaaaaaaaaaaaaaaaaaaaaaaaaaaaaaaaaaaaaaaaaaaaaa

SEQ ID NO: 25806 - DNA, 2841 bp, Homo Sapiens
gcgtcttctcgcgcggatggtgaagctgaatttggtacgctggaccctcggacagacagcaagagagagacaagcccgaggcctgacttctagcactcctgagtttgagccctatgagcagtggaacctagggaccaccaaggatccagatataattctttcctcagtaatagaaaaaagaatctgggatctaagaagatacctactcattttctaagtgactggccatgtcattgtcccacttataccgggatggggaaggccgcattgatgatgatgatgacgagcgggagaactttgagatcactgactgggatctccagaatgagttcaaccccaaccgacagcgccactggcagaccaaggaagaagccacctacggggtgtgggcagagcgagactcggatgatgagaggcccagctttggaggcaaacgggcccgtgactactctgcgccagtcaacttcatcagcgcagggctcaagaaaggggcagcggaggaggcagagttggaagattctgatgacgaagagaaacctgttaagcaggacgactttcctaaggattttggaccaaggaagctaaaaacgggtggcaattttaagcccagccagaaaggttttgcaggaggaaccaaatctttcatggacttcggcagctgggaaagacacacaaaaggaattggacagaagcttcttcagaagatgggctacgtccctggacggggcctcgggaagaatgcacaaggtatcattaacccaattgaagccaagcagagaaagggaaaaggtgctgtgggggcttatggatccgagcgcaccactcagtccatgcaagacttccctgtggttgactcagaggaagaagctgaagaggagtttcagaaggagctgagccagtggaggaaagacccaagtggaagcaagaagaagcccaaatactcttacaagaccgtggaagagttgaaggccaagggcaggattagcaagaagctcactgctccccagaaggaactttctcaagtcaaggtcatagacatgacaggccgggagcagaaggtctactacagctacagtcagatcagccacaagcacaacgttcccgatgatgggctgccgctacagtcccaacagctgccacagtctggcaaagaggccaaggcccccggcttcgcgctgcccgagctggagcacaacctgcagctgctcatcgacctcacggagcaggagatcatccagaatgaccggcagctacagtatgagcgggacatggtggtcaacctcttccacgagctggagaagatgaccgaggtcctggaccacgaggagcgggtcatctcgaacctcagcaaggtcctggagatggtggaggagtgcgagcggcggatgcagcccgactgcagcaaccccctcaccctggacgagtgtgcccgcatcttcgaaaccctgcaggacaagtactatgaggagtacaggatgtccgaccgtgtggaccttgctgtggccatcgtctatccactcatgaaggagtacttcaaggagtgggatcccctcaaagactgcacttatggcaccgagatcatctctaagtggaaaagcctcctagagaatgaccagctcttgtcccatggcggacaggacctctcagcagatgcctttcacaggttgatatgggaagtctggatgccttttgttcgaaatattgtcacccagtggcagccaaggaactgtgacccgatggtggactttttggatagttgggtgcacattattcctgtgtggatcttagataacatactggaccaactcatcttccccaagctgcaaaaggaggtggaaaactggaacccgctcacagacactgttcccatccactcttggatccacccatggctgccccttatgcaggcacggctggagccactctattcccccatccgtagtaagctgtccagcgccctgcagaagtggcaccccagcgactcctctgccaagctcatcctccagccctggaaggatgtcttcactcctggctcctgggaagcattcatggtcaaaaacatagtgcccaagctggggatgtgtcttggtgagctagtcattaacccccaccagcagcacatggatgcattctattgggtgattgactgggaagggatgatctctgtctctagcctggtgggacttcttgaaaagcacttcttccccaagtggcttcaggtgctgtgctcttggctcagtaacagcccaaattatgaggagatcaccaagtggtacctgggttggaagtcgatgttctcagaccaagtgctggcacatccatctgtcaaggacaaatttaatgaggcacttgatatcatgaaccgggcggtgtcctccaacgttggtgcctacatgcagccaggagcacgggagaacattgcctatctcacccacacggagcggaggaaggacttccagtacgaggccatgcaggagaggcgggaggctgagaacatggctcagaggggcattggcgtggccgctagctctgtgcccatgaactttaaggacctcattgagaccaaggctgaggagcacaacattgtcttcatgcccgtcattgggaagcgacacgaagggaagcagctctacacctttggccgcattgtgatctacattgaccggggagtggtctttgtccagggcgagaagacgtgggtgcccacctcactgcagagcctgatcgacatggccaagtgaactgtggcaggtccagaaccagtcagagacttgcccctaagagggatgtactgtaaataaacagtatttttagatcaccttcaaaaaaaaaaaaaaaaaa

SEQ ID NO: 25807 - DNA, 2667 bp, Homo Sapiens
ggaggaaggaggaggtcaccgtccagctgtctctcccctgtccccacatgtcttctaagctgttggagccggccggcgctcacttgtcttcaggaagctcggagcctttggtggagccggggagaggaagggtgggtgcaagagtgaaaggcgagaggggactgcaagcatccgggtcggctcctggccggagcaagatggctgagggcgagcggcagccgccgccagattcttcagaggaggcccctccagccactcagaacttcatcattccaaaaaaggagatccacacagttccagacatgggcaaatggaagcgttctcaggcatacgctgactacatcggattcatccttaccctcaacgaaggtgtgaaggggaagaagctgaccttcgagtacagagtctccgaggccattgagaaactagtcgctcttctcaacacgctggacaggtggattgatgagactcctccagtggaccagccctctcggtttgggaataaggcatacaggacctggtatgccaaacttgatgaggaagcagaaaacttggtggccacagtggtccctacccatctggcagctgctgtgcctgaggtggctgtttacctaaaggagtcagtggggaactccacgcgcattgactacggcacagggcatgaggcagccttcgctgctttcctctgctgtctctgcaagattggggtgctccgggtggatgaccaaatagctattgtcttcaaggtgttcaatcggtaccttgaggttatgcggaaactccagaaaacatacaggatggagccagccggcagccagggagtgtggggtctggatgacttccagtttctgcccttcatctggggcagttcgcagctgatagaccacccatacctggagcccagacactttgtggatgagaaggccgtgaatgagaaccacaaggactacatgttcctggagtgtatcctgtttattaccgagatgaagactggcccatttgcagagcactccaaccagctgtggaacatcagcgccgtcccttcctggtccaaagtgaaccagggtctcatccgcatgtataaggccgagtgcctggagaagttccctgtgatccagcacttcaagttcgggagcctgctgcccatccatcctgtcacgtcgggctaggaggggccaagccgaagagccacccgggccacagttcctgtgcctgccttccccaccccagcagtggcccctccccatcccctccctctgttcgtcccgtttgatgagaggctgtttactggggtggggtggcgagatgggcttgagggggctcagagcataaggcttcagggcccaagttgggagaagtgaccaaagtgtagccagttttctgagttcccgtgtgctagactggccagaagagagggtctggggcctggtcactcggccactctctcctgtttctggcctcttctcccttcactcccgtccagtctggttttgagagcaggggctgttctgcagcacctcagggaagggaggagagatacctgctgcttccattgcttttcccttcctggagtcgatgcctttctaagggttggagctgctccttgcaggggcgggtcagtttcccaggccatgccggggtggccatctatgctagggctggaagctgaggctggccgccagctgtgggctggggtggggtgggtggggtcgggtggtggagaggccttagctgtcctggctggtgcccctcccaggctccttttcaccctgccccctgggcctgaggccccctgtgtccaagcctccccctggctcttcagttctctagcccttggctttgctgggtttcctgactgtagccacatctctcccgctccctaagggtaacctagccaatggaagctgccctttgggtaggtgctgggctcctgggagggcccagatgatggggtgaggcatgtctttccagaactttccctggcagggaggggatggcagaaactcagggaggggcttggggcccattgtatctggagagcctggattcctcttggcagtcttaggcccagccacttctgctacctttgcgctgctgtgagcctcaccctgggcccctgggccctgcttctctgctcccctgggtgatgggtgggcccagaaggtggcagtcccacaccttgtcctcccacctccctgaactgtccattgcttttatagggtgaggtaagtgacagcctcccaagcccaggctttggcactcagaatgggcccagtgggggctgggcaggcccattgagggccaccgccgaggtttctcctagggctgttcctgggcctggctcttacaggctcgtcccccaggcctgcccttctccactgccccctcctgtgtctgggtccacacacccttcaggaagggggagcactgagaagcacagcacaggggctcagcctgggatccggtgatggtctgggcagaggctgggtcaggagtcccaaaggtcagtgacagtttctcagaagaggcccagcgtccacctctctcccagggccagacaccccttcctggctcccccatccccctatgggctcccagccccttgcaccctcattgctgttcagattaaagcctctgttttgcacctgtaaaaaaaaaaaaaaaaaa

SEQ ID NO: 25808 - DNA, 2657 bp, Homo Sapiens
gtcacctgggaagagtctgcagagcctttgcccgccagcgccttcgctctttggctccctgagttaatccggttgtttgcgatcgccgcggccggggctgcgaaccgaagggctcgctccgcgccgcctgggtctctacctcatccgtaggtgtggccctgatggtgtggcaggctctggactcctaaagctctggagcgaatttaagattttattcatgtgcatggcatagaagatgaattcttccacttccaccatgagtgaagagcctgacgctctatcggtagttaaccagttacgggatctagcagcagatccgttaaacagaagagccatcgtccaggatcagggatgtctgcctggccttattttatttatggaccatcccaaccctccagtcgtccactccgctttgcttgctcttcgatacttggcagaatgccgtgcaaacagagaaaagatgaaaggagaactgggtatgatgttgagcttacaaaatgttatacagaaaactacaactccaggagaaacaaaacttctggcctctgaaatctatgacattcttcagtcctccaatatggcagatggtgatagttttaatgagatgaattcacgtcgaaggaaagctcaattttttctgggaactacaaacaaacgtgccaaaacagtggttttgcatatagatggccttgatgatacgtctcggagaaatctatgtgaagaggctttgttaaaaattaaaggtgttattagctttacttttcaaatggctgttcaaaggtgtgtggtgcgaatccgttcagatttgaaagctgaggctttggcatcagcaatagcatcaaccaaggttatgaaagctcagcaagttgtgaaaagtgaaagtggagaagagatgttggtcccattccaagatactcctgtggaagttgaacagaacacagagctacctgactacctgcctgaggatgagagtcccacaaaggaacaggacaaagcggtgtcccgggtcggctcacacccagaaggtggagctagctggcttagcacagctgcaaactttttatccagatcattttattggtgacttcacttttgggctcaaggactgtgtgaaccaacaaggggccagttttccattgttgtggtgaactgtcaagtgcaatttgcaataagttatcatgaaaagtttttagattacacgatcgcatatgctgcatttcacattttattggacattttaccccactgagtggtaaaaaggacagaggctacagatggagttgctttgtttatgaaagtattttggtttgttttctttcatttaattgcctcatatttaaaaaccatgggtccactgttaaaaccacatgtgtatgtgcagctttacattttattttacgtgaagcatgtgattaggaaaactcattttcttttcaagcctcaggacctacctgaagagaagttttcttgtagctcaagttgtgcatgaattactgaatattttactgtgcttttcttcatgaagggtacatgctttgtactcttcactgaaagctgaaaacatttcttgttaccctcttttgtgcctttttattttgccaaccgtgtttatagaaaggacattactaatgacattttgcagattaaaaacattcatttgaacacagtagtcccctagaaaaacaactctacaaaaattttgcagccttattcattataattttgataaaattaacacaaaatcagtcaagaaggaaacatgtatattagtgaagtgtttttggagactgtttgaatgtgaccaaatgtggttctagttgacttcttttcactttggcttatatcaattcttgagagttaatgtgatcatgatattgcaaacaactataaatggtctctaggccttactttgtgattatacgttatctccggctagaaaaaaataatggtagtaaagaaactgacaaactgaaaataagaaaacaaaaatcaaatgcctataataccataatgccagtttggtatagagtccaactttaaaacatgaattgctcgacagagttctattcagtaggtgtttctttgtattgtcttttgtgaatttattatgaaaatgctgcgttgtgttgaatgaaaaagacccaaattactgcttatgaagaaataaagccagcattgatcacttaatcctgtttctcatgtccagccagaaaaaagaacttcagtgaaggtaagataaataaatacatacacatatgtttttttggtagataagtgctaattacatatatgtaatgctttattaaatttctgaaatatttggtaactaaaattttctttttggaaattaataaatccagatacatattaatgttgatatgagtaaaaacaaataggaagaaattgaaatttcttttcatcaacatgtagagctgctattttactatttggagaatatgatgtgaaaattggacctcaaagggtttccttgtgttttcattgtaaaataccatcatcagtgagagtcttgagttcactaacattgtcaccttctggagagagagttaatggggggcattgaggatgatatttttttacatgtgtttggtttctgattcaagtgacacgcacaaactgaaaaaaaaaaaaaaaaaaaa

SEQ ID NO: 25809 - DNA, 1737 bp, Homo Sapiens
ggaaggtgctgagcttagccttgtgccctgcccccatctccccaggcctccagcctctcccggctgcctgccgcccaaagagaaatcacaggggcggggcaggaatgcaaagtgttttctcagaacagctgaaacattccgaagagggaatggatggggagaatggtcaatacacataagaccgtgtcccaaggagctgatttccaggcccctgaggactggagaccgcttcacccctgcacttcagacaccgtttgtcccccggggcaaggtctccttactctgagcccaggccgttccccttggcttcctccgtccacccaggctgcactgcagtgatggcgcgggaggcaccagctctgtggcctgtgtccagcagctcgggtctgaaggagtagccagagaggagcacctgaaccccatgggcttggacttcctggggccccgctgggatttcttcgctgctctagctggcaggacacatcccggcctcttccacccattcccccatgtggctgaagacattccaacaatggggtgggcccataatagttagccctcagtcagttcccggagcacagccctgggagggggctatttctctccccactgaaaacatttcaaagctgagttacttgtctgaggcctcatccctcggaagccgtctgactccagagtctgagcccccggctagtaccctatagagagggggctctccaaaggggctgctggggcatgtgtgcctgtggcagaaaagaggagaccctggaattcagcaccctgggtgccattcccagcgtttagtttctagaggcctcagtttctccatcagcttatgggatccttgtctttactgacaagaatggaatagaaatgtaaaagtactctgaaaagcaattgccctgtaacttatctagaaagaaaagaccctgagactccagaatctgctgttgccatagccccatatgtgtgaattctgcaactagccaaggctagttcctttcaattccatttaaaaaacaaaaaccagcaggtgtggtggctcatggcgtaatgggcctgcccaatgctttgggaggccaaggcaggtagatcgcttgagcccaggagtttgagacaagccctggcaacatagtgagatcccatttctacaaaaaaaaaaattagccgggtgtggtggcacacgcctgtagtctcagctactcaggtggctgaggtgggaggatcgtttgagccctggaggttgaggctgcagtgagctgtgatcgcaccactgcactctggcctgggcgacagagtgagacactgtctgagaacaaaaaacgactgaaaaaaaaaatcaccttagctttttctcttagaatcttctctaaaatgtattctttgtggcattctgaaataggattcatgatgatgcctgttgatcttagggacactacctcacctgccagtatctttggggctgtgtccttcaaggacatgtccccagactgctgtgcagtgtcattttttgtgtttggtttggtggtggcttcttcccccttgctaggctatcaacctcttatcaccacttgttggtgtcagaactaactgcttctggtctggagagggactgaccgatgcctttgggtagagagaattatgaaagaaattttggtatttttctactttatattttctgaggtttctgtaataagcatatttcacttttccaataagaaaaaaaaaaaaaaaaaa

SEQ ID NO: 25810 - DNA, 4049 bp, Homo Sapiens
cagcagcggtagaggcggcggcgaggactggcgacggcgaggagatagtgtctgccttctggagagctgaccaaacactaaggatgctgaagttccgaacagtccatgggggcctgaggctcctgggaatccgccgaacctccaccgcccccgctgcctccccaaatgtccggcgcctggagtataagcccatcaagaaagtcatggtggccaacagaggtgagattgccatccgtgtgttccgggcctgcacggagctgggcatccgcaccgtagccatctactctgagcaggacacgggccagatgcaccggcagaaagcagatgaagcctatctcatcggccgcggcctggcccccgtgcaggcctacctgcacatcccagacatcatcaaggtggccaaggagaacaacgtagatgcagtgcaccctggctacgggttcctctctgagcgagcggacttcgcccaggcctgccaggatgcaggggtccggtttattgggccaagcccagaagtggtccgcaagatgggagacaaggtggaggcccgggccatcgccattgctgcgggtgttcccgttgtccctggcacagatgcccccatcacgtccctgcatgaggcccacgagttctccaacacctacggcttccccatcatcttcaaggcggcctatgggggtggagggcgtggcatgagggtggtgcacagctacgaggagctggaggagaattacacccgggcctactcagaggctctggccgcctttgggaatggggcgctgtttgtggagaagttcatcgagaagccacggcacatcgaggtgcagatcttgggggaccagtatgggaacatcctgcacctgtacgagcgagactgctccatccagcggcggcaccagaaggtggtcgagattgcccccgccgcccacctggacccgcagcttcggactcggctcaccagcgactctgtgaaactcgctaaacaggtgggctacgagaacgcaggcaccgtggagttcctggtggacaggcacggcaagcactacttcatcgaggtcaactcccgcctgcaggtggagcacacggtcacagaggagatcaccgacgtagacctggtccatgctcagatccacgtggctgagggcaggagcctacccgacctgggcctgcggcaggagaacatccgcatcaacgggtgtgccatccagtgccgggtcaccaccgaggaccccgcgcgcagcttccagccggacaccggccgcattgaggtgttccggagcggagagggcatgggcatccgcctggataatgcttccgccttccaaggagccgtcatctcgccccactacgactccctgctggtcaaagtcattgcccacggcaaagaccaccccacggccgccaccaagatgagcagggcccttgcggagttccgcgtccgaggtgtgaagaccaacatcgccttcctgcagaatgtgctcaacaaccagcagttcctggcaggcactgtggacacccagttcatcgacgagaacccagagctgttccagctgcggcctgcacagaaccgggcccaaaagctgttgcactacctcggccatgtcatggtaaacggtccaaccaccccgattcccgtcaaggccagccccagccccacggaccccgttgtccctgcagtgcccataggcccgcccccggctggtttcagagacatcctgctgcgagaggggcctgagggctttgctcgagctgtgcggaaccacccggggctgctgctgatggacacgaccttcagggacgcccaccagtcactgctggccactcgtgtgcgcacccacgatctcaaaaagatcgccccctatgttgcccacaacttcagcaagctcttcagcatggagaactggggaggagccacgtttgacgtcgccatgcgcttcctgtatgagtgcccctggcggcggctgcaggagctccgggagctcatccccaacatccctttccagatgctgctgcggggggccaatgctgtgggctacaccaactacccagacaacgtggtcttcaagttctgtgaagtggccaaagagaatggcatggatgtcttccgtgtgtttgactccctcaactacttgcccaacatgctgctgggcatggaggcggcaggaagtgccggaggcgtggtggaggctgccatctcatacacgggcgacgtggccgaccccagccgcaccaagtactcactgcagtactacatgggcttggccgaagagctggtgcgagctggcacccacatcctgtgcatcaaggacatggccgggctgctgaagcccacggcctgcaccatgctggtcagctccctccgggaccgcttccccgacctcccactgcacatccacacccacgacacgtcaggggcaggcgtggcagccatgctggcctgtgcccaggctggagctgatgtggtggatgtggcagctgattccatgtctgggatgacttcacagcccagcatgggggccctggtggcctgtaccagagggactcccctggacacagaggtgcccatggagcgcgtgtttgactacagtgagtactgggagggggctcggggactgtacgcggccttcgactgcacggccaccatgaagtctggcaactcggacgtgtatgaaaatgagatcccagggggccagtacaccaacctgcacttccaggcccacagcatggggcttggctccaagttcaaggaggtcaagaaggcctatgtggaggccaaccagatgctgggcgatctcatcaaggtgacgccctcctccaagatcgtgggggacctggcccagtttatggtgcagaatggattgagccgggcagaggccgaagctcaggcggaagagctgtcctttccccgctccgtggtggagttcctgcagggctacatcggtgtcccccatggggggttccccgaaccctttcgctctaaggtactgaaggacctgccaagggtggaggggcggcctggagcctccctccctcccctggatctgcaggcactggagaaggagctggtagaccggcatggggaggaggtgacgccggaagatgtgctctcagcagctatgtaccccgatgtgtttgcccacttcaaggacttcactgccacctttggccccctggatagcctgaatactcgcctcttcctgcagggacccaagatcgcagaggagtttgaggtggagctggagcggggcaagacgctgcacatcaaagccctggccgtgagcgacctgaaccgggccggccagaggcaggtcttctttgagctcaatgggcagctgcggtccatcttggtcaaggacacccaggccatgaaggagatgcacttccaccccaaggccctaaaggacgtgaagggccagatcggggcgcccatgcctgggaaggtgatagacatcaaagtggtggcaggggccaaggtggccaagggccagcccctgtgtgtgctcagtgccatgaagatggagactgtggtgacctcacccatggagggtactgtccgcaaggttcatgtgaccaaggacatgacactggaaggtgacgacctcatcctggagatcgagtgatcttgccccagaccggcagcctggccatccccaagccttcaacagaagctgtgctgccacggcaggcccaggccagccagtgcccgaggccaggaaggccgggccgtggaggtcctgtccacagctggacaggagagacaccgcctgcggtggttcattcctttcagccatcgtcctttcctccggcggacagctgcttacatgttcatctcttgccaaataagggtcccctcctcactggagactacaagtggtgggtcaggtggtcctaggacccaggggaggtttaggggtcctatctcctgggggaaggggagatctaagatgtcccaggtcctgggaagtttactcaataaagctggctttcccctgccaaaaaaaaaaaaaaaaaaaaaaaaaaaaaaaaaaaaaaaaaaaaaaaaaaaaaaa

SEQ ID NO: 25811 - DNA, 3096 bp, Homo Sapiens
ctcaacatggctgcgcccttgtcagtggaggtggagttcggaggtggtgcggagctcctgtttgacggtattaagaaacatcgagtcactttgcctggacaggaggaaccctgggacatccggaacctgctcatctggatcaagaagaatttgctaaaagagcggccagagttgttcatccagggagacagcgtgtgagtcccactcctcccttccctgaagcaggtggagggagggacggatatttgagcccccaccctcgggttcagtcctggccttctctgaatccggttctccccttcctcctccctaactcttccagctctgagatctgttttcagttttcttgttactaaaccgaactcttgaggattttttaaatcccagatgaaaggagcctggtgaatttctcagaaaacttggattctgccctctggttgccacagacttgctgtgggaccttaggcgacttacttcgcttctctgggcctcagttactctctacacagaaagtgctgaggaaaaaacgtagctagtacaactgaagagctaaatattctgttttatttcattgtaatttaaatagccacatgcagctagtagattaccatacagtgcagcacgggtctagaattccaaggagtcattgactctgtgcgtgcacacacccatgcacatgcacacacactcactggggacaccccatagaagcccagtgcagtctccttggaaaggaccaggttccagttgccacgaagttacttctaaaacaaggccagtcccccacgtgaaaggtggccggtgcagttgtgaggctcgcttatttgcctcgaagcataggtcactgtcaggtcctaagggatcaggcctaggggatcagccctccttcaggtcatggtccagtggtcctggaggccacctctaaggccagcagtgctccttgggccattaccagtgggagccaggctaagctgcctgaccaaatgttgacctaccctgccttatgccaggcaggactgcacgtgagcattgccatgtggcatggcaactgattcggaagaggcaaaacagccttctctccaggatgggcatgcagaggcctaaaaaaaagccgaagttcttttccagggctaacgagaataagattagacccctggaaaagtcctactaatggttaccatgacagtgtggcaagcactccacacatatcagctcatttcgttttcgtataggccttgtgggttagacagtatcacttatcccattttcagatgaggaacctgatactcagaaacaaaatgacctgcccatggtctgggtggtggtgctggctggcatttgcacccattttccatctggctacaaagaccatgcatgactgacctggtttccttcacactcagaccagcctccccttcctgggatatctttagccagaccccaggaggaaggctcctcagcacactctcctgcagcccaaagctctcagcctctcttcctctgtgctactgcctcctgcctctcactccttgctactcaccaccatctttcccacaggcggccaggaattctggtgctgattaacgatgccgactgggagctactggtcagtaccttgggggacatccctcccccagcccctgcccttgctgcttcagtgggaaagcgttgggcctctcctcaggcacatatagagtggctgggtaatcctccgccccactccagccccacactgaggctgctggagtctcccactccaggtgaggaagggatgggtagctggggacatgggagtactcctccatcctgaagatttgcaggttgaggtataggatacccatttttctggtagagtctgtctcttccagagcagccagtcctcagcccctgttctcccaactcctggggtggacctgggaaggtggccctgagggtctcccgctcccctctctcccgcaccagggtgagctggactaccagcttcaggaccaggacagcgtcctcttcatctccactctgcacggcggctgagggcccttctctgggcctgggcacccttagaggggagaacgaagcaatcagacatccccttgggccctgcttccaggtctccctgtcccccttgcctgccttcttccctgctctgtcccctaagctccctccaggcagggaaaagaggccaggtgctaaaaatgagcctttctcaagcacgtgagcagcggaaggcagacaggcgccagagcccagcactcccttttccagcagctgtggtgggggagggttcccctccagtttgtcaagagttgaaggaggctctgtggccaggtgacctggctgccttccactccttgtacctcagtctaaacatggagtggccgctgacaaggcgctccagccccagagccagcgtcttcatggggaagatgaatggacctgagtagctgaaggaaggcccctccctacccaaagactggaggcttctcagcctcaatttccctgtctgtacagctgagggctctgcctgtcccccactgctatcagtatggaaccccagctggggtcccctattgagtgccgactccccccaccgccagcagctgctcctccagccacacccctcctgctccccccacccctagcccttgaccctggctggcctgccccgctccacaggccaccagatgggctcctgagaccctccccaggctgcttacagctcattctgctgggggtagagatgaggggagggagtaagttaaaccttggactagcaagtagaagcctggggggatgcgtgtgcctcagtttcctcctccacaactgaatatttatagtggctgaaaactggggagatacttgatggcgcgaatgtccgttttctctcccttcccacctcctgcaggaagcaggacggggcaggcagcacctggtaggcacagtgctttgcccctcctccccttcccttctggaagtcttggggcctcagtgcttgcaacagccggccttgggcaaataaaagactaggttgtttactaaaaaaaaaaaaaaaaaaaaaaaaaaaaaaaaaaaaaaaaaaaaaaaaaaaaaaaaaaaaaa

SEQ ID NO: 25812 - DNA, 3300 bp, Homo Sapiens
gaggatgacggtgctgcaggaacccgtccaggctgctatatggcaagcactaaaccactatgcttaccgagatgcggttttcctcgcagaacgcctttatgcagaagtacactcagaagaagccttgtttttactggcaacctgttattaccgctcaggaaaggcatataaagcatatagactcttgaaaggacacagttgtactacaccgcaatgcaaatacctgcttgcaaaatgttgtgttgatctcagcaagcttgcagaaggggaacaaatcttatctggtggagtgtttaataagcagaaaagccatgatgatattgttactgagtttggtgattcagcttgctttactctttcattgttgggacatgtatattgcaagacagatcggcttgccaaaggatcagaatgttaccaaaagagccttagtttaaatcctttcctctggtctccctttgaatcattatgtgaaataggtgaaaagccagatcctgaccaaacatttaaattcacatctttacagaactttagcaactgtctgcccaactcttgcacaacacaagtacctaatcatagtttatctcacagacagcctgagacagttcttacggaaacaccccaggacacaattgaattaaacagattgaatttagaatcttccaattcaaagtactccttgaatacagattcctcagtgtcttatattgattcagctgtaatttcacctgatactgtcccactgggaacaggaacttccatattatctaaacaggttcaaaataaaccaaaaactggtcgaagtttattaggaggaccagcagctcttagtccattaaccccaagttttgggattttgccattagaaaccccaagtcctggagatggatcctatttacaaaactacactaatacacctcctgtaattgatgtgccatccaccggagccccttcaaaaaagacttttcgtgttttacagtctgttgccagaatcggccaaactggaacaaagtctgtcttctcacagagtggaaatagccgagaggtaactccaattcttgcacaaacacaaagttctggtccacaaacaagtacaacacctcaggtattgagccccactattacatctcccccaaacgcactgcctcgaagaagttcacgactctttactagtgacagctccacaaccaaggagaatagcaaaaaattaaaaatgaagtttccacctgaaatcccaaacagaaaaacaaaaagtaaaactaataaaggaggaataactcaacctaacataaatgatagcctggaaattacaaaattggactcttccatcatttcagaagggaaaatatccacaatcacacctcagattcaggcctttaatctacaaaaagcagcagcagaaggtttgatgagccttcttcgtgaaatggggaaaggttatttagctttgtgttcatacaactgcaaagaagctataaatattttgagccatctaccttctcaccactacaatactggttgggtactgtgccaaattggaagggcctattttgaactttcagagtacatgcaagctgaaagaatattctcagaggttagaaggattgagaattatagagttgaaggcatggagatctactctacaacactttggcatcttcaaaaagatgttgctctttcagttctgtcaaaagacttaacagacatggataaaaattcgccagaggcctggtgtgctgcagggaactgtttcagtctgcaacgggaacatgatattgcaattaaattcttccagagagctatccaagttgatccaaattacgcttatgcctatactctattagggcatgagtttgtcttaactgaagaattggacaaagcattagcttgttttcgaaatgctatcagagtcaatcctagacattataatgcatggtatggtttaggaatgatttattacaagcaagaaaaattcagccttgcagaaatgcatttccaaaaagcgcttgatatcaaccctcaaagttcagttttactttgccacattggagtagttcaacatgcactgaaaaaatcagagaaggctttggataccctaaacaaagccattgtcattgatcccaagaaccctctatgcaaatttcacagagcctcagttttatttgcaaatgaaaaatataagtctgctttacaagaacttgaagaattgaaacaaattgttcccaaagaatccctcgtttacttcttaataggaaaggtttacaagaagttaggtcaaacgcacctcgccctgatgaatttctcttgggctatggatttagatcctaaaggagccaataaccagattaaagaggcaattgataagcgttatcttccagatgatgaggagccaataacccaagaagaacagatcatgggaacagatgaatcccaggagagcagcatgacagatgcggatgacacacaacttcatgcagctgaaagtgatgaattttaacttctggaaatcagacttttacaactggatgtgtgactagtgctgacgtgtttcttgtccctctgtatactgagtctttactcttgagctggcggtgtcatcgtccgtcacttataccatgagtgtgccactttcattggaccctgactgtatacagaatgaaaggcagtgcaatatttagctgctaacaagactggctcttttaccagtatgaatgacaatttatggggggtagggtggggaactttcttttctgtttttctttaatctccctttgttggaaagtatcatgaaaggaagagttatgctttatcttgaaggaaccattagatatggaaaatagtgatgaaccagagtttcttggttgctttttcaaaaatttgtttttatttggttctgttcctgataaacagagtaactgaccttcatttctaggttcttcaagaatggtgtttgcaagtgccagatggaacaataaaagacgttgcctataacagtgacttgattgccaaggaatgtaaattaccttaaacttgcagtatctcccataaacaaatgtaatgggcatattgggactcgtatgtaggaatcaaatatccctccatacagtgtactcttattcttggcaagaatgctttaatgtctaaccaagaattttaatttattcatcttgctaaaaaaaaaaaaaaaaaaaaaaaaaaaaaaaaaaaaaaaaaaaaaaaaaaaaaaaaaaaaaaaaaaaaaaaaaaaaaaaaaaaaaaaaaaaaaaaaaaaaaaaaaaaaaaaaaaaaaaaaaaaaaaaa

SEQ ID NO: 25813 - DNA, 2063 bp, Homo Sapiens
ctcccctgtgctcccagcatgcctcgtggccggtgccgtcagcagggccctcgcattcccatctgggcagccgccaattatgccaacgcacatccatggcagcagatggacaaggcgtctcctggggtggcatacaccccccttgtggatccctggattgagcggccctgctgtggggacaccgtgtgtgtgcgaacgaccatggagcagaagagcacagctagtggcacttgtggcggtaaacctgcagaaaggggtcccctagctgggcacatgcccagctcccgaccccacagggtggacttctgctgggtaccaggctcagacccaggcacctttgatggctccccgtggctactggaccgcttcttggcccagctgggcgattacatgtccttccactttgagcactatcaggacaacatcagccgtgtctgcgagatcctcaggcgcctaacaggccgagcccaggcctgggcagccccctaccttgatggggacctgcccctgcctgacgattacgagctcttctgccaggatctcaaggaagttgttcaagacccgaacagttttgctgagtaccatgctgtggttacctgtcccctgcccctggcctccagccagctgccagtggcccctcagctgcctgtggtgaggcaatacttagctaggttcttagagggcctggcactcgacatgggtactgcccccaggtctttaccagccgccatggccacccctgctgtgtctgggtccaactctgtatctagaagtgctctgttcgagcagcagctgaccaaggagagcacccctgggcccaaggagcccccagtcctgcccagttctacatgtagctccaagcctggtcctgtggaaccagcctcttcccagccagaggaggcagcccccacacctgtccctagactgtcggagtcagctaatcctcctgcccagagaccagacccagctcatccaggaggtccaaaaccccagaaaacagaggaggaggttttggagacagagggagaccaggaggtgtccttaggtaccccacaggaggtggtggaggccccggagaccccaggagagccaccactttctcctgggttctgaacacagcccaggtgggaacaatgctgcccctcatgatgaagtggcctgtgtggcttgagcgccccatagtccccagtcagagcagagtggtgtccccagatgacttcagaccccatagctgggcaagatgcgcttgttttggactctgcgctgagcagaaccagctcccccaactccagcagagcttgacctccgccctgtgccctttccctgctgctggctctctgctgcatccctgcccgtcttctgggagtgccgtctcacccaggcctgctcccacgagggggtcgttttgtagatcaactctcagcagatagttgcatcatctttgtcacctccacccccataaaacaccccccttggtgtcttccacactggctgggactgaactgggtctgccacgtctgccctgttgggacctcgttcctgtatggggtttctgtgtctgtccccctagccccaccctctctgctccctgtgacttctgtcccagctggaatgtgaggaaggctgcctggaggaagtggccactttgattctgggggatgagtgggatagcatcttggcaaagaatgatgtttcctgtgggattaccagcagttctgggcagctggaaggtttggatgcaggaaggtgggatgcaagccccttgccaggctcagctgcaggcattcgccctttgtgtgttaacactgtagctctaatcgtgcctggtgttctgaagcaggctcctcttccctgctgctgtgctgccatcccctgctcactccgcactcgcatgcattgcggattcagcacttaagccctagtgtgtaaatgacttggatctccctcctggcagactgtgaccctcagcacaggggctctgtcttagtcagctctgtggcctggtacacaattggtgctcattaaacacgtgttggattactggcaaaaaaaaaaaaaaaaaa

SEQ ID NO: 25814 - DNA, 1741 bp, Homo Sapiens
cggggaatcatggccgcccccagtgttccgcgtccgggggtttgtgggagttgccttgacctgcagctccgccaccgcggacccgccttctgccctcagcagcagacgctctgtcccgcccgggcagctctgcgaggcagcggctggagagggaaccatggggactgtgcacgcccggagtttggagcctcttccatcaagtggacctgattttggaggattaggagaagaagctgaatttgttgaagttgagcctgaagctaaacaggaaattcttgaaaacaaagatgtggttgttcaacatgttcattttgatggacttggaaggactaaagatgatatcatcatttgtgaaattggagatgttttcaaggccaaaaacctaattgaggtaatgcggaaatctcatgaagcccgtgaaaaattgctccgtcttggaatttttagacaagtggatgttttgattgacacatgtcaaggtgatgacgcacttccaaatgggttagacgttacctttgaagtaactgaattgaggagattaacgggcagttataacaccatggttggaaacaatgaaggcagtatggtacttggcctcaagcttcctaatcttcttggtcgtgcagaaaaggtgacctttcagttttcctatggaacaaaagaaacttcgtatggcctgtccttcttcaaaccacggcccggaaacttcgaaagaaatttctctgtaaacttatataaagttactggacagttcccttggagctcactgcgggagacggacagaggaatgtcagctgagtacagttttcccatatggaagaccagccacactgtcaagtgggaaggcgtatggcgagaactgggctgcctctcaaggacggcgtcatttgctgttcgaaaagaaagcggacattcactgaaatcatctctttcgcacgccatggtcatcgattctcggaattcttccatcttaccaaggagaggtgctttgctgaaagttaaccaggaactggcaggctacactggcggggatgtgagcttcatcaaagaagattttgaacttcagttgaacaagcaactcatatttgattcagttttttcagcgtctttctggggcggaatgttggtacccattggtgataagccgtcaagcattgctgataggttttacctcgggggacccacaagcgtccgcggattcagcatgcacagcatcgggccacagagcgaaggagactacctaggtggagaagcgtactgggccggcggcctgcacctctacaccccattacctttccggccaggccagggtggctttggagaacttttccgaacacacttctttctcaacgcaggaaacctctgcaacctcaactatggggagggccccaaagctcatattcgtaagctggctgagtgcatccgctggtcgtacggggccgggattgtcctcaggcttggcaacatcgctcggttggaacttaattactgcgtccccatgggagtacagacaggcgacaggatatgtgatggcgtccagtttggagctgggataaggttcctgtagccgacacccctacaggagaagctctgggactggggcagcagcaaggcgcccatgccacacaccgtctctcgaggaaacgcggttcagcgattctttgactgcggaccctgtgggaaaccccgtcaataaatgttaaagacacactccgaaaaaaaaaaaaaaaaaaaaaaaaaa

SEQ ID NO: 25815 - DNA, 3504 bp, Homo Sapiens
gcacgaggggagattgttgccagggctctggtgagttcagaatgaccgaagaagcatgccgaacacggagtcagaaacgagcgcttgaacgggacccaacagaggacgatgtggagagcaagaaaataaaaatggagagaggattgttggcttcagatttaaacactgacggagacatgagggtgacacctgagccgggagcaggtccaacccaaggattgctgagggcaacagaggccacggccatggccatgggcagaggcgaagggctggtgggcgatgggcccgtggacatgcgcacctcacacagtgacatgaagtccgagaggagacccccctcacctgacgtgattgtgctctccgacaacgagcagccctcgagcccgagagtgaatgggctgaccacggtggccttgaaggagactagcaccgaggccctcatgaaaagcagtcctgaagaacgagaaaggatgatcaagcagctgaaggaagaattgaggttagaagaagcaaaactcgtgttgttgaaaaagttgcggcagagtcaaatacaaaaggaagccaccgcccagaagcccacaggttctgttgggagcaccgtgaccacccctcccccgcttgttcggggcactcagaacattcctgctggcaagccatcactccagacctcttcagctcggatgcccggcagtgtcatacccccgcccctggtccgaggtgggcagcaggcgtcctcgaagctggggccacaggcgagctcacaggtcgtcatgcccccactcgtcaggggggctcagcaaatccacagcattaggcaacattccagcacagggccaccgcccctcctcctggccccccgggcgtcggtgcccagtgtgcagattcagggacagaggatcatccagcagggcctcatccgcgtcgccaatgttcccaacaccagcctgctcgtcaacatcccacagcccaccccagcatcactgaaggggacaacagccacctccgctcaggccaactccacccccactagtgtggcctctgtggtcacctctgccgagtctccagcaagccgacaggcggccgccaagctggcgctgcgcaaacagctggagaagacgctactcgagatccccccacccaagcccccagccccagagatgaacttcctgcccagcgccgccaacaacgagttcatctacctggtcggcctggaggaggtggtgcagaacctactggagacacaaggcaggatgtcggccgccactgtgctgtcccgggagccctacatgtgtgcacagtgcaagacggacttcacgtgccgctggcgggaggagaagagcggcgccatcatgtgtgagaactgcatgacaaccaaccagaagaaggcgctcaaggtggagcacaccagccggctgaaggccgcctttgtgaaggcgctgcagcaggaacaggagattgagcagcggctcctgcagcagggcacggcccctgcacaggccaaggccgagcccaccgctgccccacaccccgtgctgaagcaggtcataaaaccccggcgtaagttggcgttccgctcaggagaggcccgcgactggagtaacggggctgtgctacaggcctccagccagctgtcccggggttcggccacgacgccccgaggtgtcctgcacacgttcagtccgtcacccaaactgcagaactcagcctcggccacagccctggtcagcaggaccggcagacattctgagagaaccgtgagcgccggcaagggcagcgccacctccaactggaagaagacgcccctcagcacaggcgggacccttgcgtttgtcagcccaagcctggcggtgcacaagagctcctcggccgtggaccgccagcgagagtacctcctggacatgatcccaccccgctccatcccccagtcagccacgtggaaatagtgcgagccaggccccgtggaagacgggctccctcctcccccacctggcccctggtctagaaggacccactgcaccaccctccgctggctcgggaagacaccgtgcccgccccaagagcaagcaccggccatgctgcagaggcaagacctcaattcttggctgcaaagtttcatcagggctagggggctggtgccgcctcataggcagacgaggatcatcgctgggggacctttcccgtgggctttcttcctttctctctttgcctttagtttgcccgacaccagcagaaaagtggaccttgggggctggttctgctcctggcccccttgttcagcccctgccggcacacgggcggctcaccctggacactgtgatgcgcatgggcaaggccagcgcccggggcttctgaaccgagcggggtgtttcatttttttgcttttccctgtcttaggctcccagtctttgactgccttcccatggcgatctataagttgaaagatttttttttttttaatcacctcatgatgatggagttaaaagtaaaccgtgcagaccctggggtccctgttgtacgctgcatcatcccgctggccctgtgccctggagggtgggcggctcatggtgccacagcccctggcagggacggccggcccgcccccgtgactgactgacagatgcagggatggccgaggcagccctcgctccagctgaacgcctccattgctgcttgttctggagacccccgcccccgcaccttccagacttagcagaagaacaaactgaagaacagacccagccagagaagcagggattccagaagctgcccattaagggagaaggagaggatccggtcggcagcagccctgagcagaaagctggaggggggactgtcgcggggtttttctgttgtggtttattttattaaattttttccttttttctattcatttcgatggacgcaatcttaagccaccctggccttgctcctgggaggtgagcgtgcacaggtgtgtgcaggtcaggaggtgccgtccaggtgtgcggcgagccgctgcgcacagatgtcaggatttccgtttgggtctagtttagaacctgtccttaaacctaggggttgctgtcaggatttgctttcagactttttttttttgtaattccctttagagtctacaaaaatgtttttaaaaggatcaggtctgcttttagtttcatttttgtttctttcccgtcccactctttaaaaactggttccgtgaggaaaggcagaagccgttccgtgtctcttgcaggctgggccggcttcatgccagtgcgagggcgtcccgtgcccacgtacatacgtatgtctccatgagttctgggctccactggttccaattgagctccagccctggttttcctacccatgcagttagggactttaatttaattttttttttgtagggccaccgccttcaaacacaactgctacaacattctaataaaggctcatttaacccccagaaaaaaaaaaaaaaaaaaaaaaaaaaaaaaaaaaaaaaaaaaaaaaaaaaaaaaaaaa

SEQ ID NO: 25816 - DNA, 1032 bp, Homo Sapiens
gaagttggacgcatgcgccgtttctctgcatggtgtgcgttctcgttctagctgcggccgcaggagctgtggcggttttcctaatcctgcgaatatgggtagtgcttcgttccatggacgttacgccccgggagtctctcagtatcttggtagtggctgggtccggtgggcataccactgagatcctgaggctgcttgggagcttgtccaatgcctactcacctagacattatgtcattgctgacactgatgaaatgagtgccaataaaataaattcttttgaactagatcgagctgatagagaccctagtaacatgtataccaaatactacattcaccgaattccaagaagccgggaggttcagcagtcctggccctccaccgttttcaccaccttgcactccatgtggctctcctttcccctaattcacagggtgaagccagatttggtgttgtgtaacggaccaggaacatgtgttcctatctgtgtatctgcccttctccttgggatactaggaataaagaaagtgatcattgtctacgttgaaagcatctgccgtgtagaaacgttatccatgtccggaaagattctgtttcatctctcagattacttcattgttcagtggccggctctgaaagaaaagtatcccaaatcggtgtaccttgggcgaattgtttgacaaatggcaactgacttctttagaattttgcagttaacagtagtatgtactcaaattggggggaaaaaaaccctacatgtttcttgtaaaggcgtctgacagtcctgagaattattgatggtaaggaataaaaaatgtacagatgactcagtgaagaaactgaggcttctcttatgaaacaaacattgataaacgtaactactaaatgtttatgcctctgtaaaccaaatttcttttctagataaaaatatgtattactacctgcaaattttcttctggctgttttagtagtattttttttacagaactaaatatagagtttgtatgattagtaaaaaaaaaaaaaaaaaaa

SEQ ID NO: 25817 - DNA, 1583 bp, Homo Sapiens
gagactaaactcaatacagtggatgaccagaaagcaggttctcccagcagagatgtgggtccttccctgggtctgaagaagtcaagctcattggagagtctgcagaccgcagttgccgaggtgactttgaatggggatattcctttccatcgtccacggccgcggataatcagaggcaggggatgcaatgagagcttcagagctgccatcgacaaatcttatgataaacccgcggtagatgatgatgatgaaggcatggagaccttggaagaagacacagaagaaagttcaagatcagggagagagtctgtatccacagccagtgatcagccttcccactctctggagagacaaatgaatggaaaccaagagaaaggtgataagactgatagaaaaaaggataaaactggaaaagaaaagaagaaagatagagataaggagaaggataaaatgaaagccaagaagggaatgctgaagggcttgggagacatgttcaggtttggcaaacatcgaaaagatgacaagattgagaaaacgggtaaaataaaaatacaggaatcctttacatcagaagaggagaggatacgaatgaagcaggagcaggagaggattcaagccaaaactcgagaatttagggaacgacaagctcgagagcgtgactatgctgaaattcaagattttcatcggacatttggctgtgatgatgagttaatgtatgggggagtttcttcttatgaaggttccatggctctcaacgctagacctcagagcccacgagaagggcatatgatggatgctttgtatgcccaagtcaagaagccgcggaattccaaaccctcacctgtagacagtaacagatcaactcctagcaatcatgatcggatacagcgtctgaggcaagaatttcagcaagcaaagcaagatgaagatgtagaagatcgtcggcggacctatagttttgagcaaccctggccgaacgcacggccggcgacgcagagcgggcgacactcggtgtccgtggaggtgcagatgcagcggcagcggcaggaggagcgcgagagctcccagcaggcccagcgccagtacagctctctgcctcggcaaagcaggaaaaatgccagctcggtctcccaggactcttgggagcagaactactcccctggggaaggcttccagagtgccaaagagaaccccaggtactccagctaccaaggctccaggaacggctacctgggaggacatggcttcaacgccagggtcatgctggaaactcaggagctccttcgccaggaacagaggcggaaggagcagcagatgaagaagcagcctccttccgaggggcccagcaactatgactcgtataagaaagtccaggaccccagttacgcccctcccaaggggcccttccggcaagatgtgcccccctccccttctcaggttgcgaggctgaacagacttcagactcctgagaaagggaggcccttctattcctgagcacgcaaataacggatgcttcatgtcgcgcaataaaagacattttcctatgaaaaaaaaaaaaaaaaaaaaaaaaaaaaaaaaaaaaa

SEQ ID NO: 25818 - DNA, 1170 bp, Homo Sapiens
tgatgaagaagccagttatctcagatttcgaaatagtatatggaaaaatgaagaagagaaagtggaaatttttcatcctttgcgactagttcgggatccactgtcacctgctgtaagacagaaagaaactgtgaaaaatgacctgcctgtaaatgaagctgcaattagaaaaatagctgcccttgaaaatgagctgacttttcttcgctctcagattgcagcaattgtggaaatgcaggaactgaaaaatagtacaaattctagttcctttggcttgagtgacgagcgcattagtttgggtcagctgtcatcatcgcgggctgcccatctgagtgtggacccagatcagcttccaggttcagtgctttctcctcctcctcctccaccacttcctcctcagttttcatctctccagccaccgtgttttcctcccgtacaaccaggatctaataatatttgtgactcagataatccagcaactgaaatgagcaaacagaacccggctgctaataagaccaattatagtcatcattcaaaaagccagagaaataaagatattccaaacatgttggacgttctaaaggatatgaataaggttaagcttcgtgcaattgagcggtcacctggcggtagacccattcataagaggaaaagacagaattcacattgggatccagtttctttaatatctcatgcacttaaacagaaatttgcatttcaagaagatgattcttttgagaaagagaatagatcttgggaatcttccccattttctagtccagaaacttcaaggtttggacatcacatttcacagtcagaaggacagcgaactaaagaagaaatggtcaacacaaaagctgttgaccaaggtatcagcaacacaagccttctaaactcaaggatttaaactcaacttaaggttgagctttaaacttccaaaacttcttcctggatgataaattattcttagaaactgatttggactgttaaaggctaaaagtagatgtatttaaagactcttcttgacacattttgcctacacttgctatgtaaatatgtatgcctgtcatttttgtttcctttgttcctttttacgtttatactctgttcttctgtacatagagcttaaaataaacattctttttgaacttgaaaaaaaaaaaaaaaaaa

SEQ ID NO: 25819 - DNA, 682 bp, Homo Sapiens
gaggacaagtcagctgagaaaaggaaaaaagacaagcaggaagacagttcagatgatgatgaagctgaagaaggagaggttgaagatgagaactcaagtgatgtagagttggatacgttgtctcaggtagaagaggagtctttgttaagaaacgatcttcgtccagctaacaaacttgctaaaggaaataggttattcatgagatttgctacaaaagccccaggtctaggatccatccaggactgagtgtactcattttgcatcttacctgctccacatctggaatcagccatttctccaaggagctggtgggcatggtttgaggggttcgggggttgggggctatacatactggtttgtgttgtcacgtttacctacagccctggatatatttacagtggtgtttgttctttacagtcagagtgtccaagaactgtggaaggtctttgtattactacttttgacaaaaatttatgatgactgaccacctttctttcctgttaactgacatttcaacttgacaaatgtgatctttaccacattgactcatttgagtggctgagtacattctacatgtatagtattatgctgttttctttaagccattttgaggagcacaataaactggaaaaatgatttaccaaaaaaaaaaaaaaaaaaaaaaaaaaaaaaaaaaaaaaaa

SEQ ID NO: 25820 - DNA, 4250 bp, Homo Sapiens
gtagagttaaggaagggcctcttcctctgtgagaattcagcattttgcaaccatccaaaaatgttgagggcatgctttgcttccagggcagacagagcagcacagtgagcatgggacacaggatccctgacttgctgtgtgcccttaaaccagccactacctctctgacgttcaaaattgagcaatggaaggcagcctgcccaactgttacctgcctgtcatcatgaaagcctgcggatgagtgcagaatacagaaactgcagccatgaccacgcacgtcaccctggaagatgccctgtccaacgtggacctgcttgaagagcttcccctccccgaccagcagccatgcatcgagcctccaccttcctccatcatgtaccaggctaactttgacacaaactttgaggacaggaatgcatttgtcacgggcattgcaaggtacattgagcaggctacagtccactccagcatgaatgagatgctggaggaaggacatgagtatgcggtcatgctgtacacctggcgcagctgttcccgggccattccccaggtgaaatgcaacgagcagcccaaccgagtagagatctatgagaagacagtagaggtgctggagccggaggtcaccaagctcatgaagttcatgtattttcagcgcaaggccatcgagcggttctgcagcgaggtgaagcggctgtgccatgccgagcgcaggaaggactttgtctctgaggcctacctcctgacccttggcaagttcatcaacatgtttgctgtcctggatgagctaaagaacatgaagtgcagcgtcaagaatgaccactctgcctacaagagggcagcacagttcctgcggaagatggcagatccccagtctatccaggagtcgcagaacctttccatgttcctggccaaccacaacaggatcacccagtgtctccaccagcaacttgaagtgatcccaggctatgaggagctgctggctgacattgtcaacatctgtgtggattactacgagaacaagatgtacctgactcccagtgagaaacatatgctcctcaaggtgatgggctttggcctctacctaatggatggaaatgtcagtaacatttacaaactggatgccaagaagagaattaatcttagcaaaattgataaattctttaagcagctgcaggtggtgccccttttcggcgacatgcagatagagctggccagatacattaagaccagtgctcactatgaagagaacaagtccaagtggacgtgcacccagagcagcatcagcccccagtacaatatctgcgagcagatggttcagatccgggatgaccacatccgcttcatctccgagctcgctcgctacagcaacagtgaggtggtgacgggctcagggctggacagccagaagtcagacgaggagtatcgcgagctcttcgacctagccctgcggggtctgcagcttctatccaagtggagcgcccacgtcatggaggtgtactcttggaagctggttcatcccacagacaagttctgcaacaaggactgtcctggcaccgcggaggaatatgagagagccacacgctacaattacaccagtgaggaaaaatttgccttcgttgaggtgatcgccatgatcaaaggcctgcaggtgctcatgggcaggatggagagcgtcttcaaccaggccatcaggaacaccatctacgcggcattgcaggacttcgcccaggtgacgctgcgtgagcccctgcggcaggcggtacggaagaagaagaatgtcctcatcagcgtcctacaggcaattcgaaagaccatctgtgactgggagggagggcgagagccccctaatgacccatgcttgagaggggagaaggaccccaaaggtggatttgatatcaaggtgccccggcgtgctgtggggccatccagcacacagctgtacatggtgcggaccatgcttgaatcactcattgcagacaaaagcggctccaagaagaccctgaggagcagcctggatggacccattgtcctcgccatagaggactttcacaaacagtccttcttcttcacacatctgctcaacatcagtgaagccctgcagcagtgttgtgacctctcccagctctggttccgagaattcttcctggagttaaccatgggccgacgaatccagttccccatcgagatgtccatgccctggattctaacggaccatatcctggaaaccaaagaaccttccatgatggagtatgtcctctaccctctggatctgtacaacgacagcgcctactatgctctgaccaagtttaaaaagcagttcctgtacgatgagatagaagctgaggtgaacctgtgttttgatcagtttgtctacaagctggcagaccagatctttgcttactacaaagccatggctggcagtgtcctgttggataaacgttttcgagctgagtgtaagaattatggcgtcatcattccgtatccaccgtccaatcgctatgaaacactgctgaagcagagacacgtccagctgttgggtagatcaattgacttgaacagactcattacccagcgcacctctgccgccatgtataaatccttggaccaagctatcagccgctttgagagtgaggacctgacctccattgtggagctggagtggctgctggagattaaccggctcacgcatcggctgctctgtaagcatatgacgctggacagcttcgatgccatgttccgagaggccaatcacaatgtgtccgccccctatggccgtatcaccctgcatgtcttctgggaactgaactttgactttctccccaactactgctacaatgggtccactaaccgttttgtgcggactgccattcctttcacccaagaaccacaacgagacaaacctgccaacgtccagccttattacctctatggatccaagcctctcaacattgcctacagccacatctacagctcctacaggaatttcgtggggccacctcatttcaagactatctgcagactcctgggttatcagggcatcgctgtggtcatggaggaactgctaaagattgtgaagagcttgctccaaggaaccattctccagtatgtgaaaacactgatagaggtgatgcccaagatatgccgcttgccccgacatgagtatggctccccagggatcctggagttcttccaccaccagctgaaggacatcattgagtacgcagagctcaaaacagacgtgttccagagcctgagggaagtgggcaatgccatcctcttctgcctcctcatagagcaagctctgtctcaggaggaggtctgcgatttgctccatgccgcacccttccaaaacatcttgcctagagtctacatcaaagagggggagcgcctggaggtccggatgaaacgtctggaagccaagtatgccccgctccacctggtccctctgatcgagcggctggggacccctcagcaaatcgccattgctcgcgagggtgacctcctgaccaaggagcggctgtgctgtggcctgtccatgttcgaggtcatcctgacccgcattcggagctacctgcaggaccccatctggcggggcccaccgcccaccaatggcgtcatgcacgtcgatgagtgtgtggagttccaccggctgtggagcgccatgcagttcgtgtactgcatccctgtgggaaccaacgagttcacagctgagcagtgtttcggcgatggcttgaactgggctggttgctccatcattgtcctgctgggccagcagcgtcgctttgacctgttcgacttctgttaccacctgctaaaagtgcagaggcaggacgggaaggatgaaatcattaagaatgtgcccctgaagaagatggccgaccggatcaggaagtatcagatcttgaacaatgaggtttttgccatcctgaacaaatacatgaagtccgtggagacagacagttccactgtggagcatgtgcgctgcttccagccacccatccaccagtccttggccaccacttgctaagcagaagatcctgcagacccttatctggaggaggaagagaagcaggagagagaaagccacagccagcctgccataggatccaactggacaacgtgtgggatggacctggaaacaagcacctccccaaacacatcaccactccctagggcggggcctgtgcatgctctcccatgacatctccatgctggtttctccatagcataaatgaaaaaaaaaaaaaaaa

SEQ ID NO: 25821 - DNA, 1961 bp, Homo Sapiens
cggaagtcgtctggcctccccgcggccgctcgcagcttgctggcctctcccgcgcctcacgtcggactccgtctccgcggcagggaagcagcatggaagctgaggacatccaggaggagttgacctgccccatctgcctggactatttccaggacccggtgtccatcgagtgcggccacaacttctgccgcggctgcctgcaccgcaactgggcgccgggcggcggcccgttcccctgccccgaatgtcggcacccatcggcgcccgccgcgctgcgacccaactgggccctggccaggctgactgagaagacgcagcgccggcgcctgggccccgtgcccccgggcctgtgcggccgccactgggagccgctgcggctcttctgcgaggacgaccagcggccagtgtgcctggtgtgcagggagtcccaggagcaccagactcacgccatggcacccatcgacgaggccttcgagagctaccgggagaaacttcttaagtctcagcgtaatctcgtggccaagatgaagaaagtcatgcatttacaggatgtagaagtgaagaacgccacacagtggaaggataagataaagagtcagcgaatgagaatcagcacggagttttcaaagctgcacaacttcctggttgaagaagaggacctgtttcttcagagattgaacaaagaagaagaagagacgaagaagaagctgaatgagaacacgttaaaactcaatcaaactatcgcttcattgaagaagctcatcttagaggtgggggagaagagccaggctcccaccctggagctgcttcagaatccaaaagaagtgttgaccaggagtgagatccaggatgtgaactattctcttgaagctgtaaaggtgaagacagtgtgccagataccattgatgaaggaaatgctaaagcgattccaagcaactaaaataaaaacacaaaaacaaaacaggcacaatatgtgaaacaaccgttttcaaagcaccagacgtcaggcagtgaaggacggtgattcctgagaaatgtgaaacaaatgaggtcagcctatgattgccctaccctctgcctgagggagtttccagaccatgtaaggctgaggtaactgaggtagagccagggagacttgctgagttgaggaatagacctgggagttcacggagaacaaagtagtgagagttcgcaaagtactgggcagtatcctggagcggagagagccggacacagagagaaccctcgccatctatggaggagcttcctagttgtttggcagagttctgatcagcacatgcctgtgaaaatctactcaaggctggagatagaagcttctaaaacgattagagggaacggttcctggtgctcacacagggccaggaacagtgccagttcctatcagccacaccagaaaactcgtagttcacgggcactgagtagcgtactcaggaaaatcttgcctcattagcagaaaatatttagcccttgactgggtgctgctccacacccaccttacaaatcatgaaagcaagacccaaaggggtcaaactctttccaactaacttaactgcatcccaggataaagccctagaaaattggtagaaataaacaaaaaaagagcacctaacaatataaattcacaatgtctggcatccagtcaaatatgcatgcaaaaagataggaaagcagtgacccataatggaggaaaataatcaactgaaactgacctagaattgacacagatgttagaataagcatggaaggactttaaaacatttattatgagtgtattctgtaaagaggtacatagagaccagatcaaagttttaaagatgaaaaatgtgattaaggcgaagaatgcactggatgggattaatagttgattaaatattacaaaagaaaaaattggtgaacttgaagacagagcaatggaaactacaaaaaaaaaaaaaaaaaaa

SEQ ID NO: 25822 - DNA, 3419 bp, Homo Sapiens
aggtagccggccggccgggggtcgcgggtatggccgaggccaggaagcggcgggagctacttcccctgatctaccaccatctgctgcgggctggctatgtgcgtgcggcgcgggaagtgaaggagcagagcggccagaagtgtttcctggctcagcccgtaacccttctggacatctatacacactggcaacaaacctcagagcttggtcggaagcggaaggcagaggaagatgcggcactgcaagctaagaaaacccgtgtgtcagaccccatcagcacctcggagagctcggaagaggaggaagaagcagaagccgaaaccgccaaagccaccccaagactagcatctaccaactcctcagtcctgggggcggacttgccatcaagcatgaaagaaaaagccaaggcagagacagagaaagctggcaagactgggaattccatgccacaccctgccactgggaagacggtggccaaccttctttctgggaagtctcccaggaagtcagcagagccctcagcaaatactacgttggtctcagaaactgaggaggagggcagcgtcccggcctttggagctgctgccaagcctgggatggtgtcagcgggccaggccgacagctccagcgaggacacctccagctccagtgatgagacagacgtggaggggaaaccctcagtaaaaccagcccaggtcaaagcctcatcagtttctactaaggagtctccagcaagaaaggcggccccagcccctgggaaggtgggggatgtgacaccccaggtcaaaggaggggccctgcccccagccaagagggccaagaagccagaagaggagtcagagagtagtgaggagggatctgaaagtgaggaggaggcccctgcagggacacgaagccaggtaaaggcctctgaaaaaattctccaggtcagagctgcctcagcccctgccaaggggacccctgggaaaggggctaccccagcaccccctgggaaggcaggggctgtagcctcccagaccaaggcagggaagccagaggaggactcagagagcagcagcgaggagtcatctgacagtgaggaggagacgccagctgccaaggccctgcttcaggcgaaggcctcaggaaaaacctctcaggtcggagctgcctcagcccctgccaaggagtcccccaggaaaggagctgccccagcgccccctgggaagacagggcctgcagttgccaaggcccaggcggggaagcgggaggaggactcgcagagcagcagcgaggaatcggacagtgaggaggaggcgcctgctcaggcgaagccttcagggaaggccccccaggtcagagccgcctcggcccctgccaaggagtcccccaggaaaggggctgccccagcacctcctaggaaaacagggcctgcagccgcccaggtccaggtggggaagcaggaggaggactcaagaagcagcagcgaggagtcagacagtgacagagaggcactggcagccatgaatgcagctcaggtgaagcccttggggaaaagcccccaggtgaaacctgcctctaccatgggcatggggcccttggggaaaggcgccggcccagtgccacccgggaaggtggggcctgcaaccccctcagcccaggtggggaagtgggaggaggactcagagagcagtagtgaggagtcatcagacagcagtgatggagaggtgcccacagctgtggccccggctcaggaaaagtccttggggaacatcctccaggccaaacccacctccagtcctgccaaggggccccctcagaaggcagggcctgtagccgtccaggtcaaggctgaaaagcccatggacaactcggagagcagcgaggagtcatcggacagtgcggacagtgaggaggcaccagcagccatgactgcagctcaggcaaaaccagctctgaaaattcctcagaccaaggcctgcccaaagaaaaccaataccactgcatctgccaaggtcgcccctgtgcgagtgggcacccaagccccccggaaagcaggaactgcgacttctccagcaggctcatccccagctgtggctgggggcacccagagaccagcagaggattcttcaagcagtgaggaatcagatagtgaggaagagaagacaggtcttgcagtaaccgtgggacaggcaaagtctgtggggaaaggcctccaggtgaaagcagcctcagtgcctgtcaaggggtccttggggcaagggactgctccagtactccctgggaagacggggcctacagtcacccaggtgaaagctgaaaagcaggaagactctgagagcagtgaggaggaatcagacagtgaggaagcagctgcatctccagcacaggtgaaaacctcagtaaagaaaacccaggccaaagccaacccagctgccgccagagcaccttcagcaaaagggacaatttcagcccctggaaaagttgtcactgcagctgctcaagccaagcagaggtctccatccaaggtgaagccaccagtgagaaacccccagaacagtaccgtcttggcgaggggcccagcatctgtgccatctgtggggaaggccgtggctacagcagctcaggcccagacagggccagaggaggactcagggagcagtgaggaggagtcagacagtgaggaggaggcggagacgctggctcaggtgaagccttcagggaagacccaccagatcagagctgccttggctcctgccaaggagtcccccaggaaaggggctgccccaacacctcctgggaagacagggccttcggctgcccaggcagggaagcaggatgactcagggagcagcagcgaggaatcagacagtgatggggaggcaccggcagctgtgacctctgcccaggaccaggagtcttcttgaatcccatgagctctgcccaggaccctctctcaagcacctgtggcataccttcatgtgctccactgcacccagagcttaagccacagtcctgctcaggctacacctccaagggtgggaccaggcccaccttatcttcctgtactccagaggcccaagtcagccatgctggtgtggtccaagcttctgtgtgaaccctggcccttccatcagacagcattaccctttgtcctcctctagccccaagctcccagaagcttctgccaggcacctcagagcaccagctcccctgtcccagggcctaaccacagatcctggagttctgcaacctccagaccagagcggtctcatgaaccacctccccttgaatatcacataccacattgttatcaattcatcagtaaggtcagatgctgtttgcacacctccagcaatagggtgctcactgcctctcactttccaatggcacagattacaaaagtaaagaacaaccaccaaaaaaaaaaaaaaaaaaaa

SEQ ID NO: 25823 - DNA, 2627 bp, Homo Sapiens
cgctccaagatggctgcctccatagtgcggcgcgggatgctcctggcgcggtaaaagatacctgctttcttcagcctatgtagacagccacaaatgggaagcaagagaaaaagaacattactgtcttgctgatcttgcatctttaatggataaaacatttgagagaaagttgcctgttagttctttaacaatatcacggcttatagacaacatttcctctcgggaagagatagatcatgcagagtattacctttacaagtttcgacacagccccaactgctggtacctgagaaactggactatccacacctggattaggcagtgtctaaaatatgatgcacaagacaaagccctatatacccttgtaaataaggttcaatatggaatttttccagataactttacattcaatttactgatggattctttcataaagaaagaaaattacaaagatgctttatctgtggtttttgaggtcatgatgcaagaagcctttgaagtgccttccacccaacttctctccctctatgttttatttcattgcctggcaaagaagacagacttcagttgggaagaggagaggaactttggtgcatcccttttgcttccaggcctaaaacaaaagaactcagtgggtttcagttcccagttgtatggctatgcacttcttgggaaggtggagttgcagcaagggctacgggctgtgtaccacaacatgcctctgatatggaaaccaggctaccttgacagagcccttcaagtgatggagaaagtggctgcctccccagaagacataaagctgtgtagagaagcgctcgatgtgctgggtgcagtgctgaaggctctgacttcagctgatggggcttcagaggagcagtcccaaaatgatgaagacaaccaggggtcagaaaaactggtggagcagttagacatcgaggaaacagagcagtccaagcttcctcaatacctggaacgatttaaggccttacattctaagcttcaagctctgggcaaaattgagtcagaaggtcttttaagtctgaccacccagcttgtcaaggaaaaactctccacctgtgaagcagaggacatcgccacctatgagcagaatctgcagcagtggcatctagaccttgtacagttgatccagagagaacagcaacagagggagcaagcgaagcaggagtaccaggctcagaaagcagcaaaggcatctgcctaatagggtcccccagggccccacctgtctcacaagaacttcactcaaccccgtgccaggactcagcagtggcctggacaacagcctcagcttcctctacccatcttcttttcttaaagcaggctatgtgccctacatggcaaggcaccatgactgcccatcgagatgccaagaagggctatggaactatgcaggtggctagtggtcagactgaagtcaccagctgaataccttaaggaggactcttgaggctcataatggagttcctggggcacagggattagttatgagcattaaagttcctaagacccagtgacagtactgggagaaaccaaggctgaagagtcaggttgaagcacaggcttttgttttttgttgtttttgttttttgagacagagtctcattctgtcacccaggctggagtgcagtggcgcaatcttggctcactgcaacctccgactcccaggttcaagcaattctcctgcctcggcctcctttagtaggtgggattacaggtgcataccaccacacctttctaatttttgcatttttagtagagatggggtttcaccatgttggtcaggctggtctcaacctcctgacctcaagtgatctgcccgcctcagcctcccaaagtgctgggatgataggcgtgagccaccacacccggccaagcacaggcttttgaatggtctccctctccccagcccaggtacatgaggccaaggtgaactgtgcatcctgagaccttgtgtccctgagtctcctttctgagtgcaagctgcactgtgagctggctgtgggatactcacacattcccacattctcctttctgccacatctcgcccttctggacctgcactgggagaaattcaggacaggagtgaactcaaggccatgaactcactggatttccatttttaggcacccatagggatgtttttaggatgtaagtttctgaggagaaagctagctctagcatgaagcttttttggattggcttctccatcgtgttggggtaacattttttttccaattttttttttcccaaaacatcgtctcagctcatttatcaagtaggtaaaatgagccttttgtgtacacacagaggcacatgtgcacgcacacacaacttgtgaacacacatttctgttaaagaagttagaaaatgagagatgggttggggcttgaagtgcatcagaggtatgaatgttgtaaaactgtcaggagatgtaaaattcctttctgaagtgtctcttctgtgaaagggttcagagcagattttgcttactatgtagtgttgcccttaagtacagtggtgtaattttattcaagattgtgctcttctatcaaaagcctctggaaataaatgttccgggatcaaaaaaaaaaaaaaaaaaaaaaaaa

SEQ ID NO: 25824 - DNA, 1157 bp, Homo Sapiens
gtttgtgaagtcgtggcccgttagcaggaagcctaacagtcgccccgacgctagtgagggacccaatctgagtccccggccagccgaatccaagccgtgtgtactgcgtgctcagcactgcccgacagtcctagctaaacttcgccaactccgctgcctttgccgccaccatgcccaaaacgatcagtgtgcgtgtgaccaccatggatgcagagctggagtttgccatccagcccaacaccaccgggaagcagctatttgaccaggtggtgaaaactattggcttgagggaagtttggttctttggtctgcagtaccaggacactaaaggtttctccacctggctgaaactcaataagaaggtgactgcccaggatgtgcggaaggaaagccccctgctctttaagttccgtgccaagttctaccctgaggatgtgtccgaggaattgattcaggacatcactcagcgcctgttctttctgcaagtgaaagagggcattctcaatgatgatatttactgcccgcctgagaccgctgtgctgctggcctcgtatgctgtccagtctaagtatggcgacttcaataaggaagtgcataagtctggctacctggccggagacaagttgctcccgcagagagtcctggaacagcacaaactcaacaaggaccagtgggaggagcggatccaggtgtggcatgaggaacaccgtggcatgctcagggaggatgctgtcctggaatatctgaagattgctcaagatctggagatgtatggtgtgaactacttcagcatcaagaacaagaaaggctcagagctgtggctgggggtggatgccctgggtctcaacatctatgagcagaatgacagactaactcccaagataggcttcccctggagtgaaatcaggaacatctctttcaatgataagaaatttgtcatcaagcccattgacaaaaaagccccggacttcgtcttctatgctccccggctgcggattaacaagcggatcttggccttgtgcatggggaaccatgaactatacatgcgccgtcgcaagcctgataccattgaggtgcagcagatgaaggcacaggcccgggaggagaagcaccagaagcagatggagcgtgctatgctgaaaaaaaaaaaaaaaaaa

SEQ ID NO: 25825 - DNA, 1414 bp, Homo Sapiens
gaagagactcccgggctcttaacgtcgggtatcaggagtttcttcccggagcaaggacccccaagacggaagaggatggccgcggcggctctgaggagattttggtcccggcgccgcgcagaggcgggcgacgcggtagtggcgaagccgggagtgtgggcgcggctggggtcctgggcccgcgcgctgctccgggactacgccgaggcctgcagggacgcttcggcggaggctagggcccggccggggcgcgccgctgtgtatgtgggtctgctgggcggcgcggcggcctgcttcacgctggcgcccagcgagggtgccttcgaggaggcgctgctggaggcgtcggggaccctcctgctgctggcgccggccacccgcaaccgcgagtccgaagccttcgtgcagaggctgctctggctgcggggccgtggccgcctgcgctacgtcaacctggggctctgctcgctggtgtacgaggcgcccttcgacgcccaggccagcctctaccaggcgcgttgccgctacctgcagccccgctggaccgacttccccggccgggtcctggacgtgggcttcgtgggtcgctggtgggtgctgggggcctggatgcgcgactgcgacatcaacgacgacgaattcctgcacctgccggcgcatttgcgggtggtcgggccccagcagctgcattccgagaccaacgagcggctcttcgatgagaagtacaagcctgtcgtgctcaccgacgatcaggtggaccaggcgctgtgggaggagcaggtcttgcagaaggagaagaaggacaggctcgccctgagccaggcccactcgctggtgcaggcggaggccccgagatgaaaccctgaggcccccgagtcctggcaaactgcttgcctggggtggtgcagttctgagtgtgcctcacctgcagaacagctgagacagatgatgtgcaaagtgttttctcactggatttgcacaagtttggggagcctttctgccccccgtctttgttctttattagctgaagctaattcagagccacctgggtccgggagttggggacagcagaacgacttgacacatgttcatcactggcagagctggtcatgagccttttatataagcctttttcatcgggcctcagaggccctccttaaggaggtaccacattggtcagctgacttgcaaactcttctaaggccacttagattttctttttcaagtttgggttgtggcctggcatggtgatgtctgtaatcccagcagtttgcaaactgaggcaagagaatcgcttgaggccaggagtttgaggccagctagagtgacatagcaagactccgatgctacaaaaaagaataataatagtaattaactaaataaaatttgagctgaaaaaaaaaaaaaaaaaaaa

SEQ ID NO: 25826 - DNA, 780 bp, Homo Sapiens
gtggaggaggggtgctcttgtgagctgctgctcctgcggttggtgagattacctgggtctagagtgcggagctgctccgtggccacgaggacgtcaccatgcccaaagcaccaaagggaaaaagtgcaggacgggaaaaaaaagtcatccatccatatagtagaaaagcagctcaaattacgagagaggcccacaaacaagaaaaaaaggaaaaattgaagaatgaaaaggccttgcgtctcaaccttgttggtgaaaaactgcaatggtttcaaaatcatcttgatcccccaaaaaagagatattcaaagaaagatgcttgtgaactaattgaaaggtacttaaatcgattcagcagtgagctggagcagattgagttacataacagtatcagggacaggcaggggaggcggcactgttcccgggagaccgtcatcaagcagacgatggagcgggagcgacagcagtttgagggatatggccttgagattccagacattctaaatgcaagtaatctgaaaacatttagggaatgggactttgatctgaagaaattaccaaacattaaaatgagaaaaatttgcgctaatgatgcaattcccaagacgtgcaagaggaaaactactataactgtagaccaagatttgggggaattggaactaaacgatgaatcaagtgattcagatgaggaaatgactgcagtggcctaattgtcttcacttgaattgaaaataaataatttgagagcttcaaattaaaaaaaaaaaaaaaaaaaaaaaa

SEQ ID NO: 25827 - DNA, 1324 bp, Homo Sapiens
cgcaggcgcttacagtgcaccaagatggccgcccccgtggatctagagctgaagaaggccttcacagagcttcaagccaaagttattgacactcaacagaaggtgaagctcgcagacatacagattgaacagctaaacagaacgaaaaagcatgcacatcttacagatacagagatcatgactttggtagatgagactaacatgtatgaaggtgtaggaagaatgtttattcttcagtccaaggaagcaattcacagtcagctgttagagaagcagaaaatagcagaagaaaaaattaaagaactagaacagaaaaagtcctacctggagcgaagcgttaaggaagctgaggacaacatccgggagatgctgatggcacgaagggcccagtagggagcctctctgggaagctcttcctcctgcccctcccattcctggtgggggcagaggagtgtctgcagggaaacagcttctcctctgccccgatggatgctttatttggatggcctggcaacatcacattttctgcatcaccctgagccccatttgcttcccagccctggagtttttacccggctttgcctgccacctctgcccaggacacgcttccctctcgggatgtgtgatgaactcccaggagagggaagatgggagccagggcaagataggaagctctgcctgagctttccactaggcacgccagccagaccaataaaaagcgtctgtcccactctgctaagcctggttttcttgagcagagggatggaacagagggtgagagaggcagtggccgtctccacctcagctcctgctccctctgcatcagagcccttcctttcttgggggatgggccttgccctcttctcttttcccttcctgtacctttgactaacgctcagcttccgggcctgcatgcagtagacagaagaggaagaaagaacagatgttcacagctgaatctcagtgaacagaatagcagtccctggatggcagtctgcctaaagattcctttccctgccttctcccatacattccaaaaggaagttcaacagtaagcagcacctccaagactgtctcctttcggccagtatcataagatggacgccataatcctgaggcctcctagaggctgagggggcaacggtgtgatccagctggctcatcccagcccaggtgggccaattattcaattttcaagaattttgttgcaagccagttgtcaaacacagccattataattatgtaaatttgcaaattatgttaaaaacaaggacaataaatattcaaaatgcatccctaattactaaaaaaaaaaaaaaaaaaa

SEQ ID NO: 25828 - DNA, 2217 bp, Homo Sapiens
gggtgattggcttggctggacctgaatgatgcggctgtgattgctgaattgtctgggcaggtttggagtctctggcaagctcccctgactgtgcatccctctggagacgaagaggagggggaggcctgtcctctctgggatccattggtcacatccccctgaggattcccgaatgcctacctccagtgtcgtcaacatggagttctgaagtccatgtggctcttcacagtgaatcaggtgttaaggaagatgcagagacgccacagcagcaacacggataacattccacctgaaagaaaccgcagccaggcgctcagctccgaggcgagtgtggatgaaggtggcgtctttgagagtctgaaggcagaggcagcctccccaccagcgctcttctcgggcttatcaggcagcctccccaccagctcgttcccctccagcctggtgctgggctcctcggctggcggcggggacgtgttcatccagatgcccgcgtccagggaggaaggagggggccggggcgaggggggcgcctaccaccaccgccagccccaccaccatttccaccatggcggccaccgcgggggctccctgctgcagcacgtgggtggggaccaccgggggcactcggaggagggaggcgacgagcagcctgggacgcccgcccccgccctgtccgagctgaaggctgtgatctgctggctccagaaaggactccccttcatcctgatcctcctggccaaactgtgctttcagcataagctcggcattgctgtgtgcatcgggatggccagcaccttcgcctatgccaactccacgcttcgagaacaggtctcactgaaggagaagaggtcagtgctggtcatcttgtggatcctggcctttctggcggggaacaccctctatgtgctttatacattcagctccgagattgcgccacagcactccaacctgggtgacagagtgagtgagactctgtctaaaaaaaaaaagaaagaaagaagggagggagggaggaaggaaggaaggaaggaaagaaagaaagctcagctttggcccagatgtggttaccccttggtctcctgtctttatgtctttctcctcttcctattctgtcatctccctcacttaagtctcaggcctgtcagcagctcctgtggacattgccatcccctctggtagccttcagagcaaacaggacaacctatgttatggatgtttccaccaaccagggtagtggcatggagcaccgtaaccatctgtgcttctgtgatctctatgacagagccacttctccacctctgaaatgttccctgctctgaaatctggcatgagatggcacaggtgaccacgcagaagccaccagaatcttgcctgccctattcctcctcccaagtctgttctcttattgtcaacctcagcacaacaggctggcgccaatggcattacagagaaagcaatctgtgtggctagtgggcagattaccatgcaagccccaggagaaatggaggagctttgtagccacctccctgtcagccagtattaacatgtccccttccccctgccccgccgtagattcaggacattcgcccctgtgtgccaccaaaccaggactttccccttccccttggcttggcatccctggctctctcctggtacccagcaagacgtctgttccagggcagtgtagcatctttcaagctccgttactatggcgatggccatgatgttacaatcccacttgcctgaataatcaagtgggaaggggaagcagagggaaatggggccatgtgaatgcagctgctctgttctccctaccctgaggaaaaaccaaagggaagcaacaggaacttctgcaactggtttttatcggaaagatcatcctgcctgcagatgctgttgaaggggcacaagaaattggagctggagaagattgatgaaagtgcaggtgtgtaaggaaatagaacagtctgctgggagtcagacctggaattctgattccaaactctttattactttgggaagtcactcagcctccccgtagccatctccagggtgacggaacccagtgtattacctgctggaaccaaggaaactaacaatgtaggttactagtgaataccccaatggtttctccaattatgcccatgccaccaaaacaataaaacaaaattctctaacactgaaaaaaaaaaaaaaaaaaaaaaaaaaaaaaaaaaa

SEQ ID NO: 25829 - DNA, 1271 bp, Homo Sapiens
cctccgcggacgcccgctgccatggcgactctgctgcgccctgtcctccgtcggctctgcgggctcccgggcctacagcggcctgcggcagaaatgcccctccgggctaggagcgacggcgccggcccgctatactcgcaccacctccccacctccccgctgcagaaagcgctgttggccgccggctccgcggcgatggcgctctataacccctaccgccacgacatggtcgcagttctaggggagaccacaggacaccgcaccctgaaggtcctcagggaccagatgaggagggatccagagggtgcccagatcctgcaggagcgtccccggatttcgacatccaccctcgacctgggcaagctccagagcctgccggaaggctccctcggtcgcgagtatctccgtttcctggatgtgaacagggtctccccagacacccgagcacccacccgcttcgtggatgatgaggagctagcgtatgtgattcagcggtaccgggaggtgcacgacatgcttcacaccctgctggggatgcccaccaacatcctgggggagatcgtggtgaaatggtttgaggctgtccagactggcctgcccatgtgcatcctgggtgcattctttggaccgatccgacttggcgctcagagcctgcaagtgctggtctcggagttgatcccatgggccgttcagaacgggcgcagagccccatgtgtcctcaacctgtactatgagcggcgctgggagcagtccctgagggctctgcgggaggagctgggcattacagcaccacccatgcacgtccagggcttggcctgagctcctgagccagcggggcctggcctacctcccccatcccctgcttcccttggaggcagagggctcccttgactacctttgttcctcttctttgaacactgacccttggacaacatttatcataatttgtcataaccactgctgagtggccttgaggacgaaccccgcagggagcaagcagtacagtggcattcccagggggaccagcagctacccaaggagaaccatgcatgaacagtatcagtcgtctgggctcatgctgggatgtcgcagtgctcctgttgcaactcctcccagccagccaggtttgctgggggccaggctgggtgtcctcacaggagtgagggctacacccaattccaaaagcctgagaagagagaagtggagggggaggcgagtgtgtgaataaaggctcccatcaggtcaaaaaaaaaaaaaaaaaaaaaaaaaaa

SEQ ID NO: 25830 - DNA, 1538 bp, Homo Sapiens
ctcctctccagcccttctcctgtgtgcctgcctcctgccgccgccaccatgaccacctccatccgccagttcacctcctccagctccatcaagggctcctccggcctggggggcggctcgtcccgcacctcctgccggctgtctggcggcctgggtgccggctcctgcaggctgggatctgctggcggcctgggcagcaccctcgggggtagcagctactccagctgctacagctttggctctggtggtggctatggcagcagctttgggggtgttgatgggctgctggctggaggtgagaaggccaccatgcagaacctcaatgaccgcctggcctcctacctggacaaggtgcgtgccctggaggaggccaacactgagctggaggtgaagatccgtgactggtaccagaggcaggccccggggcccgcccgtgactacagccagtactacaggacaattgaggagctgcagaacaagatcctcacagccaccgtggacaatgccaacatcctgctacagattgacaatgcccgtctggctgctgatgacttccgcaccaagtttgagacagagcaggccctgcgcctgagtgtggaggccgacatcaatggcctgcgcagggtgctggatgagctgaccctggccagagccgacctggagatgcagattgagaacctcaaggaggagctggcctacctgaagaagaaccacgaggaggagatgaacgccctgcgaggccaggtgggtggtgagatcaatgtggagatggacgctgccccaggcgtggacctgagccgcatcctcaacgagatgcgtgaccagtatgagaagatggcagagaagaaccgcaaggatgccgaggattggttcttcagcaagacagaggaactgaaccgcgaggtggccaccaacagtgagctggtgcagagtggcaagagtgagatctcggagctccggcgcaccatgcaggccttggagatagagctgcagtcccagctcagcatgaaagcatccctggagggcaacctggcggagacagagaaccgctactgcgtgcagctgtcccagatccaggggctgattggcagcgtggaggagcagctggcccagcttcgctgcgagatggagcagcagaaccaggaatacaaaatcctgctggatgtgaagacgcggctggagcaggagattgccacctaccgccgcctgctggagggagaggatgcccacctgactcagtacaagaaagaaccggtgaccacccgtcaggtgcgtaccattgtggaagaggtccaggatggcaaggtcatctcctcccgcgagcaggtccaccagaccacccgctgaggactcagctaccccggccggccacccaggaggcagggaggcagccgccccatctgccccacagtctccggcctctccagcctcagccccctgcttcagtcccttccccatgcttccttgcctgatgacaataaagcttgttgactcagctaaaaaaaaaaaaaaaaaaaaaaaaaaaaaaaaaaaaaaaa

SEQ ID NO: 25831 - DNA, 1908 bp, Homo Sapiens
ctttctcctgcagcgataagggcagtcgacagtctttagtagggaaaggagacaagtgctagctactgccgcccaagtggaaggaattatctatagagtaagtatgctaatcttgactaagactgcaggagttttttttaaaccatcaaaaaggaaagtttatgaatttttaagaagttttaattttcatcctggaacactatttcttcataaaatagtattgggaattgaaactagttgtgatgatacagcagctgctgtggtggatgaaactggaaatgtgttgggagaagcaatacattcccaaactgaagttcatttaaaaacaggtgggattgttcctccagcagctcaacagcttcacagagaaaatattcaacgaatagtacaagaagctctttctgccagtggagtctctccaagtgacctctcagcaattgcaactaccataaaaccaggacttgctttaagcctgggagtgggcttatcatttagcttacagctggtaggacagttaaaaaagccattcattcccattcatcatatggaggctcatgcacttactattaggttgaccaataaagtagaatttccttttttagttcttttgatttctggaggtcactgtctgttggcattagttcaaggagtttcagattttctgcttcttggaaagtctttggacatagcaccaggtgacatgcttgacaaggtggcaagaagactttctttaataaaacatccagagtgctccaccatgagtggtgggaaagccatagaacatttggccaaacaaggaaatagatttcattttgacatcaaacctcccttgcatcatgctaaaaattgtgatttttcttttactggacttcaacacgttactgataaaataataatgaaaaaggaaaaagaggaaggtattgagaaggggcaaatcctgtcttcagcagcagacattgctgccacagtacagcacacaatggcatgtcatcttgtgaaaagaacacatcgggctattctgttttgtaagcagagagacttgttacctcaaaataatgcagtactggttgcatctggtggtgtcgcaagtaacttctatatccgcagagctctggaaattttaacaaacgcaacacagtgcactttgttgtgtcctcctcccagactatgcactgataatggcattatgattgcatggaatggtattgaaagactacgtgctggcttgggcattttacatgacatagaaggcatccgctatgaaccaaaatgtcctcttggagtagacatatcaaaagaagttggagaagcttccataaaagtaccacaattaaaaatggagatatgatttctgctgttcaaaaaagtccctaaagagacaggctcttgccatgttgcccgggctggtcctgaactgctgaattcaagtgatcctcccaccttggcctccagaagtgctgggattatgggtgtgagccaccatgcctagccaaaatgtttcttaaggtatacattttgggtcttagaagacttatacatttgtaatatttattactaaatatctcaaagtattacaataaatgttaccatgtgagctactttgaatcaggcttcttgcacaccaatttaaaaatgttaactcttgatatatacactagttataccactcatgtcagtcaataaattttaaggtttaagtgcaggcctttgtttacagaaatcctaattttttgaaaccataactctgacctgacactaaattcctgtagacatgctaaggaaaatctgcttagtatcgagatcaagaacttccattcaaaaagattattcagttatgttatttgcatattaccattgttaaaaataaaaaaatttttaaaagatgaaaaaaaaaaaaaaaaaaaaaaa

SEQ ID NO: 25832 - DNA, 1362 bp, Homo Sapiens
gtctggcgtccgcgcgctgcacaatggcggctctgaagagttggctgtcgcgcagcgtaacttcattcttcaggtacagacagtgtttgtgtgttcctgttgtggctaactttaagaagcggtgtttctcagaattgataagaccatggcacaaaactgtgacgattggctttggagtaaccctgtgtgcggttcctattgcacagaaatcagagcctcattcccttagtagtgaagcattgatgaggagagcagtgtctttggtaacagatagcacctctacctttctctctcagaccacatatgcgttgattgaagctattactgaatatactaaggctgtttataccttaacttctctttaccgacaatatacaagtttacttgggaaaatgaattcagaggaggaagatgaagtgtggcaggtgatcataggagccagagctgagatgacttcaaaacaccaagagtacttgaagctggaaaccacttggatgactgcagttggtctttcagagatggcagcagaagctgcatatcaaactggcgcagatcaggcctctataaccgccaggaatcacattcagctggtgaaactgcaggtggaagaggtgcaccagctctcccggaaagcagaaaccaagctggcagaagcacagatagaagagctccgtcagaaaacacaggaggaaggggaggagcgggctgagtcggagcaggaggcctacctgcgtgaggattgagggcctgagcacactgccctgtctccccactcagtggggaaagcaggggcagatgccaccctgcccagggttggcatgactgtctgtgcaccgagaagaggcggcaggtcctgccctggccaatcaggcgagacgcctttgtgagctgtgagtgcctcctgtggtctcaggcttgcgctggacctggttcttagcccttgggcactgcaccctgtttaacatttcaccccactctgtacagctgctcttacccattttttttacctcacacccaaagcattttgcctacctgggtcagagagaggagtcctttttgtcatgcccttaagttcagcaactgtttaacctgttttcagtcttatttacgtcgtcaaaaatgatttagtacttgttccctctgttgggatgccagttgtggcagggggaggggaacctgtccagtttgtacgatttctttgtatgtatttctgatgtgttctctgatctgcccccactgtcctgtgaggacagctgaggccaaggagtgaaaaacctattactactaagagaaggggtgcagagtgtttacctggtgctctcaacaggacttaacatcaacaggaaaaaaaaaaaaaaaaaa

SEQ ID NO: 25833 - DNA, 2012 bp, Homo Sapiens
ctgggcttctggcttcagagctgggaattgtgggaggagggcccagatcccactggagataccgaaggagatactctttagtattgggatcccagaaaccagtcctatatctggccagagggacactgggttgtggcatctctctagctgctacccagaaggaacagggccccctggggcctataggccttgcccctgaccctgggaacacccagctcaggcctgccccagtggccacaagtcagggaggccgcaaatttttaactagaaacattgatcattaatagggggttagaaagagttcaaactaagtctcactctgggacatagaccaattgtgcttcaggcctcctgcagagatgctgggtccccaagtctggtcttctgtgaggcaggggctaagcaggagcttgtccaggaatgtgggggtctgggcctcaggggaggggaagaaggtggacattgcgggtatctacccccctgtgaccacccccttcactgccactgcagaggtggactatgggaaactggaggagaatctgcacaaactgggcaccttccccttccgaggagctgtggggggcgtctgcgccctggccaatgtcctgggggctcaggtgtgccagctggagcgactgtgctgcacggggcaatgggaagatgcccagaaactgcagcaccgcctcattgagccaaacgctgcggtgacccggcgctttgggatcccagggctgaagaaaatcatggactggtttggctactatggaggcccctgccgcgcccccttgcaggagctgagccccgctgaggaggaggcactgcgcatggatttcaccagcaacggctggctctgagggcaggcagggtccatggctggcctgagcccatctcagcctcctgccttgcacttgcagcctgaagcggagagcacagggggatgagggtggcaggcagcggggagccgatagaggctcctttgcctgctgtggtcctccaggcagcctttcacaggcacgcccatgcatatctcctattctaacggcccctgacctctcccttttggatcctaaactgtgtctctggtctgaagactgggaaggagcaatttctcaatttatctttctactgtggatgctttcctacgccctgaggcacatgaagtcagaaaggaagggcagaggggcaagtaggcacagtaagggaattttcttttctttttttttttttttgagacagagtttcactctgtcacccaggctggagtgcaatggcatgatctcgcctcctgggttcaagcgattctcctgcctcagcctcccgagtagctgggattacaggcgcctgccaccacgcccagctaatttttgtatttttagcagagatggggtttcaccgtgttggccaggctggtcttgaactcctgacctcaggtgatccaactgcctcggcctcccaaagtgctgggattacagctgtgagccactgcacccggccgggaatttatcaaaggggggactacttagatttggggcttcaaacctgagtctagcacaatgcagctggaggccagggctactcctacaaacccaagttctgactccttccagggaagtatcagcttaagaaacttgatcaggaaagtgacactggtctttcaaagagccctctttaccctcccatccctgccctccacactgcaagctgcattccagccacaacgcccttttctaaatctattttcattcatctcctattctggtctgtagccttgattccaaccattgaatgcacggagacagcccagtggcttgtcagattggtaaataatgacacctggtggataaatgttacattctagaagactattctggtcagcctaggtctgaaacactaaggagacttggcctgagatagggccatccacttgcctacaggcactctgcttttattattaaaaatagtcactttgttactataataaaatttaacagaaaaaaaaaaaaaaaaaaaaa

SEQ ID NO: 25834 - DNA, 1418 bp, Homo Sapiens
cccggaatcgacctatggccagcagtcgtccccgccctgcttcaaacatttgggtttcaggagccgggcggaggtgactgccgcgtgtttgcgttgcacgcccaccgcccgaaacacggcggcggcctcagggctgctgcggcctcggcgggggcaggccccggcgcccgcccgcctcccggcctccatcatcccagggtgcaccgcggcgggcgcgggcgcgcggccatgttgcggtagtttgttgttttcttcctgcggaggcgaagggccagctgtggaccgcgaagcgcccggcttcgcctctgcctcctgcagccccctcccttccctgtcctccgtcacccgtacccgggcccggaccaggcacgtcggcccaccagctggcttggtgggggaggctgaaggccgggccccgcgagtgccatggcggccgccctgggagcgagcggaggagcaggcgccggagatgatgactttgaccagtttgataagcctggcgcggaacggtcgtggagaagaagagctgctgatgaggactgggacagtgaacttgaagatgatttacttggagaagatttgctatctggcaaaaagaatcagtcggatttgtcagatgaagagctaaatgatgatcttttgcagagtgataatgaagatgaagaaaatttcagttctcagggtgttacaattagtctgaatgctacatctggcatggttacatcatttgaactctctgacaacactaacgaccaatctggagaacaggaatctgagtatgaacaagaacaaggagaggatgaactggtttatcacaaatctgatggatcagaattgtatactcaagagtacccagaagaaggacagtatgaaggccacgaagctgagttgacagaagaccaaatagaatatgtggaagagccagaggaggagcagctttacactgatgaagtgttagacatcgagatcaatgaacctttagatgaatttacaggaggtatggaaacattggaacttcaaaaggacatcaaagaagaatcagatgaagaagaagaagatgatgaagaatctggacgattacgtttcaaaactgaaaggaaagaaggaacaattattaggctctcagatgtaactagagagagaaggaacattccagaaactttgggtaacttttttgcctgtctcccatcctcctttactctcatttcaacttcctccatagtattgctgtaattaatcaaagtaggcaaagaaggttgactaggtaattgcggctgccgtccggagagtggccggactttggagtgagtgctgtttatggtactgtaaaactcattctttaaaatcattgctgtttatggatttaaaatgcttgaataaaatgtttaagataattaaaaaaaaaaaaaaaaaaaaaa

SEQ ID NO: 25835 - DNA, 2450 bp, Homo Sapiens
gctgagctggatggaccgcgagacgcgcgccctcgccgacagccacttccgaggcctgggggtcgatgtccccggcgtcggccaggctccgggccgggtagccttcgtctcggagccgggcgccttctcctacgccgactttgtgcggggcttcttgctgcccaacctgccctgcgtgttttccagcgccttcacgcagggctggggcagccggcggcgctgggtgacgcccgcggggaggcccgacttcgaccacctgctacggacctacggagacgtggttgtaccagttgcaaactgtggggtccaggaatacaactcgaaccccaaagagcacatgactctcagagactacatcacctactggaaagagtacatacaggcgggctactcctctcccaggggctgtctctacctcaaagactggcacttgtgcagggactttccggtggaggacgttttcaccctgcctgtgtacttctcgtccgactggctgaatgagttctgggatgcactggatgtggatgactaccgctttgtctacgcggggcctgcgggcagctggtccccgttccatgctgacatcttccgctccttcagctggtctgtcaatgtctgtgggaggaagaagtggctcctcttccccccagggcaggaagaggccctgcgggaccgccacggcaacctgccctacgacgtgacctccccagcactctgcgacacacacctgcacccacggaaccagcttgctggcccacccttggagatcacgcaggaagcgggcgagatggtgtttgtgcccagtggctggcaccaccaggtgcacaacctggatgacaccatctccatcaaccacaactgggtcaatggcttcaacctggccaacatgtggcgcttcttgcagcaggagctatgcgccgtgcaggaggaggtcagcgagtggagggactccatgcccgactggcaccaccactgccaggtcatcatgaggtcctgctcgggcatcaactttgaagagttttaccacttcctcaaggtcatcgctgagaagaggctcctggtcctgagggaggcagccgctgaggacggtgctgggttgggtttcgaacaggcagcctttgatgttgggcgcatcacagaggtgctggcctccttggttgcgcaccccgacttccagagagtggacaccagcgcgttctcaccacagcccaaagagctgctgcagcagctgagagaggctgttgatgctgctgcggccccatagcacctgtcgtgaggatagaaggacgggtggacgagaggcagcctcctgctccggggcccttccagaaataaagaccgccctccctgtgacctggggcccacccctgtcgaggcttgtggcctggctgttcatggccactgcctgggtgcctgttttcaggtgaggcccaatgaggtcagggacccaagatgggatgtggcccttctgacctgcagcaggcctgctgggagctcggagatggtgccaggacctggctcttttgggggccctgcctccttaggccaggacgcctgagctgacaggagtctgtgtctggtgtgccttctctggtggctcctcttaataggccagccctgtcccctcgtctcaggccattggaccacccctggctctgccctgtgggttcagggaggggttggagcagtgctgggcaagctcaccagggcctccaggcagggctggggttggcctccatcacctccaggtgatgggctgtggaaccagcggcctgcgccttcctctgggtacccagagtggagggctgggttgggctggcctttgccacctccctgcctttgcagggcctgtggacagctggagaggccacagatggggtggaatcccatctgctgctgaatcctcacctgggcctgagggactgtgcctgctgtgcactcacagctgggtcttcccaaggatgctgttctcaggagtggtgggtccccagcccctcttcacactgggtatgatggaggtgtgggcgggctcgtccaggccgatcaaggcacagcagtgagcagcggaggcctgtggtggggaatggactctcgtgggatcctcttgcagaggatgccccaggcctgaaccctctagtggatccacagtttgtggagactggcactctcccagccctgtccttgaccgagaatccagcattttttcagttggcccctggttggctgcctcaccccagcaggggaggaggcatccgaatccacagggacggcacgtgccatggctatgcacattgcctgcccgtggcatcaactggggccgctggcacttgtctaggatggaagcccccaagaagggcaggggtttctgtctgctctgttcagtgaatcatgtgaagtgcttgcaaaggcagctttacacagtaggtgcttcaaaaaaaaaaaaaaaaaaa

SEQ ID NO: 25836 - DNA, 1489 bp, Homo Sapiens
gagaaaattgaacaccaaagtatgcactttacatggtcacactagctgggtgaagaacatcgaatatgatactaatacaagactcttagtaacatcaggatttgatggaaatgtcattatttgggacactaacaggtatacagaagatgggtgtccacataagaaattctttcacacacgttttctcatgcgaatgaggttaacaccagattgttccaaaatgttgatttcaacgtcctctggatatctcttaattttgcatgaccttgacttaactaagtctttagaagtaggcagctatcccattttaagagcaagaagaactacttcaagttcagatttgaccacttcatcaagttcatctggtcctagagtttctggctcaccttgtcatcatagtgattctaattcttctgagaaacacatgtcacgagcctctcaaagagaaggagtttcaccacgaaatagtcttgaagtcgtaacccctgaagttcttggtgagagtgaccacggaaactgcatcacgtccttacagctgcacccaaaaggctgggccactcttcttcggtgctcaagcaacagtgatgatgaggagtgtacttgtgtctatgaattccaagaaggagctccagtgcgacctgtctcacctcgctgttctctacgactgactcattacattgaagaagccaatgtaggcaggggttacatcaaagaactttgcttcagccccgatggacgaatgatttcttccccacatggctatgggattcgcttgttgggatttgacaaacagtgcagtgaacttgttgactgcttgcccaaagaagccagtcccctgcgggtgatccgttctctgtactctcataatgatgtggtactgacaacaaagttctctccaacacattgtcagattgcctcagggtgccttagtggacgggtttctttgtatcagccaaagttttaggcacaacttacatcaaataaggaactcttctggtgtttgacttaggaattgcttcaatttagatgaagtattttctttttagaagatcttataagtttgggtcaagatcctggttcttatgggtccatgaacacacttgtgaccttagtacttggtcatccagcatcatacaggcatctccaagttagactctatgcagcatcatcttttgcagcattcctctgctcctgctgatctgtgccactgaactccagttcttctggtcattttgcatggtagctcttgtcacgttccttccttcctcactctctatttctctttccctctccctgtccctctctttctttgtgtttgttgattttggtgtcaattttgtggacatttggcaggagttttgactggggtaggagaaacccatgacattagaattgaataaaacctagaagttggatattggcatattggttgttgaaaaataaatttcatcctcacttatgagtaaaaaaaaaaaaaaaaaaaaaaaaa

SEQ ID NO: 25837 - DNA, 1447 bp, Homo Sapiens
gaacaccagcgagctggtctccagcgaggtctacctgctcagtgccttggctgctctgcagaaggttgtggagactctcccgcacttcatcagcccctatctggaaggcattctctcccaggtgattcatctggagaaaatcactagtgaaatgggttctgcgtcacaggctaatatccgtctcacatctcttaaaaagacactggctaccacacttgcaccccgagtcctgttgcccgccatcaaaaaaacttacaagcagattgagaagaactggaagaatcacatgggtccgtttatgagcatcttgcaagagcatattggggcgatgaagaaggaagagctcacctcccatcagtctcagctaaccgcctttttcctggaggccctggacttccgagcccagcactctgagaacgatctggaggaagttggaaaaacggaaaattgtatcattgactgtctagtagccatggttgtcaaactttccgaggtcacattcaggcccctgttcttcaagctgtttgattgggctaaaacagaagatgccccaaaggacaggttgttgacattttacaacttggcagattgcattgctgaaaagctgaaagggctttttactctgtttgccggccacttagtgaagccttttgctgacaccttggaccaggtgaacatctccaaaacagatgaagcattttttgactctgaaaatgaccctgaaaagtgctgcttgctgttgcagtttattttgaactgtttatacaaaatcttcctttttgatacccagcattttataagtaaagagagagcaggagccttgatgatgcctctggtggatcagctggaaaacaggcttgggggagaagagaaattccaggaacgggtgacaaagcacctgataccatgcatcgcacagttttcagtggccatggcggatgactctctttggaaaccactgaactaccagattctgctaaagacgagagactcctcgcctaaggttcgatttgctgctttgattactgtgttagcactggctgaaaaactaaaggagaattatattgtcttgctaccagaatccattcctttcttagcagagttgatggaagatgaatgtgaagaagtagaacatcagtgccaaaagactattcagcaactggaaactgtcctgggagagccactccagagctatttctaagactttctgtggtgtttcatactctactcagagttcacactcatatttcatatttttatttttgggtgttgggtgccatgttacttttggtgccttaatacacctacttggattacttacaaatgttttatcacttcgttacaaaatccccacctggcttgtgctgccacataagcctctcctgcctatcgtatagagctgcagaaagagtaaatgatacacggtatttttaaaaaaaaaaaaaaa

SEQ ID NO: 25838 - DNA, 1080 bp, Homo Sapiens
tttttttttttcacagatgacacccaacagggagcacgtttattaaagtgggaaggggtggggtacaccccagggtgtatactgacagggacctcatgcaggcccagagctctgctgcaccctcttcatcagctcttcatcctgcatagacaactctgtcaactttttgcccatccgctcatggatgtccaggtacttagagacacatcggtccaggcacacagactcgcccttggagagctctgcttccttgtagtgaggaggcacacacttccggtggcaggcactggtcattctgttgtacatatcggccatcatctccacctccagctccgcagccagctgttgggccctgagaggatccatctcagcctagcaccgtggaagggatctccttctggcctcctaatccactgcctgggacggatcacaatgcccacggagaccccaacttctgacaaatactataacgttacccgcctcccgagaggctccattttttttttttttttttttaaagtagtttaataaactccacaaaataatagcagatgcattgaaatatttacataattcgattttcaaatctctcattcaaataaaagggataaaaataaaatttctgcctttacggcagcagaacctctttcctgaaatggattggtaaaataagatacttcactggagaggaactaatttatgtttaagaggtattcatattcagctaagaaaatacaaccctttttcagctatatagattagggaatataaaatgatattttcgacaaatggaaaaaaagaggaaagattaactatttgcaccgaaatgtcttgttttgttgcgacataggaaaataaccaagcacaaagttatattccatcctttttactgatttttttttcttctatctgttccatctgctgtattcatttctccaatctcatgtccattttggtgtgggagtcggggtagggggtactcttgtcaaaaggcacattggtgcatgtgtgtttgctagctcacttgtccatgaaaatattttatgatattaaagaaaatcttttgaaaaaaaaaaaaaa

SEQ ID NO: 25839 - DNA, 2099 bp, Homo Sapiens
ggcaggtggggtgccagtggaagagggaaggcaggcgagtgtttacggcctgacttgggaggccggcggatcagcaattgcagaagcaggcagcggcagagagggaatggtgcaggcaggcgctgagaaggaggcgcagtccatctctctcagggttagtgaatgaggctctccgcccgggccggcccggggacagtgcgctgctggtcccagcatgaatgcgggccccggctgtgaaccctgcaccaagcgaccccgctggggcgccgctacaacttcgccggctgcttcggacgcccggagctttcccagcaggcagaggcgcgtcctcgaccccaaggacgctcacgtgcagttcagggtcccaccgtcctcgccagcctgcgtcccagggcgggcgggacagcacagaggcagcgccacctcgcttggtactgagcagtacagtgaatacacaggctatgctgagacatatcgttggtcccggagccacgaagatgggagtgaaagggacgactggcagcggcgctgcactgagatcgttgccatcgatgctcttcacttcagacgctacctcgatcagtttgtgcctgagaaaatgagacgcgagctgaacaaggcttactgtggatttctccgtcctggagtttcttcagagaatctttctgcagtggccacaggaaactggggctgtggtgcctttgggggtgatgccaggttaaaagccttaatacagatattggcagctgctgcagctgagcgagatgtggtttatttcacctttggggactcagaattgatgagagacatttacagcatgcacattttccttactgaaaggaaactcactgttggagatgtgtataagctgttgctacgatactacaatgaagaatgcagaaactgttccacccctggaccagacatcaagctttatccattcatataccatgctgtcgagtcctgtgcagagaccgctgaccattcagggcaaaggacagggacctgaggagccgagcgaatagcatctcctcccacctcccaccagagacgtcctgtttgagctgtcaggtgtaatatatgaattgacttaagttaatataaatgtgtacataatccacatttgtagtcaaggacgcaatctcttccacacatgtgcagttgtcagttggtacatctaaactccctccatcctgactcacgtggacttagatatgttttgtttctattttcttctatttcagtttttcattctttgatgtttatttcttttgtccatcagatctcttgtgaaatcccatggaaggttgtgctcagcctgtcgggtctctttcttcctgcccatatattataccagttgcttctgcagcccgcagatgccagcgatgccaggaaacaagttgaaatccaggaatctctttaactgattttgctaaaaatctccctgtgagccttccactcaactcttaatatgcttgcattgtttaagtttttaaattctgaaaattaataattagggtttttttcatatgtgttgcataatgcaaacctcctaggttaaaatagtttctttatttaagatagaataatttccagaaattgtacttttgaggtatcatttttatctgtaatggtttgtctgtcttttttcctctgatcagtatttttttataccagttttggagactgcctgagatgaaaggaaatgtggaataaaaggaggttttcctgatgtggtgtaaagaaaacagattcaagagaattgaagattttttttgtttcttggtacttttttctttttaaattaggactaatgtttcttttgtggtgcttgaggcatattcatataaccaaagtttgagaactgggaacttcatgctgatttgtacatattgaagtttctctggtattcaaaggttatatagtgaatgaattttcattaataaatcactttgtcagaaactcccatatcatctatattttatatatgtatatataaacgtatgctctttaagtgtgtctatatgtgagcacataaaatctaaataaaattggactggtgggaaacaaaaaaaaaaaaaaaaaaaaaaaaaaaaaaa

SEQ ID NO: 25840 - DNA, 1452 bp, Homo Sapiens
ggctgtgggtcaaaagtgccggtcaaaatggaagtgaatccccctaaacaggagcacctgctggcgctaaaagtgatgcggctgactaagcctactttattcaccaatatcccagtaacatgtgaagagaaagacttacctggagatctctttaaccagctgatgagagatgatccttcaaccgttaatggtgcagaagttttaatgttgggagaaatgctgactttaccacagaattttgggaatatatttttgggagagaccttttccagttatatcagcgttcataatgatagcaatcaagttgtaaaagacatattagtaaaagctgatcttcagacaagttctcagcgtttaaatctttcagcctccaatgctgcagtggctgaacttaaaccggattgttgtattgatgatgtcatacatcatgaagtcaaagaaattggaacacacatcttggtatgtgctgtgagttatacaactcaggctggagaaaaaatgtatttcagaaaattcttcaaatttcaggttctcaaaccattggatgtgaaaaccaaattttacaatgcagagagtgacctcagttctgtgactgatgaagtatttctggaagcccagattcagaataatgacaacctcacctatgtttatggagaaggtttcactggagccatctattatgtacaatgtaacagaattaaattcagtcagccaagctggagaatgtgtgtctacgtttgggtcaagagcatatttgcaaccaatggatacacgccagtacttatactgcctaaagccaaagaatgaatttgcagaaaaagcaggcatcattaagggagtaacagtaattggaaaattggatatagtatggaaaacaaatctaggtgaaaggggaaggttacagaccagccaacttcaaagaatggctccaggttatggagatgttaggttgtctttggaggcaataccagataccgtaaaccttgaagaaccttttcatattacctgtaaaataacaaactgcagcagtgaaaggactatggatctggttttggaaatgtgcaataccaattccatccactggtgtggaatttcaggaagacagctgggaaagctgcatccaagttcttcgctctgtcttgcccttactctgctttcttcagtacagggactgcaaagcatctctggcttaagactaacagacacattcttaaagagaacatatgaatatgatgacatcgcacaagtctgtgtggtatcttctgccattaaagtggaaagctgaaggaaacttccaatgttaggcttttcatttagtttcacagaactgctctttttgttacctttgtaaaatgatgacgtcaacaacgaagtaaatatgttacttaaattttctttcctgtaaaatggttaaaatattaaatatttgttttgaagaaaaaaaaaaaaaaa

SEQ ID NO: 25841 - DNA, 1500 bp, Homo Sapiens
cactttccagtctgttttgcaaggtgtgcatttccatcttgattccctgaaagtccatctgctgcatcggtcaagagaaactccacttgcatgaagattgcacgcctgcagcttgcatctttgttgcaaaactagctacagaagagaagcaaggcaaagtcttttgtgctcccctcccccatcaaaggaaaggggaaaatgtctcagtcgaaaggcaagaagcgaaaccctggccttaaaattccaaaagaagcatttgaacaacctcagaccagttccacaccacctcgagatttagactccaaggcttgcatttctattggaaatcagaactttgaggtgaaggcagatgacctggagcctataatggaactgggacgaggtgcgtacggggtggtggagaagatgcggcacgtgcccagcgggcagatcatggcagtgaagcggatccgagccacagtaaatagccaggaacagaaacggctactgatggatttggatatttccatgaggacggtggactgtccattcactgtcaccttttatggcgcactgtttcgggagggtgatgtgtggatctgcatggagctcatggatacatcactagataaattctacaaacaagttattgataaaggccagacaattccagaggacatcttagggaaaatagcagtttctattgtaaaagcattagaacatttacatagtaagctgtctgtcattcacagagacgtcaagccttctaatgtactcatcaatgctctcggtcaagtgaagatgtgcgattttggaatcagtggctacttggtggactctgttgctaaaacaattgatgcaggttgcaaaccatacatggcccctgaaagaataaacccagagctcaaccagaagggatacagtgtgaagtctgacatttggagtctgggcatcacgatgattgagttggccatccttcgatttccctatgattcatggggaactccatttcagcagctcaaacaggtggtagaggagccatcgccacaactcccagcagacaagttctctgcagagtttgttgactttacctcacagtgcttaaagaagaattccaaagaacggcctacatacccagagctaatgcaacatccatttttcaccctacatgaatccaaaggaacagatgtggcatcttttgtaaaactgattcttggagactaaaaagcagtggacttaatcggttgaccctactgtggattggtgggtttcggggtgaagcaagttcactacagcatcaatagaaagtcatctttgagataatttaaccctgcctctcagagggttttctctcccaattttctttttactccccctcttaagggggccttggaatctatagtatagaatgaactgtctagatggatgaattatgataaaggcttaggacttcaaaaggtgattaaatatttaatgatgtgtcaaaaaaaaaaaaaaaaaaaaaaaaaaaaaaaaaaaaaa

SEQ ID NO: 25842 - DNA, 1448 bp, Homo Sapiens
ctgcttaggactctgcccagccaggaaggaaacctacaggaggaagaatggctgcagggtggctgacaacctggtcacagaactcagtaaccttccaggaagtggcagtggacttttcccaggaggagtgggcattgctggaccctgctcaaaaaaatctatacaaagatgtgatgctggagaactttaggaacctggcctcagtagggtatcagctctgcagacacagtctgatctccaaggtggatcaagaacagctgaagacagatgaaagaggaattttacaaggtgactgtgcagactgggaaactcaacttaaaccaaaagatacaattgctatgcagaacattcctgggggaaaaacatccaatggcataaacacgaactgtgtcagaactcactctggagagatgccctatgaatgcagtgactgtgggaaagccttcatttttcagtcttcccttaagaaacacatgagatctcatactggagagaagccttatgagtgtgatcactgtggaaaatcctttagccagagctctcatctgaatgtgcacaaaagaactcacactggagagaaaccctatgactgtaaggaatgtgggaaggctttcactgttccttcatcccttcagaaacatgtgagaacccacactggagagaaaccctatgaatgcagtgactgtggaaaagccttcatcgatcagtcatcccttaagaaacacacacgctctcacactggagagaagccttatgagtgtaaccagtgtggaaagtccttcagcacaggctcttaccttattgtgcacaagagaactcacactggtgagaaaacctatgagtgtaaagaatgtgggaaggcctttaggaattcctcttgcctgagggtacacgtgagaactcacactggagagaagccttataaatgtattcagtgtgaaaaagcctttagcacaagcactaaccttataatgcccaagcgaatccacaatggccagaaactccatgaatgaaatgactcagggaagtgtttgttgcccctcatgcctcctttctcactttagaacatatattggagagaagccctgttatggtcacctggaaacagccttctggcccaactctggatgcctgttatactgggacaaaccttataaatgttatagctatgattgtttttatcagtgagtatttcattcttatatgtgtcacaactgtagatcctatgaatattttagttatcttttcagtttaattgcattgtgaacagaacacatggtcttcaatatgtagattctgtgtgacatagatttgaacataattgctggacactgactgatgtactgtggcagacagaactagttgctgtctcaatatccattcctcccttctttcttaaagtaataaaatttaccatttagttcaaaaaaaaaaaaaaaaaaaaaaaa

SEQ ID NO: 25843 - DNA, 1500 bp, Homo Sapiens
ggctacgtcccctttctcatcgtcggctccatcttcattgcgttcatcatcctgggctctgtagtggctatttattgttgcacctgtttgagacccaaggagccctcgcagcagccaatccgcttctcactccgcagctatcagacagagaccctgcccatgatcctgacctccaccagccccagggcaccctcccggcagtccagcacagccacgagctccagctccacaggcggctccatccgcaggttctcctttgccagggctgagccgggctgcctggtgccctcaccgcccccgccatacaccaccagccactcaatccacctggctcagccatctggtttcctggtgtcaccccagtatttcgcttaccccctccagcaggagcccccactgcctgggaagagctgtccagacttcagttccagttgacacgcccaggccatgaatccacaactcagtcagatggcagacaggtggagccctgctcccattgccacatgcaattctgagaaaatttcccttgtaactgatcagtgtcatggaggagcatgctaggaaaacacagcaccttctaatttgaaagttcctgtctccaatcacagaaaggctaaaccagagaactgttttctggttttgcaaacatgtgatcattacatttcaatctatgctacttttattcaaaatatgcagcagtttgactttaaagttgcaaactggctaaaaacgttttactggacattcagctatattgcttagaaaagggctacatgtttctttttcatataagttgttcattgagttatgataggaatatattcataaataagcaaagaaaaatacctaattgtaattatcaaaggttcacttaaaaaaattaactattaggtaaacttaagggggcagtgaaaaatctatttatgatttcgggagtaacctaaccatgaataatattagcataatgagaacatttactttttaaataaataactaaattttgtttacaatatgagtttttccagaatacaaggtttcaataatcacatgaggagtttaaagttttaaatatatactcagacattcattgtaacacagagtgtatgtaaaatcatttcccccactcactggagggagtatttattgcagactttttgttcagcaacatttagtgtttcagtgaaagttggacagttggggcttaaaacatttatttgtaaaatgagctatgttcaaatgtaaatatttgtaatttaatgtatttaccacattgactgtactaattatttagtagtcatactgtaatttttatgttaataataactggagttcaaagtctagctattggtataatcatctaatattatatatatctccagtgcccctgaattttatgtttgatgactatatatttgggcatatatcttgttggattagaataaataaaacactttatattttcatgaactctaaaaaaaaaaaaaaaaaaaaaaaaaaaaa

SEQ ID NO: 25844 - DNA, 1320 bp, Homo Sapiens
gagagcacagcctggtgggttctggggtctacggcctaggggccggggaagtttgcgccgccgcgaccagtgctgcgatcccgagccgggctccagccccgaggaccaggggtcgggcgggcctgcctacggaaccccgcgggccagcagcagtcgtctcgcgtcctcctgcttggaaaagtgtttaagcttctaaaatgtcatctatcaagcacctggtttatgcagttattcgtttcttacgggaacaaagtcagatggacacttacacctcggatgaacaagaaagtttggaagttgcaattcagtgcttggagacagtttttaagatcagcccagaagatacacacctagcagtttcacagcctttgacagaaatgtttaccagttccttctgtaagaatgacgttctgcccctttcaaactcagtgcctgaagatgtgggaaaagctgaccaattaaaagatgaaggcaataaccacatgaaagaagaaaattatgctgctgcagtggattgttacacacaggcaatagaattggatcccaataatgcagtttactattgcaacagggctgctgctcagagcaaattaggtcactacacagatgcgataaaggattgtgaaaaagcaatagcaattgattcaaagtacagcaaggcctatgggagaatggggctggccctcactgccttgaataaatttgaagaagcagttacaagttatcaaaaggcattagatcttgaccctgaaaatgattcctataagtcaaatctgaaaatagcagaacagaagttaagagaggtatccagtcctacaggaactggactgagctttgacatggctagcttgataaataatccagccttcattagtatggcggcaagtttaatgcagaaccctcaagttcaacagctaatgtcaggaatgatgacaaatgccattgggggacctgctgctggagttgggggcctaactgacctgtcaagcctcatccaagcgggacagcagtttgctcagcagatacagcaacaaaatcctgaacttatagagcaactgagaaatcacatccggagcagatcattcagcagcagcgctgaagagcattcctgatttaaccaggggctcaagcccaagatacaaatggtttatggctatgaatgaagtatttgttgtagatagtaccccctccctccttcaaaaaaccaaacaccatatctgatgtgtgaaaataatggaggaaaacctcttgtgtatattcttaaagaataaatctgtttagacagtaggtttatcacaaacaaaaaaaaaaaaaaaaaaa

SEQ ID NO: 25845 - DNA, 2872 bp, Homo Sapiens
gaacgccgagccgtcgccgcagcctccgccgccgagaagcccttgttcccgctgctgggaaggagagtctgtgccgacaagatggcggacggggagctgaacgtggacagcctcatcacccggctgctggaggtacgaggatgtcgtccaggaaagattgtgcagatgactgaagcagaagttcgaggcttatgtatcaagtctcgggagatctttctcagccagcctattcttttggaattggaagcaccgctgaaaatttgtggagatattcatggacagtatacagatttactgagattatttgaatatggaggtttcccaccagaagccaactatcttttcttaggagattatgtggacagaggaaagcagtctttggaaaccatttgtttgctattggcttataaaatcaaatatccagagaacttctttctcttaagaggaaaccatgagtgtgctagcatcaatcgcatttatggattctatgatgaatgcaaacgaagatttaatattaaattgtggaagaccttcactgattgttttaactgtctgcctatagcagccattgtggatgagaagatcttctgttgtcatggaggattgtcaccagacctgcaatctatggagcagattcggagaattatgagacctactgatgtccctgatacaggtttgctctgtgatttgctatggtctgatccagataaggatgtgcaaggctggggagaaaatgatcgtggtgtttcctttacttttggagctgatgtagtcagtaaatttctgaatcgtcatgatttagatttgatttgtcgagctcatcaggtggtggaagatggatatgaattttttgctaaacgacagttggtaaccttattttcagccccaaattactgtggcgagtttgataatgctggtggaatgatgagtgtggatgaaactttgatgtgttcatttcagatattgaaaccatctgaaaagaaagctaaataccagtatggtggactgaattctggacgtcctgtcactccacctcgaacagctaatccgccgaagaaaaggtgaagaaaggaattctgtaaagaaaccatcagatttgttaaggacatacttcataatatataagtgtgcactgtaaaaccatccagccatttgacaccctttatgatgtcacacctttaacttaaggagacgggtaaaggatcttaaatttttttctaatagaaagatgtgctacactgtattgtaataagtatactctgttatagtcaacaaagttaaatccaaattcaaaattatccattaaagttacatcttcatgtatcacaatttttaaagttgaaaagcatcccagttaaactagatgtgatagttaaaccagatgaaagcatgatgatccatctgtgtaatgtggttttagtgttgcttggttgtttaattattttgagcttgttttgtttttgtttgttttcactagaataatggcaaatacttctaatttttttccctaaacatttttaaaagtgaaatatgggaagagctttacagacattcaccaactattattttcccttgtttatctacttagatatctgtttaatcttactaagaaaactttcgcctcattacattaaaaaggaattttagagattgattgttttaaaaaaaaatacgcacattgtccaatccagtgattttaatcatacagtttgactgggcaaactttacagctgatagtgaatattttgctttatacaggaattgacactgatttggatttgtgcactctaatttttaacttattgatgctctattgtgcagtagcatttcatttaagataaggctcatatagtattacccaactagttggtaatgtgattatgtggtaccttggctttaggttttcattcgcacggaacaccttttggcatgcttaacttcctggtaacaccttcacctgcattggttttctttttcttttttctttcttttttttttttttttttttttgagttgttgtttgtttttagatccacagtacatgagaatccttttttgacaagccttggaaagctgacactgtctctttttcctccctctatacgaaggatgtatttaaatgaatgctggtcagtgggacattttgtcaactatgggtattgggtgcttaactgtctaatattgccatgtgaatgttgtatacgattgtaaggcttatgtcactaaagatttttattctgattttttcataatcaaaggtcatatgatactgtatagacaagctttgtagtgaagtatagtagcaataatttctgtacctgatcaagtttattgcagcctttcttttcctatttcttttttttaagggttagtattaacaaatggcaatgagtagaaaagttaacatgaagattttagaaggagagaacttacaggacacagatttgtgattctttgactgtgacactattggatgtgattctaaaagcttttattgagcattgtcaaatttgtaagcttcatagggatggacatcatatctataatgcccttctatatgtgctaccatagatgtgacatttttgaccttaatatcgtctttgaaaatgttaaattgagaaacctgttaacttacattttatggattggcacattgtgttacttactgcaagagatatttcattttcagcacagtgcaaaagttctttaaaatgcatatgtctttttttctaattccgttttgttttaaagcacattttaaatgtagttttctcatttagtaaaagttgtctaattgaaaaaaaaaaaaaaaaaaaaaaaaaaaaaaaaaaaaaaaaaaaaaaaaaaaaaaaaaaaaaaaaaaaaaaaaaaa

SEQ ID NO: 25846 - DNA, 2799 bp, Homo Sapiens
gggagcgagcgcttctgcgactccagttgtgagagccgcaagggcatgggaattgacgccactcaccgacccccagtctcaatctcaacgctgtgaggaaacctcgactttgccaggtccccaagggcagcggggctcggcgagcgaggcacccttctccgtccccatcccaatccaagcgctcctggcactgacgacgccaagagactcgagtgggagttaaagcttccagtgagggcagcaggtgtccaggccgggcctgcgggttcctgttgacgtcttgccctaggcaaaggtcccagttccttctcggagccggctgtcccgcgccactggaaaccgcacctccccgcagcatgggcaccagcctcagcccgaacgacccttggccgctaaacccgctgtccatccagcagaccacgctcctgctactcctgtcggtgctggccactgtgcatgtgggccagcggctgctgaggcaacggaggcggcagctccggtccgcgcccccgggcccgtttgcgtggccactgatcggaaacgcggcggcggtgggccaggcggctcacctctcgttcgctcgcctggcgcggcgctacggcgacgttttccagatccgcctgggcagctgccccatagtggtgctgaatggcgagcgcgccatccaccaggccctggtgcagcagggctcggccttcgccgaccggccggccttcgcctccttccgtgtggtgtccggcggccgcagcatggctttcggccactactcggagcactggaaggtgcagcggcgcgcagcccacagcatgatgcgcaacttcttcacgcgccagccgcgcagccgccaagtcctcgagggccacgtgctgagcgaggcgcgcgagctggtggcgctgctggtgcgcggcagcgcggacggcgccttcctcgacccgaggccgctgaccgtcgtggccgtggccaacgtcatgagtgccgtgtgtttcggctgccgctacagccacgacgaccccgagttccgtgagctgctcagccacaacgaagagttcgggcgcacggtgggcgcgggcagcctggtggacgtgatgccctggctgcagtacttccccaacccggtgcgcaccgttttccgcgaattcgagcagctcaaccgcaacttcagcaacttcatcctggacaagttcttgaggcactgcgaaagccttcggcccggggccgccccccgcgacatgatggacgcctttatcctctctgcggaaaagaaggcggccggggactcgcacggtggtggcgcgcggctggatttggagaacgtaccggccactatcactgacatcttcggcgccagccaggacaccctgtccaccgcgctgcagtggctgctcctcctcttcaccaggtatcctgatgtgcagactcgagtgcaggcagaattggatcaggtcgtggggagggaccgtctgccttgtatgggtgaccagcccaacctgccctatgtcctggccttcctttatgaagccatgcgcttctccagctttgtgcctgtcactattcctcatgccaccactgccaacacctctgtcttgggctaccacattcccaaggacactgtggtttttgtcaaccagtggtctgtgaatcatgacccagtgaagtggcctaacccggagaactttgatccagctcgattcttggacaaggatggcctcatcaacaaggacctgaccagcagagtgatgattttttcagtgggcaaaaggcggtgcattggcgaagaactttctaagatgcagctttttctcttcatctccatcctggctcaccagtgcgatttcagggccaacccaaatgagcctgcgaaaatgaatttcagttatggtctaaccattaaacccaagtcatttaaagtcaatgtcactctcagagagtccatggagctccttgatagtgctgtccaaaatttacaagccaaggaaacttgccaataagaagcaagaggcaagctgaaattttagaaatattcacatcttcggagatgaggagtaaaattcagtttttttccagttcctcttttgtgctgcttctcaattagcgtttaaggtgagcataaatcaactgtccatcaggtgaggtgtgctccatacccagcggttcttcatgagtagtgggctatgcaggagcttctgggagatttttttgagtcaaagacttaaagggcccaatgaattattatatacatactgcatcttggttatttctgaaggtagcattctttggagttaaaatgcacatatagacacatacacccaaacacttacaccaaactactgaatgaagcagtattttggtaaccaggccatttttggtgggaatccaagattggtctcccatatgcagaaatagacaaaaagtatattaaacaaagtttcagagtatattgttgaagagacagagacaagtaatttcagtgtaaagtgtgtgattgaaggtgataagggaaaagataaagaccagaaattcccttttcaccttttcaggaaaataacttagactctagtatttatgggtggatttatccttttgccttctggtatacttccttacttttaaggataaatcataaagtcagttgctcaaaaagaaatcaatagttgaattagtgagtatagtggggttccatgagttatcatgaattttaaagtatgcattattaaattgtaaaactccaaggtgatgttgtacctcttttgcttgccaaagtacagaatttgaattatcagcaaaaaaaaaaaaaaaaaa

SEQ ID NO: 25847 - DNA, 1729 bp, Homo Sapiens
cagacccggaagtggatcgtgcggagcaagcatcacaccatggcgtatgagtgttcctctgtgtagactcaacctgcgcctcgccgtcccccattcgcacacccgatgcccgggggtcgctacggacttaaaatctccgcaccgcaccctccacctcagaaacgttcctggatccgaacactgccccctgacgacctagagagatcccggctcccagcccactgagtggcttcagcctcgctggcacctcccaactcctggcctctctgcacgaggcgcctgccccgggccccgcctacaggggacccagctcttcttgcagccactggaagctgatcacctggagtgaagacctcacacgaagaagtctggaagaagaggaagaggaaagaaaaggagtcagggatggcccttactcaggtaaagtgatactcctggtggattgttcttttatttcttcctgaaatgcctggcattggcattgcgaatcttctctgagtctgaagcgtcctgcctgacatgtttgctagcactcacccgcgccttccctcagtccctctcatctcgtttagattccatctcccgtgatccagtgacatgaacttgggaagaggctgcactgggcatggtcctgggaagggctcacacccagacatggatggagacggggtgagggtcctgtggtgtcagtgctgttgggcagcagggattgctcaggggccgcatctggatgcactgtcagcgctgtgtaaaccatgataacagaagctgcccatgaagtcaggtgcacacgtacctgctcactggcatagaaaagaacactaaggggaaagctttcctgcctcattggtaactgcatttgaagccgaacaagtgagtcattgggtttccgactccaaactcgtaaagactgggaacagaatggaaagtttagacactgacattggagatagatgattctttcattccatcatccattttaatgtatgacgtcaacataaatgtgtaacaagattcattaaactagtctcagaagctctatcccatggagactgtgatgttcttacaagaacctttgtccgtcgggtattgtaggtgagaatggcatataagcagaacaaccttgccattagagagaatggaactgtatttttgttttaccagttatgagtcaacattttgtttcttttattttgaacatggcatcatgtatatatttcttttatagtgaaatgatacatttatgtgccaagaggtaaagcatcccttttcctgtccagccttccaccctccctcacatcttagtggggagccactgttctcaattctgtgggaagggtcagtgcaagtcctgtagaaatgtattttgacatcattatgagatttaaacaaattcctcagtgaatgtttggttgtgatatgttaacctgcaagttttgaacattgacatgttttcgtgttaggaaacaggagctcacttttctacatccttgttggagcatgctgggaatgaagacaggtggatcttttaactttctcacttctataaagaatgccacacagggtgctgcatggtggctcacacctgtaatcccagcacttgtggaagccaaggtgggaggatcatttgagccccagagattgaggctgcagtgagccatgatagtgccactgcacttcagcctgagtgatagaacaagaccttgtctcaaaaaaaaaaaaaaaaaaa

SEQ ID NO: 25848 - DNA, 2873 bp, Homo Sapiens
gcgcggccgccggtgagccgcatggagccccgggcggcggacggctgcttcctgggcgacgtgggtttctgggtggagcggacccctgtgcacgaggcagcccagcggggtgagagcctgcagctgcaacagctgatcgagagcggcgcctgcgtgaaccaggtcaccgtggactccatcacgcccctgcacgcagccagtctgcagggccaggcgcggtgtgtgcagctgctgctggcggctggggcccaggtggatgctcgcaacatcgacggcagcaccccgctctgcgatgcctgcgcctcgggcagcatcgagtgtgtgaagctcttgctgtcctacggggccaaggtcaaccctcccctgtacacagcgtcccccctgcacgaggcctgcatgagcgggagttccgaatgtgtgaggcttcttattgacgtcggggccaatctggaagcgcacgattgccattttgggacccctctgcacgttgcctgtgcccgggagcatctggactgtgtcaaagtgctgctcaatgcagcttgatgaatgtctgctcttatcgtgagaaagttgaggagtgcagagcttactctcttctctgaattgcctactgttttgggggccaacgtgaatgcggcaaagcttcatgagactgcccttcaccacgcggccaaggtcaagaatgttgacctcatcgagatgcttatcgagtttggcggcaacatctacgcccgggacaaccgcgggaagaagccgtctgactacacgtggagcagcagcgctcccgccaagtgcttcgagtactacgaaaagacacctctgactctgtcacagctctgcagggtgaacttgaggaaggccactggcgtccgagggctggagaagattgccaagttaaacatcccgccccggctcattgattacctctcctacaactgaattgcaggtggggtccggaccgtgactgcccccgttgtgcccagcattgcccgggtgagggctctgcctgttcctctgaagcagcgtgattgctgtagatagaacaacgctccttcgagtcccttcctgcgatcctgtttaggcttctctcctggatcctggataatgtttccagggtgttgggaaggcctgcgtctcaggtcacagttgtgggtgtggccctgcgctgttctacagaacctaccctctcaatgggcatgggcccaaccatccagttttcctcttttacggaccatcctcaaaggcactctcaggacagacggcgtggggagcacagaggaggctggcagagctggggactgagggcattgttgctgattctcactcaccggggcagcctgccgcagatgcacaggccccaggtgcaggccaccacctccgggtcagcaccaggactgccctcggtgctcatagggaatggctgggcccacggaaggtcggcctgggatgtggcctgggactgctgctctgctggctgctgtgtggatgcttttcctggagcactttccaaggcatcccccagccccaagcctgcgcgcatctgtcactcagggactttctatgggtctttgtgggggaaggccctggctttgtattccccacaagtagcactgagtttcttaggaaatttgtcttcagtattaggtctccaactcttgtaaaaagtttatatgtaggataaaaaccttttagaggacacgtaggcggtaccactaaggttttggtaatgagccattcaaaccgacagcagtgtgaaggtgtgtcaaggtgtatagtctcgtggctcggcattctcagtgcaaaggcctgtttggagactctgtgggaattgtttttcatctgtttctatggttgtcaaatgaattcttcacccaccctacagtttgctaactccttgaagctatcaaattagtaagagaggctgcccgcacccagggggcaccatcgcccacttattatttagttttgcggatactcatggaccatctatcacatccagcattgtcccagtgctttgagttggacgggaatgggactctgcagccaaggcaggataagaaaatcttgcaatcccgtcctgcagtgatagaaacaggtcgttctgcattataagccataggtggagcattcggtagcgtattcagactgcatgggccggcctaggagtctttgccttcataaattttaagaaccccgcccacaacagggagttaaactggaggactttgcatgattagttcagggatgagtggtttctggggcatctgaggtcaggagttcgaaaccagcctggccaacttgatgaaaccccatctctacccgttctggagaacaggtcacgcctgtcctggagacagtgtgccgggaaaagggaacgtggtactcactggatgcacccaggccggcccgagcctcccaccgcagacagtgtggaacagagtgagcctgagctgcccaaggcgatgccctttgtgctgtatgactggaggcctctccgcgtgggtacttgggggtggggccacaaatctggcgaaaaacttcatgctggccgccgtgaggttttactccagcgttcccgccattgtcatggcgggtcttcgtcctaaactgagaagaaaagcattcctgtttgatcactgccttagttaccagttctggatcagtcagtgtttctgcatggaataacaaccattaaaaaaagcactgggttctgccctttcatctttgtaagagattcttgcctctagcaatgacaacctgtgatgtctcacagtagagcacttagtgcagaatcaggtccccacggctgttgctcaataaaagtggcggaataaagtgcaaaaaaaaaaaaaaaaaaaaaaaaaaaaaaaaaa

SEQ ID NO: 25849 - DNA, 2836 bp, Homo Sapiens
cggcggcggcggccagcacggaggcggaggccgagggggctgtgcacaggtcgccgcggagaggcgtgcgaattccgagccgagcgccgaggaccgtgctacccaggccgggctgccagccgcaggctcctctctggcagcagcggcggcgcggcgacccccgtccctcggcctccccttcccatcccacctcccgagccttcctcttcccgcagcacgcccggcccggcccggccgtggccctcctcagtgccggccgccatggcagaggcgtccggcgcggggaaaatctagcccggggatttcatgcggcctagctcggttccgcctcctcctcgcgcggccccagcggctgcccgcaccccagccccactccgggcctccgtgtctctcctgtgatcgcactgacacggccggggggttagaatggaacaaactgaaggcccgatgagagaaagggaaagttaaggatgctggagcagaacaatggatttctctttctctttcatgcaagggatcatgggaaacacaattcagcaaccacctcaactcattgactccgccaacatccgtcaggaggatgcctttgataacaacagtgacattgctgaagatggtggccagacaccatatgaagctactttgcagcaaggctttcagtacccagctacaacagaagatcttcctccactcacaaatgggtatccatcatcaatcagtgtgtatgaaactcaaaccaaataccagtcatataatcagtatcctaatgggtcagccaatggctttggtgcagttagaaactttagccccactgactattatcattcagaaattccaaacacaagaccacatgaaattctggaaaaaccttcccctccacagccaccacctcctccttcggtaccacaaactgtgattccaaagaagactggctcacctgaaattaaactaaaaataaccaaaactatccagaatggcagggaattgtttgagtcttccctttgtggagaccttttaaatgaagtacaggcaagtgagcacacgaaatcaaagcatgaaagcagaaaagaaaagaggaaaaaaagcaacaagcatgactcatcaagatctgaagagcgcaagtcacacaaaatccccaaattagaaccagaggaacaaaatagaccaaatgagagggttgacactgtatcagaaaaaccaagggaagaaccagtactaaaagaggaagccccagttcagccaatactatcttctgttccaacaacggaagtgtccactggtgttaagtttcaggttggcgatcttgtgtggtccaaggtgggaacctatccttggtggccttgtatggtttcaagtgatccccagcttgaggttcatactaaaattaacacaagaggtgcccgagaatatcatgtccagttttttagcaaccagccagagagggcgtgggttcatgaaaaacgggtacgagagtataaaggtcataaacagtatgaagaattactggctgaggcaaccaaacaagccagcaatcactctgagaaacaaaagattcggaaaccccgacctcagagagaacgtgctcagtgggatattggcattgcccatgcagagaaagcattgaaaatgactcgagaagaaagaatagaacagtatacttttatttacattgataaacagcctgaagaggctttatcccaagcaaaaaagagtgttgcctccaaaaccgaagttaaaaaaacccgacgaccaagatctgtgctgaatactcagccagaacagaccaatgcaggggaggtggcctcctcactctcaagtactgaaattcggagacatagccagaggcggcacacaagtgcggaagaggaagagccaccgcctgttaaaatagcctggaaaactgcggcagcaaggaaatccttaccagcttccattacgatgcacaaagggagcctggatttgcagaagtgtaacatgtctccagttgtgaaaattgaacaagtgtttgctcttcagaatgctacaggggatgggaaatttatcgatcaatttgtttattcaacaaagggaattggtaacaaaacagaaataagtgtcagggggcaagacaggcttataatttctacaccaaaccagagaaatgaaaagccaacgcagagtgtatcatctcctgaagcaacatctggttctacaggctcagtagaaaagaagcaacagagaagatcaattagaactcgttctgaatcagagaaatccactgaggttgtgccaaagaagaagatcaaaaaggagcaggttgaaacagttcctcaggctacagtgaagactggattacagaaagggtcggcggaccggggagtgcagggctctgtcagattcagtgacagctccgtctccgcagcgattgaggaaactgtggactgagattcctgtacaatttcatcccagaaactccagacttgtagtctccatgcaagatttctttgtcggcggcttgataaacagtttctttgttttcgattttgatttcgccaatcatcattattggcattttcctgcctggtttcttcttcaagactctgaacaattgctttaacagtcaaatgatttttttttttcggtttgagctggatgggtacagcttaaatcatgggtccagcctaaaaaccaccatttaacttacactgatcaatttcaacatggactgtttttggttttttgtttttaaataaagcatcattaatgcacatctgcaggggtttgccaaacagcccaaactgtatacattacaatcattaaaagttcttattttttttaaaaaaaaaaaaaaaaaaaa

SEQ ID NO: 25850 - DNA, 639 bp, Homo Sapiens
gccggggccgagccctccgcgacgccacccgggccatgggggccgcacgcagcccgccgtccgctgtcccggggcccctgctggggctgctcctgctgctcctgggcgtgctggccccgggtggcgcctccctgcgactcctggaccaccgggcgctggtctgctcccagccggggctaaactgcacggtcaagaatagtaagtcatctttttctgttcttcttcttgttgccttcttaatcaagtgagagcctgctgccaacttctgacagaagtcttgccatgccactccaggttcaggctgtgagctacagccatccgcaggagggttcccggagaattgtggatgcgtgcacctgcgcttcctgtcgagaacattcattatgcaaaagtcaggaaaggagaaacagaactgtcatttggattgtgaaagtattctctggggagctgccctactgtatctataatataatttgatttgccacagcttgtcactgtaaagtgagagacatctgtgctgttgattttgttttgttttaattcaaagaggcacatattcaagtgtctgagccaattagagacccctgacatataacaataaagcagctcttactacaactgaaaaaaaaaaaaaaaaaa

SEQ ID NO: 25851 - DNA, 3189 bp, Homo Sapiens
gaatcccgatggagcggcccgaggaaggcaagcagtcgccgccgccgcagccctggggacggctcctgcgtctgggcgcggaggagggcgagccgcacgtcctcctgaggaagcgggagtggaccatcgggcggagacgaggttgcgacctttccttccccagcaataaactggtctctggagatcactgtagaattgtagtggatgaaaaatcaggtcaggtgacactggaagataccagcaccagtggaacagtgattaacaagctgaaggttgttaagaagcagacatgccctttacagactggggatgtcatctacttggtgtacaggaagaatgaaccggaacacaacgtggcatacctctatgaatctttaagtgaaaagcaaggcatgacacaagaatcctttgatacctcaggtgcaggtgcagggcgaggggccgatccccgggtccctccgtcgtcgcccgccactcaggtgtgctttgaggaaccacagccatcaacatcgacgtcagacctcttccccacagcctcggcctcttccacggagccttctcctgcagggcgagagcgttcctccagttgtgggtctgggggtggtggcatctcccctaaaggaagtggtccctctgtggcaagtgatgaagtctccagctttgcctcagctctcccagacagaaagactgcgtccttttcgtcgttggaaccccaggatcaggaggatttggagcccgtgaagaagaaaatgagaggagatggggaccttgacctgaacgggcagttgttggtcgcacaaccgcgtagaaatgcccaaaccgtccacgaggacgtcagagcagcggctgggaagccagacaagatggaggagacgctgacatgcatcatctgccaggacctgctgcacgactgcgtgagtttgcagccctgcatgcacacgttctgcgcggcttgctactcgggctggatggagcgctcgtccctgtgtcctacctgccgctgtcccgtggagcggatctgtaaaaaccacatcctcaacaacctcgtggaagcatacctcatccagcatccagacaagagtcgcagtgaagaagatgtgcaaagtatggatgccaggaataaaatcactcaagacatgctgcagcccaaagtcaggcggtctttttctgatgaagaagggagttcagaggacctgctggagctgtcagacgttgacagtgagtcctcagacattagccagccatacgtcgtgtgccggcagtgtcctgagtacagaaggcaggcggcgcagcctccccactgcccagcacccgagggcgagccaggagccccacaggccctgggggatgcaccctccacgtccgtcagcctgacgacagcagtccaggattacgtgtgccctctgcaaggaagccacgccctgtgcacctgctgcttccagcccatgcccgaccggagagtggagcgcgagcaggacccgcgtgtcgcccctcagcagtgtgcggtctgcctgcagcctttctgccacctgtactggggctgcacccggaccggctgctacggctgcctggccccgttttgtgagctcaacctgggtgacaagtgtctggacggcgtgctgaacaacaacagctacgagtcagacatcctgaagaattacctggcaaccagaggtttgacatggaaaaacatgttgaccgagagcctcgtggctctccagcggggagtgtttctgctgtctgattacagagtcacgggagacaccgttctgtgttactgctgtggcctgcgcagcttccgtgagctgacctatcagtatcggcagaacattcctgcttccgagttgccagtggccgtaacatcccgtcctgactgctactggggccgtaactgccgcactcaggtgaaagctcaccacgccatgaaattcaatcatatctgtgaacagacaaggttcaaaaactaagcatccagaggccctgagcagctttcagcactggaggtgaagagagcgtgtttttaaaatacagagacaagcacgtcaaggtgttttcacagccccctgagggaagggacgcagggtctccgacaggtgctctggggtgactcttctgtggagctttttaccctctgagtgagaccctccccagagccccgggggccgcagcccgccctcctggtgagcgctgggcagggctcatggtggcatcagcagcagagacgaagcctttctgtaacatgcggccgtcccgccgagaggggcagttttgctcttttgtacattttccgaaactacagttaaagcagaagtctgttttcaggaaaagtttcaagggagaagggcaagtttatcaaaaacattgtttcaggagaagggagcataagtttacagcctacaggacgtacacaatatcctgctgctgggaaaaccacagcattttatctattttttattttaataggtttggtgcttatcttctaataagatttaaatgtcacaaactgtagcacaaataatataatttataatttacaaattgactaaaattgggtatagtatggtatttgaaagaataagcatatgcttctgtttattaaaaaaagaaaccttccaatgtccaaaactgctaaccctcgacgtggccgccaagttagtcgctccttgctaaccggtgagtgaccgcggccccgagcctggggctggacgcaggtcccaggacatgctgctcccttgtgtgagtgaccacggccccgagcctggggctggacgcaggtcccaggacgtgctgctcccttgtgtgagtgaccacggccccaagcccggggctggaggcaggtcccaggacgcgccgctccctcatgctgcccgggcccttcctccaagaccctacagagcctgaggggcaccttggcttccgcctgtgctagctttgccatgtcatctggaataatacttgaaattttgatttttggaaaaaaaagttttttatcttttgttgaaatcacctgttatccttgtttgtaaactgataacttttttgcttcttctcaggaatacagttttcaactgttgtcttgctcttgatagaaactgagaagcagcaatctgtatttgtggaggaaagtcctctcttttgcatattctaataaatgagccgcgtttgctcctcaaaaaaaaaaaaaaaaaa

SEQ ID NO: 25852 - DNA, 2733 bp, Homo Sapiens
actagccggggccatggccggcgcggcggcggagtcagggcgggagctgtggaccttcgcgggttcccgggacccgagcgcaccgcggctagcctacggctacggcccgggcagcctgcgcgagctgcgggcgcgcgagttcagccgcctggcaggaactgtctatcttgaccatgcaggtgccaccttgttctcccagagccagctcgaaagcttcactagtgatctcatggaaaacacttatggtaatcctcacagccagaacatcagcagcaagctcacccatgacactgtggagcaggtgcgctacagaatcctggcgcacttccacaccaccgcagaagactacactgtgatcttcactgccgggagcacggctgctctcaaactggtggcagaggcctttccatgggtgtcccagggcccagagagcagtgggagtcgcttctgttacctcaccgacagccacacctccgtagtgggtatgaggaacgtgaccatggctataaatgtcatatccatcccggtcaggccagaggacctgtggtctgcagaggaacgtggtgcttcagccagcaacccagactgccagctgccgcatctcttctgctacccagctcagagtaacttttctggagtcagataccccctgtcctggatagaagaggtcaagtctgggcggttgcgccctgtgagcacgcctgggaagtggtttgtgctgctggatgcagcctcctacgtgagcacctcgcctttggacctgtcagctcaccaggccgactttgtccccatctccttctataagatcttcgggtttcctacaggcctgggcgctctgctggtccataatcgtgcggctcctctactgaggaagacctactttggaggagggacagcctctgcgtacctagcaggagaagacttctacatcccgaggcagtcggtagctcagaggtttgaagatggcaccatctcattccttgatgttatcgcgctaaaacatggatttgacaccctagagcgcctcacaggtggaatggagaatataaagcagcacaccttcaccttggctcagtatacctacatggccctgtcctctctccagtaccccaatggagcccctgtggtgcggatttacagcgattctgagttcagcagccctgaggttcagggcccgatcatcaattttaatgtgctggatgacaaagggaacatcattggttactcccaggtggacaaaatggccagtctttacaacatccacctgcgaactggctgcttctgtaacactggggcctgccagaggcacctgggcataagcaacgagatggtcaggaagcattttcaggctggtcatgtctgtggggacaatatggacctcatagatgggcagcccacaggatctgtgaggatttcatttggatacatgtcgacgctggatgatgtccaggcctttcttaggttcatcatagacactcgcctgcactcatcaggggactggcctgtccctcaggcccatgctgacaccggggagactggagccccatcagcagacagccaggctgatgttatacctgctgtcatgggcagacgtagcctctcgcctcaggaagatgccctcacaggctccagggtttggaacaactcgtctactgtgaatgctgtgcctgtggccccacctgtgtgtgatgtcgccagaacccagccgactccttcagagaaagctgcaggagtcctggagggggcccttgggccacatgttgtcactaacctttatctctatccaatcaaatcctgtgctgcatttgaggtgaccaggtggcctgtaggaaaccaagggctgctatatgaccggagctggatggttgtgaatcacaatggtgtttgcctgagtcagaagcaggaaccccggctctgcctgatccagcccttcatcgacttgcggcaaaggatcatggtcatcaaagccaaagggatggagcctatagaggtgcctcttgaggaaaatagtgaacggactcagattcgccaaagcagggtctgtgctgacagagtaagtacttatgattgtggagaaaaaatttcaagctggttgtcaacattttttggccgtccttgtcatttgatcaaacaaagttcaaactctcaaaggaatgcaaagaagaaacatggaaaagatcaacttcctggtacaatggccaccctttctctggtgaatgaggcacagtatctgctgatcaacacatccagtattttggaacttcaccggcaactaaacaccagtgatgagaatggaaaggaggaattattctcactgaaggatctcagcttgcgttttcgtgccaatattattatcaatggaaaaagggcttttgaagaagagaaatgggatgagatttcaattggctctttgcgtttccaggttttggggccttgtcacagatgccagatgatttgcatcgaccagcaaactgggcaacgaaaccagcatgttttccaaaaactttctgagagtcgtgaaacaaaggtgaactttggcatgtacctgatgcatgcatcattggatttatcctccccatgtttcctgtctgtaggatctcaggtgctccctgtgttgaaagagaatgtggaaggtcatgatttacctgcatctgagaaacaccaggatgttacctcctaaaaaaaatttttagcatacattaaagtttctcttttaaaaaaaaaaaaaaaaaa

SEQ ID NO: 25853 - DNA, 3593 bp, Homo Sapiens
ctcggccccgggctgccgcgccagcccgtctccgcggcgggggaccgggctgccttggcccctcagcgctcgcgtcttttccggcagttggaacgcttcctgttgtcctcacccgtaaccgcctgttgccccctgtctcagagtccctcacgcgtcccctcccgtctttggctcgttggctgccgccgccggggcttcgccagccttcaagtcgagactactggccgaaggggcgtctgcggctctccgccgtccccagccctgcctctccctgggctctgcagccatggcaatgacaggctcaacaccttgctcatccatgagtaaccacacaaaggaaagggtgacaatgaccaaagtgacactggagaatttttatagcaaccttatcgctcaacatgaagaacgagaaatgagacaaaagaagttagaaaaggtgatggaagaagaaggcctaaaagatgaggagaaacgactccggagatcagcacatgctcggaaggaaacagagtttcttcgtttgaagagaacaagacttggattggaagattttgagtccttaaaagtaataggcagaggagcatttggtgaggtacggcttgttcagaagaaagatacgggacatgtgtatgcaatgaaaatactccgtaaagcagatatgcttgaaaaagagcaggttggccacattcgtgcggagcgtgacattctagtggaggcagacagtttgtgggttgtgaaaatgttctatagttttcaggataagctaaacctctacctaatcatggagttcctgcctggaggggacatgatgaccttgttgatgaaaaaagacactctgacagaagaggagactcagttttatatagcagaaacagtattagccatagactctattcaccaacttggattcatccacagagacatcaaaccagacaaccttcttttggacagcaagggccatgtgaaactttctgactttggtctttgcacaggactgaaaaaagcacataggacagaattttataggaatctgaaccacagcctccccagtgatttcactttccagaacatgaattccaaaaggaaagcagaaacctggaaaagaaatagacgtcagctagccttctccacagtaggcactcctgactacattgctcctgaggtgttcatgcagaccgggtacaacaagctctgtgattggtggtcgcttggggtgatcatgtatgagatgctcatcggctacccacctttctgttctgagacccctcaagagacatataagaaggtgatgaactggaaagaaactttgacttttcctccagaagttcccatctctgagaaagccaaggatctaattttgaggttctgctgtgaatgggaacatagaattggagctcctggagttgaggaaataaaaagtaactctttttttgaaggcgttgactgggaacatatcagagagagacctgctgcaatatctattgaaatcaaaagcattgatgatacctcaaacttcgatgagtttccagaatctgatattcttaagccaacagtggccacaagtaatcatcctgagactgactacaagaacaaagactgggtcttcatcaattacacgtacaagcgctttgagggcctgactgcaaggggggcaataccttcctacatgaaagcagcaaaatagtactcttgccacggaatcctatgtggagcagagttctttgtataacatcatgcttttcctctcacactcttgaagagcttccaagaagttgatggaacccaccaatatgtcatagtaaagtctcctgaaatgtggtagtaagaggattttcttccataatgcatctgaaaaactgtaaacaaagacaaccatttctactacgtcggccataaacagctatcctgctttggaagagaagcatcatgagccaatttgataggtgttttaaaaataacttgagttttcctaagttcatcagaatgaaggggaaaaacagccatcatccaacattattgagattgtcgtgtatagtcatcgaatatcagccagttcctgtaattttgtgacacgctctctgccaagcccaccaagtatttcctttatagctaaaagttccatagtactaaggaaataaagcaataaagacagtctcagcagccaggattctggctgaaggaaatgatccgccaccctgagggtggtgatggtagtttctacccatacctcagcctcaggcgagtggcttatagcctccattcatggtgcactttatttatggtactaagataaagactgtcaatccattgatttatctcctcctgtcccccatctaaaatacccatgctgcttttctgagtgttgatgggggttaccagcttgatccactgttgctcttagaaggcccagaaagtctttgggcattgccaagaaatcccggattatgtggaaaaccctcactttctcttcacggctgtaccagaaaatccctaagacagatcttgccgtggactagcaatacctgcaagtgctgccaatgggaactcaatttattcctgggaacctaacgaggagagcccaggcctaggcaggaggcctggaaccctcttggctaaggtgctgttcctgttcctgcaaggtctccagaacccctttggaaatggtgaaggaaccagcccaatagaagtacagagccagctgacaagtccttgtaaagctcactcctcagtccttggcacagccatgttttgtcttctctcttggtatttcttctctcccaactttagccattttgccttggaatcatgattacaattttttcctttgcagatgccttcctgggggatactcctccccaccctaaagggtcgcctgcaacttaggcggattgggtctctctgctgtggcgttctctcttgagagaccctctgaattttagcacaaagtgccttctgtttcacagctgccaccacctttagaggaatttcgtcagaaaaatgtggaggctccatattaatgcattattttttaaaaagttttgataactcttaaagcatcatttgcacctatgtgggaactttgcctgttgcaaagtattgtggccgagctgcagctgggagcctgctttctgccagtcttgaggttctgaagatcagctttgaaaggaaagtatgtcctagcttagccattcagaagagaaaaatggaatatcagagttacagttgtcagtgaaactactttggattttaacctcttagaggaagaaaaaaggttagggaagtgtcaactctggatgaaggtgatgtgtttgcctctcagtctttcattcatagcctgctagtgaaaaggaagtaaatgagattcttttgtgtgactttgtagtctctttgtattaccaaatagttggggtgttgactcctgtgtgttttgcaagaatgtgtggtaagcctgggtaaagagaaggaactgcggtgttgggagagtctttgtgttggggagtggcaggggatgatttgtttcaggggaaaatgcccacattttaacttttaaacttctgaataaactgtgtaaaaacaaaaaaaaaaaaaaaaaa

SEQ ID NO: 25854 - DNA, 3983 bp, Homo Sapiens
atgctctcagctctcccgccgcgggatggtgccttgagtgaatgacccccttggagaacattcttccgcatccctcgcctcaagccagcctcagacagaaaactgaagattcagcagatccagtgcttcctgctcctcttctgcccaggaacacgcttgccttccccaaggcttccagaagctctgaggcaggaggcaccaagttctacctcatgtttggaggatcttgctagctatggccctcgtactcggctccctgttgctgctggggctgtgcgggaactccttttcaggagggcagccttcatccacagatgctcctaaggcttggaattatgaattgcctgcaacaaattatgagacccaagactcccataaagctggacccattggcattctctttgaactagtgcatatctttctctatgtggtacagccgcgtgatttcccagaagatactttgagaaaattcttacagaaggcatatgaatccaaaattgattatgacaagattgtctactatgaagcagggattattctatgctgtgtcctggggctgctgtttattattctgatgcctctggtggggtatttcttttgtatgtgtcgttgctgtaacaaatgtggtggagaaatgcaccagcgacagaaggaaaatgggcccttcctgaggaaatgctttgcaatctccctgttggtgatttgtataataataagcattggcatcttctatggttttgtggcaaatcaccaggtaagaacccggatcaaaaggagtcggaaactggcagatagcaatttcaaggacttgcgaactctcttgaatgaaactccagagcaaatcaaatatatattggcccagtacaacactaccaaggacaaggcgttcacagatctgaacagtatcaattcagtgctaggaggcggaattcttgaccgactgagacccaacatcatccctgttcttgatgagattaagtccatggcaacagcgatcaaggagaccaaagaggcgttggagaacatgaacagcaccttgaagagcttgcaccaacaaagtacacagcttagcagcagtctgaccagcgtgaaaactagcctgcggtcatctctcaatgaccctctgtgcttggtgcatccatcaagtgaaacctgcaacagcatcagattgtctctaagccagctgaatagcaaccctgaactgaggcagcttccacccgtggatgcagaacttgacaacgttaataacgttcttaggacagatttggatggcctggtccaacagggctatcaatcccttaatgatatacctgacagagtacaacgccaaaccacgactgtcgtagcaggtatcaaaagggtcttgaattccattggttcagatatcgacaatgtaactcagcgtcttcctattcaggatatactctcagcattctctgtttatgttaataacactgaaagttacatccacagaaatttacctacattggaagagtatgattcatactggtggctgggtggcctggtcatctgctctctgctgaccctcatcgtgattttttactacctgggcttactgtgtggcgtgtgcggctatgacaggcatgccaccccgaccacccgaggctgtgtctccaacaccggaggcgtcttcctcatggttggagttggattaagtttcctcttttgctggatattgatgatcattgtggttcttacctttgtctttggtgcaaatgtggaaaaactgatctgtgaaccttacacgagcaaggaattattccgggttttggatacaccctacttactaaatgaagactgggaatactatctctctgggaagctatttaataaatcaaaaatgaagctcacttttgaacaagtttacagtgactgcaaaaaaaatagaggcacttacggcactcttcacctgcagaacagcttcaatatcagtgaacatctcaacattaatgagcatactggaagcataagcagtgaattggaaagtctgaaggtaaatcttaatatctttctgttgggtgcagcaggaagaaaaaaccttcaggattttgctgcttgtggaatagacagaatgaattatgacagctacttggctcagactggtaaatcccccgcaggagtgaatcttttatcatttgcatatgatctagaagcaaaagcaaacagtttgcccccaggaaatttgaggaactccctgaaaagagatgcacaaactattaaaacaattcaccagcaacgagtccttcctatagaacaatcactgagcactctataccaaagcgtcaagatacttcaacgcacagggaatggattgttggagagagtaactaggattctagcttctctggattttgctcagaacttcatcacaaacaatacttcctctgttattattgaggaaactaagaagtatgggagaacaataataggatattttgaacattatctgcagtggatcgagttctctatcagtgagaaagtggcatcgtgcaaacctgtggccaccgctctagatactgctgttgatgtctttctgtgtagctacattatcgaccccttgaatttgttttggtttggcataggaaaagctactgtatttttacttccggctctaatttttgcggtaaaactggctaagtactatcgtcgaatggattcggaggacgtgtacgatgatgttgaaactatacccatgaaaaatatggaaaatggtaataatggttatcataaagatcatgtatatggtattcacaatcctgttatgacaagcccatcacaacattgatagctgatgttgaaactgcttgagcatcaggatactcaaagtggaaaggatcacagatttttggtagtttctgggtctacaaggactttccaaatccaggagcaacgccagtggcaacgtagtgactcaggcgggcaccaaggcaacggcaccattggtctctgggtagtgctttaagaatgaacacaatcacgttatagtccatggtccatcactattcaaggatgactccctcccttcctgtctatttttgttttttacttttttacactgagtttctatttagacactacaacatatggggtgtttgttcccattggatgcatttctatcaaaactctatcaaatgtgatggctagattctaacatattgccatgtgtggagtgtgctgaacacacaccagtttacaggaaagatgcattttgtgtacagtaaacggtgtatataccttttgttaccacagagttttttaaacaaatgagtattataggactttcttctaaatgagctaaataagtcaccattgacttcttggtgctgttgaaaataatccattttcactaaaagtgtgtgaaacctacagcatattcttcacgcagagattttcatctattatactttatcaaagattggccatgttccacttggaaatggcatgcaaaagccatcatagagaaacctgcgtaactccatctgacaaattcaaaagagagagagagatcttgagagagaaatgctgttcgttcaaaagtggagttgttttaacagatgccaattacggtgtacagtttaacagagttttctgttgcattaggataaacattaattggagtgcagctaacatgagtatcatcagactagtatcaagtgttctaaaatgaaatatgagaagatcctgtcacaattcttagatctggtgtccagcatggatgaaacctttgagtttggtccctaaatttgcatgaaagcacaaggtaaatattcatttgcttcaggagtttcatgttggatctgtcattatcaaaagtgatcagcaatgaagaactggtcggacaaaatttaacgttgatgtaatggaattccagatgtaggcattccccccaggtcttttcatgtgcagattgcagttctgattcatttgaataaaaaggaacttggaaaaaaaaaaaaaaaaaa

SEQ ID NO: 25855 - DNA, 2650 bp, Homo Sapiens
ggcgagggcgcgcggctggtgtccgccccgcccgaaaggtgagccagccatgagagggtatcttgtggccatattcctgagtgctgtcttcctctattatgtactgcattgcatattatggggaacgaatgtctattgggtggcacctgtggaaatgaaacggagaaataagatccagccttgtttatcaaagccagcttttgcctctctgctgagtcagagctctgcatatattttaagaaaaggcattgaggaactcaatcaaaccagtattcttttcacacaggtttcatcagtttcacccttttctgtgtgcggctgattttagaaagattgcttccttgtatggtagcgataagtttgatttgccctatgggatgagaacatcagcggaatattttcgacttgctctttcaaaactgcagagttgtgatctctttgatgagtttgacaacataccctgtaaaaagtgtgtggtggttggtaatggaggagttttgaagaataagacattaggagaaaaaatcgactcctatgatgtaataataagaatgaataatggtcctgttttaggacatgaagaagaagttgggagaaggacaaccttccgactttttccagaatctgttttttcagatcctattcacaatgaccctaatacgacagtgattctcactgcttttaagccacatgatttaaggtggctgttggaattgttgatgggtgacaaaataaacactaatggtttttggaagaaaccagccttaaacctgatttataaaccttatcaaatccgaatattagatcctttcattatcagaacagcagcttatgaactgcttcattttccaaaagtgtttcccaaaaatcagaaacctaaacacccaacaacaggaattattgccatcacattggcgttttacatatgtcacgaagttcacctagctggttttaaatacaacttttctgacctcaagagtcctttgcactactatgggaatgccaccatgtctttgatgaataagaacgcgtatcacaatgtgactgcagagcagctctttttgaaggacattatagaaaaaaacctcgtaatcaacttgactcaagattgactctacagactcagaagatgatgctaacagtgttagttttatttttgtactgcaatttttagtttaaaatatgttggatgcactcgtcaaataattatgtatactgtctgttgctgcctggtgattcataaccaccagcttaatttctgtgaatactgtatatttaacttatgaaaaccaagaaatgtaaagataacaggaaaataagttttgattgcaatgtttttaaaataagctagttttctgaggtgttttcacacgtctttttatagttacttcatcttagatttttgaagggatatgacttcctactaaggatttagtttaccacaacaattctgactacaataagacattttgaggaggatatttggctactgtaaacatggctggtggaaaatcacgattgtggcttgatgtggcaagccgaaaccacttggctctggaaatctaagttcatactggtttaattaagctctctcctgacaacccccagaattaaatgaaccatgattgtgaagagtaatttggtacaatgaaggcagtgtttgtttttaagttaaaggaaatgggctaaacataaagttcttattagataagtaaataactaaagaaagaatacaattactaaactctgatggctttgtattattttaaagaaatgaagtttaactaactttatacaatgaagctaagctaggcaagctcaagaaggaaaaaaaaatcttgaacattatttttttttgcctgacttacttattcattaaattttgaaggttttccacttgaagtaaattaggaaaggtaaagaagataacagaacaagtaaacacttaagaaaagtcaagctgaggccgggcagggtggctcacacctgtaatcctaacaaacactttgggaggccgagggaggcagctggattgcctgaactcaggagttcaagaccagcctggccaacatggtgaaacctcatctctactaaaatacaaaataattagctgggcgtggtggtatgcgctgtagtcccaggtactcgggaggctgaggcacgagaattgcttgagcccgggaggcagaggttgcagtgagccaagatcgcgccactgcacttcagcctgggtgacagagtgaggctgtcttctaaaaaatataaaaagtgaagttgggatttttggatttaaatggtacaaaaagaatatctcattttcccatgattaaagctaatcttcagatggaaagcttgcctggctacctagggtgcaccagagaatctgatccaatgcaagccagtcaatcctacaaatgtggtgagctagtcttccttcctatattttaataaatgtaacccaaggccatctggaggtaggggaatgagaggtgaagaaacagaaaaatagaggttataaggatggaactaaaagttgtcagaagaggtatgagctgaagaaagaattactctcttttgaccaataaataccattgggaaacactggaaaaaaaaaaaaaaaaaaaaaaaaaaaaaaaaaaaaaaaaaaaaa

SEQ ID NO: 25856 - DNA, 4826 bp, Homo Sapiens
gagaagagtcacacagcatgaatcagacaatgaaaatgaaatacaaattcaaaataagttaaaaaaagactttcctaaacaatttgatcaggtttctgtctttaaatcaatacggaaagattttagtctagtaagagaaaacagcaaagagacattttctggaaaggagaaaaatagagacctaacttatgaacgtgaaaaacggttggataaaccccataaagatttggattcaaggttgaaaagcagtttttttgataaagcagctaatcaagttgaagaaacattacatacccatttaccacaaaccccagaaacaaactttagggattccagctacccatttgccaataaagaatccattggttcggaactggggaattcctttgcatcaaatattagaattaaagaagaacctttggatgatgagtatgacaaagcaatggcaccacagcagggactactagacaaaataaaagatgaacctgacaatgctcaagagtatagtcatggccaacagcaaaaaactcaagagggggaactgaaaattagtgctgtgttttcagtcagtggcagccctcttgctccacagttgactactggctttcagccctcactggcgtcatctggcatgaataaaatgcttccttcagttccagccacagctgttcgagtttcctgttctggttgtaaaaaaatcctccagaaggggcaaactgcttatcagaggaaagggtctactcagctattctgctccacactgtgcctcactggatatacagttccacctgcccgcccaccgcctcctctcaccaagaaaacttgttcaagttgctcaaaagacattttaaatccaaaggatgtgatcagtgcccagtttgaaaacaccaccactagtaaagatttttgcagtcagtcatgtttgtcaacatatgaactgaaaaaaaaacctattgttaccataaatacaaatagtatttcaaccaaatgcagcatgtgtcagaagaatgctgttattcgacatgaagttaattaccagaatgtggtccataaactttgcagtgatgcctgcttctctaagtttcgttctgctaacaacctcaccatgaactgttgtgagaactgtgggggttactgttacagtgggtcgggacaatgccacatgcttcagatagagggacagtctaagaagttttgtagttcatcgtgtatcacggcatacaagcagaaatcagccaaaattacaccgtgtgcgctttgcaaatcattgagatcctcagcagaaatgattgaaaataccaatagcttggggaagacagagcttttctgttctgttaattgcttatctgcttacagagttaaaatggttacttctgcaggtgtacaagttcagtgtaacagttgtaaaacctcagcaattcctcagtatcacctagccatgtcagatggaagtatacgcaacttctgcagctacagctgtgtggtagctttccagaatttattcaacaaaccaactggaatgaattcttcagtagtgcccttgtctcagggccaagtaattgtaagcatccccacaggttccacagtgtcagccggaggaggtagcacatctgctgtttctcccacctccatcagtagctctgctgcagctggtctccagcgtctcgctgcccagtcccagcatgttgggtttgcacgaagtgttgtgaaactcaaatgtcaacactgtaaccgtctttttgccacaaaaccagaacttcttgactataagggcaaaatgtttcagttctgtggcaagaattgttctgatgaatataagaaaataaataatgtaatggcaatgtgtgaatattgtaaaattgagaaaattgtaaaggagactgttcggttctcaggtgctgacaagtcattctgtagtgaaggttgcaaattgctttataaacatgacttggcaaaacgctggggaaatcactgtaaaatgtgcagttattgtttacagacatctcccaaattggtacagaataatttaggagggaaagtggaagagttctgttgtgaagaatgcatgtccaaatatacagttttgttctatcagatggccaaatgtgatgcttgtaagcgacagggtaaactcagtgagtccttgaaatggcgaggggaaatgaaacatttctgtaacctgctttgtatcttgatgttctgtaatcagcaaagtgtatgtgacccgccttcacaaaataatgcagcaaatatttccatggttcaagctgcttcagcaggacccccatctctgagaaaagattcgactccagttatagccaatgtagtatcattggcaagtgcccctgctgctcagcctacagtgaattctaacagtgtcttacaaggtgcagttccaacagtaacagcgaaaatcatcggtgatgcaagtactcaaacagatgccctgaaactgccaccttcccaacctccaaggcttttgaagaacaaagctttattatgcaaacccatcacacagactaaagccacctcttgcaaaccacatacccaaaacaaagaatgccagacagaagacactccaagtcagccccagattattgtggtgccagttcccgtaccagtgtttgttcccatacctcttcacctttatactcaatatgctccagtcccatttggaattccagttccaatgcctgtccctatgcttattccatcttcaatggatagtgaagataaagtcacagagagtattgaagacattaaagaaaagcttcccacacatccatttgaagctgatctccttgagatggcagaaatgattgcagaagatgaagagaagaagactctatctcagggagagtcccaaacttctgaacacgaactctttctagacaccaagatatttgaaaaagaccaaggaagtacatacagtggtgatcttgaatcagaggcagtatctactccacatagctgggaggaagagctgaatcactatgccttaaagtcaaatgctgtgcaagaggctgattcagaattgaagcagttctcaaaaggggaaactgaacaggacctggaagcagattttccatcagactcctttgacccacttaataaaggacagggaatccaggcacgttcccgaacaagacgacgacacagagatggcttcccccaacccagacgaagaggacggaagaagtctatagtggctgtggagcccaggagtcttattcaaggagcctttcaaggctgctcagtgtccgggatgacactgaaatacatgtatggggtaaatgcttggaagaactgggttcagtggaaaaatgccaaggaagagcagggggatctaaaatgtggaggggttgaacaggcctcatctagcccacgttctgaccccttaggaagtactcaagaccatgcactctctcaagaatcctcagagccaggctgtagagtccgctctatcaagctgaaggaagacattctgtcctgcacttttgctgagttgagtttgggcttatgccagtttatccaagaggtgcggagaccaaatggtgaaaaatatgatccagacagtatcttatacttgtgccttggaattcaacagtacctgtttgaaaatggtagaatagataacatttttactgagccctattccagatttatgattgaacttaccaaactcttgaaaatatgggaacctacaatacttcctaatggttacatgttctctcgcattgaggaagagcatttgtgggagtgcaaacagctgggcgcttactcaccaatcgtccttttaaacaccctccttttcttcaataccaaatacttccaactaaagaatgttactgagcacttgaagctttcctttgcccatgtgatgagacggaccaggactctgaagtacagtaccaagatgacatatctgaggttcttcccacctttacagaagcaggagtcagaaccagataaactgactgttggcaagaggaaacgaaatgaagatgatgaggttccagtgggggtggagatggcagagaatactgacaatccactaagatgcccagtccgactttatgagttttacctgtcaaaatgttctgaaagtgtgaagcaaaggaatgatgtgttttaccttcaacctgagcgctcctgtgtcccgaatagccccatgtggtactccacattcccgatagaccctggaaccctggacaccatgttaacacgtattctcatggtgagggaggtacatgaagaacttgccaaagccaaatctgaagactctgatgttgaattatcagattaaaacggaagtgaggttcttattttcatacatattggtatgcaccaaactgtgaatgcatccagctgttggaaaatgatgtataagtctaagtcctcttgacttgaccataagatcatggaaaacagatgacttgtgaaccccacagtgtggatgtgcaaatgaaaattgaaggaaagaatatgaactgagaaatgttctttggcagtgatatagttcttagacatcttcagaatgactaatttctccgagtggtgcataatcttattttgtttgggagtaacaaatcgtggaatatttttaaggaaaactgttgtataaaactttaccatagtaaccttagaccttagagaggtagctttggagtgaaactttggctgcaataggctactttggcaagccctccgtaaaagtcagaggagagatcagtacagagctaagagtgacatcaaatgaggactgtgggacccagatttgaagacccaataaaaatactcaactttttaaaaaaaaaaaaaaaaaa

SEQ ID NO: 25857 - DNA, 2891 bp, Homo Sapiens
gctcctccccgctggcggggggagaaagggcaggaggccttccgtcccggctataaagggccccggaccgccgcggctcgcctcggcttgcctcgacacgcctaggcgccctccggctccgccctagccgccgcgtcccagctagagctccagcgcccgctcaggccccactcgaccctctcgggcctcggctacttggactgcggcggaatatggcggctccgatgactcccgcggctcggcccgaggactacgaggcggcgctcaatgccgccctggctgacgtgcccgaactggccagactcctggagatcgacccgtacttgaagccctacgccgtggacttccagcgcaggtataagcagtttagccaaattttgaagaacattggagaaaatgaaggtggtattgataagttttccagaggctatgaatcatttggcgtccacagatgtgctgatggtggtttatactgcaaagaatgggccccgggagcagaaggagtttttcttactggagattttaatggttggaatccattttcgtacccatacaaaaaactggattatggaaaatgggagctgtatatcccaccaaagcagaataaatctgtactcgtgcctcatggatccaaattaaaggtagttattactagtaaaagcggagagatcttgtatcgtatttcaccgtgggcaaagtatgtggttcgtgaaggtgataatgtgaattatgattggatacactgggatccagaacactcatatgagtttaagcattccagaccaaagaagccacggagtctaagaatttatgaatctcatgtgggaatttcttcccatgaaggaaaagtagcttcttataaacattttacatgcaatgtactaccaagaatcaaaggccttggatacaactgcattcagttgatggcaatcatggagcatgcttactatgccagctttggttaccaaatcacaagcttctttgcagcttccagccgttatggatcacctgaagagctacaagaactggtagacacagctcattccatgggtatcatagtcctcttagatgtggtacacagccatgcttcaaaaaattcagcagatggattgaatatgtttgatgggacagattcctgttattttcattctggacctagagggactcatgatctttgggatagcagattgtttgcctactccagctgggaagttttaagattccttctgtcaaacataagatggtggttggaagaatatcgctttgatggatttcgttttgatggtgttacgtccatgctttatcatcaccatggagtgggtcaaggtttctcaggtgattacagtgaatatttcggactacaagtagatgaagatgccttgacttacctcatgttggcaaatcatttggttcacacgctgtgtcccgattctataacaatagctgaggatgtatcaggaatgccagctctgtgctctccaatttcccagggagggggtggttttgactatcgactagccatggcaattccagataagtggattcagctacttaaagagtttaaagatgaagactggaacatgggcgatatagtatacacgctcacaaacaggcgctaccttgaaaagtgcattgcttatgcagagagccatgatcaggcattggttggggataagtcgctggcattttggttgatggatgccgaaatgtatacaaacatgagtgtcctgactccttttactccagttattgatcgtggaatacagcttcataaaatgattcgactcattacgcatgggcttggtggagaaggctatctcaatttcatgggtaatgaatttgggcatcctgaatggttagacttcccaagaaaaggaaataatgagagttaccattatgccaggcggcagtttcatttaactgacgacgaccttcttcgctacaagttcctaaataattttgacagggatatgaatagattggaagaaagatatggttggcttgcagctccacaggcctacgtgagtgaaaaacatgaaggcaataagatcattgcttttgaaagagcaggtcttcttttcattttcaacttccatccaagcaagagctacactgactaccgagttggaacagcattgccagggaaattcaaaattgtgctagattcagatgcagcggaatatggagggcatcagagactggaccacagcactgactttttttctgaggcttttgaacataatgggcgtccctattctcttttggtgtacattccaagcagagtggccctcatccttcagaatgtggatctgccgaattgaagaggcctgatttcagctccaccagatgcagatttgtgttttgttttcttgttatcactgtcacacagcttataacatgtatgcttttcagaatacagttgtctagccaagccatcaagtgtctgaaattcaatattggtttatgcaaatacagcaaacttttatttaagtagataggagaatatgtttaaaatattaggaatcctagaccatattttcaagtcatcttagcagctaggattctcaaatggaagtgttatatataatatgttaaaaacattttgctttcctggctaattatttgatccttttaaattcaaatttgaatcatttgtcatgtatgattatttctgttaaatgtacacagtatttaagatggatatttggtggctctatttgttctgatatcttttggtctaaattatgaggtaccaagattgtttctttgtttctttttttcaaattgtgtttagaaatactgtaataaatatgcagtagtgatataaagaattatatccaaggtaatataaaagccattacgtatgaactcaaaaaaaaaaaaaaaaaaaa

SEQ ID NO: 25858 - DNA, 3244 bp, Homo Sapiens
ggctgtgggtgccgctgagcaagatggagctgtctgcagtgggcgagcgggtcttcgcggccgaatccatcatcaaacggcggatccgaaagggacgcatcgagtacctggtgaaatggaaggggtgggcgatcaagtacagcacttgggagcccgaggagaacatcctggactcgcggctcattgcagccttcgaacaaaaggagagggagcgtgagctgtatgggcccaagaagaggggacccaaacccaaaactttcctcctgaaggcgcgggcccaggccgaggccctccgcatcagtgatgtgcatttctctgtcaagccgagcgccagtgcctcctcgcccaagctgcactccagcgcagccgtgcaccggctcaagaaggacatccgccgctgccaccgtatgtcccgccgtcccctgccccgcccggacccgcaggggggcagccccggactgcgcccgcccatttcgcccttctcggagacggtgcgcatcatcaaccgcaaggtgaagccgcgggagcccaagcggaaccgcatcatcctgaacctgaaggtgatcgacaagggcgctggcggcgggggcgccgggcagggggccggggcgctggcccgccccaaagtcccctcgcggaaccgcgttataggcaagagcaagaagttcagcgagagcgtcctgcgtacacagatccgccacatgaagttcggcgcctttgcgctgtacaagcctccgcccgcccccctggtagccccgtcccccggcaaggctgaggcctcagccccgggccctgggctacttctggccgcccccgccgccccctacgacgcccgcagctctggctcctccggctgcccctcgcctacaccacagtcctctgaccccgacgacacgctccccaagctcctccccgagaccgtgagcccatccgcccccagctggcgcgagccggaggtgctcgacctgtccctccctcccgagtcggcagccaccagcaagcgggcaccgcctgaggtcacagctgctgccggcccggcacctcccacggcccctgagcccgccggtgcctcctccgagcccgaggctggggactggcgccccgagatgtcaccctgctccaatgtggtcgtcaccgatgtcaccagcaacctcctgacggtcacaatcaaggaattctgcaaccctgaggatttcgagaaggtggctgctggggtagcaggcgccgctgggggcggtggcagcattggggcgagcaagtgagggggctccaccaaggaggggggcttgggggggccctcctgcccgaagtcatactcttgctcccaccccacccttgcccccagccctctctccctgtgctttgcttgtctcaaatggctcggtgttgacccagggatggggctgggtagttggggtcccagaaagccgggggtaggggccaccctggaatggggcaggggaagggcacaccccctgcccatgcatggtagcccactgggtggtttctggaaagccctagaaactagggttcctctgccccttccacatcccacctgtctctctagcttgcttcctgctctcctgtgcggcgtctgatttctcggtgctaacctggcagctgtggggcccttaggagccccccaccgagggtggacacagtccctttccttcctgcagatgcctaggcaggaggagggcttcctgcctgtttggcaaagtcccaggcagaggccaaggatgaggcctgactcggctcctccctccacatcagccagggcatcagaagttgggccagggcggggtcttccctgctcgattttggacgaggcctaagtagaccccctatgccctgccccagccctggctctttcctaaccccctcaacggtgggaggaactggcagagggtgcgcctggccacagcctccccgcatctaaaggccccttcagttcttgaccaaaggtgctacgagaacctgccgtggaaacttccagttgtgcgtctgccccactcgctgtgtttgtccgtgggttcatacatgcattgggtgctaggccccaggctgccgggtggcaccctttacagttcctttgaacaggggcattgaaggcctggactgcctctcgcctcagtaggcctggggaccaggcttgggtctggaggtttgctgtggaagtcaccaggcctcccctcctggcccaggtgtgctgggggcaccgtgccccccacccccctgccctcctcagggtggtcagcccaacctgtcggaccttcacttcacatcatggtggggaccgagatagagagggagaccccattccaagctccctcttcctcccggtgtttggggaggatgctgaagaatccattcccgagggcctcccggcttgtcccagcccctcttttgcttctgaccacggaggctttctcacagcccagcctgcctgaagcaaaggaggctcccgtgtcctgggcagcttctgtttccctctgctgcctgggagctgaggcacccgtgccagtggcagaggccacagccccagccttaggccaggccctgggagggcaggcaggcaaaggggagaccagagggtctgtgttctccaggagaatgagggtgttggtcccagaattgggaccggggccccgctggccagccctgggccacttcccgggtctccattgtgcgtgggtggcgtgttccaggcgtggctggagctggcttcctggctgtgctgccatgggcccctccctcagaagcacgttggcaggaggccgatcagaaccctagcgcctttggtcctaagaatgggaggctgccttccttcccaatctccctgccagggcccacagcgtggccctagccctcccctccccgggatgtagaacggggaccctcgcagggttggggcgggggctgatactcctcggcccctccctaccctgccctgtgtgttggctttgtggccgtccaagtgccaattggcttttcgcccaaataagggctggtatttctcctctgtccttggaggtgatttccccctgaccccctcccccaggtgagtgaccacctgggtgccagttacaggtgtttccagagaccatagaaatgtgttttcctgagagttcgtgtcattcgtgacttttttgtaaagaagttgtgttttcagaggtgattttatgacaggaaagtgaaagaattagttttgcaaaaaaacaaaaacaaaaaaaaaaaaaaaaaa

SEQ ID NO: 25859 - DNA, 2654 bp, Homo Sapiens
ctggtgtttagcaactccgaccacctgcctgctgaggggctagagccctcagcccagaccctgtgcccccggccgggctctcatgcgtggaatggtgctgtgccccttgccagcaggccaggctcaccatggtgccgcatgccatcttggcacgggggagggacgtgtgcaggcggaatggactcctcatcctgtctgtgctgtctgtcatcgtgggctgcctcctcggcttcttcttgaggacccggcgcctctcaccacaggaaattagttacttccagttccctggagagctcctgatgaggatgctgaagatgatgatcctgccactggtggtctccagcttgatgtccggacttgcctccctggatgccaagacctctagccgcctgggcgtcctcaccgtggcgtactacctgtggaccaccttcatggctgtcatcgtgggcatcttcatggtctccatcatccacccaggcagcgcggcccagaaggagaccacggagcagagtgggaagcccatcatgagctcagccgatgccctgttggacctcatccggaacatgttcccagccaacctagtagaagccacattcaaacagtaccgcaccaagaccaccccagttgtcaagtcccccaaggtggcaccagaggaggcccctcctcggcggatcctcatctacggggtccaggaggagaatggctcccatgtgcagaacttcgccctggacctgaccccgccgcccgaggtcgtttacaagtcagagccgggcaccagcgatggcatgaatgtgctgggcatcgtcttcttctctgccaccatgggcatcatgctgggccgcatgggtgacagcggggcccccctggtcagcttctgccagtgcctcaatgagtcggtcatgaagatcgtggcggtggctgtgtggtatttccccttcggcattgtgttcctcattgcgggtaagatcctggagatggacgaccccagggccgtcggcaagaagctgggcttctactcagtcaccgtggtgtgcgggctggtgctccacgggctctttatcctgcccctgctctacttcttcatcaccaagaagaatcccatcgtcttcatccgcggcatcctgcaggctctgctcatcgcgctggccacctcctccagctcagccacactgcccatcaccttcaagtgcctgctggagaacaaccacatcgaccggcgcatcgctcgcttcgtgctgcccgtgggtgccaccatcaacatggacggcactgcgctctacgaggctgtggccgccatcttcatcgcccaggtcaacaactacgagctggactttggccagatcatcaccatcagtatcacagccactgcagccagcattggggcagctggcatcccccaggccggcctcgtcaccatggtcatcgtgctcacctccgtgggactgcccaccgatgacatcaccctcatcattgccgttgactgggctctggaccgtttccgcaccatgattaacgtgctgggtgatgcgctggcagcggggatcatggcccatatatgtcggaaggattttgcccgggacacaggcaccgagaaactgctgccctgcgagaccaagccagtgagcctccaggagatcgtggcagcccagcagaatggctgtgtgaagagtgtagccgaggcctccgagctcaccctgggccccacctgcccccaccacgtccccgttcaagtggagcgggatgaggagctgcccgctgcgagtctgaaccactgcaccatccagatcagcgagctggagaccaatgtctgagcctgcggagctgcaggggcaggcgaggcctccaggggcagggtcctgaggcaggaactcgactctccaaccctcctgagcagccggcaggggccaggatcacacattcttctcacccttgagaggctggaattaaccccgcttgacggaaaatgtatctcagagaagggaaaggctgcatgggggagccccatccagggagtgatgggcccggcattgcctgaggccccgctgtgacagtttccccggtgtgagcccggtgagggcggcaggcaggggttatccggccccactttctggatgacagacttgaggctctgagagctgaaaacacttgtccaaggtctcacgttaaggtcaagacactaactcaaatctttcaagccccgcctctcctcttggaggacagggcagcctgcagctgtgtccaggcccaggccccaccccataacaggtggcctcagccacacagttctccccaaggggagcagcccagggccaagccccgctgccttccccaggccacagtgcgtccagtctcctgtcctgccacgtgtcttttgcaaagctccttggatgtggagacagatgtctttactagagctgaaaggcccccttgacacatccaggccaacctcccatggaataggtaggcaagccaggactccgggaaggaggtgcagccaggatgctctggtggagctgccgatggggccctggtgtcagaactccccaaaggcctgtgcgtccaagtggagtcaggttttctattcctttctgtgtttgcaaattcagtgttaactaaataaaggtattttgtttttcaaaaaaaaaaaaaaaaaa

SEQ ID NO: 25860 - DNA, 1836 bp, Homo Sapiens
gcaaagagccgaggccgggcgcgcgaccctcgtccttctgcccctggccgcacactttgcgcacatctctttttctgcatggtggatattatttttcattatccttttctgggtgctatgggtgatcattccaagaagaagcccgggacggccatgtgcgtgggctgcgggagtcagatccacgaccagtttatcctgcgggtgtcgcccgacctcgagtggcacgcggcctgcctcaagtgtgccgagtgcagccagtacctggacgagacgtgcacgtgcttcgtgagagacgggaagacctactgcaagcgggactacgtcaggctgttcggcatcaagtgcgccaagtgccaggtgggcttcagcagcagcgacctggtgatgagggcgcgggacagcgtgtaccacatcgagtgcttccgctgctccgtgtgcagccgccagctgctgcctggggacgagttctcgctgcgggagcacgagctgctctgccgcgccgaccacggcctcctgctcgagcgcgccgcggccggcagcccgcgcagccccggcccgcttcccggcgcccgcggcctgcatctgcccgacgctgggtcgggccggcagcccgcgttgcgcccgcacgtgcacaagcagacggagaagacgacccgcgtgcggactgtgctgaacgagaagcagctgcacactctgcggacctgctacgccgccaacccgcggcccgacgctctcatgaaggagcagctggtggagatgaccggcctgagcccgcgggtcatccgcgtctggttccagaacaagcgctgcaaggacaagaagaaatccattctcatgaagcagctgcagcagcagcagcacagcgacaagacgagccttcagggactgactgggacgcccctggtggcgggcagtcccatccgccatgagaacgccgtgcagggcagcgcagtggaggtgcagacgtaccagccgccgtggaaggcgctcagcgagtttgccctccagagcgacctggaccaacccgccttccaacagctggtctccttctccgagtccggctccctaggcaactcctccggcagcgacgtgacctccctgtcctcgcagctcccggacacccccaacagtatggtgccgagtcccgtggagacgtgagggggacccctccctgccagcccgcggacctcgcatgctccctgcatgagactcacccatgctcaggccattccagttccgaaagctctctcgccttcgtaattattctattgttatttatgagagagtaccgagagacacggtctggacagcccaaggcgccaggatgcaacctgctttcaccagactgcagacccctgctccgaggactcttagtttttcaaaaccagaatctgggacttaccagggttagctctgccctctcctctcctctctacgtggccgccgctctgtctctccacgccccacctgtgtccccatctcggccggcccggagctcgcccacgcggacccccgccctgccccagctcagcgctccctggcggcttcgcccgggctcctagcggggaaaaggaaggggataactcagaggaacagacactcaaactcccaaagcgcatgattgctgggaaacagtagaaaccagacttgccttgaaagtgtttaagttattcgacggaggacagagtatgtgagcctttgccgaacaaacaaacgtaagttattgttatttattgtgagaacagccagttcatagtgggacttgtattttgatcttaataaaaaataataacccgggaaaaaaaaaaaaaaaaaaaaaaaaaaaaaaaaaaaaaa

SEQ ID NO: 25861 - DNA, 2664 bp, Homo Sapiens
gactccggccggttgccggccccaggcggtgcttctccccaccaccgcccagctcagctcagcccagcccagcccactctgcccttagaggcccttctccccaaagacgcactccagaagtctcgccctcgtgcggctgaggagcctgggatcccagacctgaacaagtgaaacccccgcccctgaagaatgggtaagacgttttcccagctgggctcttggcgggaggatgagaacaagtcaatcctgtcctccaaaccagccattggcagcaaggctgtcaactactccagcaccggtagcagcaagtctttttgttcctgtgtgccttgtgaaggaactgctgatgccagcttcgtgacttgtcccacctgccagggcagtggcaagattccccaagagctggagaagcagttggtggctctcattccctatggggaccagaggctgaagcccaagcacacgaagctctttgtgttcctggccgtgctcatctgcctggtgacctcctccttcatcgtctttttcctgtttccccggtccgtcattgtgcagcctgcaggcctcaactcctccacagtggcctttgatgaggctgatatctacctcaacataacgaatatcttaaacatctccaatggcaactactaccccattatggtgacacagctgaccctcgaggttctgcacctgtccctcgtggtggggcaggtttccaacaaccttctcctacacattggccctttggccagtgaacagatgttttacgcagtagctaccaagatacgggatgaaaacacatacaaaatctgtacctggctggaaatcaaagtccaccatgtgcttttgcacatccagggcaccctgacctgttcatacctgagccattcagagcagctggtctttcagagctatgaatatgtggactgccgaggaaacgcatctgtgccccaccagctgacccctcacccaccatgacctgtctgctgtccctgtactccaggcacctgcaaccctggtctatatctcccacaactccctggtgactaaggaaggactacagaggctttgccaaaggagaagccctgcctcatcacacccttacctcccaccccctcagcacaggaagcttgctttgaagttaacttcatacacacacactcatatcctccagtttcccccagattctttcaggggctgccatcagattctgcccttggttagttttttggtttttttttggtagagacagagtctcactgttggtccaggttggttttgaactcctgggctcaagcgatcctcccttcttggcctcccaaagcacttggattacagatgtgagcctgtgcctggctggtctttcttgaggaaaatctgacctggcattttcttgaggcaccttagattccctggagtggcacctggcctttctgtactgagcacctggtcagtctgaagggggcatttcaccccagctccatcagggctggctgtcccgtctgaatgtggagagagctgtagttttatctggcttttaaaacatggacctgccggctgggcgcagtggcttacacctgtaatcccagtactttgggaggccgaagtgggtggatcacttgagggcaggagttcgtgaccagcctggtcaacatggtgaaaccttgtctctactaaaaatacaaaaattagctgggtgtggtggcatgcgcctgtaatcccagctactcgggaggctgaggcagcagaatcacttgaaaccggaaggcagaggttgcagtgagccaagatcgtgcaactgcactccagcctgggcaaaagagcaaaactttgtctcaaaaaaagactcttttcaagttttctaccctctgataagaaaatttggggatatccagtgccatctccaaggactttcaggggatcatagatgcttttctgtgcctatctgctttgaccatgtgaaaaagtgatagtctgcttctctctggtaacttgtctgccacccatctgatagtaagattagccaaggccctttagccctctgtcctttctggttattgactgtccctggttcctaggaagacagagttgttctccagctaaagcgtctcctctctataaagtagttttactattcttttaatagcaggagccaaaatagtagaggaggggagagaggcacctggcactctgcgggcctgcacaggaaaaacagagccaaagacagaatcattgtataagatatttattaaaggagagcctctaagtccacatcctgagcccatgtgagtggacacaggtaggtaaaacggtgggtccagctgctgtcatctgaaagccttcagatgaagctatcagtatccagctgaaggctgctgggttctgttccaccaccaccttagcaccagggccctctctggtcccagaggcctcatctctccttgggctttgacaatgtggagcagcacatcagcagggactggtctagaccctccctttcctgtcacttagctggagctaagctccagataacccctaggttcccactggctcctagtagaaatagtttctgtactttagcagaacaggaaggatatttgttcattaaaggtggcttggtcttaaaaaaaaaaaaaccaaaaaaaaaaaaaaaaaaaaaaaaaa

SEQ ID NO: 25862 - DNA, 1166 bp, Homo Sapiens
gaccgcaaataaccctgtacaaagaggaatggagattgcctctatccacctagattcataagctggcctgaggtgatcttggcatcaaggaagggatgcacatcatcacaccatcagcttcagagaatggcagccatttatttgtcccgtgggtttttttccagggaaccaatctgcccttttgaagaaaagacaaaggtagaaaggatggtggaggactacctggcaagtggttatcaggattcagtgacgtttgatgatgtggctgtggacttcaccccagaggagtgggctttactggacacaactgagaaatacctctacagagatgtgatgctggagaactacatgaacctggcctctgtggaatgggaaatacaacctagaaccaaacggtcatcacttcagcagggttttttgaagaatcaaatattcagtgggatacaaatgacaagaggctacagtggatggaaactctgtgactgtaagaattgtggagaggtcttcagggaacagttttgccttaagacacacatgagagttcagaatggagggaatacttctgagggtaattgttatggaaaagacaccctcagtgtgcacaaggaagcctctactggacaggaactttccaaatttaatccatgtggaaaagtctttactctaactccaggtcttgctgtacatcttgaagttctcaatgcaagacaaccctacaaatgtaaggaatgtggaaaaggctttaagtattttgcaagccttgataatcatatgggaatccacactgatgagaaactctgtgaatttcaggaatatgggagagctgtcacagcttcttcacacctaaagcagtgtgtagcagttcatacaggaaagaaatccaaaaagactaagaaatgtgggaaatccttcactaatttttctcaactttatgcacctgtgaaaactcataaaggagagaagtcctttgaatgtaaagaatgtggaagatcctttagaaattcctcatgccttaatgatcacattcaaattcacactggaataaaaccacacaagtgtacatactgtgggaaagccttcactagatcaactcaacttactgaacatgtaagaactcacactggaataaaaccctatgaatgtaaaaaaaaaaaaaaaaaaaaaaa

SEQ ID NO: 25863 - DNA, 4594 bp, Homo Sapiens
gctcgatctaggttctgcggcacgggatggcggaggcgcctcctgtctcaggtacttttaaattcaatacagatgctgctgaattcattcctcaggagaaaaaaaattctggtctaaattgtgggactcaaaggagactagactctaataggattggtagaagaaattacagttcaccacctccctgtcacctttccaggcaggtcccttatgatgaaatctctgctgttcatcagcatagttatcatccgtcaggaagcaaacctaagagtcagcagacgtctttccagtcctctccttgtaataaatcgcccaagagccatggccttcagaatcaaccttggcagaaattgaggaatgagaagcaccatatcagagtcaagaaagcacagagtcttgctgagcagacctcagatacagctggattagagagctcgaccagatcagagagtgggacagacctcagagagcatagtccttctgagagtgagaaggaagttgtgggtgcagatcccaggggagcaaaacccaaaaaagcaacacagtttgtatacagctatggtagaggaccaaaagtcaaggggaaactcaaatgtgaatggagtaaccgaacaactccaaaaccggaggatgctggacccgaaagtaccaaacctgtgggggttttccaccctgactcttcagaggcatcctctagaaaaggagtattggatgggtatggagccagacgaaatgagcagagaagatacccacagaaaaggcctccctgggaagtggagggggccaggccacgaccaggcagaaatccaccaaaacaggagggccaccgacatacaaacgcaggacacagaaacaacatgggccccattccaaaggatgacctcaatgaaagaccagcaaaatctacctgtgacagtgagaacttggcagtcatcaacaagtcttccaggagggttgaccaagagaaatgcactgtacggaggcaggatcctcaagtagtatctcctttctcccgaggcaaacagaaccatgtgctaaagaatgtggaaacgcacacaggttctctaattgaacaactaacaacagaaaaatacgagtgcatggtgtgctgtgaattggttcgtgtcacggccccagtgtggagttgtcagagctgttaccatgtgtttcatttgaactgcataaagaaatgggcaaggtctccagcatctcaagcagatggccagagtggttggaggtgccctgcctgtcagaatgtttctgcacatgttcctaatacctacacttgtttctgtggcaaggtaaagaatcctgagtggagcagaaatgaaattccacatagctgtggtgaggtttgtagaaagaaacagcctggccaggactgcccacattcctgtaaccttctctgccatccaggaccctgcccaccctgccctgcctttatgacaaaaacatgtgaatgtggacgaaccaggcacacagttcgctgtggtcaggctgtctcagtccactgttctaacccatgtgagaatattttgaactgtggtcagcaccagtgtgctgagctgtgccatgggggtcagtgccagccttgccagatcattttgaaccaggtatgctattgcggcagcacctcccgagatgtgttatgtggaaccgatgtaggaaagtctgatggatttggggatttcagctgtttaaagatatgtggcaaggacttgaaatgcggtaaccatacatgttcgcaagtgtgccaccctcagccctgccagcaatgcccacggctcccccagctggtgcgctgttgcccctgtggccaaactcctctcagccaattgctagaacttggaagtagtagtcggaaaacatgcatggaccctgtgccttcatgtggaaaagtgtgcggcaagcctctgccttgtggttccttagatttcattcatacctgtgaaaagctctgccatgaaggagactgtggaccatgctctcgcacatcagttatttcctgcagatgctctttcagaacaaaggagcttccatgtaccagtctcaaaagtgaagatgctacatttatgtgtgacaagcggtgtaacaagaaacggttgtgtggacggcataaatgtaatgagatatgctgtgtggataaggagcacaagtgtcctttgatttgtgggaggaaactccgttgtggccttcataggtgtgaagaaccttgtcatcgtggaaactgccagacatgctggcaagccagttttgatgaattaacctgccattgtggtgcatcagtgatttaccctccagttccctgtggtactaggccccctgaatgtacccaaacctgcgctagagtccatgagtgtgaccatccagtatatcattcttgtcatagtgaggagaagtgtcccccttgcactttcctaactcagaagtggtgcatgggcaagcatgagtttcggagcaacatcccctgtcacctggttgatatctcttgcggattaccctgcagtgccacgctaccatgtgggatgcacaaatgtcagagactctgtcacaaaggggagtgtcttgtggatgagccctgcaagcagccctgcaccacccccagagctgactgtggtcacccgtgtatggcaccctgccataccagctcaccctgccctgtgactgcttgtaaagctaaggtagagctacagtgtgaatgtggacgaagaaaagagatggtgatttgctctgaagcatctagtacttatcaaagaatagctgcaatctccatggcctctaagataacagacatgcagcttggaggttcagtggagatcagcaagttaattaccaaaaaggaagttcatcaagccaggctggagtgtgatgaggagtgttcagccttggaaaggaaaaagagattagcagaggcatttcatatcagtgaggattctgatcctttcaatatacgttcttcagggtcaaaattcagtgatagtttgaaagaagatgccaggaaggacttaaagtttgtcagtgacgttgagaaggaaatggaaaccctcgtggaggccgtgaataagggaaagaatagtaagaaaagccacagcttccctcccatgaacagagaccaccgccggatcatccatgacttggcccaagtttatggcctggagagcgtgagctatgacagtgaaccgaagcgcaatgtggtggtcactgccatcagggggaagtccgtttgtcctcctaccacgctgacaggtgtgcttgaaagggaaatgcaggcacggcctccaccaccgattcctcatcacagacatcagtcagacaagaatcctgggagcagtaatttacagaaaataaccaaggagccaataattgactattttgacgtccaggactaagaagatcatgatgcacttagataaaagaatgattaggtatagtggagacttatttgccagcagataaatcatgcccgttcccctctgcctggcagaatcacagtctcacatactgtcttgtactgacacatccaaagcatgagtgtgtcagaaatcccttgtctattcctgtctgtataaagtgtttcattatgaccagatctctgattgtatggtcactaggtatgcaatcacgcattcaaagaggctctttacaccatcactgtgattgctctgagagttgagggactattgggctttatttggacaaaccaaacttttagcctgaaaccaactttatgccactaagtcatagcctcagttgtcccagttatttgtcctcctgaaaatgcctgaaacatcagacagacattgcttgctttacccaaactgatcaaaatctttaggagcacaaatgaattttttagtctgaaataccaaataatgaattggtataccatatccggaatcacacatgttatcttaaacccagccatcatacctaagtcttttgccaaaacctctcataggtatatctagctgaacttattttggcattttcaatgtgatcagttctagacctagaagggggtcaggctgctttacagaattctatttccttaagtccctggcacttctcataccacatcactgaacctgttcagtaacaatcagtttggccgtcccccatgatggtaggaaatatagagagcaagttcttctgccagggtcacactgtggtctctgaactgaccagtatatccctaactcctctttgatagagaaagagtctcaaatggacaactgtcctgtgttgctttccctaggccttcagcagcctattggctctccctgcctctgagctctggactctgtttgaatattccaagtagtatatggacagtccagggcttatgcccagcagcccactggaggcattcttcaggctcctttaaggcaggtgcattgatagttccattagtgtgacccttgcattggcacccctccagcctggaggccaggcttccagcaacttccttctgccctagagcaagccatgagccccagagcagtagcaggagacttgagaagtagagtgacaaaaacaagcacttaattaaattataaaatttaactttaaaaaaaaaaaaaaaaaaaaaaaaaaa

SEQ ID NO: 25864 - DNA, 3239 bp, Homo Sapiens
gcttggggaacgaggagcaggacgcggcctcggtggggcccgggccgaacggctgcggacacctgggcgccgaggagccgagcgccgccgtctccggcatggatcagtgcgtgacggtggagcgcgagctggagaaggtgctgcacaagttctcaggctacgggcagctgtgcgagcgcggcctggaggagctcatcgactacaccggcggcctcaagcacgagatcctgcagagccacggccaagatgctgaattatcagggacactttcacttgttttgacacagtgctgtaaaagaataaaggatactgttcaaaaattggcctccgaccacaaagacatccacagcagtgtttctcgggttggaaaagccattgataagaattttgattctgacattagcagtgtgggaatagatggctgctggcaggcagacagccaaaggcttctcaatgaagtgatggtggagcacttctttcgacaaggaatgctggatgtggctgaggagctctgtcaggaatctggtctttctgtagacccaagtcagaaggaaccatttgtggagttaaatagaatattagaggcattaaaggtcagagttctgagacctgctctggagtgggcagtgtcaaaccgggaaatgcttatagctcaaaacagctccttggaatttaagctacacagactgtattttattagcttgttaatgggtggaaccacaaatcagcgagaggcattacaatatgctaaaaattttcagccatttgccctaaatcatcaaaaagacattcaggttttgatgggaagccttgtgtacctgagacaagggattgagaactcaccatatgttcacctacttgatgcaaaccagtgggctgatatctgtgacatctttacacgggatgcttgtgccctcctggggctctccgtggagtcccctctcagtgtcagtttctcagcaggttgtgtggcgctgccagctttaattaacatcaaagccgtgattgaacagaggcagtgtactggagtttggaaccagaaagatgaattacctattgaagtggaccttggtaaaaagtgctggtatcactctatatttgcctgccccattcttcgtcagcaaacaacagataacaatccacccatgaaattggtctgtggtcatattatatcaagagatgccctgaataaaatgtttaatggtagcaaattaaaatgtccctactgtccaatggaacaaagtccaggagatgccaaacagatatttttctgaagagataactttagtttgcaatttgtaagtgaaactgaatcgtgggtgcatttcagaagagaacgttccatataatgcagctaaccaaggactcctgtgtttctataagctaatgctccagaaactttgccaacctgttagtgtacacacactgaggggagtgctcccggtgaatattatcatagggctttattatattcttggtcttcatttctgatcaagtaaatacaccagcagttgtcattcaatgcaggtttttgtacttaattatatggtgatttttttactttttaagagcagaaacggaaattgacctccccgccatgtgtttaatattcctcctgcttttacttttgtcattttcttgataatcgtaagccttgagagtgtttgtgaaaaagttttatttcctgttatgtatacataattaaatgaaaattcttcagaaaaagtttgataaattgaattgtggttatgaaactaatttgcatttttatttgcttaagaaagaaagctgtgatagattccagatatgctttttgatgttttcctctgctccagctccaagaagtcagcacacctgcattttagctctgcatgcagccccagcaggctgcgtgtttaagaatttcattgtttaactggctggtgtgagaagtcttccgttagcatagagtggaaggagtactattgtttggttgggtttttgtttgtttgttttttgtttttgcttttattgccaagaggtgcttgttttaaaagtatgtttaataaaatgaaattctaaagttagaagtgttcttaagttgatatttactctcttggtcttggtagccctattatatcattgcagacacagtgttgtgcatgtgtgtattgtatatgtgcaccagcatcaaacattgtgtatctggaaggaaagcagcatgttccagttctaaaatgcagttaccagacccatcactttaaatccttaaagttagaagctagcaaattttctgtagtgcagaacgtttattgctgtttttgtgtttgaatagtataatgtttgatgcctctcttctgcaaagcgtatcatctcattgactgtgaatctgtatattattctgatggatacagataatgatcttttctcttgtgaggtatcttcatttatgcactgtccaaaaatagccatgtgtaagagtctttctgtatgacgaactacatggaaaagacttctgtggacataattctgaccgaaacccatgaagttacttcagtataagaagaacgttacacggaaatcaccaaatattttgcaactttatttcttctgacatggagtgaacatcaataggaatactttcaaagaaaatgaaaacacagaagcaaagagaaatgtggcacttcacattttaaactacagatggacttggtttgagggagggggaatcacagatttggtgctaagttaattagaaactggcagcgttttacagtagtacaccagcctggatgttttttctaaaatgtttacctgggagagctggggtttgtttgtgaggagaaagagtactgtggaaaacctctgcttgagtaccatgtggccaggcctatgtggatggctactccgtgctgtgcggcttcaccagcggttgggattggcccagcttggagtgcttgtgtggtccaacctcagtctggccccatagtgacttttgccccatgattctgcttcactgttggaatcctctttgaagttccccctctctttgctaaagcagtgaaggaagagaacagagacaaactctttggactgtgaaagagaaggtagagaattccaggcaacagtctgaccaagggtgtaaaccagtttattatatatatatttttcctttgaattaaaacctatgagtgactacaaaaaggattagactgagccgaataaaaaaaaaaaaaaaaaaaaaaaaaaaaaaaaaaaaa

SEQ ID NO: 25865 - DNA, 2205 bp, Homo Sapiens
ccgacgcgcctggctaggagcgccgaccgcagggcctctacggaccttactagaaaaatgaaacctgatgaaactcctatgtttgacccaagtctactcaaagaagtggactggagtcagaatacagctacattttctccagccatttccccaacacatcctggagaaggcttggttttgaggcctctttgtactgctgacttaaatagaggtttttttaaggtattgggtcagctaacagagactggagttgtcagccctgaacaatttatgaaatcttttgagcatatgaagaaatctggggattattatgttacagttgtagaagatgtgactctaggacagattgttgctacggcaactctgattatagaacataaattcatccattcctgtgctaagagaggaagagtagaagatgttgttgttagtgatgaatgcagaggaaagcagcttggcaaattgttattatcaacccttactttgctaagcaagaaactgaactgttacaagattacccttgaatgtctaccacaaaatgttggtttctataaaaagtttggatatactgtatctgaagaaaactacatgtgtcggaggtttctaaagtaaaaatcttgtaagaaaattgtcaaaggggctaatgctacaaggctacactcttcctagagttgaaatattttgttgctgcagccgagtgacctccataaatactggactgaaaaaacattgtaatactacaagtataatgacatttagaagattactttgggctggtgggacatgctgtgaatttagattacaaatgaatattataaaggggatgatttttaaccaaaggaatatatttttaacttgaatcttttcttgcattgtatttttctaaaagtttggcttcctttcttggtagtcaagagtatgggtaataaggagttatatgtctgctatctgtgttgctcatttaaaaaaagtatacattgaataaggctgtttatcacatgcataaaattaaatatttttgtttcaaagaaacatctcaatacacttaggggtgtattgtttcccacatattaagtcagggtggataaattagttattataactaaacatagtatagtccaacattcgttgatcccaatacaggcaaacaacctggtcaaccttttgaagtagaagaaatgaaaattacttgacaagattaaaagtaaaactatttaaatgttttactgaaagtttatatagtatagtctatgtagataaaaagtaccacttgtcttttctgtgaattatgactattcatttgttaaaaatacctaagagcaattatagtgggacatctaaggtcctctgtaaacagtgaattagcaaacctcagcctatgtgtttctaccctgatttttttcttttcatgggtatctgaagcctctaagttttttcaaaaatggagtatcacaaaattgagtgaaacacaatacttaatgtattgtactagattgccaaattcataaaatgttaatggaagctttttgatgtgattataatggcactattctggtcattatcctattttgattttatttaattttttaaagttgaagaattaaatattttaatggttctaatcttttgcattccatgttgcattaaacctgtttatatgagtagtcttctgttagaatcacatctgtgcttttcttgagtctgctgttgaactattagattaagtcataattcataaaattttagtttaatgtgctctttgtaaaatgaaattgtaaagaaaataccagtgtttctcatcccattgactcacaccacgtcatctggattttggatttccctccatgcagccagctatagttggctttccaaaacaacagaaatccttcaccaatagagtgcactacttacctgcttatagcctatacagacgaactgatctgtccttcgtgaaacgcaacaaagctagttctgtcttttcagaagtcctacaaccttgacaaagagtagttttatcaggtaaatcctggtaattaaaaacgcatgtttttaaaaattagcctggtaaggccgggtgcagtggctcacgcctgtaatcccagcactttgggaggctgaggtgggcagatcacaaggtcaggagtttgagaccagcctgaccaaaatggtgaaaccctgtctctactaaaaaaaaaaaaaaaaaaa

SEQ ID NO: 25866 - DNA, 923 bp, Homo Sapiens
ggccctcaatctcgatgaagataacacgaggagtgcacaggcaagtgcccagttgccagcaattgcttcaaaagcccatgttcttcttttcccccattcttaggcacagccaaaattggtcagaaaggggagtaaagtgggacacgagcttcaaagtagggaaaccaaagaagggagcatccacgtcctctctctccagcttctcccccgcgttcttcgggcgaatccgagggacgggcgctgcgctggggaaagtttgtcccacccgcgtttcgcagctggttgcaaggagaggaggaggagagggagggtcaagctcggagcctgtgaccgcacggatgatcgagccggcgtcgcgcttacctcgcagtcctcgtacttgatattatccgtctatttccaaagcattttcatggatcggcgtgaacggatatgcccctctcggtctcgcacccaagtggagctactctctggctctttaccaacagcctaatcgcctcattagcatatcaacaatagtccaattgctcgccagtaccacaatctgccgccggccgctccgacacaggtataaaggcctctctacgccgcgaacttgcttctagagcgcactccagcctgcgaactgataaaaccttcctcgtgatccgccacgaggccctgccccaacaccccctctcttaccccaattccgccacattccccttcctttctttctccgcttccttttctccagagatgccttctgcaaagcccggcactgctcaaggtccaagcgccacgcctggggcccagcttctagcacttctcccttaaccctgctaccacgatccgagctgcccttttggccccgtgcaattttattagaaatcattatccctttcgcaattaaacataaccaccaaaccaaaaaaaaaaaaaaa

SEQ ID NO: 25867 - DNA, 1678 bp, Homo Sapiens
agagaacgcgctcgcgtagaggaattccgggtcctcctcctcgccctaccttggtttacctgcagccgcctagtcctcttctccttctctttgatgattcagggcctcggcttccctcacgggcataattggaatatcatttggagaaagtgtcatggaagttctgcgtccacagcttataagaattgatggccggaattacaggaagaatccagtccaagaacagacctatcaacatgaagaagatgaagaggacttctatcaaggctccatggagtgtgctgatgagccctgtgatgcctacgaggtggagcagaccccacaaggattccggtctactttgagggcccccagcttgctctataagcatatagttggaaagagaggggacactaggaagaaaatagaaatggagaccaaaacttctattagcattcctaaacctggacaagacggggaaattgtaatcactggccagcatcgaaatggtgtaatttcagcccgaacacggattgatgttcttttggacacttttcgaagaaagcagcccttcactcacttccttgcctttttcctcaatgaagttgaggttcaggaaggattcctgagattccaggaggaagtactggcgaagtgctccatggatcatggggttgacagcagcattttccagaatcctaaaaagcttcatctaactattgggatgttggtgcttttgagtgaggaagagatccagcagacatgtgagatgctacagcagtgtaaagaggaattcattaatgatatttctgggggtaaacccctagaagtggagatggcagggatagaatacatgaatgatgatcctggcatggtggatgttctttacgccaaagtccatatgaaagatggctccaacaggctacaagaattagttgatcgagtgctggaacgttttcaggcatctggactaatagtgaaagagtggaatagtgtgaaactgcatgctacagttatgaatacactattcaggaaagaccccaatgctgaaggcaggtacaatctctacacagcggaaggcaaatatatcttcaaggaaagagaatcatttgatggccgaaatattttaaagttgtttgagaacttctactttggctccctaaagctgaattcaattcacatctctcagaggttcaccgtagacagctttggaaactacgcttcctgtggacaaattgacttctcctgaggtggatcttggaaagcactagaaactaaacatcttcaccaggtgctgaagaaaagtgtcttcgttttaattgccaagcagggatgtggacatttggatggtgacttccctgggtggttccccatagattcaccattgcctctaatggtgtctacacccgtcatactaccagctgagatggtggtgggcataaggagaatttgtgcctataacccttagtgtgttctggttttttttcttttaatttttaaattgtcgtaaaatactcataaaacatactgtcttcaccatttttaagtgcacagttcagtaacgttaactgttaatacattcataatgctgtgtggccgtcaccgccgtccatctccataggcttctcagcttgtaaaatggaaactgtacccattaaacagtaattcccactcctcccagaaaaaaaaaaaaaaaaaa

SEQ ID NO: 25868 - DNA, 2813 bp, Homo Sapiens
gcattttcccgcgtgcgtgtgtgagtgggtgtgtgtgttttcttacaaagggtatttcgcgatcgatcgattgattcgtagttcccccccgcgcgcctttgccctttgtgctgtaatcgagctcccgccatcccaggtgcttctccgttcctctaaacgccagcgtctggacgtgagcgcaggtcgccggtttgtgccttcggtccccgcttcgccccctgccgtcccctccttatcacggtcccgctcgcggcctcgccgccccgctgtctccgccgcccgccatggcgactgcgacccccgtgccgccgcggatgggcagccgcgctggcggccccaccacgccgctgagccccacgcgcctgtcgcggctccaggagaaggaggagctgcgcgagctcaatgaccggctggcggtgtacatcgacaaggtgcgcagcctggagacggagaacagcgcgctgcagctgcaggtgacggagcgcgaggaggtgcgcggccgtgagctcaccggcctcaaggcgctctacgagaccgagctggccgacgcgcgacgcgcgctcgacgacacggcccgcgagcgcgccaagctgcagatcgagctgggcaagtgcaaggcggaacacgaccagctgctcctcaactatgctaagaaggaatctgatcttaatggcgcccagatcaagcttcgagaatatgaagcagcactgaattcgaaagatgcagctcttgctactgcacttggtgacaaaaaaagtttagagggagatttggaggatctgaaggatcagattgcccagttggaagcctccttagctgcagccaaaaaacagttagcagatgaaactttacttaaagtagatttggagaatcgttgtcagagccttactgaggacttggagtttcgcaaaagcatgtatgaagaggagattaacgagaccagaaggaagcatgaaacgcgcttggtagaggtggattctgggcgtcaaattgagtatgagtacaagctggcgcaagcccttcatgagatgagagagcaacatgatgcccaagtgaggctgtataaggaggagctggagcagacttaccatgccaaacttgagaatgccagactgtcatcagagatgaatacttctactgtcaacagtgccagggaagaactgatggaaagccgcatgagaattgagagcctttcatcccagctttctaatctacagaaagagtctagagcatgtttggaaaggattcaagaattagaggacttgcttgctaaagaaaaagacaactctcgtcgcatgctgacagacaaagagagagagatggcggaaataagggatcaaatgcagcaacagctgaatgactatgaacagcttcttgatgtaaagttagccctggacatggaaatcagtgcttacaggaaactcttacaaggcgaagaagagaggttgaagctgtctccaagcccttcttcccgtgtgacagtatcccgagcatcctcaagtcgtagtgtacgtacaactagaggaaagcggaagagggttgatgtggaagaatcagaggcgagtagtagtgttagcatctctcattccgcctcagccactggaaatgtttgcatcgaagaaattgatgttgatgggaaatttatccgcttgaagaacacttctgaacaggatcaaccaatgggaggctgggagatgatcagaaaaattggagacacatcagtcagttataaatatacctcaagatatgtgctgaaggcaggccagactgttacaatttgggctgcaaacgctggtgtcacagccagccccccaactgacctcatctggaagaaccagaactcgtggggcactggcgaagatgtgaaggttatattgaaaaattctcagggagaggaggttgctcaaagaagtacagtctttaaaacaaccatacctgaagaagaggaggaggaggaagaagcagctggagtggttgttgaggaagaacttttccaccagcagggaaccccaagagcatccaatagaagctgtgcaattatgtaaaattttcaactgtcttcctcaaaataaagaagtatggtaatccttacctgtatacagtgcagagccttctcagaagcacagaatatttttatatttcctttatgtgaatttttaagctgcaaatctgatggccttaatttcctttttgacactgaaagttttgtaaaagaaatcatgtccatacactttgttgcaagatgtgaattattgacactgaacttaataactgtgtactgttcggaaggggttcctcaaattttttgactttttttgtatgtgtgttttttctttttttttaagttcttatgaggaggggagggtaaataaaccactgtgcgtcttggtgtaatttgaagattgccccatctagactagcaatctcttcattattctctgctatatataaaacggtgctgtgagggaggggaaaagcatttttcaatatattgaacttttgtactgaatttttttgtaataagcaatcaaggttataattttttttaaaatagaaattttgtaagaaggcaatattaacctaatcaccatgtaagcactctggatgatggattccacaaaacttggttttatggttacttcttctcttagattcttaattcatgaggagggtgggggagggaggtggagggagggaagggtttctctattaaaatgcattcgttgtgttttttaagatagtgtaacttgcttaaatttcttatgtgacattaacaaataaaaaagctcttttaatatgaaaaaaaaaaaaaa

SEQ ID NO: 25869 - DNA, 852 bp, Homo Sapiens
cagatcatcatgacactcacctccctgctaagtgtcctgcaaggcctttcacggtctgatcccctatcctttctctttcctcatctcctatcactcttgcccttgcaaattttcttccagcactctggcctccttgctgttcttcagtatggcaagcaacctgctgcccggagcccacacactgactgtcccctctcctaggacactcttccctcaagggctcccatatcttgcctgctggctcctgcatcttcttcaagtctgctcaaatgtcaccttctcagtgaggcccatcctggctatcctctttcagttctgacagaaaataatttattgctttattacatcattattttgttgtcttccctccgtctgttcctataaaatttaatctctgagaaagcagaaaacgttgtcttgttctttcctgtaacccaagtgccttgaacattgcctcattaattgcttgcgctcagtaatatgtgttgaataaatgggtcaagtagtttattaattgtgaaactaaatcctgtctgaaaggtttggagcagcttgttgaaatagcaaatggagattctgtgttttaagttgtggctaaggtagaatcatccatgatgtatgtggagccagctcctgtgtcctggacttaaacatctgtatctgacgtgtgggtaattatattgctatcctacacctttgacccattcatctcggctcacctgtgatccaggctatgctactaaagttgggtgagagagtctgcaacacaaggaaaacatagagccatcatttagtaaatcaaacccataataatacattttgttgttaaatgtaaaaaaaaaaaaaaaaaaa

SEQ ID NO: 25870 - DNA, 3835 bp, Homo Sapiens
ggccgccacagctgtaggtgctgctagtgtttagcgctggtctttgccgggcgttgagggcagctcagcctccttgtttgtccggttcgcctgtgcgtggtactcaagggcaccagtattcccgcggtcggcagcatgggtcgggagtcacgccactatcgaaaacgatcggcatcccggggtcgctctggaagtcggtctagaagtcgctcaccctcagacaaaagaagtaaacgtggagatgacagacggtctagaagtagagatagagataggaggagagagaggtctcgtagcagggataaaagaagatctcggtcaagggacaggaagcgtctgagacgttccagaagtagagagagagacagaagccgagagcgaagaagatctcgaagtagagacaggagacgctcaaggagtagaagccggggccggcgatcccgatcctccagtcctggaaataaaagcaagaaaactgagaatagatctaggtccaaagagaaaactgatggtggggaaagttctaaagagaagaaaaaagacaaagatgacaaggaggatgaaaaagaaaaagatgctggcaactttgaccagaataagctggaagaagaaatgagaaagcgaaaagaaagagtagaaaaatggcgagaagagcaacgtaaaaaggctatggaaaacataggagaactgaaaaaggaaatcgaagagatgaaacaagggaaaaagtggagtttagaggacgatgatgatgacgaagatgatcctgcagaagctgaaaaggagggaaatgaaatggagggtgaggagttagatccattagatgcttacatggaagaagtgaaagaggaagtaaaaaaatttaacatgagaagtgtaaaaggtggtgggggaaatgaaaagaagtctgggccaacggtcacaaaagttgtcactgttgtgacaaccaaaaaagcagttgtggattctgataagaagaaaggtgagctgatggagaatgaccaggatgccatggagtattcttcagaggaggaagaagttgatcttcagacagcccttacagggtatcaaacaaaacagcgaaagcttctagaaccagttgatcatggaaaaattgagtatgagccatttaggaaaaacttctatgttgaagttccagaactagcaaaaatgtctcaagaagaggtaaatgtgtttcgattggaaatggagggcattacagttaaaggaaaaggttgccccaaaccaattaaatcctgggtccagtgtggaatttccatgaagatcttaaattccctcaagaagcatggctatgaaaagcccacgcccatccaaacccaagctattcctgctataatgtctggacgagatttgattggcattgccaaaacaggaagtggaaagaccattgcttttctgttgcccatgtttagacacatcatggatcagaggtcattagaggaaggagaggggccaatagctgtcatcatgactccaactcgagaactggctttacagattactaaagagtgtaagaagttttccaagactttgggacttagagtggtctgtgtttacggaggaacaggaatcagtgagcagattgctgagctgaaaagaggtgctgaaattattgtttgcacacctggtcgaatgattgacatgttagccgctaacagtggtcgggtcacaaatcttcgaagagtgacatatgttgttttagatgaagcagacagaatgtttgacatgggttttgaaccccaggtcatgcgcatcgtggataatgttcgtcctgatcgacagacggttatgttttcagctactttccccagagctatggaggctttggctcgcaggatcctcagtaaacctattgaagtacaagttggaggcaggagtgtggtttgctcagatgtggagcaacaagtgattgtgattgaagaagaaaagaaattcttgaagttacttgagcttctaggccattatcaagagtcaggatctgtcattatatttgtggataagcaggaacatgctgatggtcttcttaaggatttaatgagagcatcttatccttgcatgtctcttcatggaggcattgatcaatatgacagagatagcatcataaatgactttaagaatgggacctgcaaacttcttgtggctacctctgttgctgcccgaggtctagatgtgaaacatctgattcttgtagtaaattatagctgccccaaccattatgaggattatgtacacagagcagggcggactggaagagcaggaaacaagggttatgcttatacttttatcacagaggatcaagctcgctatgctggtgacataattaaagctcttgaattgtcagggactgcagtacctcctgatttagagaaactgtggagtgatttcaaagatcagcagaaagctgaggggaaaataattaaaaagagtagtgggttctctggtaagggattcaagtttgatgaaacagaacaagctttggctaatgagaggaagaagttacaaaaagcagctcttggtctacaagattcagatgatgaggatgctgcagttgatattgatgagcaaattgaaagcatgtttaattcaaagaagagagtaaaggatatggctgctcctggaacatcaagtgttcctgctccaactgcaggaaatgctgagaaattagaaattgctaagagattggctcttagaatcaatgcccagaagaatttgggcatcgagtctcaggatgtgatgcagcaggccaccaatgcaattcttaggggtggcaccattctggctcccactgtttctgcaaaaaccattgcagaacaacttgctgaaaagatcaatgccaagctcaattatgtgccgttagagaaacaagaagaagagagacaggatggtggacagaatgaatcttttaagagatatgaagaagaattagagatcaatgacttcccacagactgctaggtggaaagttacctctaaggaagctctgcagagaatcagtgaatactctgaagccgcaattacaatcagaggaacctacttccctcctggcaaagaacccaaggaaggcgagcggaagatttacttggcaattgaaagtgccaatgaactggctgtgcagaaagcaaaggcagaaatcaccaggctcataaaagaagagctgatccggctgcaaaattcataccaaccaacaaataaaggaagatacaaagtcttatagacatccggaaaaaagatttttacctgtgctggtctatgatgtatgtggcagttgctgtctgcagtttacaatgtattgtaaatgaagattttttaaattctatcttgctgattttttttaaatataagaaactggtacttggtaaagaaatctgtccgtaagtacccccacaatcagtcaaactatatttaaagccagcctgttttcagagtatgatgtcctttaatgtaaactcaaatatcaatattttaaatgtccggataatattctagaggtttaaaaaatggaaatatttgaactttctattgaagacaataaagtacacaagtcgttaaggggctattcactttatcctgtactttcaatgaaattgtgatcatttcctaagaaaaggtaaaattcactatcatattttgtgtccccaccttgatgttacatgactctggaacaatatgaactggatttaagaatgttataatagaagtcttacaaaatgggttgagagtttttgtttcaatttttatcatcataaatgggcaaaaagtagttggactaatttcggtttttatacaagtaaagatttaatagtaaaaaaaaaaaaaaa

SEQ ID NO: 25871 - DNA, 3540 bp, Homo Sapiens
gtgtggggagccggggccggcccgggacgcgggctggggagccggggcgaggggcgacgccccgccgcccgagtttccccctttctagggtgaggatggttctacacagccacccggagttccttagttgaaaggtgcgccctgctgtgacagcatggacaccacgttgctgaaaacatgctttgggactgccactgaatttatcttttgcggttttatgacaaagttattagtagtttcccttttttgaattagtattttgaagttaatatcacaatgagttcaggcttatggagccaagaaaaagtcacttcaccctactgggaagagcggattttttacttgcttcttcaagaatgcagcgttacagacaaacaaacacaaaagctccttaaagtaccgaagggaagtataggacagtatattcaagatcgttctgtggggcattcaaggattccttctgcaaaaggcaagaaaaatcagattggattaaaaattctagagcaacctcatgcagttctctttgttgatgaaaaggatgttgtagagataaatgaaaagttcacagagttacttttggcaattaccaattgtgaggagaggttcagcctgtttaaaaacagaaacagactaagtaaaggcctccaaatagacgtgggctgtcctgtgaaagtacagctgagatctggggaagaaaaatttcctggagttgtacgcttcagaggacccctgttagcagagaggacagtctccggaatattctttggagttgaattgctggaagaaggtcgtggtcaaggtttcactgacggggtgtaccaagggaaacagctttttcagtgtgatgaagattgtggcgtgtttgttgcattggacaagctagaactcatagaagatgatgacactgcattggaaagtgattacgcaggtcctggggacacaatgcaggtcgaacttcctcctttggaaataaactccagagtttctttgaaggttggagaaacaatagaatctggaacagttatattctgtgatgttttgccaggaaaagaaagcttaggatattttgttggtgtggacatggataaccctattggcaactgggatggaagatttgatggagtgcagctttgtagttttgcgtgtgttgaaagtacaattctattgcacatcaatgatatcatcccagagagtgtgacgcaggaaaggaggcctcccaaacttgcctttatgtcaagaggtgttggggacaaaggttcatccagtcataataaaccaaaggctacaggatctacctcagaccctggaaatagaaacagatctgaattattttataccttaaatgggtcttctgttgactcacaaccacaatccaaatcaaaaaatacatggtacattgatgaagttgcagaagaccctgcaaaatctcttacagagatatctacagactttgaccgttcttcaccaccactccagcctcctcctgtgaactcactgaccaccgagaacagattccactctttaccattcagtctcaccaagatgcccaataccaatggaagtattggccacagtccactttctctgtcagcccagtctgtaatggaagagctaaacactgcacccgtccaagagagtccacccttggccatgcctcctgggaactcacatggtctagaagtgggctcattggctgaagttaaggagaaccctcctttctatggggtaatccgttggatcggtcagccaccaggactgaatgaagtgctcgctggactggaactggaagatgagtgtgcaggctgtacggatggaaccttcagaggcactcggtatttcacctgtgccctgaagaaggcgctgtttgtgaaactgaagagctgcaggcctgactctaggtttgcatcattgcagccggtttccaatcagattgagcgctgtaactctttagcatttggaggctacttaagtgaagtagtagaagaaaatactccaccaaaaatggaaaaagaaggcttggagataatgattgggaagaagaaaggcatccagggtcattacaattcttgttacttagactcaaccttattctgcttatttgcttttagttctgttctggacactgtgttacttagacccaaagaaaagaacgatgtagaatattatagtgaaacccaagagctactgaggacagaaattgttaatcctctgagaatatatggatatgtgtgtgccacaaaaattatgaaactgaggaaaatacttgaaaaggtggaggctgcatcaggatttacctctgaagaaaaagatcctgaggaattcttgaatattctgtttcatcatattttaagggtagaacctttgctaaaaataagatcagcaggtcaaaaggtacaagattgttacttctatcaaatttttatggaaaaaaatgagaaagttggcgttcccacaattcagcagttgttagaatggtcttttatcaacagtaacctgaaatttgcagaggcaccatcatgtctgattattcagatgcctcgatttggaaaagactttaaactatttaaaaaaatttttccttctctggaattaaatataacagatttacttgaagacactcccagacagtgccggatatgtggagggcttgcaatgtatgagtgtagagaatgctacgacgatccggacatctcagctggaaaaatcaagcagttttgtaaaacctgcaacactcaagtccaccttcatccgaagaggctgaatcataaatataacccagtgtcacttcccaaagacttacccgactgggactggagacacggctgcatcccttgccagaatatggagttatttgctgttctctgcatagaaacaagccactatgttgcttttgtgaagtatgggaaggacgattctgcctggctcttctttgacagcatggccgatcgggatggtggtcagaatggcttcaacattcctcaagtcaccccatgcccagaagtaggagagtacttgaagatgtctctggaagacctgcattccttggactccaggagaatccaaggctgtgcacgaagactgctttgtgatgcatatatgtgcatgtaccagagtccaacaatgagtttgtacaaataactggggtcatcgggaaaggcaaagaaactgaaggcagagtcctaacgttgcatcttattcgagctggcagttctgttcacgtccattgccggcaatggatgtctttgtggtgatgatccttcagaaaaggatgcctctgtttaaaaacaaattgcttttgtgtccctgaagtatttaataagaagcattttgcactctagaaagtatgtttgtgttggttttttaagaagtctaaatgaagttattaatacctgaagctttaagttaagtgcattgatcatatgatatttttggaagcatacaattttaattgtggaagtttaaagcctcttttagtcccttgagaatgtaaataaatgtgtcttctttatggaaaaaaaaaaaaaaaaaaaaaaaaaaaaa

SEQ ID NO: 25872 - DNA, 2702 bp, Homo Sapiens
gtgccgcgcccagagcagcagcaacagcgaagatgcgaggccattacctgtttgatccctgtcggaaacctggcacgggccaacttttcccgattatcacgccaagaagttgcaaggactagtcgaagactcggaggggccagggcgagggcgcgctcccccgcgcgctgcctcctccctcctccctccggccgcccgagctcccggcctctctcccgcccgcgctcactccctccgcccgcctccctcctctggccccctccgcgcggcacagggcggggggtgccgcgaaactccgacccgagccacttggacttgcacagtgtccgccgggcgcaggggccgaccgcacgcagtcgcgcagttctgcctccgcctgccagtctcgcccgcgatcccggcccggggctgtggcgtcgactccgacccaggcagccagcagcccgcgcgggagccggaccgccgccggaggagctcggacggcatgctgagccccctccttggctgaagcccgagtgcggagaagcccgggcaaacgcaggctaaggagaccaaagcggcgaagtcgcgagacagcggacaagcagcggaggagaaggaggaggaggcgaacccagagaggggcagcaaaagaagcggtggtggtgggcgtcgtggccatggcggcggctatcgccagctcgctcatccgtcagaagaggcaagcccgcgagcgcgagaaatccaacgcctgcaagtgtgtcagcagccccagcaaaggcaagaccagctgcgacaaaaacaagttaaatgtcttttcccgggtcaaactcttcggctccaagaagaggcgcagaagaagaccagagcctcagcttaagggtatagttaccaagctatacagccgacaaggctaccacttgcagctgcaggcggatggaaccattgatggcaccaaagatgaggacagcacttacactctgtttaacctcatccctgtgggtctgcgagtggtggctatccaaggagttcaaaccaagctgtacttggcaatgaacagtgagggatacttgtacacctcggaacttttcacacctgagtgcaaattcaaagaatcagtgtttgaaaattattatgtgacatattcatcaatgatataccgtcagcagcagtcaggccgagggtggtatctgggtctgaacaaagaaggagagatcatgaaaggcaaccatgtgaagaagaacaagcctgcagctcattttctgcctaaaccactgaaagtggccatgtacaaggagccatcactgcacgatctcacggagttctcccgatctggaagcgggaccccaaccaagagcagaagtgtctctggcgtgctgaacggaggcaaatccatgagccacaatgaatcaacgtagccagtgagggcaaaagaagggctctgtaacagaaccttacctccaggtgctgttgaattcttctagcagtccttcacccaaaagttcaaatttgtcagtgacatttaccaaacaaacaggcagagttcactattctatctgccattagaccttcttatcatccatactaaagccccattatttagattgagcttgtgcataagaatgccaagcattttagtgaactaaatctgagagaaggactgccaaattttctcatgatctcacctatactttggggatgataatccaaaagtatttcacagcactaatgctgatcaaaatttgctctcccaccaagaaaatgtaaaagaccacaattgttcttcaaaaacaaacaaaacaaaacaaaacaaaattaactgcttaaatgttttgtcggggcaaacaaaattatgtgaattgtgttgttttcttggcttgatgttttctatctacgcttgattcacatgtactcttttctttggcatagtgcaactttatgatttctgaaattcaatggttctattgactttttgcgtcacttaatccaaatcaaccaaattcagggttgaatctgaattggcttctcaggctcaaggtaacagtgttcttgtggtttgaccaattgtttttctttctttttttttttttttagatttgtggtattctggtcaagttattgtgctgtactttgtgcgtagaaattgagttgtattgtcaaccccagtcagtaaagagaacttcaaaaaattatcctcaagtgtagatttctcttaattccatttgtgtatcatgttaaactattgttgtggcttcttgtgtaaagacaggaactgtggaactgtgatgttgtcttttgtgttgttaaaataagaaatgtcttatctgtatatgtatgagtcttcctgtcattgtatttggcacatgaatattgtgtacaaggaattgttaagactggttttccctcaacaacatatattatacttgctactggaaaagtgtttaagacttagctaggtttccatttagatcttcatatctgttgcatggaagaaagttgggttcttggcatagagttgcatgatatgtaagattttgtgcattcataattgttaaaaatctgtgttccaaaagtggacatagcatgtacaggcagttttctgtcctgtgcacaaaaagtttaaaaaagttgtttaatatttgttgttgtatacccaaatacgcaccgaataaactctttatattcattcaaagaaaaaaaaaaaaaaaaaaaaaaaaaaaaaa

SEQ ID NO: 25873 - DNA, 1142 bp, Homo Sapiens
gtaaaaattctcaaacactgcatacacagagaggataggagacatggcatttgcggataggaaatgaggaaattttgcgataggacagctgtagatcctgttgcggacacccagccgggcagttggaggcggggtcagtccagaagccttcagataacaccagggtgtagtcctggcgagaaatcttcagttgcttcaggaccttttctagccccacgcgacggctaggtcctccgtgagagaaaactggttcgagaagcatggccaacattcccaatgatccgtgagtattgagaagttctccatgttctcccaagcaagcctaacatctgagacttcccgcatggcggccgccctattagcatttaggtggctataggatgcccattgtttgaacttaagatggaggccgagagcctccaaatgaaaggacagagttgaaagttaagttctgcgcctgtactcacccctctgatgaatataccttctgttctgattctgatcctgggcgagtccccacaatgaagtggtgttgtctgtctggggaaataactgaggttcgttgtctcgcgctaaggagaacaaagatgtgggcacacagggaatgggtttaagagcagaaagtttaataggtgaaagaaacaagaggaaagctcccctgtgcagagggagggggttccgaagggatctcccgggttgcggtgggaagcggctggttttatagagggcttgaggaggcagtatctgatttacatagggcctagggatttagttggaccaagtgtgccatttacatagtccacaaagaggctggccatcccaccctaatctttctcttattaggcagatgtggtttccacctggccggtgccatgacacccacacacatggcgacaaggagaagggagaagaaaacctatttgttgtatatacctggcttttggcacagctgccgggattcacctgtgcaagtttccagcttgcttatctatgcttgcagcttgatttttcaggctactttctgttagaaaagaaatgatttgggggctgctttctattaaaagaaaaaccttacccagggaaaaaaaaaaaaaaaaaaaaaaaaaaaaaaaaaaaaaaaaaaaaaaaaaaaaaaaaaaaaa

SEQ ID NO: 25874 - DNA, 2028 bp, Homo Sapiens
gccgtcgctccagacaatcggaatcctgccttcaccaccatgggctggctttttctaaaggttttgttggcgggagtgagtttctcaggatttctttatcctcttgtggatttttgcatcagtgggaaaacaagaggacagaagccaaactttgtgattattttggccgatgacatggggtggggtgacctgggagcaaactgggcagaaacaaaggacactgccaaccttgataagatggcttcggagggaatgaggtttgtggatttccatgcagctgcctccacctgctcaccctcccgggcttccttgctcaccggccggcttggccttcgcaatggagtcacacgcaactttgcagtcacttctgtgggaggccttccgctcaacgagaccaccttggcagaggtgctgcagcaggcgggttacgtcactgggataataggcaaatggcatcttggacaccacggctcttatcaccccaacttccgtggttttgattactactttggaatcccatatagccatgatatgggctgtactgatactccaggctacaaccaccctccttgtccagcgtgtccacagggtgatggaccatcaaggaaccttcaaagagactgttacactgacgtggccctccctctttatgaaaacctcaacattgtggagcagccggtgaacttgagcagccttgcccagaagtatgctgagaaagcaacccagttcatccagcgtgcaagcaccagcgggaggcccttcctgctctatgtggctctggcccacatgcacgtgcccttacctgtgactcagctaccagcagcgccacggggcagaagcctgtatggtgcagggctctgggagatggacagtctggtgggccagatcaaggacaaagttgaccacacagtgaaggaaaacacattcctctggtttacaggagacaatggcccgtgggctcagaagtgtgagctagcgggcagtgtgggtcccttcactggattttggcaaactcgtcaagggggaagtccagccaagcagacgacctgggaaggagggcaccgggtcccagcactggcttactggcctggcagagttccagttaatgtcaccagcactgccttgttaagcgtgctggacatttttccaactgtggtagccctggcccaggccagcttacctcaaggacggcgctttgatggtgtggacgtctccgaggtgctctttggccggtcacagcctgggcacagggtgctgttccaccccaacagcggggcagctggagagtttggagccctgcagactgtccgcctggagcgttacaaggccttctacattaccggtggagccagggcgtgtgatgggagcacggggcctgagctgcagcataagtttcctctgattttcaacctggaagacgataccgcagaagctgtgcccctagaaagaggtggtgcggagtaccaggctgtgctgcccgaggtcagaaaggttcttgcagacgtcctccaagacattgccaacgacaacatctccagcgcagattacactcaggacccttcagtaactccctgctgtaatccctaccaaattgcctgccgctgtcaagccgcataacagaccaatttttattccacgaggaggagtacctggaaattaggcaagtttgcttccaaatttcatttttaccctctttacaaacacacgctttagtttagtcttggagtttagttttggagttagccttgcatatcccttctgtatcctgtccctcctccacgccgacccgagagcagctgagctgcgctggctctgggcagggagtgtgccttaatgggaagcacacgggctttggagtcaggcacaggtgccagctccagcttttgaacttgggcaattgtttaacctaacctgcaagttgattttgagggttaaataaaggcatacatgaaaatgcctggcaaattacctgacacagagcagacattcaatacattttagtttccttgtttcaaaaaaaaaaaaaaa

SEQ ID NO: 25875 - DNA, 957 bp, Homo Sapiens
gggttttcttgcggagctgctgtgaagactcagctcagctgtgataattacctgaggtcagcttctccagaatgcccttatctcctaaggcctttgagataagcaggaattgtggtgtctgccttgcctccaaacctttatccttgcttatctcagtggaaaattccagcagggatttctgaacaccaagttaaattcctccactcaacaatcagtttggcacgtggctgcccgccagtctgggcagaacagaggggagccaagggaataaacccaagtcctgcccccaggtgcccagagcctggcggggatgggacagttgcctgcagagcaagaggctgccacccagtttcacacaggccagagaggctgacctacctgcccagaggcaggggaagaatccagaggacctctcccggaggaggcacgagaagcccacgtggcagccaagaagagggagagcatcctgggccccggaagcacaatgccaggggcagacatgcactgggaggcacggggccagggacaccttcagtgagcacagggtctgggtaggcttcgggaggggtgagggcggagaggcagccaagccgggttgtgggaggccctgcctaattctgtaaagactaggattagaaacatgacaaaaatgggttaggcacggtggctcacacctgttatccactttgggaggctgaggctggtggatcatctgaggctgggagttcaagaccaacctggccaacatggtgaaaccccgtctctactaaaaatacaaaaattagccgggcgtggtggcgcacacctattaatcccaggtactaaggaggttgaggcaggagaattgcttcaacccaggaggcagaggttgcagtgagcccagaccatgccactgcactccagcctgggcaacagaacaagtctctgtctgaaaaataaaataaaaaaaaaaaaaaa

SEQ ID NO: 25876 - DNA, 1281 bp, Homo Sapiens
ccagactccagcgccgccccgggcgcggaccccaaccccgacccagagcttctccagcggcggcgcagcgagcagggctccccgccttaacttcctccgcggggcccagccaccttcgggagtccgggttgcccacctgcaaactctccgccttctgcacctgccacccctgagccagcgcgggcgcccgagcgagtcatggccaacgcggggctgcagctgttgggcttcattctcgccttcctgggatggatcggcgccatcgtcagcactgccctgccccagtggaggatttactcctatgccggcgacaacatcgtgaccgcccaggccatgtacgaggggctgtggatgtcctgcgtgtcgcagagcaccgggcagatccagtgcaaagtctttgactccttgctgaatctgagcagcacattgcaagcaacccgtgccttgatggtggttggcatcctcctgggagtgatagcaatctttgtggccaccgttggcatgaagtgtatgaagtgcttggaagacgatgaggtgcagaagatgaggatggctgtcattgggggcgcgatatttcttcttgcaggtctggctattttagttgccacagcatggtatggcaatagaatcgttcaagaattctatgaccctatgaccccagtcaatgccaggtacgaatttggtcaggctctcttcactggctgggctgctgcttctctctgccttctgggaggtgccctactttgctgttcctgtccccgaaaaacaacctcttacccaacaccaaggccctatccaaaacctgcaccttccagcgggaaagactacgtgtgacacagaggcaaaaggagaaaatcatgttgaaacaaaccgaaaatggacattgagatactatcattaacattaggaccttagaattttgggtattgtaatctgaagtatggtattacaaaacaaacaaacaaacaaaaaacccatgtgttaaaatactcagtgctaaacatggcttaatcttattttatcttctttcctcaatataggagggaagatttttccatttgtattactgcttcccattgagtaatcatactcaactgggggaaggggtgctccttaaatatatatagatatgtatatatacatgtttttctattaaaaatagacagtaaaatactattctcattatgttgatactagcatacttaaaatatctctaaaataggtaaatgtatttaattccatattgatgaagatgttaaaaaaaaaaaaaaaaaaaaaaaa

SEQ ID NO: 25877 - DNA, 3369 bp, Homo Sapiens
agctcgccgagtagacggccccgccgcccgctgcccgccggggctctccagcttcgccatgccgccgtggggcgccgccctcgcgctcatcttggccgtgctcgcccttctcggcctgctcggcccgcggctccggggaccctgggggcgcgccgtcggagagaggaccctgccgggggcccaagaccgagacgacggggaggaggcggacggcggaggcccggcggaccagttcagcgacgggcgcgagccactgccgggagggtgcagccttgtttgcaagccgtcggccctggcccagtgcctgctgcgcgccctgcggcgctcagaggcgctggaggccggcccgcgctcctggttctccgggccccacctgcagaccctctgccacttcgtcctgcccgtagcgcctgggcctgagctggcccgggagtacctgcagttggcggacgatgggctagtggccctggactgggtggtaggaccttgtgttcggggccgccggatcaccagcgccgggggccttcctgcggtgcttctggtgatccccaatgcgtggggtcgcctcacccgcaacgtgctcggcctttgcttgctcgccctggagcgcggctactacccggtcatcttccatcgccgcggccaccacggttgcccactggtcagcccccggctgcagcctttcggggacccgtccgacctcaaggaggcggtcacatacatccgcttccgacacccggcggcgccgctgttcgcggtgagcgaaggctcgggctcggcgctgctcctgtcctacctgggcgagtgcggctcctccagctacgtgacaggcgccgcctgcatctcgcccgtgctgcgctgccgagagtggttcgaggccggcctgccctggccctacgagcggggctttctgctctaccagaagatcgccctcagcaggtatgccacagccctggaggacactgtggacaccagcagactgttcaggagccgttcccttcgagagtttgaggaggctctcttctgccacaccaaaagcttccccatcagctgggatgcctactgggaccgcaacgacccgctccgggatgtcgatgaggcagccgtgcctgtgctgtgtatctgcagtgctgacgaccccgtgtgtggacccccagaccacactctgacaactgaactcttccacagcaacccctacttcttcctcctgctcagtcgccacggaggccactgtggcttcctgcgccaggagcccttgccagcctggagccatgaggtcatcttggagtccttccgggccttgactgagttcttccgaacggaggagaggattaaagggctgagcaggcacagagcttccttccttgggggccgtcgtcgtgggggagccttgcagaggcgggaagtctcttcctcttccaacctggaggagatctttaactggaagcgatcatacacaaggtgaaagacctggcctgagaacccccaagtcctgcaaagaaaaacagagctgggcaagggggagtcctggaaagatggggcggactgaacagagggagctccagctctgtgctcctcattcagtccctctctcttaaattggtgccttgaaagagaaggaacgtcctgcgagcctgcactcacttcatcctcagcagaactcctgcctggcctctgctcaacatatccctactcatccggtcagcagcggcgcgttccagtcactgtcacctgtcactgacatcacaagccaaaggatagcactttttcaatccatggactcaggagaaaatgccctcttactggcagtggctagagggatgagacgtttgtgtatgtcactgggcagtgaccccgattctcaagctggagccatttgatgtcatgaggacaggatgtttgtgtctcggccccacttccctcatttgctctgtggttgtggcgccctgctttgaccgaatgctctggcaactgcggcagcaggcttgtgtgtgtgagaagggcggcagaggcagtggggctggctcgctgagggctgagcaggtagagaatgtgaatgtccatctcaaggaatgcgaagttccaatctctcagaggagctctgcaagtctcagctaggaatggggctgatctggcccccaagcctcactggagagatcccaagggtattttacaaataggaagcgctctcatgcaggatctgagggctttgctagaccatggttcaaggagtcagaatcttggctaccctacatgctccctctggcaccatttcaggggattactccagagagctgcagccagaactgtttatctcctgagatatggactttctctaagtcaggaaaagcacaaacctcataacttaggtgttttctggttggttgctcccttttctgatcctactactggcctctccctttccagagccaggagacacatctgggaccagaggaaacaaaagcaccaagaggttgactagagctgaccagtgatttacaaatatttcatattccaatgcttcgtctgctcaattattcaaaaggccatccctgtaaaggcagaaaagcttcctcttagatctggccactcagcaaataagtgggtatttggctttatgaagaataatgctgaggactagagatatagtatatcagagataatatatagtatacaggttgatctaaatattctggtttggattaggcaattaaaatttttttggcaacaggacatatgtttccatgtgttgctaagattcaaaaactttgccctgaagttttattttaatcgtcattgagaaagagggctcctgttctgacctcaaaaacagcaaagctgttgtaaagaagagagctgcttatacgaaaacccacattccaagacttggtataaggtattcctgaggccttgatttcaggtttggataatcttgccccagattctagatcttgttcttctagatcaaatcagaagaaactttgaaataactccaagaatctgcactgaaatgtagacagcactcgataatctaagggacattatcttgttgtgaaaaattatctccctcccggctgggagcggtggcacacacctataatctcagcactttgggaggccgaggtgggtggatcacgaggtcaggagatcgagaccatcctggctaacacagtgaaacctcatctctactaaaaatacaaaaaattagccgggcgtggtagcgggtgcctgtaatcccagttactcaggaggctgaggcaggagaatggcgtgaacccgggaggcggagcttgcagtgagctgagatcgcaccactgcactccagcctgggcgacagagtaagactgtgtttcaaaaaaaaaaaaaaaa

SEQ ID NO: 25878 - DNA, 953 bp, Homo Sapiens
ggccacgcggcctacgcagccgagtcggaaccaaccggttgtttggtgaaacctaccccagagcctcccgcggcccacagagcacagccctccttacagcctagaaaaaatgacagatctcgtagctgtttgggatgttgctttaagtgacggagtccacaagatcgaatttgaacatgggactacatcaggcaaacgagtagtatatgtagatggaaaggaagagataagaaaagagtggatgttcaaattagtgggcaaagaaacattctatgttggagctgcaaagacaaaagcgaccataaatatagacgctatcagtggttttgcttatgaatatactctggaaattaatgggaaaagtctcaagaagtatatggaggacagatcaaaaaccaccaatacttgggtattacacatggatggtgagaactttagaattgttttggaaaaagatgctatggacgtatggtgcaatggtaaaaaattggagacagcgggtgagtttgtagatgatgggactgaaactcacttcagtatcgggaaccatgactgttacataaaggctgtcagtagtgggaagcggaaagaagggattattcatactctcattgtggataatagagaaatcccagagattgcaagttaatgaattttcatcttaagaagtaaagatcaggactttttaattactgtggtaattaaatgtgttcagtatgtacttatcagtacatttagtctgcaatgttttaattttttaaaaagttacatgaaactaacattccaagggtcaggaaaaaaaccaattatgtatagtcataaaaattacaatttatgatgcaaataatgtaaaatgttttaaagacaaatggcaaataagatatggaccaaagtcactaatgttttacaacagtaacctttactataataaatacttttaaaaaaaaaaaaaa

SEQ ID NO: 25879 - DNA, 1201 bp, Homo Sapiens
gctcagggcacatgcctcccctccccaggccgcggcccagctgaccctcggggctcccccggcagcggacagggaagggttaaaggcccccggctccctgccccctgccctggggaacccctggccctgtggggacatgaactgtgtttgccgcctggtcctggtcgtgctgagcctgtggccagatacagctgtcgcccctgggccaccacctggcccccctcgagtttccccagaccctcgggccgagctggacagcaccgtgctcctgacccgctctctcctggcggacacgcggcagctggctgcacagctgagggacaaattcccagctgacggggaccacaacctggattccctgcccaccctggccatgagtgcgggggcactgggagctctacagctcccaggtgtgctgacaaggctgcgagcggacctactgtcctacctgcggcacgtgcagtggctgcgccgggcaggtggctcttccctgaagaccctggagcccgagctgggcaccctgcaggcccgactggaccggctgctgcgccggctgcagctcctgatgtcccgcctggccctgccccagccacccccggacccgccggcgcccccgctggcgcccccctcctcagcctgggggggcatcagggccgccctcgccatcctgggggggctgcacctgacacttgactgggccgtgaggggactgctgctgctgaagactcggctgtgacccggggcccaaagccaccaccgtccttccaaagccagatcttatttatttatttatttcagtactgggggcgaaacagccaggtgatccccccgccattatctccccctagttagagacagtccttccgtgaggcctgggggacatctgtgccttatttatacttatttatttcaggagcaggggtgggaggcaggtggactcctgggtccccgaggaggaggggactggggtcccggattcttgggtctccaagaagtctgtccacagacttctgccctggctcttccccatctaggcctgggcaggaacatatattatttatttaagcaattacttttcatgttggggtggggacggaggggaaagggaagcctgggtttttgtacaaaaatgtgagaaacctttgtgagacagagaacagggaattaaatgtgtcatacatatccaaaaaaaaaaaaaaaa

SEQ ID NO: 25880 - DNA, 2561 bp, Homo Sapiens
gggggactcgagagctagctgagcgaatgggccggcgactgtggagttagcgtcctcaatgtggacgccctgagctcccattaggagccgctggctgcggcagcaggggactagcgtgaaagttggctaaaaaaaagaaaagaacatggaggcagatataatcacaaatcttcgatgcaggctcaaagaggctgaagaagagcgactaaaagctgcacagtatggtttacaactagtagagagtcaaaatgaattacagaatcaattggataaatgtcgtaatgaaatgatgaccatgactgagagttatgaacaagaaaaatatacccttcaaagagaagttgaactcaagagtcgaatgttagaaagtttgagctgcgaatgtgaagctattaaacaacaacaaaaaatgcacctggagaaattggaagaacaactaagcagaagccatggacaggaagtgaatgaactaaaaactaagatagaaaaactgaaagtggaattagatgaagccaggcttagtgaaaagcagctgaagcaccaagtagatcatcagaaggaactcctctcttgtaaatcagaggaactgcgcgtaatgtctgaacgtgtgcaggaaagcatgtcttcagagatgctggctcttcaaattgagctgacagaaatggagagtatgaagaccaccctcaaagaagaagtgaatgaactacaatacagacaagaacagctagaacttcttattactaacctaatgcgccaggtagaccggcttaaagaggaaaaagaggagcgagagaaagaagcagtttcttactataatgccctagagaaagctcgtgtagcaaatcaagatcttcaggtacagttggaccaggcactccagcaagccttggatcccaatagtaaaggcaactctttgtttgcagaggtggaagatcgaagggcagcaatggaacgtcagcttatcagtatgaaagtcaagtatcagtcactaaagaagcaaaatgtatttaacagagaacagatgcagagaatgaagttacaaattgccacgttgctacagatgaaagggtctcaaactgaatttgagcagcaggaacggttgcttgccatgttggagcagaagaatggtgaaataaaacatcttttaggtgaaattagaaatctggagaaatttaagaatttatatgacagtatggaatctaagccttcagtcgactctggtactctggaagataacacctattatacagatttacttcagatgaagctggataacttaaacaaagaaattgaaagcactaaaggtgaattgtccatacagcgaatgaaagcattatttgagagccagcgggctctagatattgagcgaaaactttttgcaaatgaaagatgcctccagctttcagaaagtgaaaatatgaaactgagagctaaactagatgaattgaaactaaaatatgaacctgaagagacagttgaagtgcctgtactgaaaaagaggcgtgaggtgctccctgtggatataaccaccgctaaagatgcatgtgtcaacaacagtgctctcgggggagaagtttatcgattaccgcctcagaaagaggagacacagtcctgccctaacagtttagaagataacaacttgcaattagaaaaatcagtttctatacacacaccagtagtcagtctctctcctcacaaaaatctgcccgtggatatgcagctgaagaaggaaaagaaatgtgtgaaactcataggagttcccgctgacgctgaggccttaagtgaaagaagtggaaacacccctaactctcccaggttagctgctgaatcaaagcttcaaacagaagttaaagaaggaaaagaaacttcaagcaaattggaaaaagaaacttgtaagaaatcacaccctattctatatgtgtcttctaaatctactccagagacccagtgccctcaacagtaaagacttttctttaataagagtacggtgccacttgcctcaaaagttactatggtgcttaagattgtcttgatctgacatatatcaccttctgggttatttactcattgtgccaggacctggcattttcatgtgcctttgaccaagtgttcagaatttgcttgactctaacctggagagcttcttaagtgatgccccttcatggagcttctatgacagtgaataaactattaattgaaggaaaatgttataattaatgtatctatttgctgcattgtatatggattaaatgataaaaaacaagtaatctaccctcagagccatgtatttgagaatgcttcaatcatattttcctatgtacttttttttataaacttagttttagactatgttgtaaaaatgggaaggttgtaaactatgttgtaaaaataggaaatgtggcttaaaatatatacattatattgtttcaggattttgtcagtgtttaaagaaccaatgttcatctttgtatttatatacatgatttaaattttgtctaaaattttaaataaaactgcagtgatttatccgtaaaaaaaaaaaaaaaaaaaaaaaaaaaaaa

SEQ ID NO: 25881 - DNA, 2403 bp, Homo Sapiens
gggggtacacccacagccttagccgcacatccccaactagcatcttttccagaatggtggcgaacaactgatgctcatactcgtacaggagcaaccttctttccaccattactgggaattccaccactatttgctcccccagcccagaatcatgattcttcttcattccattcaaggacttcgggaaaaagtaatcgaaatggtcccgaaaaaggtgtaaatgggtcaataaatggaagtaatacatcatctgtaattggtatcaacacatctgtactatccactactgcttcaagttccatgggacaaactaaaagtacaagctcaggtggaggaaatcgaaaatgtaatcaggaacaaagcaaaaaccagcctttggatgctagagttgacaaaatcaaagataagaaaccaaggaagaaagcaatggaaagttctagcaacagtgatagtgattcaggcacatcatcagacacctcaagtgaaggcattagtagcagtgattcagatgatctagaagaagatgaagaagaagaagatcaaagtattgaagaaagtgaagatgatgattctgattcagagagtgaagcacaacataaaagtaacaaccaggtgctattacatggtatttcagacccaaaagcagatggacagaaagcaactgaaaaagcccaggaaaaaagaatacaccagccattacctcttgcgtctgaatcccagactcactcattccaatcccagcagaagcagcctcaggttttgtcacagcagcttccatttattttccaaagctctcaggcaaaggaggaatctgtgaacaaacacaccagtgtaatacagtctacgggattggtgtccaatgtgaaacctttatctttggtaaatcaagccaaaaaggaaacttacatgaaactcatagttccttctcctgatgttcttaaagcagggaataaaaatacctctgaagaatctagttcattgaccagtgaattgagatccaaacgggaacaatataaacaggcattcccatcacagttaaagaaacaagagtcatcgaagagcctgaagaaggttattgcagctttgtcaaatccaaaagcaacctctagttcaccagcacatccaaaacaaacattagaaaacaaccacccaaatccattcttgacaaatgcacttttaggtaatcaccaaccaaatggagttattcaaagtgtcattcaagaagctcctctagcacttactaccaaaactaaaatgcagagcaagattaatgaaaacattgctgctgcaagtagcacccctttttcctcacctgtaaatctgagtacaagtgggagaagaacccctggcaatcagacacctgtaatgccctctgcctctcccatcctgcatagtcaagggaaggaaaaagcagttagcaataatgtaaacccagtaaaaacacagcatcactcccatcctgcaaaatctttagtggaacaattcagaggaacagattcagacattcccagtagtaaagattctgaagattcaaatgaggatgaagaggaagatgatgaagaagaagatgaggaagatgatgaagatgatgaatctgatgacagccaatcaggcacttccaaaagaagaagagtaacagatgaacgtgaactgcgtattccattggaatatggctggcagagagagacaagaataagaaactttggagggcgccttcaaggagaagtagcatattatgctccatgtggaaagaaacttaggcagtaccctgaagtaataaagtatctcagcagaaatggaataatggatatctcaagggacaatttcagcttcagtgcaaaaataagagtgggtgacttctatgaagccagagatggaccgcagggaatgcagtggtgtcttttgaaagaagaggatgtcattcctcgtatcagggcaatggaaggtcgtagaggaagaccaccaaatccagatagacaacgagcaagagaggaatccaggatgagacgtcggaaaggtcgacctccaaatgttggcaatgctgaattcctagataacgcagatgcaaagttgctaagaaaactgcaagctcaagaaatagccaggcaagcagcacaaataaagcttttgagaaaacttcaaaagcaggaacaggctcgggttgctaaaaaagccaaaaaacaacaagcaataatgctgctgaggagaagcggaagcaaaaagaacagataaagattatgaaacagcaggaaaaaattaagagaatacagcaaatcagaatggaaaaagaacttcgagctcagcaaattctagaggctaaaaagaaaaagaaggaagaagcggcaaatgccaaattattggaggccgagaaacaaaaaaaaaaaaaaaaaaaaaaaaaaaaaa

SEQ ID NO: 25882 - DNA, 918 bp, Homo Sapiens
gggggaggagggacctacaaagactggaaactattcttagctccgtcactgactccaagttcatcccctctgtctttcagttggttgagatataggctactcttcccaactcagtcttgaagagtatcaccaactgcctcatgtgtggtgaccttcactgttgtatgccagtgactcatctggagtaatctcaacaacgagttaccaatacttgctcttgattgataaacagaatggggttttggatcttagcaattctcacaattctcatgtattccacagcagcaaagtttagtaaacaatcatggggcctggaaaatgaggctttaattgtaagatgtcctagacaaggaaaacctagttacaccgtggattggtattactcacaaacaaacaaaagtattcccactcaggaaagaaatcgtgtgtttgcctcaggccaacttctgaagtttctaccagctgaagttgctgattctggtatttatacctgtattgtcagaagtcccacattcaataggactggatatgcgaatgtcaccatatataaaaaacaatcagattgcaatgttccagattatttgatgtattcaacagtatctggatcagaaaaaaattccaaaatttattgtcctaccattgacctctacaactggacagcacctcttgagtggtttaagaattgtcaggctcttcaaggatcaaggtacagggcgcacaagtcatttttggtcattgataatgtgatgactgaggacgcaggtgattacacctgtaaatttatacacaatgaaaatggagccaattatagtgtgacggcgaccaggtccttcacggtcaaggatgagcaaggcttttctctgtttccagtaatcggagcccctgcgcaaaaaaaaaaaaaaaaaaaaaaaaaaaaaa

SEQ ID NO: 25883 - DNA, 2524 bp, Homo Sapiens
ggggaatttgtgcaggcagcgggtgctggcttttagggtccgccgcctctctgcctaatgagctgcaccagaatgatccaggttttagatccacgtcctttgacaagttcggtcatgcccgtggatgtggccatgaggctttgcttggcacattcaccacctgtgaagagtttcctgggcccgtacgatgaatttcaacgacgacattttgtgaataaattaaagcccctgaaatcatgtctcaatataaaacacaaagccaaatcacagaatgactggaagtgctcacacaaccaagccaagaagcgcgttgtgtttgctgactccaagggcctctctctcactgcgatccatgtcttctccgacctcccagaagaaccagcgtgggatctgcagtttgatctcttggaccttaatgatatctcctctgccttaaaacaccacgaggagaaaaacttgattttagatttccctcagccttcaaccgattacttaagtttccggagccactttcagaagaactttgtctgtctggagaactgctcattgcaagagcgaacagtgacagggactgttaaagtcaaaaatgtgagttttgagaagaaagttcagatccgtatcactttcgattcttggaaaaactacactgacgtagactgtgtctatatgaaaaatgtgtatggtggcacagatagtgataccttctcatttgccattgacttaccccctgtcattccaactgagcagaaaattgagttctgcatttcttaccatgctaatgggcaagtcttttgggacaacaatgatggtcagaattatagaattgttcatgttcaatggaagcctgatggggtgcagacacagatggcaccccaggactgtgcattccaccagacgtctcctaagacagagttagagtcaacaatctttggcagtccgaggctggctagtgggctcttcccagagtggcagagctgggggagaatggagaacttggcctcttatcgatgaattaagcaacaatgtaactggtcttgacttgtcatattcccccatgcaatcctaggtctgtattgctcaattttaggaagcctttgctactccatcagtaggtttagatttgagcttttgagacctggctatggaaaagaaagacacttgagaatttagtgttggggtctgtacagatgatgctacccaatttggctttgaaggatcaagtaacaggttgaaaactatttttataaaggtaatactttttcagttcccttcttccttccctctcaatccactagctttcatgttgggcaaggaaaagttgaggaaggatggctgatggtgatggaaagctgtgttaatggtatgaggaatgtgtgaaaagtatacacaaagggctctgaagctcaagtcagaggagtgggaggtctgatcattgttggtggaaaaacgtaaggttattttgtgtttttaagttggttttacaattctttcctggggaaattatttctggaggggaaaaagatccattctacgtatccttgtggagaaaagctaaataacctttaagaatgtgggtggtattggagaaagaagatgaattatagctccggagaatcaagatcttaagtgaagcctttctgttcagatgtgatctataaaaaatcataatttggggaaagtttaagcaaatctggctttgtagtcctgatgttataagtgactttgtgatcaaactgtcaggcttgggttcttgttatagaatgcttggtatagaaaaaccatgccatcattaatggctaacaacacgtagggacttcatgtcatgtcaaagatagctctttgcaagtgccttgattaaaccagaaaactgtcatcgtttaacccaaatatctgaatggtcatctggtaactcatgggtttttggcctcataagatggtccactctgtacacaggcattcctcctgcaataatgttgtatctttgagaccgttgtcagtgtacacaactcacatccttcatattgaaggtgactcatttttctgcacacttttttgatgtgatgcttgacgtgaggcccgacactaggattctcaatgcaagaatccagtaccttgcacatagaagtagcaacccatcccttgcctattttcatcttgctgttttcttttttttaaaaaaatggatgtgacttgttttgaatgttttgtattatacttgtttttgtgtgtgcataaattcattctgtaggatcttaagaaaaagagtcccagaatgttgcttctattattgtgcacaaccattgagaggtgttacgagaatgcagttaattttaacatgtgtgatgtgccatggtggaaaagtactatcggaataactctgcagtgacagaatttgaagtttggctagcatccatacttttctactgtaaatatttcactctcctctagctatccttgatgagcttctcactttaagaataaatgtgtttgatacaaaaaaaaaaaaaaaagaaaaaaaaaaaaa

SEQ ID NO: 25884 - DNA, 1814 bp, Homo Sapiens
gccagagaagacaagggcagaaagcaccatgagtgggggcccaatgggaggaaggcccgggggccgaggagcaccagcggttcagcagaacataccctccaccctcctccaggaccacgagaaccagcgactctttgagatgcttggacgaaaatgcttgacgctggccactgcagttgttcagctgtacctggcgctgccccctggagctgagcactggaccaaggagcattgtggggctgtgtgcttcgtgaaggataacccccagaagtcctacttcatccgcctttacggccttcaggctggtcggctgctctgggaacaggagctgtactcacagcttgtctactccacccccacccccttcttccacaccttcgctggagatgactgccaagcggggctgaactttgcagacgaggacgaggcccaggccttccgggccctcgtgcaggagaagatacaaaaaaggaatcagaggcaaagtggagacagacgccagctacccccaccaccaacaccagccaatgaagagagaagaggagggctcccacccctgcccctgcatccaggtggagaccaaggaggccctccagtgggtccgctctccctggggctggcgacagtggacatccagaaccctgacatcacgagttcacgataccgtgggctcccagcacctggacctagcccagctgataagaaacgctcagggaagaagaagatcagcaaagctgatattggtgcacccagtggattcaagcatgtcagccacgtggggtgggacccccagaatggatttgacgtgaacaacctcgacccagatctgcggagtctgttctccagggcaggaatcagcgaggcccagctcaccgacgccgagacctctaaacttatctacgacttcattgaggaccagggtgggctggaggctgtgcggcaggagatgaggcgccaggagccacttccgccgcccccaccgccatctcgaggagggaaccagctcccccggccccctattgtggggggtaacaagggtcgttctggtccactgccccctgtacctttggggattgccccacccccaccaacaccccggggacccccacccccaggccgagggggccctccaccaccaccccctccagctactggacgttctggaccactgccccctccaccccctggagctggtgggccacccatgccaccaccaccgccaccaccgccaccgccgcccagctccgggaatggaccagcccctcccccactccctcctgctctggtgcctgccgggggcctggcccctggtgggggtcggggagcgcttttggatcaaatccggcagggaattcagctgaacaagacccctggggccccagagagctcagcgctgcagccaccacctcagagctcagagggactggtgggggccctgatgcacgtgatgcagaagagaagcagagccatccactcctccgacgaaggggaggaccaggctggcgatgaagatgaagatgatgaatgggatgactgagtggctgagttacttgctgccctgtgctcctccccgcaggacatggctccccctccacctgctctgtgcccaccctccactctcctcttccaggcccccaaccccccatttcttccccaccaacccctccaatgctgttatccctgcctggtcctcacactcacccaacaatcccaaggccctttttatacaaaaattctcagttctcttcactcaaggatttttaaagaaaaataaaagaattgtctttctgtctctcaaaaaaaaaaaaaaaaaa

SEQ ID NO: 25885 - DNA, 2470 bp, Homo Sapiens
agcgagcaggcgaagccgcggaggacggggtgaagatggcggccttctccgagatgggtgtaatgcctgagattgcacaagctgtggaagagatggatggctcctcccaactgatatccaggctgaatctatcccattgatcttaggaggaggtgatgtacttatggctgcagaaacaggaagtggcaaaactggtgcttttagtattccagttatccagatagtttatgaaactctgaaagaccaacaggaaggcaaaaaaggaaaaacaacaattaaaactggtgcttcagtgctgaacaaatggcagatgaacccatatgacagaggatctgcttttgcaattgggtcagatggtctttgttgtcaaagcagagaagtaaaggaatggcatgggtgtagagctactaaaggattaatgaaagggaaacactactatgaagtatcctgtcatgaccaagggttatgcagggtcgggtggtctaccatgcaggcctctttggacctaggtactgacaagtttggatttggctttggtggaacaggaaagaaatcccataacaaacaatttgataattatggagaggaattcactatgcatgataccattggatgttacctggatatagataagggacatgtcaagttctccaaaaatggaaaagatcttggtctggcatttgaaataccaccacatatgaaaaaccaagccctctttcctgcctgtgttttgaagaatgctgaactgaaatttaacttcggtgaagaggaatttaagtttccaccaaaagatggctttgttgctctttccaaggcaccggatggttacattgtcaaatcacagcactcaggtaatgcacaggtgacacaaacaaagtttctccccaatgctccgaaagctctcattgttgaaccttcccgggagttagctgaacaaactttgaataacatcaagcagtttaagaaatacattgataatcctaaattaagggagcttctgataattggaggtgttgcagcccgggatcagctctctgttttggaaaatggagtagatatagttgtaggtactccgggaagactagatgacttggtgtcaactggaaagctgaacttatctcaagttagattcctggtcctggatgaagctgatgggcttctttctcaaggttattctgattttataaataggatgcacaatcagattcctcaggttacctctgatggaaaaagacttcaggtgattgtttgctctgccactttgcattctttcgatgtaaagaaactgtccgagaagataatgcattttcctacatgggttgacttaaaaggagaagactctgttccagatactgtacaccatgttgttgtcccagtaaatcccaaaactgacagactctgggaaaggcttggaaagagccacattagaactgatgatgtacatgcaaaagataacacaagacctggtgctaatagtccagagatgtggtctgaagctattaaaatcctgaaaggggagtatgctgtccgggcaatcaaggaacataagatggatcaagcaattatcttctgtagaaccaaaattgactgtgataacttggagcagtactttatacaacaaggaggaggacctgataaaaaaggacaccagttctcatgtgtttgtcttcatggtgacagaaagcctcatgagagaaagcaaaacttggaaagatttaagaaaggagatgtaagattcttgatttgcacagatgtagctgctagaggaattgatatccacggtgttccttatgttataaatgtcactctgcccgatgaaaagcaaaactacgtacatcgaattggcagagtaggaagagctgaaaggatgggtctggcaatttccctggtggcaacagaaaaagaaaaggtttggtaccatgtatgtagcagccgtggaaaagggtgttataacacaagactcaaggaagatggaggctgtaccatatggtacaacgagatgcagttactatctgagatagaagaacacctgaactgtaccatttctcaggttgagccggatataaaggtaccagtggatgaatttgatgggaaagttacctacggtcagaaaagggctgctggtggtggaagctataaaggccatgtggatattttggcacctactgttcaagagttggctgcccttgaaaaggaggcgcagacatctttcctgcatcttggctaccttcctaaccagctgttcagaaccttctgatttttacatttactgaataagatttgagtaatgaaagtctgtagtcttaaaactctaaaacagttgtactgcttccaagcagcagtatttatagtaacgtaagctattaatgctaactcttgcatgtcaagaaacattagtcttaggaattcttcaaaaaatggcatcccaatgaaaataaatttgatgactataaaaaaaaaaaaaaaaaaa

SEQ ID NO: 25886 - DNA, 4377 bp, Homo Sapiens
gcaacactcgcgtgtcaggcggttgctaggctccggccgcgcgccccgcccttgcgctcagcgccctctcaccgcccggtacgtgctcgcgcgaaggctgcggcgcggcgctcgcgcctcttaggcttggcggtggcggcggcggcagcttcgcgccgaatccccggggagcggcggtggcggcgtcctggggccaggaggagcgaacacctgccgcggtcctcccgccggcgctgggctctgtgtgctccgggatggagcaggtgtgcagagggtgagaacccagctctgggaccaagtcacttgcttccttacttagcaagactatcgacttgagcaaacttggacctgggatgaggatgtctgtgggcctctcgctgctgctgcccctctgggggaggacctttctcctcctgctctctgtggttatggctcagtcccactggcccagtgaaccctcagaggctgtcagggactgggaaaaccagcttgaggcatccatgcactcagtgctctcagacctccacgaggctgttcccacagtggttggcattcctgatggcacggctgtcgtcgggcgctcatttcgagtgaccattccaacagatttgattgcctccagtggagatatcatcaaggtatcagcggcagggaaggaggctttgccatcttggctgcactgggactcacagagccacaccctggagggcctcccccttgacactgataagggtgtgcattacatttcagtgagcgctacacggctgggggccaacgggagccacatcccccagacctccagtgtgttctccatcgaggtctaccctgaagaccacagtgagctgcagtcggtgaggacagcctccccagaccctggtgaggtggtatcatctgcctgtgctgcggatgaacctgtgactgttttgacggtgattttggatgccgacctcaccaagatgaccccaaagcaaaggattgacctcctgcacaggatgcggagcttctcagaagtagagcttcacaacatgaaattagtgccggtggtgaataacagactatttgacatgtcggccttcatggctggcccgggaaatgcaaaaaaggtggtggagaatggggcccttctctcctggaagctgggctgctccctgaaccagaacagtgtgcctgacattcatggtgtagaggcccctgccagggagggcgcaatgtctgctcagcttggctaccctgtggtgggttggcacatcgccaataagaagccccctcttcccaaacgcgtccggaggcagatccatgctacacccacacctgtcactgccattgggcccccaaccacggctatccaggagcccccatccaggatcgtgccaacccccacatctccagccattgctcctccaacagagaccatggctcctccagtcagggatcctgttcctgggaaacccacggtcaccatccggactcgaggcgccattattcaaaccccaaccctaggccccatccagcctactcgggtgtcagaagctggcaccacagttcctggccagattcgcccaacgatgaccattcctggctatgtggagcctactgcagttgctacccctcccacaaccaccaccaagaagccacgagtatccacaccaaaaccagcaacgccttcaactgactccaccaccaccacgactcgcaggccaaccaagaaaccacggacaccccggccagtgccccgggtcaccaccaaagtttccatcaccagattggaaactgcctcaccgcctactcgtattcgcaccaccaccagtggagtgccccgtggcggagaacccaaccagcgcccagagctcaagaaccatattgacagggtagatgcctgggttggcacctactttgaggtgaagatcccgtcagacactttctatgaccatgaggacaccaccactgacaagctgaagctgaccctgaaactgcgggagcagcagctggtgggcgagaagtcctgggtacagttcaacagcaacagccagctcatgtatggccttcccgacagcagccacgtgggcaaacacgagtatttcatgcatgccacagacaaggggggcctgtcggctgtggatgccttcgagatccacgtccacaggcgcccccaaggggatagggctcctgcaaggttcaaggccaagtttgtgggtgacccggcactggtgttgaatgacatccacaagaagattgccttggtaaagaaactggccttcgcctttggagaccgaaactgtagcaccatcaccctgcagaatatcacccggggctccatcgtggtggaatggaccaacaacacactgcccttggagccctgccccaaggagcagatcgctgggctgagccgccggatcgctgaggatgatggaaaacctcggcctgccttctccaacgccctagagcctgactttaaggccacaagcatcactgtgacgggctctggcagttgtcggcacctacagtttatccctgtggtaccacccaggagagtgccctcagaggcgccgcccacagaagtgcctgacagggaccctgagaagagcagtgaggatgatgtctacctgcatacagtcattccggccgtggtggtcgcagccatcctgctcattgctggcatcattgccatgatctgctaccgcaagaagcggaagggcaagcttacccttgaggaccaggccaccttcatcaagaagggggtgcctatcatctttgcagacgaactggacgactccaagcccccaccctcctccagcatgccactcattctgcaggaggagaaggctcccctaccccctcctgagtaccccaaccagagtgtgcccgagaccactcctctgaaccaggacaccatgggagagtacacgcccctgcgggatgaggatcccaatgcgcctccctaccagcccccaccgcccttcacagcacccatggagggcaagggctcccgtcccaagaacatgaccccataccggtcacctcctccctatgtcccaccttaacccgcaagcgcctgggtggaggcagggtagggcaggggcctggagacgacatggtgttgtctgtggagaccggtggcctgcagaccattgcccaccgggagccgacacctgacctagcacacactgacacaggggcctggacaagcccgccctctctggtcctcccaaaccccaaagcagctggagagactttggggacttttttatttttattttttgcctaacagcttttggtttgttcatagagaattcttcgcttcatttttgatggctggctctgaaagcaccatgtggagtggaggtggagggagcgaggaaccatgaatgaactcgcaggcagtgccgggcggccccctggctctctgcgttttgcctttaacactaactgtactgttttttctattcacgtgtgtctagctgcaggatgtaacatggaaaacagtaactaaagattaaattcaaaggactttcagaagttaaggttaagtttttacgtttaatctgctgtttacctaaacttgtatgtataatttttgggtgggtatggggaattgctttgctaaaaataagctcccagggtgtttcaaacttagagaagaccaagggacagtattttttatcaaaggaatactattttttcacactacgtcaacttggttgctctgataccccagagcctgattgggggcctcccggccctggctcacgccaagtccctggtgctgggtttgctctcccgctgttgccaggggctggaagctggaggggtctcttgggccatggacatccccacttccagcccatgtacactagtggcccacgaccaaggggtcttcatttccatgaaaaagggactccaagaggcagtggtggctgtggcccccaactttggtgctccagggtgggccagctgcttgtgggggcacctgggaggtcaaaggtctccaccacatcaacctattttgttttaccctttttctgtgcattgtttttttttttcctcctaaaaggaatatcacggttttttgaaacactcagtgggggacattttggtgaagatgcaatatttttatgtcatgtgatgctctttcctcacttgaccttggccgctttgtcctaacagtccacagtcctgccccgacccaccccatcccttttctctggcactccagtcccaggccttgggcctgaactactggaaaaggtctggcggctggggaggagtgccagcaatagttcataataaaaatctgttagctctcaaagctaatttttttactaaagtttttatacagcctcaaattgttttattaaaaaaaaaaaaaaaaaaaaaaaa

SEQ ID NO: 25887 - DNA, 3280 bp, Homo Sapiens
ggcaggggcgcatccctcgccacccgcggtcgcccagcacgccgggacgcgcgtggccatccagctccccgggggcgttggggggctccgcgggcctgggcctcgggattcgcccgccgcttccccggggagccgctgctgcaaagccaggttggggcgccgggcccggccagcgccctctaggcagcggaagtgcagcttgctttacatccgtcctccccgcctcgcagagttgggagaaggcagggtggggggtgtggaaaaataaaaggaaaagtccttgcaccatgtagatcagcgtcccccactttggcatcccggccggccggggacctcccagtctgcggccatgaacgcgagcagcgagggcgagagcttcgcgggctcggtgcaaattccaggtggcacaacggtgctggtggagctgactcccgacatccatatctgcggcatctgcaagcagcagtttaacaacctggatgcctttgtagctcacaagcaaagtggctgccagctgacaggcacatccgcagcagcccccagcacggtccagtttgtatcggaggaaacagtgcctgccacccagactcagaccaccaccagaaccatcacctcggagacccagacaatcacagtttcagctccagaatttgtttttgaacatggctatcaaacttacctgcccacggaaagtaatgaaaaccagacagccactgtcatctctctccctgccaagtcacgcaccaaaaagcccacaacaccacctgctcagaaaaggcttaactgttgctatccaggttgccaattcaagactgcttatggcatgaaggacatggagcggcatttaaaaattcacacgggagacaaaccccataagtgtgaagtctgtggcaagtgctttagccggaaagacaagctgaaaactcacatgcggtgccacacgggcgtgaagccctacaagtgtaagacgtgtgactacgccgctgccgacagcagcagcctcaacaagcacctgaggatccactcggacgagcggcccttcaaatgccagatctgcccctacgccagccgcaactccagccagctcactgtccacctgcgatcccacacgggggacgcccccttccagtgctggctctgtagcgccaagttcaaaatcagctcggacttgaaaaggcacatgcgggtgcactcgggggagaagcctttcaagtgcgagttctgcaatgtccgctgcaccatgaaggggaacctcaagtcgcacatccgtatcaagcacagcgggaataacttcaagtgtcctcattgcgacttcctgggtgacagcaaagccaccctccggaagcacagccgcgtgcaccagtcggagcatcctgagaagtgctcggaatgcagctactcctgctccagcaaggccgccctgcgcatccacgagcgtatccactgcaccgaccgccctttcaagtgcaactactgcagcttcgacaccaaacagcccagcaacctgagcaagcacatgaagaagttccacggggacatggttaagactgaggctctagagaggaaggacaccggcaggcagagcagccggcaggtggccaagctggatgccaagaagagtttccactgcgatatatgcgatgcctccttcatgcgggaggactcgctccgcagccacaagagacagcacagtgagtacaatgagagtaagaactcggacgtgaccgttctccagtttcagatcgaccccagcaagcagcccgccacgcccctcactgtgggacacctccaggtgcccctccagcccagccaagtgccccagttcagcgagggaagagtcaaaatcatcgttgggcatcaggtgccccaggcgaacaccatcgtccaggctgccgctgctgcagtgaacatcgtcccgcctgccttggtggcccagaacccagaggaactcccagggaacagccggctgcagatcctgcgccaggtcagtctgatcgccccccctcagtcctcgcggtgtccgagcgaggcgggcgcaatgacccagccggctgtcctgctgaccacccacgagcagacggacggagccactctgcaccagactctcatccccacggcctcaggtggcccccaggaaggctctggcaatcaaactttcattaccagttcgggtattacttgcactgactttgaaggcctaaacgccttgattcaggaggggacagcagaagtgacagtggtgagcgatggaggccagaacatcgcagtggccaccacagcgccaccggtcttctcctcctcttcccagcaagaactacccaagcagacctactccatcattcaaggggcagcccatccagctttgctctgtcccgccgactccattccagattagtgcttaaaaaacaaaaggagtgggggaaaggaattgagaaaaagaaatcttaagtagaattctctaaaaggtttgctcttaatgttttctttgttttgttttgtttttgagacggagtctcgctctgtttcccaggctggagtgcagtggcgctatcttggctcactgcaacgtccgcctcccaggttcaagcgattctcatgcctcggccctccgagtagctgggaccacaggtgtacgacatcatgactggctaatttttgtatatttaatagaggcggggtttcatcatgttgaactcctgacctcaagtgatctgcccacctcagcctcccaaagtgctgggattacaggtgtgagccaccatgcctggccgtggtttgctcttaatgtttttaaggatggttgtgaatccccctggccccataataaattgtaattttatactgcttactataatttttttaacactgtaacaactttgagaccacctctgaatcgtcgcattataactgttgtagaatcttaaatgttaccaagatgattccaatgaggggttggaattaaatgcattaagtagtgaattcatgtgtttgtttccaacttgattttccaactctaataaaggtttctgtccatcttattacatttgtgtagtaaatggtacttcccagcctctcttttgccccattctggaatactccccagagtttgggggtgttcatgttttatacatgtaagtctgttggcatgaaggaccattttctacataatatgacatggatacttgacccaaaaaaaaatgtttagtgctaatgagcagaaaatgaatggttccataataaattgatatctgattaaaatataaaaaaaaaaaaaaaaaaa

SEQ ID NO: 25888 - DNA, 4590 bp, Homo Sapiens
aggaccactgtcagtggaaaccgcaggagaggtctgtggtgggcctctggcccttggcggattcgatccgttcccccagggaccatccacggatggcttcttccttcatgtaggcagggccgatgaagacaccgagggaaggttatatgttagttgttcaaaaagccccaactcccacgattcagagccgtggactctcctcaggcaggattctgactcggatgtggtggacatagaggaagccgagcacgatttcatgggtgaggcccatcctgtggttttcagcagatacattggggaggaagagtcggccaaactgcaggaggacatgaaggtgaaggaacatgaagacaaagatgacgccagcggccgctcgagcccctgcctgagcacagcctctcagatgagcagtgtctccatggcgagtgggagcgtgaagatgaccagctttgcggagaggaagctccacagactcaacagctgtgagaccaagtccagcaccagcagctcccagaagaccacgccagatgcgtctgagagctgcccagcccctctgacgacgtggaggcagaagagggagcagagtccgagccagcatggcaaggatcccgccagcctcctggcatctgagctggtacagctgcacatgcagctggaggagaagcgcagggccatcgaggcccagaagaagaagatggaggcgctgtcggcaaggcagcgcctgaagctcggcaaggctgcattcctgcatgtggtgaagaagggcaaggccgaggctgccccacccctcaggccggagcactttgcaaaggagtactctcagcacaacggggaggactgtggggacgctgtttccaaaaccgaagactttctcgtgaaggaggagcagagagaggagctccttcacgagccacaggatgtggacaaagagagcctggcctttgctcagcaacataaagcaaaagaccctgtggctctgcacgagctggagagaaataaggtgatctccgctgccctcctggaggacactgttggggaggttgtcgacgtgaatgaatgtgacctttccatcgagaagcttaacgaaaccatcagtacgctgcagcaggccatcctgaaaatctctcagcagcaagagcagcttctgatgaagtcccccacagtcccagtgccaggctctaagaataactcgcaggaccacaaagtgaaggcaccagtccacttcgtggagccactctctcccacgggcgtggctggccaccgcaaagccccccggctgggtcaaggccggaattcccgttccggaaggccggcggagctgaaggtcccaaaagacaggccacagggctcctcccgaagtaaaaccccaacgcccagtgtagagacgctcccgcacttgagacccttccctgccagcagccaccctcggacgcccacggaccctggcctggacagtgccctggagcccagtggtgacccacatgggaagtgtctcttcgacagttacaggctccatgatgaaagcaatcagcggacacttactctgtcctcttccaaagatgccaacattctttcggagcagatgagcctcaaagaagttctggatgcgagtgtgaaggaggtggggtccagctcctcagatgtctcgggaaaagagagcgtccccgtggaggagcctctgaggagcagggccagcctcattgaagtggacctctccgacctgaaggcccccgacgaggatggggagctggtaagcctcgatggctcggcggaccttgtcagcgaaggcgaccagaagccgggggtcggcttcttcttcaaggatgaacagaaagcggaagatgagctcgccaagaagcgggcggccttcctcctgaagcagcagcgcaaggccgaggaggcccgcgtgcgcaagcagcagctggaagcggaggtggagctcaagcgtgacgaagcccggcgcaaagctgaggaagaccgggtgcggaaggaggaggagaaggcgcggcgcgagctcatcaagcaggagtacctgcggaggaagcagcagcagatcctagaggagcaggggctcggcaagcccaagtcaaagccgaagaagccgcggccgaagtcggtgcaccgggaagagtcgtgcagcgactccggcaccaagtgctcctccacccctgataacttgagccggactcagtcaggctccagcctgtccttggcctctgcggcgacgacagaacccgagagcgttcattccgggggcacaccctctcagcgagtggaatcgatggaagccctgcccatactgagccgtaacccaagcaggagcacagaccgagactgggagaccgcgtcggcggcatcttccctggcctcagtggccgagtacacaggtcccaagctctttaaggagcccagtagtaaatcaaacaagccgattattcacaatgccatatcccattgctgcctggctggaaaagtgaacgaaccccacaagaattccatattggaggagctggagaagtgtgatgccaatcactacatcatactgtttcgtgatgctggctgccagttcagggcgctttactgctactatcctgatactgaggaaatctacaaactcactggcacggggccaaagaacatcaccaagaaaatgatcgacaaactgtataaatacagctcagaccgaaaacagtttaacttgatcccagccaaaaccatgtctgtcagtgtggacgcactcacaatccacaaccacctgtggcagcccaagcggcctgcagtgccaaagaaggcccagactcgtaaatgaccccggtgcagctggcgtccaaagggtgacccagactcgtaaatgatgcccttgtggctggcatccagagggtgccacggggtccttatttattgttttcatctatttgggtacgaagtgtgcaaagtcacagaccttttgcaaagaggtttctagacagcagaagaaaacccctctctcagcgctcatctcacgcagaggatgccaggcagggtgaggatgggggagtagatgccgcttttgcagtggctcgcactgctgtggccactgctgaccactgaggctcccagcggagggtgttcacagccaggtcccgggccacggagctcccttacttgaagttctccttcagcatagattagacgtgatccactttgctttcttgcttctcacctcgcccccttgcacattgcctgacaccctcatattggccagctgtaatctcgtgactatgggactgaggctcaatcttggcttggggtgtttgaatgtctatagcaaaggaattcataatgggaaatctttttcatttgagaaattgtatgatatttattggttgtgtctactgccaacatttatatccaattctaagatttctgaaaaaaaattcttatcccttgctgctcagaaaaagtttacggaaaacaccagttcactaaaagcaccgaaatctgcaaagcctgtcttccgctagaacaacgtctacaaatgtgaagatgatgacttctggcacgcggtcatgagggtggggaatggcactaggagctgatgtttgcctcatttaaagtaggcaagccgagccaactgcagccatcattcattaagttttgggtagtgctctaatggtttgttcactttaataaagacagattttggtaaagtagaatatttttcattctgagcatgtttgtcccaaaaggtgatgcacttaagctgacagtcccttcagtggttttgttaggtcacggcttgtcctgtctggattctgcatctggaagcgctgcatgctctcagaggagcgtgccgtttcccctgtagatggatacttttgttttgttgcctatttaaaaacaattaagtggttatttgcagttatttcagaactccaagtaagtggatggctttgggttctttctgccttggtcccaatggtgttgatgcttctgtggagcgcggacattcccaggagcaggtgcgtgccagccatggctgccagacactgctgcaactgaccagctgccggaagattctggagccactaacattagttttgcacatattttcttgggagtgttacttgaatctatctcaaactgcagaaaaaatcaaaagatcaataattgggagaaaaagagacaaatttaactgttacataattttagatagacaaaaaacatgagtgagtcgtgtacataaggagggaacatggtacagaaggctagaaggaattataggtcttattcccctttcctcagtcctttgaagagaagtacagtctcttgcgattttgtatatatcgtgttcgacacagccgctctctgtcctgtaaatagggaactaaaggctgtatgatttctcaagtgctgagttacacagtcctgagtgagctttctgttaccatactttcacacgtgggctttatttctcactgtatgtttgatatgatattactgtatttattttaagaaagcactaagatgtaataaagtgatgaactaatttgctttaaaaaaaaaaaaaaaaaaaaaaaaaaaaaaaaaaaaaaaaaaaaaaaaaaaaaa

SEQ ID NO: 25889 - DNA, 1665 bp, Homo Sapiens
agagccttcgcgggtgaggcttaacgcgcaggaggtctcacgagagtggaagcaactctcgcgaattttaaaatttatctttttgcctagcgactgacaacaggctggttgcttggcgtggaatcctaaagtggcctggctttgagactggagtgagaccccagccctaggctggggttctttccattatagaggagacggattcagaagggctacagaccaaggttgttgaaaaccagacatatgatgagcgtctagagattaacgactccgaagaggttgcaagtatttatactccaaccccaagacaccaaggacttcctcgttctgcccatcttcctaacaaggctatggctgataacagcagtgatgagtgtgaagaggaaaataacaaggagaagaagaagacctcacagttgacacctcaacggggctttagtgaaaatgaggatgacgatgatgatgatgatgattcatctgaaactgattctgattctgatgatgatgatgaagagcatggagcccctctggaaggggcctatgaccctgcagactatgagcatttgccagtttctgctgaaattaaggaactcttccagtacatcagtaggtacacacctcagttgattgacctggaccacaaactgaagcctttcattcctgattttatcccagctgtcggggatattgatgcattcttaaaggtcccacgtcctgatggaaagcctgacaaccttggcctattggtattggatgaaccttctacaaagcagtcagaccctacggtgctctcactctggttaacagagaattctaagcagcacaacatcacacaacatatgaaagtaaaaagcctagaagatgcagaaaagaatcccaaagccattgacacgtggattgagagcatctctgaattacaccgttctaagccccctgcgactgtgcactacaccaggcccatgcccgacattgacacgctgatgcaggaatggtccccggagtttgaagagcttttgggcaaggtaagcctgcccacggcagagattgattgcagcctggcagagtacattgacatgatctgtgccattctagacatccctgtctacaagagtcggatccagtccctccatctgctcttttccctctactcagaattcaagaactcacagcattttaaagctctcgctgaaggcaagaaagcattcactccttcatccaattccacctcccaagctggagacatggagacattaaccttcagctgagacacttcccaagctgctgtttcaaggctgagctggcccctctgccccagctgagatggacagatcgttgtcagctacttgatgtccttgcccatgccacagcttggctcaggggcagtgcatgtcctgctgccctctctgccagagggcacagaacatgtttgtttaatgaacctgcctgcctcagattgctgtccccggggagttaatgcatctacaccactgtggggatttgagttataagaattggaatttctgagatcccatggaggttagattgggaggaaagcttaaaagatgtcctttttgtgagagggatggaattgttttctttcattcgtaaagttagtgagtaaagattttataaatcaaatgctctaaaaaaaaaaaaaaaaaaaaa

SEQ ID NO: 25890 - DNA, 2041 bp, Homo Sapiens
tgaaggcctcaagccctctgacaaatatgaaaagcccctggactacaggtggcccatgcgctatgaccagtggtgggagtgtaaatttattgcagaaggcatcattgaccaagggggtggtttccgggacagcctggcagatatgtcagaagagctgtgccctagctcagcggatacccccgtgcccctgcccttctttgtacgcacagccaaccagggcaatggcactggtgaggctcgggacatgtatgtacccaacccctcctgccgagactttgccaagtatgaatggatcggacagctgatgggggctgcccttcggggtaaggagttcctggtcctggccctgcctggttttgtgtggaagcagctttctggtgaggaggtgagctggagcaaggacttcccagctgtggactctgtgctggtgaagctcctggaagtgatggaaggaatggacaaggagacgtttgagttcaagtttgggaaggaactaacattcaccactgtactgagtgaccaacaggtggtgggagctgatccctgggggtgcaggcatcgtcgtgggatatggggaccgttctcgtttcatccaactggtccagaaggcacggctagaggagagcaaggagcaggtggcagctatgcaggcaggtctgctgaaggtggtaccacaggctgtgctggacttgctgacctggcaagagttggagaagaaagtgtgtggggatccagaggtcactgtggatgctctgcgcaagctcacccggtttgaggacttcgagccatctgactcgcgggtgcagtatttctgggaggcactgaacaacttcaccaacgaggaccggagccgcttcctgcgctttgtcacgggccgcagtcgcctgccagcacggatctacatctacccagacaagctgggctacgagaccacagacgcgctgcccgagtcttccacttgctccagcaccctcttcctgccacactatgccagtgccaaggtatgcgaggagaagctccgctatgcggcctacaactgcgtggccatcgacactgacatgagcccttgggaggagtgaggcgtgccgccggctgtgggaccagcaagactgcacgtgtccctcttggccttgcccagggcgaagacaccttccctgccctggtttggctgacgtgctcagcaaaaccccatgtgccctgctcctgtgtgcagttggggtaggggcagctggcatggtcaggtaacactagtggcccagccccgcagacccacaagccctacccgtgctggggcttgcttcccgaggtatttcacctcttaagagggaatcttccacaagcccagcacaagctgccaggcctgagctacttgaagggggccatctaggtccccaacccatggactttgcctccattttcagctccgcctttttttctcctattttctctctggctttcttcagccatgactcacaactaaaaacataaaacactggaggttagtggaggcccctccccaagcagggagcctgggatgggcagggagtgatagccaaactccttggtcacctgctccaagaaggaagcagtagctgagcacctgccctcacatactgctcttttcccctctccctccacaccagagatgtggtgagctctgttcttctaccaacccagtctcaacacacaaagtgccaccaccttccctgactcagaacccacatccactcaatgtgaactctactaccacgacctccccatattcctcacttctccatcacctccagcctgactccctgtctgccctttcacccccaagattttgcacaggttaaggccagttatggcctttttgaaatctgtaatagctcccctttccccaactctaaagcctagaccttaaacctgttcctagagctatgcacacccctgccccagtttaccgttcctccctcagggcctccgtgacactccatgaaaagaagttcttgcataccggaaagttgaataaatggatgaattcaaaaaaaaaaaaaaaaaa

SEQ ID NO: 25891 - DNA, 1873 bp, Homo Sapiens
cgcccagcgcgcgaggacgtgatccgcttctgctccggcttggattgtagccttgacgaggtctgagcgaccatggaccggccggggttcgtggcagcgctggtgctgctgcattttttatcacctatgaatatgtgaagtggtttttgcatgctgattcatcttcatatttgacacctatgaaacatatgttggctgcctctgctggagaagtggttgcctgcctgattcgagttccatctgaagtggttaagcagagggcacaggtatctgcttctacaagaacatttcagattttctctaacatcttatatgaagagggtatccaagggttgtatcgaggctataaaagcacagttttaagagagattcctttttctttggtccagtttcccttatgggagtccttaaaagccctctggtcctggaggcaggatcatgtggtggattcttggcagtcagcagtctgtggagcttttgcaggtggatttgccgctgcagtcaccacccctctagacgtggcaaagacaagaattacgctggcaaaggctggctccagcactgctgatgggaatgtgctctctgtcctgcatggggtctggcggtcacaggggctggcaggattatttgcaggtgtcttccctcgaatggcagccatcagtctgggaggtttcatctttctgggggcttatgaccgaacgcacagcttgctgttggaagttggcagaaagagtccttgaagcagagacaagcctcacctccacttctgtcaagagaggggcctgcagtgcaaaccctcttccgctgagcagctgtctgaactataggccccagtgctgaagaccagttgtgctaagataccggcatggagattgtgccatccgtggtataggctggctggtatgaagtcattggcctgtatgccagagagctaagagaagaaaacggggtctgtggcggtactctgaacaatttcctcagaacctcttaataaataagtttggtaatgctgaggccaggccttttagagctttcatttgatctgtatctgatctttcatttcctgccacctgatggtggattcagcagaaggcaagatggttataattctaaaagaatagcttgtttgtttgtttgggaaaaggagacttggggaagagttgtgtatgtgggtgtttctccccctagttaattcctgttgtgtaagggtaggctttgttgaaaaagaaagaaagattgaactacaggtgcatagcaagcactctttctgggtaactaggctgctggttttaattaccctcagatttcacccataaaaacgcacaattgtattattttacagagatgtgtccagcgccccctgtggtgtgtgagagaaagcagctagaactcaagtgactaggtgggcccagctggcttcgtgcaggagggcacggtgggtgagccattctcgccattctcatgtcagactgaaaggagggcctgggccagctttgaaaaggcaggatgaaatggaaaggtcaccacacttagggattttagaccttgactaacaagctccaggtgtagaaaaattcaaaacaaaatgtcaggaatctagcagtgttgtctgccctggagcaaacaaacagtatgtgattttgcttcgcctattttttttttcttttttgggggaagataattaaaggcagaatgactgcgtttgtaaaagaaggaccaccaactatactgacatttataaatgaacctttattaaagacacttcaatgccatttgttagacacttcaatattttacatggttttcaatgtacactgtaccaaaatttctataaataaataactttgtacataaaagtaaaaaaaaaaaaaaa

SEQ ID NO: 25892 - DNA, 2130 bp, Homo Sapiens
ccaagactggagaggaagcgactgcggggagtatttccattttaaccggaaacaatccctgaacccacaggaatgaatgcctaatggtggagtttcagccatcagtgacaggctgaacccagactcccagggcacctgcttgcacctttgaatgatggcctgaactatgaacaaacgggactatatgaacacttcggtacaggagccccctcttgactactccttcagaagcatccacgtcattcaagatctggtaaatgaggagccaaggacaggactacgaccactgaagcgttcaaagtcggggaaatcactgacccagtccctgtggctgaataacaatgttctcaatgatctgagagacttcaaccaggtggcttcacagctgttggagcacccagagaacctggcctggatcgacctgtcctttaatgacctgacttccattgaccctgtcctaacaactttcttcaacctgagtgtcctctatcttcacggcaacagcatccagcgcctgggggaggtgaataagctggctgtccttcctcggctccgtagcctgacactccatgggaaccccatggaggaagagaaagggtataggcaatatgtgctgtgcaccctgtcccgtatcaccacgttcgacttcagtggggtcaccaaagcagaccgcaccacagctgaagtctggaaacgcatgaacatcaagcccaagaaggcctggaccaagcagaatacactttgaggctcccacgaccctagtagtcctaaaggcctaagcatagacagcatggtttgacaataaataatttgagctgttgagcagatgagaagtcacttacaccttgtagagatgttctctaactcaggcaactgcaagtagctctagccttttcttttcttttttttttttttgagacggagtctcactctgtcacacaggctggagtgcagtggcacgatcttggctcactgcaacctcagcctcccaggttcaagagattctcctgcctcagcctccccagtagctgtgattaaaggcgcctgccaccatgactggctaattttgttgttgttgttgttgttttgagacggtttcactcgtcaccccagctggagtgcagtggtgcgatctcagctcactgcaacctccgcctgctgggttcaagcgattctcctgcctcagcctcctgagtagctgggattacaggcgcctgctaccacatccagctaatttttttttttgagacggagtctcgctctgtcacccaggctggagtgcagtggcacgatctcggctcactgcaaactccgccttccaggttcacgccattctcctgcctcagcctcccaagtagctgggactataggcacctactaccacgcctggctaattttttgtatttttagtagagacggggtttcaccatgttagccaggatggtctccatctcctgaccttgtgatccacccacctcggcttcccccagctaattttttatattttagtagagacaaggtttcgccatgttggccaggctggtcttgaactcctgacctcaggtgatccgtctgctttggcctcccaaagtgctgggattagaagcgtgagccaccacgcccagcctttttttgtatttttagtagagatggggtttcgccatgttggccaggctggtctcaaactcctgacctcaggtgatctgcccacctcagcctcccaaagtgctaggattacaggataagccactgcacctggccagctctagtcttattttgctgaaaaagggaggcaattgagggaaaggcctgctggcctgggacactggagacgtgggtttaccacacagccttgggaaatttatctaactctctgggcccctttgtacttttcagcttagagatttgggggttaaagtagatcagtaatttccaaactcttcacagagtaccagggtctgtagagatgcctcacaggcctccatgacaggccaagaagatggcctatgatctctgaaaccagcccccacttcaatcagatcaaagtaattccattctgttttatatgctgggattctgcttaagatttcatttgataaaaagaatcttctgcttaaaaaaaaaaaaaaa

SEQ ID NO: 25893 - DNA, 2156 bp, Homo Sapiens
gagctgaagagacctggagccgacagacgggtgaaggccatgccgccttctgggaaagttccccgaaaggagaatctgtggctacagtgtgagtgggggtcctgctcctttgtgtgctcaaccatggaaaagttctttgagcatgtcactcagcacctgcagcagcacctgcatggctctggggaggaggaggaagaggaagaggaggatgacccacttgaggaagaattctcctgcttgtggcaggaatgtggcttttgttctctggactgttctgctgacctcatccgccatgtctacttccactgctaccacaccaagctgaaacagtgggggctgcaggccttgcaaagccaggctgaccttggcccctgcatcctggacttccagagccggaacgtcatccctgatatccctgaccacttcctgtgtctgtgggagcactgtgagaattccttcgacaatcctgagtggttttatcggcatgtggaagcacacagtctgtgctgtgaatacgaagcagtcggcaaggacaacccggtggtgctgtgtggctggaaaggctgtacctgcaccttcaaggaccgcagtaaacttcgagagcacctccgcagccatacccaggagaaagtggtagcctgccccacctgtgggggcatgtttgccaacaataccaagttcttagatcacatccgtcgccagacctcattggatcagcagcacttccagtgttctcactgttccaagagatttgccacagagcggctattgcgggaccacatgcgcaaccatgtgaatcactataagtgccctctgtgtgacatgacctgcccgctgccttcctccctccgcaaccacatgcgctttcgtcacagtgaggaccggccctttaaatgtgactgttgtgactacagctgcaagaatcttattgacctccagaagcacctggatacccacagcgaggagccagcctacaggtgtgattttgagaactgcaccttcagtgcccgatccctctgctctatcaagtcccattaccgcaaagtacatgaaggagactctgagccaaggtacaaatgtcatgtgtgtgacaaatgcttcacacggggcaacaacctcaccgtgcaccttcgcaagaagcaccagttcaagtggccctcagggcatccccgttttcggtacaaggaacatgaagatggctatatgcggctgcagctggttcgctacgagagtgtagagctgacacagcaactgctgcggcaaccacaagagggatcgggcctgggaacgtcgctgaacgagagcagcctgcagggcattattctagaaacagtgccaggggagccaggacgtaaggaagaggaagaggagggcaagggtagcgaagggacagccctctcagcctctcaggacaaccccagttctgtcatccacgtggtgaatcagaccaatgcccaaggccagcaagagattgtctactatgtgctgtctgaagccccaggggagcctcccccagtccctgagccaccttcagggggcatcatggaaaagcttcaaggaatagctgaggagccagagatccagatggtttgaaggccgcagagccagaccatttcttccccaggtcctgaagtttgagccaggcaagtggcagtgcccctagtgggcagccgttgccaatggatgcctttaggagtggtgccgagagcagtgtggtccactctggcctgggtttgcatcattctgcagactctaaagacttcccttttctgccagactacattttgtggggagcctgaggactctggattctttgaggggatcctggatgtgtgtgttcttgttaaagaggctgttatcaggcttaactataaccctcaagatctgcttgacagtgattaaatccttagctcacatccattcccatctttcgggctccttaggcccaaggatggcatgtgactggtccctgcaagggtcctttctttgtcaccagccaaggcattgataaccaagtagccattttcctcttaaggtttcctctacaaccccaaggactttcatgattatcctcagggacaggattggaggcattgagcgtgtttattaacaagatgtttttggtaataaaaaaaaaaaaaaaaaaaaaaaaaaaa

SEQ ID NO: 25894 - DNA, 2166 bp, Homo Sapiens
gggggtcgctgtgcctgtccccgtgtgatccgaaaagtgctggcaaaatgcggctgctgcttcgcccgggggggtaagggggtgccctggtgaaattttctatcctggccaactcaaatgaggatggcaagagagtgagcccttggagagagaggctgagcatcatgaagagaagaccctgggagttccctggggaccctgagtctggagctggggcaaggccccccagggcccgtcagtggcctgaggagatggttggatcattccaaacattgtctcagtgtggaaactgaggcagacagtggtcaggcaggaccatatgagaactggatgttggagccagctctagccacaggagaggagctgccggaactgaccttgctgaccacactgttggagggccctggagataagacgcagccacctgaagaggagactttgtcccaagcccctgagagtgaggaggaacagaagaagaaggctctggaaaggagtatgtatgtcctgagtgaactggtagaaacagagaaaatgtacgtggacgacttggggcagattgtggagggttatatggccaccatggctgctcagggggtccccgagagtcttcgaggccgtgacaggattgtgtttgggaatatccagcaaatctatgagtggcaccgagactatttcttgcaagagctacaacggtgtctgaaagatcctgattggctggctcagctattcatcaaacacgagcgccggctgcatatgtatgtggtgtactgtcagaataagcccaagtcagagcatgtggtgtcagagtttggggacagctactttgaggagctccggcagcagctggggcaccgcctgcagctgaacgacctcctcatcaaacctgtgcagcggatcatgaaataccagctgctgctcaaggattttctcaagtattacaatagagctgggatggatactgcagacctagagcaagctgtggaggtcatgtgctttgtgcccaagcgctgcaacgatatgatgacgctggggagattgcggggatttgagggcaaactgactgctcaggggaagctcttgggccaggacactttctgggtcaccgagcctgaggctggagggctgctatcttcccgaggtcgagagaggcgcgtcttcctctttgagcaaatcatcatcttcagtgaagccctgggaggaggagtgagaggtggaacacagcctggatatgtatacaagaacagcattaaggtgagctgcctgggactggaggggaacctccaaggtgacccttgccgctttgcactgacctccagagggccagagggtgggatccagcgctatgtcctgcaggctgcagaccctgctatcagtcaggcctggatcaagcatgtggctcagatcttggagagccaacgggacttcctcaacgcattgcagtcacccattgagtaccagagacgggagagccagaccaacagcctggggcggccaagagggcctggagtggggagccctggaagaattcggcttggagatcaggcccagggcagcacacacacacccatcaatggctctctcccctctctgctgctgtcacccaaaggggaggtggccagagccctcttgccactggataaacaggcccttggtgacatcccccaggctccccatgactctcctccagtctctccaactccaaaaacccctccctgccaagccagacttgccaagctggatgaagatgagctgtaactggtgaaaaccatgggggtggtgctgactcagccgcctattccccaaggagcttcagggcagtccttctggcactgctccagaattcctccttcttggtgtgtctggagggtgggcaaggctgggagggatatcaacttggaggagaacacctagacccaaggacttttttctgcccaaggaacacagtttccttcagctcccatccctatgcatgcatcatggtccccccaaaaggaggatatgtgggtgggtgggagggctggggcaggggccagatagaaattattggttttgttttttaattttgtttttcctgttttctgagaataaaggttttgttatatcaaaaaaaaaaaaaaaaaaaaaaaaaaaaaaaaaaaaaaaaaaaaaaaaaaaaaaaaaaaaaaa

SEQ ID NO: 25895 - DNA, 1237 bp, Homo Sapiens
ggcacatgccagtaattccatctactcgggaggctgaggcaggagaatcgtctaagcccgggaggtggaggttgcagtgagcccagatggcgctgctgcactcaagcttggatgacagagcaagactccgtttcaaaaaaaaaaacctcctctcttccttcacaccttcctctgaatcccacccggtcccacctcctgaacctatccagacaccttctcctgacccaggcaccacctgctttcggggcgatggccgtagcctcctcccaggcacctgtctgcatccctctggccagtgcatgctgagcacgtgacctacccgtgttgggacacgtgaggatacagccttgacccccaggggctgacattctagggggagatagaaggagacaaacgtagaaggtagaataagtgggtggtggagtggcagggagtgctgagtgccacaggaagtcagacaaggaaggagagtgtggggcaggtgccgtttaaatggggggcgctggggtctcctcacagttgcttctcagctcagctgtgccaggatcttgttgagtcaggtcagctgcccacagccctcttgcctgacccctgaagcccagaactctgatcttcacagccctaggtatggccccagcaccccactgccctctctcctgccccagccgactgctgttcccagacttccctggccacgctccaagacgccagctctgccgcgggcactttgttctcacggtgtcctccatgcctgcagggcccatgcatgggaagttgcgttggcggcctgggtgttggcggttccgtgcctgctccaactctccgtgaggcccctctcccagagcctgacacactctgtggccgaactctaggcaggtgcccctgagtcctttcctcgacgaggcctgaccccatccccatcctcgctgggcccgccgaccccggtgttagcaagaatcctctaaatcagtgtatggagaattacccaccctcgatatctgatcccattcctcatctcccacccttgatctcatcaccctgccggcctcctgcaagatcctcattgagccactccagtgagaatccccctaccctcgaaggccgccctaacaacttcccatccgctgacccctccaacgccatcaatctccagctgtggttgttgaactcggaggtgagctcctctcaccactctcttgaataaagcttttctcaccattttaaaaaaaaaaaaaaa

SEQ ID NO: 25896 - DNA, 2599 bp, Homo Sapiens
ccagctcctgcacgtgtccgagcagagcatcttgacctccaccgccctcctcacagccatgctgcgccagcttcgctcccctgcgctgctgcgggaggccgtggctttcctcctgggcacagaccggcagcctgaagcccccggggacaacccccacaccctgtatgctcatctcatcgggcattgtgaccacctctctgatgagatcagcatcaccacactccggctgtttgaggagctgctgcagaagccccacgaggggatcatccacagcctggtcctgcgcaaccttgagggccgcccttacgtggcctggggctcaccagagcctgagagctatgaggacaccctagacctggaggaagacccctacttcaccgacagcttcctggattccggctttcaaactcccgcaaagcctcgcctagctcctgctaccagttacgatggcaaaacagcagtgaccgagatcgtcaacagtttcctgtgcctggtccccgaggaagccaagacctctgccttcctggaggagacaggctatgacacatacgtccacgatgcttatggcctgttccaggagtgcagctcccgcgtcgcctcctggggctggcctctgacccccacacctttggacccccatgagcccgagcgacctttcttcgagggccacttcctccgagtgctgtttgaccgcatgtcccggattctggatcagccatacagcctgaacctgcaggtgacctcggtcctgtcccggcttgccctcttcccccacccccatattcatgagtacctgctggatccgtacatcagcctggcccccggctgcaggagcctattctccgtgttggtgagggtgatcggggacttgatgcagagaatccagagggtaccccagttcccaggcaagctgttcctggtgcgcaagcagttgacgggccaggctcctggggagcagctggaccaccagaccctcctccagggcgtggtggtgctggaggagttctgcaaggagctggctgccattgccttcgtcaagtttcccccacatgatcctcgccagaacgtctccccagccccggaagggcaggtctgagccagcaccagggcggtgggagactcctgtccacacctctgccccagagctgcctcctgcctggcactgccgccacactcccctcctgggatggggcttctgctcccgggctcactcaaggagactgcggcatgttgaccacaccagactgggtttcagggaatgggcatgccaggtgccaaggagccaaacagatggctttccaggcagcaaggtccttggggccttcttggaggagcttgggtgacagccaggtgagcacccagaccccagaccctcatgtgctgtgtgcctggccccttctgtactggccatttgtggccagggccaagcctgtgactcaactccaggggcaagatggggagtgagctgatggctccgagactggtcaggagcccaggccagtgagatggggcctggagccttgtctgtgtcacattaggtaccatgggagctgctgagacctgacattttgtcccctgcctacatggcttggcccatggagaaggagcagtgaatgggatcgtcggggaagcccctcttcctgctctgctcccctggaaactgttgcaaaactcccagccgcctcatggcaaatgcccaaagcatgttccgcacccaggcgggggcccctgctaatgagaaccttggtgcagctgcagccaggaggggagcgggcccaggagccaggctcaggtccagctggttcctctctggcgccttctgaacccgtctcagcaggtccacagcacctgggcagaggtcagagaccaggggaggccgggccttgccctcccttctgcccagggcccagtgttcttgatagaagacccttctggggagccagggagctcaggggacagataagggaaggacgccccctgactccaggcccctgagcctggcgggaagtggctgcggcccaggcagccagtcctggtggtgttctccctgcatgccctccgtggctgggctgccaccccacccggcccgaatctgtcttgacctgcaggaatacacgggcggcgccaggcattacctcacagcgggactacacagttgctggctttgctcctgggcaaggaggagcaggccagagcctcttttgcttccttttcttgcccatgccgcttctagaagccaggcacaggttgccaagaggtgacacgaaacaggaggaaactcagtgacctctgcctctcccacattcctccccgcgggggaggacctcgccgctctgaagagcaccgtgcacatgtgggtgcacaaacgtgggtgttggtgtggacggggcgcagatctccgtggatgaactgcgtctggactcttagattcataaaatattcgagggtttgggagtcacagaccctcccctctcctcagtgcactttggcatttgcacggtgtcttccccggacagcacagcaataaatggtgtgattgcgtggaaaaaaaaaaaaaaaaaaaaaaaaaaaaaaaaaaaaaaaaaaaaaaaaaaaaaaa

SEQ ID NO: 25897 - DNA, 1723 bp, Homo Sapiens
actccgaatgcgaagttctgtcttgtcatagccaagcacgctgcttcttggattgacctggcaggatggcgccaccaccagctagagtacatctaggtgcgttcctggcagtgactccgaatcccgggagcgcagcgagtgggacagaggcagccgcggccacacccagcaaagtgtggggctcttccgcggggaggattgaaccacgaggcgggggccgaggagcgctccctacctccatgggacagcacggacccagtgcccgggcccgggcagggcgcgccccaggacccaggccggcgcgggaagccagccctcggctccgggtccacaagaccttcaagtttgtcgtcgtcggggtcctgctgcaggtcgtacctagctcagctgcaaccatcaaacttcatgatcaatcaattggcacacagcaatgggaacatagccctttgggagagttgtgtccaccaggatctcatagatcagaacatcctggagcctgtaaccggtgcacagagggtgtgggttacaccaatgcttccaacaatttgtttgcttgcctcccatgtacagcttgtaaatcagatgaagaagagagaagtccctgcaccacgaccaggaacacagcatgtcagtgcaaaccaggaactttccggaatgacaattctgctgagatgtgccggaagtgcagcagagggtgccccagagggatggtcaaggtcaaggattgtacgccctggagtgacatcgagtgtgtccacaaagaatcaggcaatggacataatatatgggtgattttggttgtgactttggttgttccgttgctgttggtggctgtgctgattgtctgttgttgcatcggctcaggttgtggaggggaccccaagtgcatggacagggtgtgtttctggcgcttgggtctcctacgagggcctggggctgaggacaatgctcacaacgagattctgagcaacgcagactcgctgtccactttcgtctctgagcagcaaatggaaagccaggagccggcagatttgacaggtgtcactgtacagtccccaggggaggcacagtgtctgctgggaccggcagaagctgaagggtctcagaggaggaggctgctggttccagcaaatggtgctgaccccactgagactctgatgctgttctttgacaagtttgcaaacatcgtgccctttgactcctgggaccagctcatgaggcagctggacctcacgaaaaatgagatcgatgtggtcagagctggtacagcaggcccaggggatgccttgtatgcaatgctgatgaaatgggtcaacaaaactggacggaacgcctcgatccacaccctgctggatgccttggagaggatggaagagagacatgcaaaagagaagattcaggacctcttggtggactctggaaagttcatctacttagaagatggcacaggctctgccgtgtccttggagtgaaagactctttttaccagaggtttcctcttaggtgttaggagttaatacatattaggttttttttttttttaacatgtatacaaagtaaattcttagccaggtgtagtggctcatgcctgtaatcccagcactttgggaggctgaggcgggtggatcacttgaggtcagaagttcaagaccagcctgaccaacatcgtgaaatgccgtctttacaaaaaaatacaaaaattaactggaaaaaaaaaaaaaaa

SEQ ID NO: 25898 - DNA, 1801 bp, Homo Sapiens
cacttcctcctcaggcgcttcttctctgcaccctggcagcccgtggggagttcgggaaggggccctggatgccttttctgcttgtttttgattgactgaaacaaaacaaaacaaaagggccactggatgtctgccttcttggggggtgagccagacagactgacaaacaaacagccccaactgtgttcgggggagggtttcgcctcccgttttgcccggcagcagcagcatggacgtgttggctagttatagtatattccaggagctacaacttgtccacgacaccggctacttctcagctttaccatccctggaggagacctggcagcagacatgccttgaattggaacgctacctacagacggagccccggaggatctcagagacctttggtgaggacttggactgtttcctccacgcttcccctcccccgtgcattgaggaaagcttccgtcgcttagaccccctgctgctccccgtggaagcggccatctgtgagaagagctcggcagtggacatcttgctctctcgggacaagttgctatctgagacctgcctcagcctccagccggccagctcttctctagacagctacacagccgtcaaccaggcccagctcaacgcagtgacctcattaacgcccccatcgtcccctgagctcagccgccatctggtcaaaacctcacaaactctctctgccgtggatggcacggtgacgttgaaactggtggccaagaaggctgctctcagctccgtaaaggtgagaagccttataagtgctcatgggagggatgtgagtggcgttttgcacgaagcgatgagctcacgaggcactacaggaaacacacaggtgcaaagcccttcaaatgcaaccactgcgacaggtgtttttccaggtctgaccatcttgccctccacatgaagagacatatctaaaaaaccgaaaggccagagttgccatggcatcggctagtgtctaaaggaaacgccatgaggcagggggctggacttcaggcggggacccattgcctcgcagaagaaagttctcacttataaacctctgtacacacacacacacacacacacacatacacacactcacagacccacacacatacacactgtcatgcactcaactatatttaaaatatatacgtctattctttatgccttgccctagccagatggaagaagatgaagaaggaaaccaggtgaactcagcaaggcagactggctgcttacttcagcactattggaattatttcccgctgttgccaatggaaatcaaagaaaatggatgtgacgtctgtgcaggtggacggcagtccgaggggcttatttcacttgcttctcagtgcaacttgataggagaatccagcatcttaaagttgcatatgtgtagcactaatgtttctttttaaatagttgggggaaaatgacctagaaaaccaaattgcagtttggtagccaaaattaactcttggtttatttgtcctttgtgtgtgaaaagtcctactattccgtgcgtcagacttcctcacagaactgttgactggttttggttcttagtactattgagatctttcgcgtcgatcccaacggccttagcggcggcagactggaataacaccttacacctttctggcctgcatttctgtagacttcactctcaagggaggagttttcttttcttacgttttgacttttgcacaccatatgcactagggattctggaaacttctagcatgactgcaaagtggccaagagaataaagtccttgatgataaaaaaaaaaaaaaaa

SEQ ID NO: 25899 - DNA, 2364 bp, Homo Sapiens
ggcgcccgggccagagtccggccggagcggagcgcgcccggccccatggacagctcggccgtcattactcagatcagcaaggaggaggctcggggcccgctgcggggcaaaggtgaccagaagtcagcagcttcccagaagccccgaagccggggcatcctccactcactcttctgctgtgtctgccgggatgatggggaggccctgcctgctcacagcggggcgcccctgcttgtggaggagaatggagccatccctaagcagaccccagtccaatacctgctccctgaggccaaggcccaggactcagacaagatctgcgtggtcatcgacctggacgagaccctggtgcacagctccttcaagccagtgaacaacgcggacttcatcatccctgtggagattgatggggtggtccaccaggtctacgtgttgaagcgtcctcacgtggatgagttcctgcagcgaatgggcgagctctttgaatgtgtgctgttcactgctagcctcgccaagtacgcagacccagtagctgacctgctggacaaatggggggccttccgggcccggctgtttcgagagtcctgcgtcttccaccgggggaactacgtgaaggacctgagccggttgggtcgagacctgcggcgggtgctcatcctggacaattcacctgcctcctatgtcttccatccagacaatgctgtaccggtggcctcgtggtttgacaacatgagtgacacagagctccacgacctcctccccttcttcgagcaactcagccgtgtggacgacgtgtactcagtgctcaggcagccacggccagggagctagtgagggtgatggggccaggacctgcccctgaccaatgatacccacacctcctcccaggaagactgcccaggcctttgttaggaaaacccatgggccgccgccacactcagtgccatggggaagcgggcgtctcccccaccagccccaccaggcggtgtaggggcagcaggctgcactgaggaccgtgagctccaggccccgtgtcagtgccttcaaacctcctcccctattctcaggggacctggggggccctgcctgctgctccctttttctgtctctgtccatgctgccatgtttctctgctgccaaattgggccccttggccccttccggttctgcttcctgggggcagggttcctgccttggacccccagtctgggaacggtggacatcaagtgccttgcatagagccccctcttccccgcccagctttcccaggggcacagctctaggctgggaggggagaaccagcccctccccctgccccacctcctcccttgggactgagagggcccctaccaacctttgcctctgccttggagggaggggaggtctgttaccactggggaaggcagcaggagtctgtccttcaggccccacagtgcagcttctccagggccgacagctgagggctgctccctgcatcatccaagcaatgacctcagacttctgccttaaccagccccggggcttggctcccccagctctgagcgtgggggcataggcaggaccccccttgtggtgccatataaatatgtacatgtgtatatagatttttaggggaaggagagagggaagggtcagggtagagacacccctcccttgcccctttcctgggcccagaagttggggggagggagggaaaggatttttacattttttaaactgctattttctgaatggaacaagctgggccaaggggcccaggccctgtcctctgtccctcacacccctttgctccgttcattcattcaaaaaaacatttcttgagcaccttctgtgcccagcatatgctaggcccaccagctaagtgtgtgtggggggtctctacgccagctcatcagtgcctccttgcccatccttcaccggtgcctttgggggatctgtaggaggtgggaccttctgtggggtttggggatctccaggaagcccgaccaagctgtccccttcccctgtgccaacccatctcctacagccccctgcctgatcccctgctggctgggggcagctcccaggatatcctgccttccaactgtttctgaagcccctcctcctaacatggcgattccggaggtcaaggccttgggctctccccagggtctaacggttaaggggacccacataccagtgccaagggggatgtcaagtggtgatgtcgttgtgctcccctcccccagagcgggtgggcggggggtgaatatggttggcctgcatcaggtggccttcccatttaagtgccttctctgtgactgagagccctagtgtgatgagaactaaagagaaagccagacccctaaaaaaaaaaaaaaaaaa

SEQ ID NO: 25900 - DNA, 2433 bp, Homo Sapiens
gtgccagaggcgcctagggttggggtcctcgctcaggcacagagacccgacaccgagcggcggcttccccgggatcgagggacgcgcacgccagaggagacgaaaggaacccgggtcggaccagatcggaaccactgaccattgcccatggcggccctaggccctagcagccagaatgtcactgaatacgtcgttcgagttcctaagaatacaaccaaaaaatataacatcatggcttttaatgcagccgacaaagtcaactttgctacgtggaatcaggctcggctggagcgggacttgagcaacaagaaaatctaccaagaggaggagatgcccgaatcgggcgcgggcagtgagttcaaccgcaagcttcgggaggaggctcggaggaagaagtacggcatcgtcctcaaggagttccggcccgaggaccagccctggctgctccgggtcaacggcaaatcaggcaggaagttcaagggcatcaagaagggaggcgtaacagagaacacgtcctactacatcttcacccagtgccccgacggggccttcgaggccttccccgtgcacaactggtacaatttcacaccgctggcccggcatcgcacgctcactgccgaggaggccgaggaggagtgggagaggaggaacaaggtgctgaaccacttcagcatcatgcagcagcggcggctcaaggatcaggaccaggacgaggatgaggaggagaaggagaaacgtggccgcaggaaggcgagcgagctgcgcatccacgacctggaggacgacctggagatgtcgtccgatgccagtgatgccagtggtgaggaggggggcagagtccccaaggccaagaagaaggcgccgctggccaagggcggcaggaaaaagaagaagaagaagggttcagacgacgaggccttcgaggacagcgatgatggggacttcgagggccaagaggtagactacatgtcagacggctccagtagctcccaagaagagcctgagagcaaggccaaggcgccgcagcaggaggaggggcccaagggtgtcgatgagcagagcgacagtagtgaggagagtgaggaggagaagccgcctgaggaggacaaggaggaggaggaggagaagaaggcacccaccccgcaggagaagaagcgcaggaaagacagcagcgaggagtcggacagctcagaggagagcgacattgacagcgaggcctcctcagccctcttcatggcgaagaagaagacgccacccaagagagagcggaagccgtcgggagggagctcaaggggcaacagccgcccaggcacgcccagcgcagagggtggcagcacctcctccaccctgcgggcggctgccagcaaactcgagcaagggaagcgggtgagcgagatgcctgcagccaagcggttgcggctggacacgggaccccagagcctgtctgggaagtcgacaccccagccaccatcaggcaagacaacacccaacagcggcgacgtgcaggtgactgaggatgccgtgcgccgctacctgacacggaagcccatgaccactaaggacctgctgaaaaagttccagaccaagaagacagggctgagcagcgagcagacagtgaacgtgttggcccagatcctcaagcgactcaaccccgagcgcaagatgatcaacgacaaaatgcacttctccctcaaggagtgaggcttggtccaatacatggctctgccccccagaacttaaggctctcactgccccttcgccatcctagagtgaggctctgtccaatacatggctctgccctccagaacttcaggctctcagtgacccttcgacatcctgcttgctccctgactcccagggccccgtagttagcaattctggaaaagttaagccatctcctcctctggcccttccttctggaatcttcagatgcctgttaggccttcttattgtcctcctcctcctggctcggcctccctcacactgaccaagggcctgtgctgcccactgggtaacttctacagttctcccttccacttccctaagtctctcttcagctgtgacttatccaccacatagcccagtaagtcttcagttttggctgggcatgatggtgagcgcctgcagtcccagctacttgggaggctaagcccagttcaaggctgcagtgaactatgatggtgccactgcattccagcctgggtgacagaatgaaatcctggcacaaaaaaaaaaaaaagtagccaggcatggtggcgggagcctgttgtcccagctgttccgtaggctgaggcacgagattcacttgaacctgggaggtggaggttgctgtgagctgacaccatgccactgcactccagcctgggtgacagtgagactctgtctcaataaataaaaaataataataaattgaaaaaaaaaaaaaaaaaaaaa

SEQ ID NO: 25901 - DNA, 1029 bp, Homo Sapiens
ctcggccatgctacgcgcgctgagccgcctgggcgcggggaccccgtgcaggccccgggcccctctggtgctgccagcgcgcggccgcaagacccgccacgacccgctggccaaatccaagatcgagcgagtgaacatgccgcccgcggtggaccctgcggagttcttcgtgctgatggagcgttaccagcactaccgccagaccgtgcgcgccctcaggatggagttcgtgtccgaggtgcagaggaaggtgcacgaggcccgagccggggttctggcggagcgcaaggccctgaaggacgccgccgagcaccgcgagctgatggcctggaaccaggcggagaaccggcggctgcacgagctgcggatagcgaggctgcggcaggaggagcgggagcaggagcagcggcaggcgttggagcaggcccgcaaggccgaagaggtgcaggcctgggcgcagcgcaaggagcgggaagtgctgcagctgcaggaagaggtgaaaaacttcatcacccgagagaacctggaggcacgggtggaagcagcattggactcccggaagaactacaactgggccatcaccagagaggggctggtggtcaggccacaacgcagggactcctaggggcccagtaaggacagtgcccgccagggaccatgtatgtatcatggcggaagagttggccctgacctggaataaagcagttggtgttgcttatgaggaaggttcagccttatccagcacagccttcacgttttgccctctgctgtcaccacttggtcagaaacttccaaacgcagtgccctgttctgccggtgtgtacagcctcagcgcaccaggagaccctagagtggtttccatctcacagagaatcagacagggccacagccccctcaggcagccaggtcatctgagtatcattaagagtagtgatgggaagattacagtctgagggccaaacgtgcctgcttcctgtttttgtaaataaagttttgttggaacacaaaaaaaaaaaaaaaaaaaaaaaa

SEQ ID NO: 25902 - DNA, 4313 bp, Homo Sapiens
gaaaagatggctgccaccagcaaagaggtggcccgcttggagaccttggtgcgcaaggcaggtgagcagcaggaaacagcctcccgggagttagtcaaggagcctgcgagggcaggagacagacagcccgagtggctggaagagcaacagggacgccagttctgcagcacacaggcagcgctgcaggctatggagcgggaggcagagcagatgggcaatgagctggaacggctgcgggccgcgctgatggagagccaggggcagcagcaggaggagcgtgggcagcaggaaagggaggtggcgcggctgacccaggagcggggccgtgcccaggctgaccttgccctggagaaggcggccagagcagagcttgagatgcggctgcagaacgccctcaacgagcagcgtgtggagttcgctaccctgcaagaggcactggctcatgccctgacggaaaaggaaggcaaggaccaggagttggccaagcttcgtggtctggaggcagcccagataaaagagctggaggaacttcggcaaaccgtgaagcaactgaaggaacagctggctaagaaagaaaaggagcacgcatctggctcaggagcccaatctgaggctgctggcaggacagagccaacaggccccaagctggaggcactgcgggcagaggtgagcaagctggaacagcaatgccagaagcagcaggagcaggctgacagcctggaacgcagcctcgaggctgagcgggcctcccgggctgagcgggacagtgctctggagactctgcagggccagttagaggagaaggcccaggagctagggcacagtcagagtgccttagcctcggcccaacgggagttggctgccttccgcaccaaggtacaagaccacagcaaggctgaagatgagtggaaggcccaggtggcccggggccggcaagaggctgagaggaaaaatagcctcatcagcagcttggaggaggaggtgtccatcctgaatcgccaggtcctggagaaggagggggagagcaaggagttgaagcggctggtgatggccgagtcagagaagagccagaagctggaggagaggctgcgcctgctgcaggcagagacagccagcaacagtgccagagctgcagaacgcagctctgctctgcgggaggaggtgcagagcctccgggaggaggctgagaaacagcgggtggcttcagagaacctgcggcaggagctgacctcacaggctgagcgtgcggaggagctgggccaagaattgaaggcgtggcaggagaagttcttccagaaagagcaggccctctccaccctgcagctcgagcacaccagcacacaggccctggtgagtgagctgctgccagctaagcacctctgccagcagctgcaggccgagcaggccgctgccgagaaacgccaccgtgaggagctggagcagagcaagcaggccgctggggcactgcgggcagagctgctgcgggcccagcgggagcttggggagctgattcctctgcggcagaaggtggcagagcaggagcgaacagctcagcagctgcgggcagagaaggccagctatgcagagcagctgagcatgctgaagaaggcgcatggcctgctggcagaggagaaccgggggctgggtgagcgggccaaccttggccggcagtttctggaagtggagttggaccaggcccgggagaagtatgtccaagagttggcagccgtacgtgctgatgctgagacccgtctggctgaggtgcagcgagaagcacagagcactgcccgggagctggaggtgatgactgccaagtatgagggtgccaaggtcaaggtcctggaggagaggcagcggttccaggaagagaggcagaaactcactgcccaggtggaagaactgagtaagaaactggctgactctgaccaagccagcaaggtgcagcagcagaagctgaaggctgtccaggctcagggaggcgagagccagcaggaggcccagcgcctccaggcccagctgaatgaactgcaagcccagttgagccagaaggagcaggcagctgagcactataagctgcagatggagaaagccaaaacacattatgatgccaagaagcagcagaaccaagagctgcaggagcagctgcggagcctggagcagctgcagaaggaaaacaaagagctgcgagctgaagctgaacggctgggccatgagctacagcaggctgggctgaagaccaaggaggctgaacagacctgccgccaccttactgcccaggtgcgcagcctggaggcacaggttgcccatgcagaccagcagcttcgagacctgggcaaattccaggtggcaactgatgctttaaagagccgtgagccccaggctaagccccagctggacttgagtattgacagcctggatctgagctgcgaggaggggaccccactcagtatcaccagcaagctgcctcgtacccagccagacggcaccagcgtccctggagaaccagcctcacctatctcccagcgcctgccccccaaggtagaatccctggagagtctctacttcactcccatccctgctcggagtcaggcccccctggagagcagcctggactccctgggagacgtcttcctggactcgggtcgtaagacccgctccgctcgtcggcgcaccacgcagatcatcaacatcaccatgaccaagaagctagatgtggaagagccagacagcgccaactcatcgttctacagcacgcggtctgctcctgcttcccaggctagcctgcgagccacctcctctactcagtctctagctcgcctgggttctcccgattatggcaactcagccctgctcagcttgcctggctaccgccccaccactcgcagttctgctcgtcgttcccaggccggggtgtccagtggggcccctccaggaaggaacagcttctacatgggcacttgccaggatgagcctgagcagctggatgactggaaccgcattgcagagctgcagcagcgcaatcgagtgtgccccccacatctgaagacctgctatcccctggagtccaggccttccctgagcctgggcaccatcacagatgaggagatgaaaactggagacccccaagagaccctgcgccgagccagcatgcagccaatccagatagccgagggcactggcatcaccacccggcagcagcgcaaacgggtctccctagagccccaccagggccctggaactcctgagtctaagaaggccaccagctgtttcccacgccccatgactccccgagaccgacatgaagggcgcaaacagagcactactgaggcccagaagaaagcagctccagcttctactaaacaggctgaccggcgccagtcgatggccttcagcatcctcaacacacccaagaagctagggaacagccttctgcggcggggagcctcaaagaaggccctgtccaaggcttcccccaacactcgcagtggaacccgccgttctccgcgcattgccaccaccacagccagcgccgccactgctgccgccattggtgccacccctcgagccaagggcaaggcaaagcactaaagggccagtaccagtgagtggccccacctgtgtccccgatgctgccgtcacctggtcctccgcctactgtccctctcagtgccttctctcagctcccaggccaacagtagccaaacccctagagacagtgatgcctgcccgcaccctggcctggtccctggtccttcactggcgccttctcggagctggcccagggggcctggagcatggacagtgtgggcgctctccctaccttgcctccttttttcttaaagcaaagtcacttctccatcacaaccagatttgaggctggttttgatggctgggtccttgggcctggccagtcttcctcttagcctctggatctagaagggaccataagaggagtaggccctggttcctgctgtcctggtggctgggcccagcaggggccctcactcttgaagtccaggactgggtctgacctggtgggagcacctgccagaggatgctctttcccaggacggatgggccctgtgtctcaggagtggggttgggggacagccttcagcagcagctcacaccctaccttccccagacttgcactggggtgggatttggagtgatgggaaggtttttaagggccggggatggatcttttctaaatgttattacttgtaaataaagtctatttttctcccgtgaaaaaaaaaaaaaaaaccaaaaaaaaaaaaaaaaaaaaaaaaaaaaaaaaaaaaaaaaaaaaa

SEQ ID NO: 25903 - DNA, 2121 bp, Homo Sapiens
atccagagggacgcttggctgctacgcgggattgcagtggtgcagccagccccgaagtcggaaggtgctctctagggagtacaggaagataaagtttgtgcttgatttagaattagctagatcctttgggggagaggggatcgagccgatttcgggaggatgttcactgcgcggatgatgctcaggccatcgagaaatccagaaacaggcgacgaccttcgtcaagagaaaaatgatcctgtggagaaaagtaaatgtcgctaggttgggatggatggtaacaggccaagccccggacctatatctagccacattttttgtcaaggaggaaaccaattctgtagagaaaagtacctccctgtcccttgcaaggaccagtgtcaggcaatcctagtgccactatctggctactgcatgtcaaggagccaatcccatgtagaaataaactgcctcttactccctggatgctatagcctgaagcaggccacactccccagaaatgagggacccaatcacacaaggatgcaaatcctgactccacccctccaatcctcagtggagctggtcgcagatcctgagacccggacagtggcagtgaaacagctgggagttaacccctcaactaccgggacccaggagttgaagccggggttggagggctctctgggggtgggggacacactgtatttggtcaatggcctccacccactgaccctgcgctgggaagagacccgcacaccagaatcccagccagatactccgcctggcacccctctggtgtcccaagatgagaagagagatgctgagctgccgaagaagcgtatgcggaagtcaaaccccggctgggagaacttggagaagttgctagtgttcaccgcagctggggtgaaaccccagggcaaggtggctggctttgatctggacgggacgctcatcaccacacgctctgggaaggtctttcccactggccccagtgactggaggtgataagaggcaaaacaagggagtgagtgaggcctggagtccacctctggccccgggtcacccctgccgcttcatacctgccgtaggatcttgtacccagagattccccgtaagctccgagagctggaagccgagggctacaagctggtgatcttcaccaaccagatgagcatcgggcgcgggaagctgccagccgaggagttcaaggccaaggtggaggctgtggtggagaagctgggggtccccttccaggtgctggtggccacgcacgcaggcttgtaccggaagccggtgacgggcatgtgggaccatctgcaggagcaggccaacgacggcacgcccatatccatcggggacagcatctttgtgggagacgcagccggacgcccggccaactgggccccggggcggaagaagaaagacttctcctgcgccgatcgcctgtttgccctcaaccttggcctgcccttcgccacgcctgaggagttctttctcaagtggccagcagccggcttcgagctcccagcctttgatccgaggactgtctcccgctcagggcctctctgcctccccgagtccagggccctcctgagcgccagcccggaggtggttgtcgcagtgggattccctggggccgggaagtccacctttctcaagaagcacctcgtgtcggccggatatgtccacgtgaacagggacacgctaggctcctggcagcgctgtgtgaccacgtgtgagacagccctgaagcaagggaaacgggtcgccatcgacaacacaaacccagacgccgcgagccgcgccaggtacgtccagtgtgcccgagccgcgggcgtcccctgccgctgcttcctcttcaccgccactctggagcaggcgcgccacaacaaccggtttcgagagatgacggactcctctcatatccccgtgtcagacatggtcatgtatggctacaggaagcagttcgaggccccaacgctggctgaaggcttctctgccatcctggagatcccgttccggctatgggtggagccgaggctggggcggctgtactgccagttctccgagggctgagccccgcccagctcccctccacaataaacgctgtttctccttgaaaaaaaaaaaaaaaaaaaa

SEQ ID NO: 25904 - DNA, 2805 bp, Homo Sapiens
gggaggagccatcccagccatgagcccctgtgggaatctgctgggggccaagtggcctggagtcctcaggctcccgcagctgctccggagggagaggtgagctcagggcagcctgcctgcagccagaggtgccgggagccccgggcctgtcatggtggccatctacagccggcctgaggcagtcacagacggatttgcagctgagcctgtctatctggtgtgggaagaagatggggagttacttgtcagtcccggcttacttcacctccagagacctgtttcggtgttcagaatgccaggattccctcaccaactggtactatgagaaggatgggaagctctactgccccaaggactactgggggaagtttggggagttctgtcatgggtgctccctgctgatgacagggccttttatggtggctggggagttcaagtaccacccagagtgctttgcctgtatgagctgcaaggtgatcattgaggatggggatgcatatgcactggtgcagcatgccaccctctactgtgggaagtgccacaatgaggtggtgctggcacccatgtttgagagactctccacagagtctgttcaggagcagctgccctactctgtcacgctcatctccatgccggccaccactgaaggcaggcggggcttctccgtgtccgtggagagtgcctgctccaactacgccaccactgtgcaagtgaaagaggtcaaccggatgcacatcagtcccaacaatcgaaacgccatccaccctggggaccgcatcctggagatcaatgggacccccgtccgcacacttcgagtggaggaggtggaggatgcaattagccagacgagccagacacttcagctgttgattgaacatgaccccgtctcccaacgcctggaccagctgcggctggaggcccggctcgctcctcacatgcagaatgccggacacccccacgccctcagcaccctggacaccaaggagaatctggaggggacactgaggagacgttccctaaggcgcagtaacagtatctccaagtcccctggccccagctccccaaaggagcccctgctgttcagccgtgacatcagccgctcagaatcccttcgttgttccagcagctattcacagcagatcttccggccctgtgacctaatccatggggaggtcctggggaagggcttctttgggcaggctatcaaggtgacacacaaagccacgggcaaagtgatggtcatgaaagagttaattcgatgtgatgaggagacccagaaaacttttctgactgaggtgaaagtgatgcgcagcctggaccaccccaatgtgctcaagttcattggtgtgctgtacaaggataagaagctgaacctcctgacagagtacattgaggggggcacactgaaggactttctgcgcagtatggatccgttcccctggcagcagaaggtcaggtttgccaaaggaatcgcctccggaatggcctatttgcactctatgtgcatcatccaccgggatctgaactcgcacaactgcctcatcaagttggacaagactgtggtggtggcagactttgggctgtcacggctcatagtggaagagaggaaaagggcccccatggagaaggccaccaccaagaaacgcaccttgcgcaagaacgaccgcaagaagcgctacacggtggtgggaaacccctactggatggcccctgagatgctgaacggaaagagctatgatgagacggtggatatcttctcctttgggatcgttctctgtgagatcattgggcaggtgtatgcagatcctgactgccttccccgaacactggactttggcctcaacgtgaagcttttctgggagaagtttgttcccacagattgtcccccggccttcttcccgctggccgccatctgctgcagactggagcctgagagcagagccccccccggggccgcaggagagggcccgggctgcgcggatgatgagggcccagtgaggcgccaagggaaggtcaccatcaagtatgaccccaaggagctacggaagcacctcaacctagaggagtggatcctggagcagctcacgcgcctctacgactgccaggaagaggagatctcagaactagagattgacgtggatgagctcctggacatggagagtgacgatgcctgggcttccagggtcaaggagctgctggttgactgttacaaacccacagaggccttcatctctggcctgctggacaagatccgggccatgcagaagctgagcacaccccagaagaagtgagggtccccgacccaggcgaacggtggctcccataggacaatcgctaccccccgacctcgtagcaacagcaataccgggggaccctgcggccaggcctggttccatgagcagggctcctcgtgcccctggcccaggggtctcttcccctgccccctcagttttccacttttggatttttttattgttattaaactgatgggactttgtgtttttatattgactctgcggcacgggccctttaataaagcgaggtagggtacgcctttggtgcagctcaaaaaaaaaaaaaaaaatgatttccagcggtccacattagagttgaaattttctggtgggagaatctataccttgttcctttataggccaaggaccgcagtccttcagtaacaccagtgtaaaagcttgaggagaaattgtgaagctacacagtatttgttttctaatacctcttgtcattctaaatatctttaatttattaaaaaatatatatatacagtaaaaaaaaaaaaaaaaa

SEQ ID NO: 25905 - DNA, 1282 bp, Homo Sapiens
gcccgctgacagattctcggtggcggcggcagcggcggcggccctggactgcggggaatgggaatcctaggtccctgactgagcacctcccccgcctccctgcccccgacatggctcaggagaagatggagctagacctggagctgcctccgggtacgggcgggagcccggcggagggcggtggcagcggcggcggcgggggcctcaggaggtctaacagcgcccccctgatccacggcctcagtgacacttcgccggtgttccaggccgaggcgccgagcgccaggcggaacagcacaacgttcccgagccgccacggcctgctgctgccggcctcccctgtccgcatgcacagcagccgcttgcaccagatcaaacaagaagagggcatggacttgatcaaccgagagacggtccacgaacgggaggtgcagaccgcaatgcagataagccactcctgggaggaaagtttcagcctgagtgacaacgacgtggagaaatccgcctcccccaagcgcatcgatttcattcctgtgtcaccagcaccgtcacccactcggggaattgggaagcagtgtttttcgccatccttgcaaagttttgtaagtagcaacggattgcctccaagccctattcccagcccaacgacccgatttaccacccggagaagccagagccccatcaattgcattagaccaagtgttcttggaccattgaaaagaaaatgtgaaatggaaactgaatatcagccaaagagatttttccagggcatcaccaacatgctttcttctgacgttgcacagctgtcagatcctggtgtgtgtgtatcttcggatacccttgatggaaacagcagcagtgccggatcttcttgtaactcaccagcgaaagtcagcactaccaccgactctcctgtgtcacctgcccaagcggcttctccatttattccactagatgaactttcgtctaagtgattcactcatcctgagactttctttttgcagtggagagagagaataatctagttggggcaaacactgaactttgtcaattaatttgaggctatttcctatttgaccccttttcttttttgaaattccctgaaatgatgttattctagagaacttctatgtcaggttcctttggatacccttgaattcagtgtagtaatattttcagacgtttccccaataagtgtgttgaagcatacatctttacgctgctaatatgtctaaatacatatgttatcccttgatttttttaaataaaaaaaaaaaaaaaa

SEQ ID NO: 25906 - DNA, 1110 bp, Homo Sapiens
agatgtttgatgcacgaacgagtgagagtgttctctccgttgagcatgggcagccagtggagagtgtcctacttttcccctctggaggtcttctggtgtcagcaggaggtcgttatgttaaagtctgggacatgttaaaaggaggacaattgctagtatctttgaaaaatcatcacaaaaccgtgacatgtttatgtctaagcagctctggacagaggttactctctggctcactggataggaaggtgaaagtatacagcacaacttcctacaaagtagtccacagttttgattatgcagcttcaattttgagtcttgcccttgcacatgaagatgagacaatagttgtaggaatgaccaatggaatactgagtgttaaacatcggaaatctgaagcaaagaaggaatcacttcccagaagaagaaggcctgcatatcgaacctttattaaaggaaaaaattacatgaagcaacgggatgacattttgattaacaggccagcaaagaagcacctagaattgtatgacagggatctgaaacattttcggatctctaaggcactcgatagagttcttgatcccacttgtacaataaagacacccgagattacggtgtccatcataaaggagttaaatcgaagaggcgtccttgcaaatgcgcttgcaggtcgggatgagaaggaaatcagtcatgttcttaattttttgataaggaatctttctcagccaagatttgcccctgttttaatcaatgctgctgaaataattattgatatatatctgcctgtaattggtcagtcccctgtagttgataaaaagtttttactacttcaaggacttgtagaaaaagagattgattaccaaagagaattgttagaaaccttggggatgatggatatgctttttgccaccatgagaaggaaggaaggcacttctgtgttggaacacacatctgatggatttccagagaataagaagatagaatcatagtgtctgctaaataagacatataagaactctgaagttggaatagatttgactgtattaaatgttggcgagagactctctttgatacattaaaaaaactgtttgcagaaaaaaaaaaaaaaaa

SEQ ID NO: 25907 - DNA, 1472 bp, Homo Sapiens
ggctcagcagagcccggggcacaggccggaggggctgcaggcgcgaggctgggttacgtgaggaagctggggttttcgcgggcagctttagagccccagtcagggaaaccgaggccgggcttcctggctgcctcgcgagcctcttcatggctctcgccgccgccctgaggtgcctagaatgggttccggcctccggggaggttcccagtaaccgcaggagccaccattgatttggcgtctgctgggtgcaaagcccagcgcgctaaccctttactcgcgacctttcgcttcaccttcacagcagccctgcgaggagagttgtggactggggcaacctttgccagtgatgagaagtgatgctcgtggcagtgctgaatctctctgaatatgattcgaattgcagccttaaatgccagctccaccattgaggatgatcatgaaggaagctttaaaagtcacaaaacccagacaaaggaggctcaggaagcagaggcttttgcattgtaccacaaggcccttgatctgcagaaacatgaccggtttgaggagtctgccaaagcctaccatgagctcttggaggcgagcctgctgcgggaggcagtgatgctggactccacagatgtcaacctctggtataagattggacatgtggccctgaggctcatccggatccccctggctcgccatgcttttgaggaagggctgcggtgcaatcctgaccactggccctgtttggataacctaatcactgtcctgtacaccctcagtgattacacaacatgtctgtacttcatctgcaaagctttggagaaggattgccggtacagcaaagggctggtcctcaaggagaagatttttgaggagcagccttgtctccggaaggactctctcagaatgttcctcaaatgtgacatgtcgattcacgatgtttcggtgagtgcagctgagacacaggcgattgtagatgaggccttggggctgcgaaaaaagaggcaagcgctgattgtgcgggagaaggagccggacctgaaacttgtgcagcccattcctttcttcacctggaagtgcctcggagagagcttgctggccatgtacaatcatctcaccacctgtgagcccccacgtcccagccttggcaaaaggattgatttgtcggactaccaggaccccagccagcctcttgagtcctccatggtggtgacgccagttaacgtgatccagccaagcactgtcagcaccaacccagctgtggctgtcgccgagcctgtggtctcctacacctctgtggctacaaccagcttcccactgcacagtcctggtctgttggagacaggcgctcctgtgggtgatatttctgggggagataaatccaagaaaggggtaaaacggaagaagatttcagaagagagtggagaaacagcaaagcggcggtctgcccgtgtccgaaacaccaagtgcaaaaaaaaaaaaaa

SEQ ID NO: 25908 - DNA, 1607 bp, Homo Sapiens
ggccgcgggaggagggagccgtcaccgaggagctgccgctcgctgccccgggcaggggcacagttgcaaccaaggcaatgtcttactacctcagctcagaaaaccacctggacccagggcccatctacatgcgagaaaatgggcagctgcacatggtcaatctggctctggatggtgtcaggagtagcctgcagaagccaaggcctttcagactgttccccaaaggcttttctgtggagctttgcatgaacagggaagacgacactgcacggaaagagaagactgatcatttcatcttcacatacacccgagaggggaatcttcggtactccgccaaatccctcttcagccttgtcctgggtttcatctccgacaatgtggatcacattgattcccttattggctttcctgagcagattgctgaaaagctgttctctgctgctgaagccagacagaaattcactgagccaggtgcagggctgagggctttacagaaattcactgaggcctatggaagtttggtgctttgctccctgtgtttgcgaaacaggtatctcgtgatttcagaaaagcttgaggagattaagtctttccgggagctgacctgcctggatctttcctgttgcaagcttggagatgagcatgaacttctagaacatctcaccaatgaagccctgtctagtgtaactcagctccacctgaaggataattgtttatctgatgctggggtgcggaagatgacagcaccagttcgagtgatgaaaagaggccttgagaatctaacattattagacttatcatgtaaccctgagatcacagatgcaggcattggatacctcttttcttttaggaaactaaactgcttagatatctctgggacagggctcaaggacatcaaaaccgtcaagcacaagctccagacccacataggccttgttcactccaaagtgcctttgaaggaatttgatcatagtaactgcaagacagagggctgggctgaccagatcgttctgcagtgggagcgtgtgactgcggaagctgtgaagccacgggagacctcggagcctagagcagcagctcagcgcttctatgggaagcggtctcgagcagaagccccactgaagtgtcccctggcagacacccacatgaactcttccgagaaactccagttctataaagagaaagccccagattgccatgggccagtgttgaaacacgaagctatctcaagccaggagtcaaagaagagcaagaagagaccttttgaggagtcagagacagaacagaataactcttcacaaccttcaaagcagaaatatgtatgtcttgctgtggaagactgggacttgttaaattcctattgattagtagatacaagttgacctttctctggcccccagctctagtgtttgagtaaaggagactgaggatgatttactttttgtttgaatttacctatggcattagcatagtaagcagatatttctacttttgtggtgtgggaggggaatgctatggaagtatgtaataatttctaatgtatattttcaatacatagtaattttttcaaataaacatttttgctgtccttaaaaaaaaaaaaaaaa

SEQ ID NO: 25909 - DNA, 2085 bp, Homo Sapiens
catgtccatcctgcgggaggtggacgagcagtaccacgcgctgctggagaagtacgaggagctgctgagcaagtgccggcagcacggggccggagtgcggcacgccggcgtgcagacctcgcgccccatctcccgggacagctcgtggagggacctgcgcgggggtgaggagggccagggtgaggtcaaggcaggagagaagagcctgagccagcacgtggaggccgtggacaagcggctggagcagagccagcccgagtacaaggcgctcttcaaagagatcttctccaggatccagaagaccaaggctgacatcaacgccaccaaagtcaagacgcacagcagcaagtgacccttctccggcctgcagcctcccccagggtggaagccgtggggtccctcaggcctgggcggtgcagcttccagagagcgagcgccctttagcggcctgccaccacagcacgcggcctcctgatccggaagcacgcagcatgttccctgctgagcggaggcagcccacctgtcctgcctcccaggagcccttggccacctcgcgccagcccaaaggcgcagctctgagttcaaagccaaatgtccccactaccccagggatcccccagctcccccagcccctggcttcctgaccctgcgcctcaccctcagactggtgaccaggcttctgaaagccattctggatcagttggcttttttttttttggttaagtttgttttttctaagagatttgcaatgcaaggtctccttgaccccttgccacaactggaaacacttgaaaggggaccccagggccagctgtttcaggggtttcctggaccacccactgcttctccccaaccctgatgcgctgacattcccttagcaccagctgtcccacctccagggtcctgaccaggtcagagatgtcccctgccatgcagagcaggaagcctcagctgggcctggagtgtccctgctccagccctgccagggacaggtttctccctggatactcttggcccaccgcagatctgtagccagtcagaggaggaggagaaggagcccctcagcagagtggtgcagtttcgctcagagcttgtctccttggcttccaaccccagaaatgcctgctgggccttaagctttccaggggccggggcagtggggagcccccatcccttcacaccgccaccaactaaccaagcttggcctctgactcccgtctctgtgcttgcccccatctcagggaccatgatgtctcagtcactccacgctccccacaggccaaccctggcacaggtcatgtctgcagcccccagaatgttctggacatgcaccaccagccggtggtcccaatgtccacccctgcctccccttcactggggactggggttttcgccccatgctgcatcgtgttgtattgggatggggctgaggaacatgctccctccctccctcccataaaatgcctgctcttcacctcccacctttgtggggggcttttgaggacccagctgcgtcaggagttttgcttcaagatgtcagaaagtcaagttcagctaagagacacccaggtccccagcttgccctgagcagcccttcagggcttctggttccttctgccgcccttcctgagaccttagaaaccagaagagccatacagtcagtggaaggcgggggggccctggcctctgcaccgggatcccagtgggaaccttcatgccttatttatttctaatgggtaaaggggttttcttaccaagcatccctgacctcctggagacaccacctgctttccgggcggcactgtgatgggagctggtggcgactgagtccttctgtacgtgcaactgggaaacttttgtcctttgaggctaggcagctccctgccctccgtgtgtgtctgttatctgggggagaggagtgtggaagggttgggggaagagctccagcctgtctgctccccagctctgtagtggcagaccagcgtcacctttgaagtatacgtgagagaaatatatttacaaatgctttattctcttctttaataaaaaatgcaccagtattctaaaagcaaaaaaaaaaaaaaa

SEQ ID NO: 25910 - DNA, 1444 bp, Homo Sapiens
cggcgttggtggtggcagtggacggggcggctgggcctggaacagtcggagcagccgctagcagaaggatgacccaagacgggaagcgggctgctgagcctcgccgattcccgtgcttgtaactgccccagccggacaccccccctcccttgacctacccggagctcagcctggccttacttcagtgataaaaggaggaaaggctggctacagcaaacatcattcaagatgtccagcaaagggagcagcacagatggcagaacagacttagctaatggaagcctgtctagcagtccagaggagatgtctggagctgaagaggggagggagacatcctcaggcattgaagtggaggcctcagacctgagtttgagcttgactggggatgatggtggccccaaccgcaccagcacagaaagtcgaggcacagagacagagagctcaggtgaagataaggactctgacagcatggaggacactggtcattactccattaatgatgaaaatcgagtccatgaccgctcagaggaagaggaagaggaggaagaagaggaggaagaagagcagcctcggcgccgtgtacagcgcaagcgggctaaccgtgaccaggactcatcagatgatgagcgggccctagaggactgggtgtcctcagaaacatcagctctaccccgacctcgctggcaagccctccctgcccttcgggagcgggagctgggttcaagtgcccgctttgtctatgaggcctgtggggcaagagtctttgtgcagcgtttccgcctgcagcatgggcttgagggccatactggttgtgtcaataccctgcactttaaccagcgcggcacctggctggccagtggcagcgatgacctgaaggtggtggtgtgggattgggtacggcggcagccagtactggactttgagagtggccacaaaagtaatgtgttccaggtgaggcaagggagcataatagcaactgagagaatcaggcatgagttagagaaatctgaactgcagcatggattgggagctgatagtgagttattgtaggaattacatatcgggacatggccctactttggctcccctaatgacctaaatacactgaaagactcttggcaaccctagattccttgagcatgtggactgttggaagcctcataggtagggtgcatgcagcttattaaatgtgtgctggtaggaggcagtgtagtataagcacaggctcttgaaccaaactgcctgagttcaaatcctagcccttctgcttactagctcagtgatcttggccaagttattttacctttgtcttcagtttatctgtaaaatgggactaataacacatagggttatgaggattaagtaacaatagaagctaagcagttagaactgtgactggtacttaataaacatttgataaatgttaaaaaaaaaaaaaaaaaaa

SEQ ID NO: 25911 - DNA, 1461 bp, Homo Sapiens
cggacgcgtgggcgcgtcccagccatggcgacatcctcggccgcgctgccccgaatactcggcgcgggtgcccgggccccgtcgcgctggttgggctttctcgggaaggcgaccccccggcctgctcggccgagccgcaggacgcttggaagcgcgacggcccttatgatccgcgagtcggaggacagcaccgatttcaacgacaagattttgaatgagcccctcaagcactctgacttcttcaatgtcaaggaactgttttccgtgagaagcctcttcgatgcccgagtccatctgggacacaaagctggctgtcggcacaggtttatggagccgtacatctttgggagccgcctggaccacgacatcatcgacctggaacagacagccacgcacctccagctggccttgaacttcaccgcccacatggcctaccgcaagggcatcatcttgtttataagccgcaaccggcagttctcgtacctgattgagaacatggcccgtgactgtggcgagtacgcccacactcgctacttcaggggcggcatgctgaccaacgcgcgcctcctctttggccccacggtccgcctgccggacctcatcatcttcctgcacacgctcaacaacatctttgagccacacgtggccgtgagagacgcagccaagatgaacatccccacagtgggcatcgtggacaccaactgcaacccctgcctcatcacctaccctgtacccggcaatgacgactctccgctggctgtgcacctctactgcaggctcttccagacggccatcacccgggccaaggagaagcggcagcaggttgaggctctctatcgcctgcagggccagaaggagcccggggaccaggggccagcccaccctcctggggctgacatgagccattccctgtgatgttcactctcctcccaaagcaaaccacagccaagcctgtctgagctgggagtccccttccccagccctgggtcagcggcatcctcagtcgttgttacttactcagctgatgtcacagtgcagacatccaccgttccaccacagaaccagtggctgagcggaccaacgttgccatgtgcgtttgctctgtggggaacagagcacagagggtgagcgacatgtgcagaacggccccttggctgcagttaggacctcagtggctggtatggccgagctgctagaagatgctgctgtccctgtgatcccagcagccctcccttcaccgtgacccctgacctttgtcaggaaggtgcagtttttcttctcaatctaaatgcctttcaggtgggccgcttccttggctacctggttccagggggctgttttgtaatgagatgctgctggcaggccactcagaggctcccagctgggttggtgggacagccaggccagatgacctgattccagcaaaaataaaactcagatttgggcaaaaaaaaaaaaaaa

SEQ ID NO: 25912 - DNA, 2230 bp, Homo Sapiens
ccatcacgtcccctgacaccgacaccccattgctcccacagtctccccagtctccactttggtccccagcgctgtctgcccgaggatttgcctgaaggctgcccccaactctgcacccgccccccgagggccaccgaggaccatgactaagacagatcctgccccgatggccccgccaccccgaggagaggaggaagaagaggaggaggaggatgaacccgtccccgaggcccccagccccacccaggagcgccggcagaagcctgttgtgcacccctcggcacctgcccccctccctaaggactacgctttcaccttcttcgatcccaatgacccggcgtgccaggagatcctgtttgaccctcagaccaccatccccgagctgtttgccattgtgcgccagtgggtgccccaagtccagcacaagatagacgtcatcggcaatgagattctgcgccgaggctgccatgtgaacgatcgtgacgggctgaccgacatgacactgctccactatgcgtgcaaagctggggcccacggagtcggggaccccgcggcagccgtgcgcctctcgcagcagctgctggcgctgggcgcagatgtgacgctgcgcagccgctggaccaacatgaacgcgcttcactacgcggcctattttgatgtgcccgtcctcgtgcgtgtgctgctgaagggtgcgaggccgcgagtggtgaactccacgtgcagtgacttcaaccacggctcagccctgcacatcgctgcttccagcctgtgcctgggcgccgccaaatgtttgctggagcacggcgccaaccctgcgctgaggaatcgaaaaggacaggtgccggcggaggtggtcccagatcctatggacatgtccctggacaaggcagaggcggcactggtggccaaggagctgcggacgcttctggaagaggcagtgccactatcttgcgccctccccaaggtcacgctacccaactatgacaacgtcccaggcaatctcatgcttagcgcactgggcttgcgcctgggagaccgcgtgctgctggatggccagaagacgggcacactgcggttctgtgggaccacggagtttgccagcggccagtgggtgggcgtggagctggacgaacctgagggcaagaacgatggcagcgttgggggcgttcggtacttcatctgccctcccaagcagggtctctttgcctccgtgtccaagatctccaaggcagtggacgcacccccctcctctgtcacctccacaccccggaccccccggatggacttctcccgtgtcaccggcaaaggccgcagggaacacaaaggcaagaagaagaccccatcatccccatctctgggcagcttgcagcagcgtgacggggccaaggctgaggttggagaccaggtccttgtcgcgggccagaagcaggggatcgtgcgcttctacgggaagacagactttgccccaggttactggtatggcattgagctggaccagcccacaggcaagcatgatggctctgtcttcggtgtccggtacttcacttgccccccgaggcatggggtcttcgcaccagcatcccgtattcagaggattggcggatccactgattcccccggggacagcgttggagccaaaaaagtgcatcaagtgacaatgacgcagcccaaacgcaccttcaccacagtccggaccccaaaggacattgcatcagagaactccatttccaggttgctgttctgctgctggttcccctggatgctgagggcggagatgcagtcttagaggccctggacacctgacaaagagacagagtccccactagcatctcctgacacccgaggagccctgagtcaccctgagatagagattcccagtaacacatccagagtagagacccctgttagccagccctcgatcattgaggccccattattaacagatactcccataataacccccaaatacagaccccatgtcacccagaaagagattccctgagtagcaccttcaggctagtccctatccccaacccctcagagcagattcccagattaacagatttccatatcaccccaaatgatggtgaccctctccacataatgcattacaacagaacattcttgaatcacccaaccctggatcagaaacctccccattaacaaacactgccccttaagtcctcttgaaataaacataggtcacacccccaaagcaaaaaaaaaaaaa

SEQ ID NO: 25913 - DNA, 1673 bp, Homo Sapiens
ctctcctcgcccgctgggtgctgaagttgggcggatggcagcaaaccggctccgctagaggaccgagccgcccagccccgctcccccggacccatcggcgcgctgcccacacctccaggcgaccggccaactgggtcctgaagtagctgaaatgcgaaaaaggcagcagtcccaaaatgaaggaacacctgccgtgtctcaagctcctggaaaccagaggcccaacaacacctgttgcttttgttggtgctgttgttgcagctgctcctgcctcactgtgaggaatgaagaaagaggggaaaatgcgggaagacccacacacactacaaaaatggagagtatccaggtcctagaggaatgccaaaaccccactgcagaggaagtcttgtcctggtctcaaaattttgacaagatgatgaaggccccagcaggaagaaaccttttcagagagttcctccgaacagaatacagtgaagagaacctacttttctggcttgcttgtgaagacttaaagaaggagcagaacaaaaaagtaattgaagaaaaggctaggatgatatatgaagattacatttctatactatcaccaaaagaggtcagtcttgattctcgagttagagaggtgatcaatagaaatctgttggatcccaatcctcacatgtatgaagatgcccaacttcagatatatactttaatgcacagagattcttttccaaggtttttgaactctcaaatttataagtcatttgttgaaagtactgctggctcttcttctgaatcttaatgttcatttaaaaacaatcattttggagggctgagatgggaaataaaagtagttaaataacatcagaaactgagttcctggagaactacagtttagcattcctcaggctactgtgaaaacacaaccgttatggtctttgtctccatttttatcaaggttttccatggttaagtttggagaaaataccacacaaaacaatgaattgccaaattgtttgttttattcaagactcattctacttgcaagcaaagtgtatttgtagtcctatgaacagtctcctcgtgtatctccagagactgcatgtgcaaagtaaaatgcttcatttgccacatagttgttgtaatatttaatccagtagcataacttatatctgtatttaaggacttttgtgcaatatggtcttaagaaataattgccaaaaaaatcggccatggttctgcatttttaacataatctaagacagaaaaaaagcaatttttactatgtaacaatggtattcaacattctatatactgtgtttagtacactaattttgaagccaatatttctgtacatgaaaaagagctatttatctctgtttgttggaaaatcctaatggggattcctctggttgttcactgccaaaactgtggcattttcattacaggagagtttactatgctaaaagcaaaaaacaaaaaaaaaaaaaaagggaagaaggaaaaaagcaaaaaacaatttgaagatatcctatctcaatgacaaatcaaaagagtgatattgcttttaactgtaatagaagaaaatgaatttatgtatatatcagatgtccaatactgtaattaatttattaaagactggctctccagttttaaaaaaaaaaaaaaaaaaaaaaaaaaaaaaaaaaaaa

SEQ ID NO: 25914 - DNA, 1586 bp, Homo Sapiens
cgcgtccggacacccgatcccagcatccctgcctgcaggactgttcgtgttcagctcgcgtcctgcagctgtccgaggtgctccagttggaggctgaggttcccgggctctgtagctgagtgggcggcggcaccggcggagatgcctgggaagaaggcgcgcaagaacgctcaaccgagccccgcgcgggctccagcagagctggaagtcgagtgtgctactcaactcaggagatttggagacaaactgaacttccggcagaaacttctgaatctgatatccaaactcttctgctcaggaacctgactgcatcaaaaacttgcatgaggggactccttcaaaagagttttctcaggaggtgcacgtttcatcaatttgaagaaagactgcattgtaattgagaggaatgtgaaggtgcattcatgggtgcccttggaaacggaagatggaatacatcaaagtgaatttctgttcaagttttcccagattatcattctttgggatgagagaacattataaaaccactttgtttattttaaagcaagaatggaagacccttgaaaataaagaagtaattattgacacatttcttttttacttagagaatcgttctagtgttttttgccgaagattaccgctggcctactgtgaaggtagatgacctgtgattagactgggcggctggggagaaacagttcagtgcattgttgttgttgctgtttttggtgttttgcttttcagtgccaactcagcacattgtatatgattcggtttatacatattaccttgttataatgaaaaaactcattctgagaacactgaaatgttatactcagtgttgatttcttcggtcactacacaacgtaaaatcatttgtttcttttgactcaaattgtattgcttctgttcagatgatctttcattcaatgtgttcctgttgggcgttactagaaactatggaaaactggaaaataactttgaaaaaattggataaagtataggagggttacttggggccagtaaatcagtagactgaacattcaatataataaaagaacatggggattttgtataaccagggataataaaaagaaaaaagaagttaatttttaattgatgtttttgaaacttagtagaacaaatattcagaagtaacttgataagatatgaatgtttctaaagaagtttctaaaggttcggaaaatgctccttgtcacattagtgtgcatcctacaaaaagtgatctcttaatgtaaattaagaatattttcataattggaatatacttttcttaaaaaaaaggaacagttagttctcatctagaatgaaagttccatatatgcattggtgaatatatatgtatacacatacttacatacttatatgggtatctgtatagataatttgtattagagtattatatagcttcttagtagggtctcaagtaagtttcattttttttatctgggctatatacagtcctcaaataaataatgtcttgattttatttcagcaggaataattttatttattttgcctatttataattaaagtatttttctttagtttgaaaaaaaaaaaaaaaa

SEQ ID NO: 25915 - DNA, 3109 bp, Homo Sapiens
tgaagatggcggctcccaccgccaacaaggcagcctccctgggctgtaacaacaagcctgcgttcccggagctggatttcaggtcgggagctcgggtggaggaattgaacaaactcatccaagaatttacgaagcacgaccagcgggaatacgacgaccagagagcgctggagattcacacagccaaggatttcatcttttccatgctgggaatggtgcaaaagctggaccaaaagcttccagtggctaatgaatacctgttgctctctggaggtgtccgggaaggcgtggtggacctggacttagatgagcttaatgtctatgcccggggtactgactatgatatggactttaccctcttggtgccagccctcaagctgcatgaccgtaatcagcctgtgacactcgacatgcgccactcagccttgtgccactcttggctgagccttcggctctttgatgaggggacaatcagtaaatggaaagactgctgcaccattgtagatcacatcaatggtgccaccaactacttcttctcacctaccaaagtggctgactggttctatgactctatcagcattgtcctatcagaaatacagaagaaaccccagcgagggatgccaaaggtagaaaaggtggaaaaaaatgggaccatcatctccatcattctgggtgtagggagtagtcgcatgttgtatgatattgtccctgtggtatctttcaaaggttggcctgcagtggcccagagctggctcatggagaaccacttttgggatgggaagattactgaggaagaggtcatcagtgggttttacttggtgcctgcttgctcctacaagggtaagaaggacaatgaatggcggctgtcctttgccaggagcgaggtgcagttgaagaagtgcatctccagcagcctcatgcaggcctatcaggcctgcaaagccatcatcattaaactgctgtcccggcccaaggctattagcccctatcacctgcggagcatgatgctctgggcctgcgacagacttcctgccaactacttggctcaagaagactatgcagcccactttttgctgggcctcatcgatgacctgcaacactgtctggtcaacaagatgtgccccaattatttcatccctcagtgcaacatgctggaacatctgtctgaggagacagtcatgcttcacgcccggaagctgtcctctgtgcgctcagacccggcagagcacttgcgcaccgccattgagcatgtcaaggcagccaaccggctgacactggagctccagaggcgaggtagcaccaccagcatcccctctccacagtctgacggaggggaccccaaccagcctgatgaccgtttggcaaaaaaactgcagcagctagtgactgagaacccgggaaagtcaatctctgtctttatcaatcctgacgatgtcacaaggccccatttcagaattgatgacaaatttttctgagtgttagctgacttttttttttcctgattcttaaactctgataatgtgtcgtgtggtttgtgatgctatctttctgttttttacatatccagcctagattggatttgttaagaacaaattttaagtttcctggttctgcaggatggtgcaggctctgaaacagtatattactatttcatattctgcctctgatttcgttgtttactttttgtagttattgtcatgctctttagtttgttggagttttttttctttttaaggagatcttaagccatagatgaaaatgcccatgaatcctcttgcttttttctgtttcatacttggtgcaaatttgttcatgggtatggggaaacaaatctctttctgatgcttaacgattctatcctattatttttattattttgtttttgtcttttttcttatgagctttcaccactactgatatttgagaatcatatgaacctgggaactacttggcatgttagctggatttatttattttggccagtgaccagagtagtttccccccttttccaccaaacaatgtaaactttgaaagtgataatactacaaattgtgttttggagcaacttcattgaatgtaattgtcctcaaatcagagaacactgggtggtttgaagggtgtctttgacagttttccaagcagaattaaggtttccaaatgttaattttagcatatgtaattatttgaagccttatttaaatcctattaaagaacataccattataattattatttgcactaatctttgccattgtcagaattgcaaagtgtgtttcaatataaattaacaaccactctcgaaattctatcattttttcattttgcccatttctatcagtgaaatgattctttgcatttgcttagttctccttcagttgtggggtcctgctttgccctctttgatattcctggttcctgtcttactgagagaagttgttaaagctttatacatgttgaccccatctaaagctggggaaaatatacacttgatgaagtaggtgtctttgtatttatttcttttggggtcatagaggtaagcttttttgtaaaatctctactcttcctgagagttttgagaaaaactggcaggaagaacttataatccccaaatagaagataccacgtctgttcaaaagcaggtattgctatagagcagcacccaggaaatatctgtgggtggcagccttggtatagaggtgtcctgtcttcatgagtgaagttacttgcctgattaggtgctggaaggtattggctccctgttttggtgtggactcatggcaagctggtgtttaagaggtcaggaggcctgctgatctttcaaaggacacccatgatgtctactcatagaaagggcaagtaacgtgttcattttggtcttgaatgtccaaactcaagggttggattttggccaattgaaatcagacatatgcgatcttgggtttttgcatggaaattaatgtaatgcttataaatgaaaaatgaaaacatttcaaccatctaagtcaaacacaaaaataataaaaaaagaaacatactggccttgaaaaaaaaaaaaaaaaaaaaaaaaaaaaaaaaaaaaaaaaaaaaaaaaaaaaaaaaaaaaaaaaaa

SEQ ID NO: 25916 - DNA, 3702 bp, Homo Sapiens
gcggaacgggcggaggctgccggtttcgtaaccgtcgctcctcctcgctgactcgcgggctgtgaggcctgggtcggctcgggccgcaccgcgcggggccgctcggagtggaggccgcctgggggcaggcgggctagaggagcaggtacatgtgaagattttttggcagcttagcgtggaaaccattgatcaccctgctctcatttctacctgttctgtgttggcaagggagagtgcccaaatgagcaagatatcgcagcaaaacagcactccaggggtgaacggaattagtgttatccatacccaggcacatgccagcggcttacagcaggttcctcagctggtgcctgctggccctgggggaggaggcaaagctgtggctcccagcaagcagagcaaaaagagttcgcccatggatcgaaacagtgacgagtatcggcaacgccgagagaggaacaacatggctgtgaaaaagagccggttgaaaagcaagcagaaagcacaagacacactgcagagagtcaatcagctcaaagaagagaatgaacggttggaagcaaaaatcaaattgctgaccaaggaattaagtgtactcaaagatttgtttcttgagcatgcacacaaccttgcagacaacgtacagtccattagcactgaaaatacgacagcagatggcgacaatgcaggacagtagacctcaccctttccagactttagagcttgtggcttgaatgttaaaggtgtgaccaccgacaccactcatgtcaatggctgaaagttgtccatttccatgactcaaagacccattggaggctattttctgggatcagcactgaagagttgattagctaaaaatgttagccttgtaattcgaatatctggttttaaatgatagaggtttttgtgggaatcaaaatcccccaaatgttaaggtatatggtaaaaaaagaaatatctgggatcccgatgttcttaataaatcctgacttcccaagaaatgcttcttttttaagttgacaaaaggaatggggaactggcaggccgcgcagaaggttcttggttttaatggataggctgaattggattaagaaaagttgaatgccacctatggtaatctatttgtgattttcttctaaattatgtattataaattcgtagagctatagaaagcaatgagtgtgtaatttggagtgattttatatatggcataaactttgttttaacataattagtactgttttcccccaaaagtacaagtttttgagtagcaatgtcaggttaagtaaagaaacttcatcacatcttataggtagtgtgtggccaattgacttaaaaaatacaaataacatttaggaagcaaatagattaaacacaaaaataaaactaaagcataggaattatgtttttgagatacctttgggcttagattggcattgttttattctaaaaacccaactcagtggtgtagagaaacttgtgtaccaaaattttagtttctgcagatgctagtgtttttttggatacaattttgacaaccaagttagtaaacaaaatatcttaacagtttgatgacacaagctactgatgagggtttggaatattaattcagaaggtagtttctcttgtgttcaaaatagctgccatggggctgttacttttaaagtcaaaattttcttctgaaggctcattttggtatttgatcttaaccaagtgattattagagaaatgtatcaactccatgccatctcccaaaataattgtctaagaaaacttgaaagtgtaaggttttaacctttaatttatttctcttaaatacatcttttgatattgttgttgtgacatttctttttctggttagtgggctttccagactttgtaccactgcttctgtttattcatttatatgcttttgtgtcccataaattatttcagaaaatgctgataaaactcaggatattgacatttttgttgagactaaaaaatggcagtcgctaaagtagggactctagagtctggcttacgtcagtgttggtagtttagattgtctttgtcaacgttttttcttctctcttttgctttcttttctttctctttttttcttagcacagttctagctcaaatttgtgtattttttgtgtgcctgggctggagatgagagactgagtcataactgatttaaaagtttgtgttatcaggtatcttatttgaacatggtcatttttggccacattgctgtttcatactaggacttgggatgatgtagccagaataaaactcaagttgcaccctccggttggtggaagattgctgaccgtgccgtttctgggcaggagaagacatcatggtgtccagcaactcagcaaagccattcttaagagtcgtgaggtccttctgaatgtaaaactggagcccaggagaagctgtcccaggagggctgttaactccctatagagccaggagacaggataggggtttctagggtccaacaccagcttaccttggagtgtgaatctacccatgaaggatgagagatgttttgaaaaactagccaggacacacccacaggatcctactggctccttagcagctgattggtgttacataattaacttaattggagatgcattaggtcacttgaatgtataagcaagcacctatggtaggcgctacagacatttaaatctcttgggaattcgatgctcccatggaatttataccagttatatgaattgacttaagtatcttgaaaaagaaactttagagaaagcatcaggggtgtgtactcagtatttcaaatcagaacacaagattggaacttttggaaaaatgggttcaagctttcctattagccatggaaatgcaaagtttagcagaagcaagcaattaggcagagaacaaaaatgttaagcatggtgttgtctatcttattgaagtggttggaaatgaaagcttttaatttgatagatttatcagtataaaattagggaaaccacgtgtggggaatgaatcaatttagagcttcgggaattgtgaggtgacttttgtaacttttgttctgtgtgtgacctgtgaaccactaggatgtgatctgcccttgtgggcaggtccagcatagttaggagttaggctttagcataaatttctagctgcatctgagtctcctgggatgggtgctctttggctggttttggctgcggatggtgagatcagagcagctcttcctgctgctggcccctgcaatcagttgttgggatgccagtgcagatcactaagtagtaagattttaatcaaacacgaccaggtccgaaatgcaggtcatgagtgtgaaattctcaaatttacataaaaagtagaagtatagacagtttaacatttggtattaaaggagaggaaattgtagcagcttttcacgtttcccagtccccattagagggcttgagaccttgtacctgaacaacccattttgcactcagtgctttctgatgccttaggagaattgttttgtttcacaaaagctgggaaggaagaagtccattctgcagctgttagatctgcctctcaggaaaaagtactaacttgttctttttgttcctggctttcatcagtttgtgagatttctctattttttttaaatataattttatttctttcaacaaatataaaataaaaaacaactttggaacaatgaaaaaaaaaaaaaaa

SEQ ID NO: 25917 - DNA, 1469 bp, Homo Sapiens
ggctgggcctgcctcggacgccgccggtgtcgcggattctctttccgcccgctccatggcggtggatgcctgactggaagcccgagtgggatgcggctgacgcggaagcggctctgctcgtttcttatcgccctgtactgcctattctccctctacgctgcctaccacgtcttcttcgggcgccgccgccaggcgccggccgggtccccgcggggcctcaggaagggggcggcccccgcgcgggagagacgcggccgagaacagtccactttggaaagtgaagaatggaatccttgggaaggagatgaaaaaaatgagcaacaacacagatttaaaactagccttcaaatattagataaatccacgaaaggaaaaacagatctcagtgtacaaatctggggcaaagctgccattggcttgtatctctgggagcatatttttgaaggcttacttgatcccagcgatgtgactgctcaatggagagaaggaaagtcaatcgtaggaagaacacagtacagcttcatcactggtccagctgtaataccagggtacttctccgttgatgtgaataatgtggtactcattttaaatggaagagaaaaagcaaagatcttttatgccacccagtggttactttatgcacaaaatttagtgcaaattcaaaaactccagcatcttgctgttgttttgctcggaaatgaacattgtgataatgagtggataaacccattcctcaaaagaaatggaggcttcgtggagctgcttttcataatatatgacagcccctggattaatgacgtggatgtttttcagtggcctttaggagtagcaacatacaggaattttcctgtggtggaggcaagttggtcaatgctgcatgatgagaggccatatttatgtaatttcttaggaacgatttatgaaaattcatccagacaggcactaatgaacattttgaaaaaagatgggaacgataagctttgttgggtttcagcaagagaacactggcagcctcaggaaacaaatgaaagtcttaagaattaccaagatgccttgcttcagagtgatctcacattgtgcccggtcggagtaaacacagaatgctatcgaatctatgaggcttgctcctatggctccattcctgtggtggaagacgtgatgacagctggcaactgtgggaatacatctgtgcaccacggtgctcctctgcagttactcaagtccatgggtgctccctttatctttatcaagaactggaaggaactccctgctgttttagaaaaagagaaaactataattttacaagaaaaaattgaaagaagaaaaatgttacttcagtggtatcagcacttcaagacagagcttaaaatgaaatttactaatattttagaaagctcatttttaatgaataataaaagttaattatctttttgagctaaaaaaaaaaaaaaaaaaaaaaaaaaaaaaaa

SEQ ID NO: 25918 - DNA, 3665 bp, Homo Sapiens
ggctggggggccgcgggcgggaggcggataaaaaggccccagggcgcccggggagggagcccgttagcgctgctccgccgcggcgcccgcccagccccggactgtccgcgctccatctggtatcttggcctcagctgtccttgaagtcaccatggcgaggtccccaccagccaccctctttctgttcctgctgctgctaggccagccccctcccagcaggccacagtcactgggcaccactaagctccggctggtgggcccagagagcaagccagaggagggccgcctggaggtgctgcaccagggccagtggggcaccgtgtgtgatgacaactttgctatccaggaggccacagtggcttgccgccagctgggcttcgaagctgccttgacctgggcccacagtgccaagtacggccaaggggagggacccatctggctggacaatgtgcagtgtgtgggcacagagagctccttggaccagtgcgggtctaatggctggggagtcagtgactgcagtcactcagaagacgtaggggtgatatgccacccccggcgccatcgtggctacctttctgaaactgtctccaatgcccttgggccccagggccggcggctggaggaggtgcggctcaagcccatccttgccagtgccaagcagcatagcccagtgaccgagggagccgtggaggtgaagtatgagggccactggcggcaggtgtgtgaccagggctggaccatgaacaacagcagggtggtgtgcgggatgctgggcttccccagcgaggtgcctgtcgacagccactactacaggaaagtctgggatctgaagatgagggaccctaagtctaggctgaagagcctgacgaataagaactccttctggatccaccaggtcacctgcctggggacagagccccacatggccaactgccaggtgcaggtggctccagcccggggcaagctgcggccagcctgcccaggtggcatgcatgctgtggtcagctgtgtggcagggcctcacttccgcccaccgaagacaaagccacaacgcaaagggtcctgggcagaggagccgagggtgcgcctgcgctccggggcccaggtgggcgagggccgggtggaagtgctcatgaaccgccagtggggcacggtctgtgaccacaggtggaacctcatctctgccagtgtcgtgtgtcgtcagctgggctttggctctgctcgggaggccctctttggggcccggctgggccaagggctagggcccatccacctgagtgaggtgcgctgcaggggatatgagcggaccctcagcgactgccctgccctggaagggtcccagaatggttgccaacatgagaatgctgctgctgtcaggtgcaatgtccctaacatgggctttcagaatcaggtgcgcttggctggtgggcgtatccctgaggaggggctattggaggtgcaggtggaggtgaacggggtcccacgctgggggagcgtgtgcagtgaaaactgggggctcaccgaagccatggtggcctgccgacagctcggcctgggttttgccatccatgcctacaaggaaacctggttctggtcggggacgccaagggcccaggaggtggtgatgagtggggtgcgctgctcaggcacagagctggccctgcagcagtgccagaggcacgggccggtgcactgctcccacggtggcgggcgcttcctggctggagtctcctgcatggacagtgcaccagacctggtgatgaacgcccagctagtgcaggagacggcctacttggaggaccgcccgctcagccagctgtattgtgcccacgaggagaactgcctctccaagtctgcggatcacatggactggccctacggataccgccgcctattgcgcttctccacacagatctacaatctgggccggactgactttcgtccaaagactggacgcgatagctgggtttggcaccagtgccacaggcattaccacagcattgaggtcttcacccactacgacctcctcactctcaatggctccaaggtggctgaggggcacaaggccagcttctgtctggaggacacaaactgccccacaggactgcagcggcgctacgcatgtgccaactttggagaacagggagtgactgtaggctgctgggacacctaccggcatgacattgattgccagtgggtggatatcacagatgtgggccccgggaattatatcttccaggtgattgtgaacccccactatgaagtggcagagtcagatttctccaacaatatgctgcagtgccgctgcaagtatgatgggcaccgggtctggctgcacaactgccacacagggaattcatacccagccaatgcagaactctccctggagcaggaacagcgtctcaggaacaacctcatctgaagctgtcactgcacactcctagctgctgccgatacaccagatacctcagcttattggagccatgcccttcacagagtcccaactcagaggaaaagggccagtgccaaggggcaccaagaacctgctcaggaagccttttgatggcaagatcaccaatccagatggtattgctccctcaggatggctctgggcctgcccctaagggcctgtggcctatggaatatgtcctccaggctttgctcagctgagctcctcttctgtaaggaaacccagtcatccctgaatcttgccacagagatccgggattcaggagctctcagtttcttagggatggactatggcccagtcccccatctaagtggtgctttgcaaatgtcttggaggagtataggacagaggaccaaaatacacagcaggtagtgttagctctctgctaggagctcaaagcaacacaacttgtatcaaaatcacaactggcagagaagctggtggatccaatcctttcttcatctgttgttatttagaactcacctctcacactctgttctttagtgtccttacctttatcttaccacacacatgggtgtttctattatccttggaagcacagacctcgggcatccccttattgcctgatgggccaacaccaacagttacggagtgcttgagaaggggcaagtttcacagaaatggccagatagggccttcctacagagcagcaagagtaggccaagcagaaagactgctgaggtaacacggaccccagcccctgtcagggcctctgccaaggaaataatatggaccatttacctggcaggcagtctgctctctctcaggatcaccacgcatctcaggattggtctaaacttcaagtctcaaccaagtgtctgaagtgaactttgcattgaataaatttttgccatggaaagaacatcaaacaagccactcatctctacagagataagaaaacaagtttggcagagcaagagacagaagaccgtggagaaatcagaagggggaacagtcagtttagttaaggatggaacctgggaaaggccaccattcctgcttgatggggctctgatttgctcttgctcaagtggaataaaaccccatggtcttcttgacatgattcttgatcttttctccactgagacacacttaagtgatgatccttacaggactgacaccctaatgccaataaaagttgctcattatggactgctacaaaaaaaaaaaaaaa

SEQ ID NO: 25919 - DNA, 2061 bp, Homo Sapiens
agaggaagccaagaacggtgaaaaggccaggcggagttcagaggaggtggacggccagcacccggcccaagaggaggtcccggaatcgccccagacctctggcccagaggcagaaaataggtgtgggagccccagggaggaaaagccagctggagaggaagcagagatggaaaaggctacagaggtgaagggggagagggtgcaaaatgaagaggtgggacctgaacatgacagccaagaaacaaagaagctggaggagggagctgcagtgaaggagaccccccacagtccccctggaggagtgaagggcggagatgtccccaagcaggaaaaaggcaaggaaaaacaacaggagggggcagtgctcgagccaggctgcagcccccagaccggccctgcccagctggagaccagcagtgaggtccagagcgagccagcagtccccaagccggaggatgacactcctgtccaggacactaaaatgtgaagaacagctcattgtgccccagtgatgaagttgctggacacatctctttgcaggtagcagcaacagttgtagcagcagcagacgaagccattgcagaggcagaatatgctgagtgtctggagtcagcctgaagacacagggtggattatttcctggcctccacaccaaacgttcccttgcagatggagactgaatctgagggcagcagacttttatcagcttgagtttatgtcatttgatggacttggttcaacaacaagaacttacttaaaacaatgtactgtggtgatgagtcccaggggcactggtcagcctgtggagccctggatgctatccacacccacctatccctgcagctaatttagctgatctctaatttaactgagctctaatttagctgatcagattttgcttgggtaaagttcctttttaatgttctaaagtgtttacggttctcaaatatcagttaaaaactaattttaggtggccataaacataaaatagaaaccctgtaagttacagaagaccctaaattgtatcaaaaccctagagacaacttttcaatttgatccaaatttgaactggccaaccagtctttaaaacactggactagaagagataatgattgaaacatttaaaaaaaaaaagtgctccattcgcaggagcttttcctgtcctgtggttttccagttggtgaccaccatgggaggtcgctggctcggctcactcccttctcccacccttgagaatgtggagaactcccatggagaggcagaatggcaggaggtttcatgtcccgcgttgcatctcctcctgaaagaaaagcagtgatacctgaataatgctggctctccgattgatcctgtgaggatgaatttgcatttccagaatccttgagcatggattagatgtttcctgggaggtgccttgagtaccattatgtgcaagctacataattaaaacatttttcttagtttccctgggaagcttttcttgactcacagcccaggttcttctgcccaacacaaaaggagtgagttggggtctttagtctcttcttattgggtagctcttgctttaatattctgtttggtgagtgtaagggattctgcaagggacagggggcctgactacccagtctttgacttgtatcctctcccctcttcatacactcctgctgaaaaatgttaatccaaatacacatttaaacttagggtcggtccttattctgatttgagtattttaatgtctcagtgtgctgatttggtagttggaagaattattcttctggaggtctgttagactacatcctacactgacttcagaaaacagtctgtcagacaaaaaggccttatgtcaccactggtacctcagtttcctcatcccatttacagtttttctaactccagggtagtgtttagtgttaatatttgggatatattttttttcaaaactgtttttaagtagtttgtaatttgtaacaaacttgtaacctggttgggactgatattgtcatagctatgataaactttggatattagcagaatttgggaaaaaaaaaaaaaaaaaaaaaa

SEQ ID NO: 25920 - DNA, 2020 bp, Homo Sapiens
cctgccaccaccgacacccacgggcggagatcacctgctgccccgcagacccctgtcccttcctcccggaccagcagctagaggctctgactccagccaaagcatgaatggccttgaagtggctcccccaggtctgatcaccaacttctccctggccacggcagagcaatgtggccaggagacgccactggagaacatgctgttcgcctccttctaccttctggattttatcctggctttagttggcaataccctggctctgtggcttttcatccgagaccacaagtccgggaccccggccaacgtgttcctgatgcatctggccgtggccgacttgtcgtgcgtgctggtcctgcccacccgcctggtctaccacttctctgggaaccactggccatttggggaaatcgcatgccgtctcaccggcttcctcttctacctcaacatgtacgccagcatctacttcctcacctgcatcagcgccgaccgtttcctggccattgtgcacccggtcaagtccctcaagctccgcaggcccctctacgcacacctggcctgtgccttcctgtgggtggtggtggctgtggcatggccccgctgctggtgagcccacagaccgtgcagaccaaccacacggtggtctgcctgcagctgtaccgggagaaggcctcccaccatgccctggtgtccctggcagtggccttcaccttcccgttcatcaccacggtcacctgctacctgctgatcatccgcagcctgcggcagggcctgcgtgtggagaagcgcctcaagaccaaggcagtgcgcatgatcgccatagtgctggccatcttcctggtctgcttcgtgccctaccacgtcaaccgctccgtctacgtgctgcactaccgcagccatggggcctcctgcgccacccagcgcatcctggccctggcaaaccgcatcacctcctgcctcaccagcctcaacggggcactcgaccccatcatgtatttcttcgtggctgagaagttccgccacgccctgtgcaacttgctctgtggcaaaaggctcaagggcccgccccccagcttcgaagggaaaaccaacgagagctcgctgagtgccaagtcagagctgtgagcggggggcgccgtccaggccgagcgcagactgtttaggactcagcagacccagcaagaggcatctgccctttccccagccacctccccagcaagcaacctgaaatctcagcagatgcccaccatttctctagatcgcctagtctcaacccataaaaaggaagaactgacaaaggggatccatcggccacccctctgcaggggcttgtgatggctacaatggctcctagacactcaacgacttcatctgtggcagggagagaggaggccggaagaacaacccctgaacaatggaggcctttctttcccgctaggctcccagcctccttcccgctacagaatcgctcatcggcgaggctcagcagaaagaccctgaaggcaggctgcaaatgacccagaagagggacctgggagtcctggtggggacggggagggagtctcaatactcctttgcagtgcaaggtactctgagtcccctctgtagtgcctctgccagacacacactgcctgagttgaagagacacaggccacacatttcaggctggttgccagcggacgtcagcactcacggcctgcggggactcagcacagctctggattctggatctctcctgctgtaaccccacgcacaagcctgcaacccccagagctctttgacaggctcccaggcctcccagtcctggacaagcatgtgcagtcacgggagctcagctcaggccagggctgggctgtgcacctgcctcccactgacccagacccacttcctccagagaggcctctctccgcctgagctatttcccttgctagtgtgcagatatttccctaacatgtccttttttgtatttgtttgtacggaccataaatataactgtagctttaagactaaaaaaaaaaaaaaa

SEQ ID NO: 25921 - DNA, 2790 bp, Homo Sapiens
ggctgatgttcacttttgaagaggaccacaatgaaacccttttaatattacttaatgattccacagacctcctgggtgttaaatcaggtgaatctatttttaaaaattgctatttacttttttaggtggctgatcaggacagtatgaaatttcatacagtttcctaacttgagaaaacatggtgatgcaattcctccaaccaggagggatttatggacagcggtggctacgtcctaatctgcccagaatacaggatgactaaacaaattggcaaacggacgcagctttctctctctctaagaaaagtctgctgagaaccctcgttcccactctgtttctgcctccaagaagaaaagcctaaaactcactttcttccggactctttcaaggaagctgattaaaagaagctcctaaaccagaggtgcagacaaggtgatgatgtggctctcagaggaaggtgtgctacctacaaccctgctggcttcatggaagaatatgcttctcaaatgcaaatccaatcaagttatctccctgcttaaatccaaactcgctcatgtggcccacaaagcctaccttgcctgcctctctctaacctcacccaaaacacacttccattgctctctaggttccagcaccctgaccttttggtctgcactgtgccaggctccctccagccctgaagcctttgcacatgctgttcctcctgtctggaaaggctctcccatcttgtctattcgttctccaggctcaagtgactcttcctgagagccttctctgaccccagtccaggtcaagttcctctgtcacatgcctgaccctgcatccctccttgacagcacttatatcagcttgtaacacatttttgtgtgattattttgttaatgtcagcctctcccacaaactgtaagctcagtgagggatggaagcatgcctatttttaatcatcatggtatcctcagcactcagcacagcacatggtacatcaggaatgctcataagcattaatagagaaatgactgatttgagtcagacgaagactcagtatgccaggacgttcaggccgagagtctaagaggccgccggagggcttcggaaccagtgagcccactcaattcagcctgctcagtaccctgtgtgtactttatcaggaagaaggtacagtccctccctcccctatccgtttcccaaccacaggatcaaaataacccggaagcattacctttgcatcgagggtgagcagcaactcaaactcgttgtaaaactccttggggctgagcaacgggtactccttgactgtgcccaggaatgtcgcaatgtcgttcaaggcgatatcaaccccttctcgagactggcacttgtctacagcttgggaagccaagaggtagattcctgcctcacaccattggctgaccttttggaaagaaacagtgccctgtgcacttcgcctgaccacaactcagagccaccgtaatcctcagcaggtctgagcttgtaaggtgtctacaaggattcccagacaatgggaaattgtcatgggacggcatcgagtttaaggggtctaaccactgtaaattacactatgagggggacaaacccaaaccagctgatacctgtccacttctcagggaagtcactcggtcagcaaaatgagtctcttccattaacagtaattgctacatctccaggaggagacagctaaatatatatttaatttaagacagggtttcactctgtcacccaggctggagtgcagtagtgcaattatggcttaatgcagcctggagaggtctaccccaggctcaggtgattcttccaccttagcctcctgagtagctgggactacagatgcatgccaccacaccaggctaatttttccttccttcctcccttccttccttccttccttccttccttccttccttccttccttccttcctctttctttctctctgtctctctctctttctttctttcctttttttgagacaggttttggccatgttgccgaggctgctctcgaactcctgggctcaagcaatcctcccacctcggcctcccaaagtgctgggattacaggtgtgaggcactgcacccacccagccttatagctaaatatctcttaggctggtctaaccatagagaaatgtaatcaatggcttttggggtttacctgctagtccactcttcttgcatccgaattggttaccagaacacagggtgattaataagacattagacctggcccttacatttcctgggagaagggcatgtcccttttaacaaaaacacaactttcatctttggattcccaggtgatccctatttgcatttactggcgtttgtctttcgtaaggaagcaagaatgcaaagctttgtaactcagcacagcgatactcaagagtttctggatgctgggaggacattagataggtgatgagttctaattattcaatttttaaaaaagactcattttctttgctcttttgaactccactgagacacttgaacagaaagacagggagcccttatgctacctgaagagttatatgaaaagaagtttccagtgccaatacctctgcatttccatttaccatgtgacctgaaaagcaatataaagtaactatacagagaaaaaagatcaaaatgcaacacgccaaagtggttgtctttctaagtgggaaaatgataggcaacttaagtttttgtcttatttttttcctagattatttacagtgaatatgtaccacatttagaataataaaaaatcataaagataaaaaaaaaaaaaaa

SEQ ID NO: 25922 - DNA, 3593 bp, Homo Sapiens
gcctgctctggggcaaggttgggggagctgccccttgtcctgcacttcagcagctacagggctgtgggtgaaggagggcctgaggattgtgagctcagtgcttttaggcttgagctgcccttggggatcccccctggaggcagagctggaccttggggagggaccctgtggcggacgtccttctatggccgcttcaggcacttcttggatatcatcgaccctcgcacactctttgtcactgagagacgtctcagagaggctgtgcagctgctggaggactataagcatgggaccctgcgcccgggggtcaccaatgaacagctctggagtgcacagaaaatcaagcaggctattctacatccggacaccaatgagaagatcttcatgccatttagaatgtcaggttatattccttttgggacgccaattgccctgctggagacggcgctgacgcgagtggtcctgcccatgcccatcctggtgctacccccgatcgtcatgtccatgctggagaaattgaaacatcccaattagagccggagatagcccaggccacgagcagccggacagtggtgtacaacaaggggttgtgagtgtggtcagcggcctggggacggagcactgtgcagccggggagctgaggggcagggccgtagactcacggctgcacctgcagggagcagcacgccaaccccagcagtcctgggccccctgggagagtgctcaacctacagtggagggagactgacccattcacattttaacataggcaagaggagttctaacacatttcgtacaaaaaaataatcaagtgcatttctgggccttatgtggggttgtcaaaactccactcagcacaattatgtgtgaagctgaaaaattgtagagtgcccatggggtagaagtagaatccttttatactttggttccttttttatttttattttttatcagaatcaaatctgagccttagtttcagctgaccagaagtggcaggaggacaggtggaggcgagccagattaggcctggagttgggctggtttggtggccaggctggtaaatttaggatattacaatggccagcccagatggctccctgggctggcatggggaggggagagaaggtggtctgcaccccacaggatgaactagccatgactagggtcctcaggcagtggcccagggaatcagggagcactggaggcctctgcaagattctgtgggcagctggctctgaatgtagccagcccacatccattccagagctgcagaaccagtccctctgagtgaagtccagtgaccctggagctagggtcccccttcgtggagctctaactgattcagggcccctgaagtgaccccagctccaggcaggaaaccccgagaaggaatggtgcttggcaggaaccatggacctgcacttggcctcttcgggaagatcctccttccaggccccaggctggatgctgggttctggggctgagagtggggctagactgggctggctgccttctgcggagcttctccagccaccaaggctgcctgccccatcccatccctttctaagcaggaaggtctcatgcctgagaatgcctaggccagctccttagacacctatcagagaagcagcatcaacctaggagcagtgggccctggctctgtcactaaatggcagtgagatgtcagacaaattcattcccttctctcagcctccactccctgtctgaaaccagaagactggatcaaggggttcccactggctcctccagcaagacctcgtctttgcttgtcctgctcagatgctggtcatcctgggcatgtccccagtgtggactctggactgggaagggggcaggcccctttggacctgcagttggcctcagcagaaggccttgccttgtgtatgtgactccatatcccgggagcagttgacctttgccaaacactttacagttctggaggaggaggtaacatagatgcctgggcctgatggtggggccatacccatgtgtcgcctctcactctggcagcctcagaggccccttgctgctggctcccatctccctcccatttgcagaccaggaaggaagagcaagctgtacaaagggaagcagagcctggggtgggtgtgagcagggtgacccctcatctgaaaggcccaaaccagggggaagcaccagcctcagtgcagccccctcctgaccccacctagaatggaagcctccacctgcagccccaggcctccctcccccggggtctccacctcaggggagacttaggccagaggtgaacattcatgtgtaggaagaggccgctgcagggtggcatcttagggtaggggaagtgtgctgaggtgggccttccatgggcatggccgttgcctctctgccagccgctggtgcccaccagctggctctgcagcacattgccctgaggggcctgccactctcctgaggagcagcccacctgctgcccgtgaggagggggagaagggttagacaagcctggaggacaaaacagcgggagtgtgggggtgccatggtgttggaggggcaggcctttttgagccaatcccaccataatgtgaatatgccagtgactgctgcgctgtgctggtctctaggcctgaactaggtgctggcatgtctgggtcgtcttttgaaaagctcacttcaagctcaccctgctcctacctatcataaggtcttattcttgtgcactttatcttgggaccaaaactgcctacccaccccttcccgccctccccctgccagaggcctggtgccctggcccagcctgtggcctcagcatctcataactcatttgctttgtctcccggatgatttccgtcatgctcccaaatgcagcttcaggtgagccaaggggtctgctcctgtggcggtgcagtggcaaaggatccagatagcctagggtgagggtgacagagggacagtgggctatgccactaggccctggtctggctttggaaagacctgtgaggggaaaccttcacccagcacccatgccccactctgctgaggccagaggaagggaggcctgaggggcagattggttcatgcctggggtggaggctaagcctggacacagtcagggcggggctggccagctgtgcgagaacacaagccacgcctgcgatggtgctgcacccctggtgtccctgcctggccctcctctggtcacttcaaacatgccctcaggcttggggatgcccttcttccattcccagacagcagtgtgagggtgcagggaccaagatgtcaagctggccgtggagtcgagctggccgacggacccctttcacctggttatgagccgacttctttggtgttctggcctctggcctgggaaaagggcaggagcctagaggaggaaaaaggctggtggacagacccagggtggtcttcaagcctggcccagtgagagtgaggcccccgcacgcaagcctcagccactcccaggggcctttgcagcgtctttttaacctcagaaaatttctcaatctatgtgatttgtgtaatactaatgagctttgggcaataaatacgggatttaaagcaaaaaaaaaaaaaaa

SEQ ID NO: 25923 - DNA, 1034 bp, Homo Sapiens
ggcacgaggggcactccggctcaccccgcacctccatcctgtgccgaattgtcccagacagaccgtcgccattgctcggtcactgtgctttgcaggcctggggcgcagctctccaagcctgtcctgccccgccccaccccactgggcttaggttagcttcgtgccttagtatctcgggcccactgcaggagccaacaccctctgctgtccagggggggtctgtggccctaagattggccggcctctccatgcatctggccagcgtccccttggagacaccttcaccctcaagcgctgcagaagcatgaggtgagggcctgcagcgctctgtaccgtttagggtgttggaccagccgggagcctggcaggcctggcccagcggccagggtgagtgttctcagaccccgggcagctggtggttctccagggccaggtaccccttttgtgtgtgcgacctctgactaggtccctgtgggaatggggcagatggcggccatcaccactgggtcccagggcagaagcttagataccggccttgagcagcccgaccttccaccgctgcctggatcccaagcctcagccgacccaggggaccttggtggcaacggtgtgactgacagcaccacccctagcctttgcatgcccaggggtcgagagccagtatccggcccagacaatgccacccgccatggaagaaaagctgaccctgcccacctgctgcagacccgggccccgggccgaggttgctttctgtgacgaccgcctggtgacgctggacaccaggagggttatggcactgccctcccctcctggagcccctggcactgaccacctggacttgacctgactcctggtcactggccaaacacccatcctcaccccagccaccccgggccctggctggtgccgtgtgacacctgtagcccacctgtgtgtctttgctccgcccacccctgcgtggcgccggtcaggcgcaaacctggcgccagtgtctaaatgtccatcattctcagaccaaaaaaaaaaaaaaaaaa

SEQ ID NO: 25924 - DNA, 756 bp, Homo Sapiens
gggcacaacactgataagtcactgtcatgctaacattttttgtaatgagctactttgacaatacttccataattttctcaaatgatacagattttgcctcatctctctcgctgtcacacacaaaacttttggccataatggggaaccttatgattctcccttataattgcaaaacactagaaactctcatttatttcacctcttctcttgcagacaagggaacaccccagacatggtatcagagatccacatgacaggcccaatgtgcctcattgagaacactaatgggcgactgatggcgaatccagaagctctgaagatcctttctgccattacgcagcctgtggtggtggtggcgactgtgggccgctagcgcacaggaaaatcctacctgattaacaagctggctcagaagaaaaagggtgagtggcatgagcaaagctctgccaagtcccttctgtccatctacacagtcagcctccatcacgaggatgtgaagagagaaagagatgaggatgaatatggaaagctaactttccattcacagtcgggctccttatcttcatgctgctctaagggataattttaaattcattaattattcccatgatacattagtttccctttcaaaagcacaaactgtgcctttcctaaaaggagtaagactgtaataaaaataattaatgtacataataataactataataaactacaatttttatgccgtaaaaaaaaaaaaaaaaaaaaaaaaaaaaa

SEQ ID NO: 25925 - DNA, 1265 bp, Homo Sapiens
cccagagaggctcagctgcactcgcccggctgggagagctgggtgtggggaacatggccgggcctccgaggctcctgctgctgcccctgcttctggcgctggctcgcggcctgcctggggccctggctgcccaagaggtgcagcagtctccccactgcacgactgtccccgtgggagcctccgtcaacatcacctgctccaccagcgggggcctgcgtgggatctacctgaggcagctcgggccacagccccaagacatcatttactacgaggacggggtggtgcccactacggacagacggttccggggccgcatcgacttctcagggtcccaggacaacctgactatcaccatgcaccgcctgcagctgtcggacactggcacctacacctgccaggccatcacggaggtcaatgtctacggctccggcaccctggtcctggtgacagaggaacagtcccaaggatggcacagatgctcggacgccccaccaagggcctctgccctccctgccccaccgacaggctccgccctccctgacccgcagacagcctctgccctccctgacccgccagcagcctctgccctccctgcggccctggcggtgatctccttcctcctcgggctgggcctgggggtggcgtgtgtgctggcgaggacacagataaagaaactgtgctcgtggcgggataagaattcggcggcatgtgtggtgtacgaggacatgtcgcacagccgctgcaacacgctgtcctcccccaaccagtaccagtgacccagtgggcccctgcacgtcccgcctgtggtccccccagcaccttccctgccccaccatgccccccaccctgccacacccctcaccctgctgtcctcccacggctgcagcagagtttgaagggcccagccgtgcccagctccaagcagacacacaggcagtggccaggccccacggtgcttctcagtggacaatgatgcctcctccgggaagccttccctgcccagcccacgccgccaccgggaggaagcctgactgtcctttggctgcatctcccgaccatggccaaggagggcttttctgtgggatgggcctgggcacgcggccctctcctgtcagtgccggcccacccaccagcaggcccccaacccccaggcagcccggcagaggacgggaggagaccagtcccccacccagccgtaccagaaataaaggcttctgtgcttcctttaaaaaaaaaaaaaaaaaaaaataaaaaaaaaaaaaaaa

SEQ ID NO: 25926 - DNA, 962 bp, Homo Sapiens
cagcagccgcgatggacgtgttcctcatgatccggcgccacaagaccaccatcttcacggacgccaaggagtccagcacggtgttcgaactgaagcgcatcgtcgagggcatcctcaagcggcctcctgacgagcagcggctgtacaaggatgaccaactcttggatgatggcaagacactgggcgagtgtggcttcaccagtcaaacagcacggccacaggccccagccacagtggggctggccttccgggcagatgacacctttgaggccctgtgcatcgagccgttttccagcccgccagagctgcccgatgtgatgaagccccaggactcgggaagcagtgccaatgaacaagccgtgcagtgagacccccaagaggcccatttcccccaataaaagagatttgggagtctgcctggttgctgcctctttttcccgcccctccctgggatgggtcccactccctgtgggctccttttggggcttgtgcttggcagttcctgtgctgtcctgtctcccagatcctgagaccctggctgagaacttggcccagcctgctgcttaaaggcaccatggggacctgggttgccctcagacccaagccattgttagcagctagccagccacaccaaccacgccagggggaggaaagggaaggactgggagagacacaaagaccagagccagcctcagggacaagagattccagttttaggcctttctccttctaagtgccccccacccccatagcctgcatgtccactcccagacgatggccaagagcagaaacacaagctggagccagtgtcctggtttgacagcatgttcaacgagggaaccccaagacggacccacacaggtccacccacgctgggggctgtaatcacggagggaagtggctgcccccttaacacacctttaataaacagtctacagacccaaaaaaaaaaaaaaaaaaaa

SEQ ID NO: 25927 - DNA, 1598 bp, Homo Sapiens
ggggaccttagcaagatggcggctccctgggcgtccctgcgcctggtcgcccccatgtggaatgggcgtatcaggggcatccatcgcctgggtgcggcagtggccccagagggcaatcagaagaagaaaaggacaatactccagttcctgaccaactatttctacgatgtggaggctctgagggattacttgctccaaagggagatgtacaaggtgcatgagaaaaatcggtttcgagacaaggagtggatcaggccagataagtatggccatttctctcaggagttctggaatttctgtgaagtgcctgtcgaagctgtggatgccggtgactgtgacatcaactacgagggcctggataacctccgaacctccgcaggctggacatctcggacctccctgccgtgtccaaccctggcctcactcagatattggtggaggagatgctgcccaattgcgaggttgtgggagtcgactgggctgagggcctgaagtcagggccggaggagcagcctcgggacacagccagccctgtccctgcctagcctttagccctgtccccactcacgtggcttctcagcgggctgcatggaatgtctggtagctcaccacacttctggcttccatttgtcttcactcaacgtcagggtgggggagtggtgctggccaatcacaggagagagcgtgagttcccagtatttattcctggctgcccttggctaaaggtcacagctcctgtcaccctgtcaggcagccctttccatgcccctgttcaggcctggggaggtaaaggctcaggctgttagtagccgcagagagccacactcaccttgtcaggagactcttctcaaactgtccttatgtgagtgcactgccatttcttgcagggaccctgactgacacaggggctactactgacactttacagggatggttctcccccgtgcagggccgctgtgcccactgcaggacatgcagcatccttcgccccactccactcactaaaggccagcgcaccccaggccccatagtattgctggttatggatttattgactttatgttccaaattcagctttttcagttggctgttttttgaaaggggataagctttgtcagtagagggcaccaaacaggcattataggaggaaaggcgcctccttcgtggttcttgttggttgtgcttctgcctctggacgccgcagtgcatgtggcttccccagcacccagctcctgaagcaccaggcggtcagcagctgcccttggcaccctccagccctcagaagttgcgtaggagacacagcgcctccactgaggcacctctctgggaataacgttccccagcaccccaaatggatttccagtcaattcagaagcattttaccagtgaagccctcattattccagttcactgttaaagccagtaattctctatattaaactttccctgttcaagttaaaaaaaaaaaaaaaaaaaaaaaaaaaaaaaaaaaaaaaaaaaaaaaaaaaaaaaaaaaaaaaaaaaaaaaaaaaaaaaaaaaaaaaaaaaaaaaaaaaaaaaaaaaaaaaaaaaaaaaaaaaaaaaaaaaaaaaaaaaaa

SEQ ID NO: 25928 - DNA, 1507 bp, Homo Sapiens
gggcgttatatgtggtcttctctcatttccagcagagcaggctcatatgaatcaaccaactgggtgaaaagataagttgcaatctgagatttaagacttgatcagataccatctggtggagggtaccaaccagcctgtctgctcattttccttcaggctgatcccataatgcatcctcaagtggtcatcttaagcctcatcctacatctggcagattctgtagctggttctgtaaaggttggtggagaggcaggtccatctgtcacactaccctgccactacagtggagctgtcacatccatgtgctggaatagaggctcatgttctctattcacatgccaaaatggcattgtctggaccaatggaacccacgtcacctatcggaaggacacacgctataagctattgggggacctttcaagaagggatgtctctttgaccatagaaaatacagctgtgtctgacagtggcgtatattgttgccgtgttgagcaccgtgggtggttcaatgacatgaaaatcaccgtatcattggagattgtgccacccaaggtcacgactactccaattgtcacaactgttccaaccgtcacgactgttcgaacgagcaccactgttccaacgacaacgactgttccaatgacgactgttccaacgacaactgttccaacaacaatgagcattccaacgacaacgactgttctgacgacaatgactgtttcaacgacaacgagcgttccaacgacaacgagcattccaacaacaacaagtgttccagtgacaacaactgtctctacctttgttcctccaatgcctttgcccaggcagaaccatgaaccagtagccacttcaccatcttcacctcagccagcagaaacccaccctacgacactgcagggagcaataaggagagaacccaccagctcaccattgtactcttacacaacagatgggaatgacaccgtgacagagtcttcagatggcctttggaataacaatcaaactcaactgttcctagaacatagtctactgacggccaataccactaaaggaatctatgctggagtctgtatttctgtcttggtgcttcttgctcttttgggtgtcatcattgccaaaaagtatttcttcaaaaaggaggttcaacaactaagtgtttcatttagcagccttcaaattaaagctttgcaaaatgcagttgaaaaggaagtccaagcagaagacaatatctacattgagaatagtctttatgccacggactaagacccagtggtgctctttgagagtttacgcccatgagtgcagaagactgaacagacatcagcacatcagacgtcttttagaccccaagacaatttttctgtttcagtttcatctggcattccaacatgtcagtgatactgggtagagtaactctctcactccaaactgtgtatagtcaacctcatcattaatgtagtcctaattttttatgctgaaaaaaaaaaaaaaaaaaaaaaaaaaaaaa

SEQ ID NO: 25929 - DNA, 2178 bp, Homo Sapiens
ctgctgggtttgcatgaggagggattaagaaagttctcggagtacctttgcaagcaggtggccagtaaagctgaggagaatctgctcatggtgctggggacagacatgagtgatcggagagctgcagtcatctttgcagatacacttactcttctgtttgaagggattgcccgcattgtggagacccaccagccaatagtggagacctattatgggccagggagactctataccctgatcaaatatctgcaggtggaatgtgacagacaggtggagaaggtggtagacaagttcatcaagcaaagggactaccaccagcagttccggcatgttcagaacaacctgatgagaaattctacaacagaaaaaatcgaaccaagagaactggaccccatcctgactgaggtcaccctgatgaatgcccgcagtgagctatacttacgcttcctcaagaagaggattagctctgattttgaggtgggagactccatggcctcagaggaagtaaagcaagagcaccagaagtgtctggacaaactcctcaataactgccttttgagctgtaccatgcaggagctaattggcttatatgttaccatggaggagtacttcatgagggagactgtcaataaggctgtggctctggacacctatgagaagggccagctgacatccagcatggtggatgatgtcttctacattgttaagaagtgcattgggcgggctctgtccagctccagcattgactgtctctgtgccatgatcaacctcgccaccacagagctggagtctgacttcagggatgttctgtgtaataagctgcggatgggctttcctgccaccaccttccaggacatccagcgcggggtgacaagtgccgtgaacatcatgcacagcagcctccagcaaggcaaatttgacacaaaaggcatcgagagtactgacgaggcgaagatgtccttcctggtgactctgaacaacgtggaagtctgcagtgaaaacatctccactctgaagaagacactggagagtgactgcaccaagctcttcagccagggcattggaggggagcaggcccaggccaagtttgacagctgcctttctgacttggccgccgtgtccaacaaattccgagacctcttgcaggaagggctgacggagctcaacagcacagccatcaagccacaggtgcagccttggatcaacagctttttctccgtctcccacaacatcgaggaggaagaattcaatgactatgaggccaacgacccttgggtacaacagttcatccttaacctggagcagcaaatggcagagttcaaggccagcctgtccccggtcatctacgacagcctaaccggcctcatgactagccttgttgccgtcgagttggagaaagtggtgctgaaatccacctttaaccggctgggtggtctgcagtttgacaaggagctgaggtcactcattgcctaccttaccacggtgaccacctggaccatccgagacaagtttgcccggctctcccagatggccaccatcctcaatctggagcgggtgaccgagatcctcgattactggggacccaattccggcccattgacgtggcgcctcacccctgctgaagtgcgccaggtgctggccctgcggatagacttccgcagtgaagatatcaagaggctgcgcctgtagctgcctggatgagcacacctggctcatcacacttgcaggcctgttccctaaggggccccagccaaggagctgagcgaggctgtcgggcttgggggagatctgacagcccagacctttctacggctggcagcagagaaacaaagtctggacccactccatgctctgccctcagacctggccaggtgatgctctgggggcagcatctccccaccgagagaagcgggctcctaatgaggtgggaaagccacggcaggcagcgagcagcccaggccagctttctgcatggatggtcagtctcttgccctcaaacactacagcaaacaagctacccctgccagtcctagacaacttgggtacatctggggacctagcagttaggcttgactttgaggagaggctgtgatgtttatgatccctgaataaagctactccttggaaaaaaaaaaaaaaaaaaaaaaaaaaaaaaaaaaaaaaaaaaaaaaaaaaaaa

SEQ ID NO: 25930 - DNA, 2374 bp, Homo Sapiens
gagtgcctcaaggagtatgcccattacttcctagaggtcaccctgcaagatcacatattctacaaattccagccttctgtggtcgctgcggcctgtgttggggcctccaggatttgcctgcagctttctccctactggaccagagacctgcagaggatctcaagctattccctggagcacctcagcacgtgtattgaaatcctgctggtagtgtatgacaacgtcctcaaggatgccgtagccgtcaagagccaggccttggcaatggtgcccggcacaccccccacccccactcaagtgctgttccagccaccagcctacccggccctcggccagccagcgaccaccctggcacagttccagacccccgtgcaggacctatgcttggcctatcgggactccttgcaggcccaccgttcagggagcctgctctcggggagtacaggctcatccctccacaccccgtaccaaccgctgcagcccttggatatgtgtcccgtgcccgtccctgcatcccttagcatgcatatggccattgcagctgagcccaggcactgcctcgccaccacctatggaagcagctacttcagtgggagccacatgttccccaccggctgctttgacagataggccacctccagacctcacgaggaagccttggagatgtgggcagaggaagaggacactgaagaggagagctcagccaagtgaggcagcaggaggccatccctgaagagccttggaacgtggagggtctgtgctccttttaaataaaactgacccagagcaaaacattcaataacatacctcacccgagagcattcctctgagaaacgtctgccacgtgtggctagggtacaaaaggatggcttggtggccgtccccccacacaggggcccagtgaatcgagaaagacttgataagaggccaggagagtgggaactggacacagaccactgatctcaagcatgtccagtttttagcattaaagacttttctattctttgctgatggcagctacaccgctgaaaaaggaggggcagcctggcgtgttctcaggacccccggaggatcccatattgggtgcttttctttccctggctctatgcagaggggcctgagttggtgtgtatgcctgagtgtttgccttgcgaggcacagtgggtggctgtcttgcctttgttttcgaacctaaaaccattttcagccttttagatatgtcatgtgctgctgcttcccgaagtggtcttgctttctgtttcgtaagatgtcttgtttacacactgtatcagggatttggtgatacttgaaaattcctttggagaaaaaaacaaatttaattgccacactgcctgtcccacatgagggctgttaatttggaacccaagtttgaacccaacttgtgatggacccgcaggtaaccacagagcttcctttttgaaggcatatggttggagagaaccattttcccagctctcggttccggaagattccacgtcttggaggctgtgttcaccactagaactttaataactacccagggagggagaagctcgttgaaaggaagacaaagatttaaacagttcccacctctctccaccacatacttacagggcatgagtttaacccagtctaggctttgagtgtggctgatagcgaaggatagcaatgtggaaaatttgcttagtcccacctgtatttggggagtgggatgtacatgggcgtttgataccaccattgataggcaagcgactggttggatcaaaagccagtatttagggatctgcagcgagagggccctcaggaagactcttgtaaccatgtgcaatatgtttttattctgactcgcagcttgtgctcagcatgttctttggtttagtttggggttgggggacacattgttcacccagcagaactgggaggtgcaaaggaccgtggaagcaatttttgttttgtttgaggaatacctgtcttggattccttagccccttgccagtcctggagactgtggcaggggccgccaggaaggcagctgtctgctgctgagtcagatcggaaggtggtgaatctttccagagcagctgaaaatctcagcatggagacagtaagaaaagagacggggtgtggataagactctgccaccgtgtcacactagcataggaggctgcacgttcatttgttgttgtttttttttcctttgccaacctccgttctatttatgtgcaagcagtttggattcaagttcttgtatctgtctgttctgggacctggggattgtgagggttccctcacagccagcacgacccccagaaagaggcgtcccacaataaacacgtcacctgctaaaaaaaaaaaaaaaaaaaaaaaaaaaaaa

SEQ ID NO: 25931 - DNA, 2310 bp, Homo Sapiens
gtcctcaaagactgtatcgtccacctctgcatctccaagcccgaacgccccatgaagttcctccgggagcacttcgagaagctggagaaggaagaaaaacaggcagattttggcgcggcaaaagtcaaactcacagtcggactcccatgatgaggaggtgtcgcccacccccccgaaccctgtggtgaaggcccgccgccggcgaggaggcgtgagtgccgaggtgtacaccgaggaggacgccgtgtcctacgtcaggaaggtgattcccaaggactacaaaaccatgactgcgctggccaaggccatctccaagaacgtgctcttcgctcacctggatgacaacgagaggagtgacatattcgatgccatgttccctgtcactcacatcgctggggagactgttatacagcaagggaatgaaggagacaacttctatgtcgttgatcaaggggaagtggatgtgtacgtgaacggagagtgggtgaccaacatcagcgagggaggcagcttcggggagctggcgctcatctacggcacccccagggctgcgaccgtgaaagccaagacggacctcaagctctgggggatcgaccgggacagctaccggcgcatccttatgggcagcacgctgaggaaacgcaagatgtacgaggagttcctcagcaaggtctccatcctagagtccctggagaagtgggagcgtctgaccgtggcggatgcgctggagcccgtccagtttgaagatggagagaaaattgtggtccagggagagcctggggacgacttttacatcatcacggagggcaccgcgtccgtgctgcagcgccggtcccccaatgaggagtacgtggaggtggggcgcctgggaccctctgactacttcggggagattgcactgctgctgaaccggccccgggcggccactgtcgtggcccgggggcccctcaagtgtgtgaagctggaccggccccgcttcgagcgtgtgctggggccctgctctgagatcctcaagaggaacattcagcgttacaacagcttcatctccctcaccgtctgagcacagctcccgccctgcagccccagctccccagtgtggtggccgtgccctgctcgtctgtgtcgggggcccgggagccgctgtgtgaggtgtgggccgggtggggctgggtcccggcagcgtgaggactgccccttccccggactcactttttggaataaatgatcaccttgtgcatttccaaatcaaaggacaagcggacaaaatgcatcccaagatcaaggaagggacaggccagcttcctccccacacgcctccccggctgcctctgtgggcttctcctggggggcccaccccacccctgccagtctcctggagatgcttgaggatcggtcctccccagaaccaggccaggacgttgcccctggggcctggtgaccctgtgaggtcaggtcccccagattgacgtctgagtgtgggcaagtgtgtcaaaaggggctgccccccaggggagatgaggctgagagcagggagttgaggccgaagaagtcaaggcccctcccgcaaatgtgtacccctgcccgcgccactgcaccccgccgcacccccacctcccccgggggccctgctgcggatgccggagtgggagagtctctgagctgtgagattgatcttgcccctaattggagaggaagccgggcgccaagacacacggggctcctgccttgggagccagggccgcggccgcaggtagaccccagtagggggggccgggctcgaagttcctttgggaggggctggcgggactccagcaggccgtcctcacctttcttagaaagtccacccagggcaagttgatgttgggggaaagcagaagtcaagccagccgcgggccccacacgccccgacccgctcaaccgacttgtcccttaaatgtgtcttggatcccgcagtgatgacgtgagccagccaggcccgaaagggtgaggccagtgcagagaagcttcccaggggattcctgggttcccccgaaagacaagcgaggtcattgcagttcacccgatgttgctcctgtcccgtgcgtcccggggaggctgtccttggtccgaggctgctcgttgcagcccctcccctgctggcggttacgatgcgtggggtccccctccccgcccagccccggccacgtcgccgtgtcccgcctgtgcctgtgacgtccctgtggacctgtgagccatccccccccttatctctgctctgaatactgcatgaagcattaaacgtgcaatgaagtaaaaaaaaaaaaaaaaaaa

SEQ ID NO: 25932 - DNA, 2169 bp, Homo Sapiens
gcaaccccgggccctgagggcaggccccaaccgcggaggagcaggagagggcggaggccggcgggccatgccctggtcgtcccgcggcgccctccttcgggacctggtcctgggcgtgctgggcaccgccgccttcctgctcgacctgggcaccgacctgtgggccgccgtccagtatgcgctcggcggccgctacctgtgggcggcgctggtgctggcgctgctgggcctggcctccgtggcgctgcagctcttcagctggctctggctgcgcgctgaccctgccggcctgcacgggtcgcagcccccgcgccgctgcctggcgctgctgcatctcctgcagctgggttacctgtacaggtgcgtgcaggagctgcggcaggggctgctggtgtggcagcaggaggagccctctgagtttgacttggcctacgccgacttcctcgccctggacatcagcatgctgcggctcttcgagaccttcttggagacggcaccacagctcacgctggtgctggccatcatgctgcagagtggccgggctgagtactaccagtgggttggcatctgcacatccttcctgggcatctcgtgggcactgctcgactaccaccgggccttgcgcacctgcctcccctccaagccgctcctgggcctgggctcctccgtgatctacttcctgtggaacctgctgctgctgtggccccgagtcctggctgtggccctgttctcagccctcttccccagctatgtggccctgcacttcctgggcctgtggctggtactgctgctctgggtctggcttcagggcacagacttcatgccggaccccagctccgagtggctgtaccgggtgacggtggccaccatcctctatttctcctggttcaacgtggctgagggccgcacccgaggccgggccatcatccacttcgccttcctcctgagtgacagcattctcctggtggccacctgggtgactcatagctcctggctgcccagcgggattccactgcagctgtggctgcctgtgggatgcggctgcttctttctgggcctggctctgcggcttgtgtactaccactggctgcaccctagctgctgctggaagcccgaccctgaccaggtagacggggcccggagtctgctttctccagaggggtatcagctgcctcagaacaggcgcatgacccatttagcacagaagtttttccccaaggctaaggatgaggctgcttcgccagtgaagggataggtgaacggcgtcctttgaagcaggatcagacccagccagcagagatggagagtgactctgttggcagaaggcaggcgaggataagctaacgatgctgctgtggcctctatgcactcagcaagagcgggacgcctgtgctgggccgggcaccagggatggtgctgagtcgggcagaggcctcctttcaaggagttcacagtgaacaagatgagaagggctgggccctggagggtcaagagccccaattatgtacaagacactttgggaggaaagaagactaccttttccccctgccattggtatagctggtgccccaaaacttccacctccctccctggccacctctaaaatgactggtataggtgctgccccaccccttagctcccctatcctgggctaggaggccacaggggctgtcctctagaattcttccttccctcccccacaccattcattcaattcatgaaacaaatctttgccaagagcagtttatgtgccaggaacatcattctgtccttgcaacctggaacaagaccagctaccagcctagcttcatccgctacttgcaccaaccagtcccgggttagatcccaaatgctagaagccagggatgcccaactctgggtggccccagtcagaacctctgggatctcagtgaagctggcctggcctctgctcctgctctcaaggggctgcttttcaaccaagagccttgtgagcctggtctgagccttgcacagccactgagtattttttttgccttagccagtgtacctcctacctcagtctatgtgagaggaagagaatgtgtgtgcctgtgggtctctacaagtgacagatgtgttgttttcaacagtattattaggttatgaataaagcctcatgaaatcctccaaaaaaaaaaaaaaaaaaaa

SEQ ID NO: 25933 - DNA, 1892 bp, Homo Sapiens
gggaagggagtgctcccccaccagcagcctggagaggctctgcaggcacaagcatcagcgggaacgcagccacgagcggccagacaggaaggagagtgtggcgtggccccgagaccggaggaagcggaggtcccggtccccaagctcggagcacagggcacgggagcacaggcggcctcggtcccgtgagaagtggccgcagacccggtcccattccccagagaggaagggggctgtgagggaggcttccccagcaccccttgcacagggggagccagggcgggaagacctccccaccaggttgccagccttgggggaagcacatgtctcgccggaggtggctacggccgacaaggcccccctgcaggctccccctgtcctggaggtggcagctgagtgtgagccggacgacctggacctggattatggcgactccgtggaggccggacacgtctttgatgatttctcaagcgacgccgttttcatccagctcgatgacatgagctcgccaccttctcccgaaagcacagactcttccccagagcgagacttcccactgaagcctgcgttgcccccagccagcctggccgtggccgccatccagagggaggtgtcattgatgcacgatgaagacccttcgcagcccccacccctgccagagggcacccaggagccacatttgctcaggccggacgcggctgagaaggctgaggcacccagttccccggatgtggcgcctgcggggaaggaagacagcccctctgcgagtgggagggtacaggaggcagcccggcctgaggaggtggtttcgcagacccccctgctgcggtccagagccctggtgaagcgggtcacctggaacctgcaggagtcggagagcagcgcccccgccgaggacagagccccccgggcaccacttcacaggccacagaagccccgagaaggagcctgggacatggaggatgtggcccccacaggggtcaggcaggcgttctccgagctgccctttcccagtcacgtgcttccggaacccgggttcccagacacagacccctctcaggtttacagccccggcctgccgcctgccccggcccagccctcaagcatcccaccctgcgcactggtcagccagcccacggtccagttcatccttcaggggagcctgccgctagtgggctgtggggcagcacagaccctggccccagtgcccgctgccctgaccccagcctcagagccagccagtcaagccactgcagccagcaactcggaggagaagaccccggcccccaggctagctgcggagaaaaccaagaaggaggagtacatgaagaagctgcacatgcaggagcgtgctgtggaggaggtgaagctggccatcaagcccttctaccagaagagggaggtgaccaaggaggagtacaaggacatcctgcgcaaggccgtgcagaagatctgccacagcaagagtggagagatcaaccccgtgaaggtggccaacctggtgaaggcgtacgtggacaagtacaggcacatgcgcaggcacaagaaaccagaggccggggaggagccgcccacgcagggggccgagggctgaggccaggcaatcacgggctatgccgggggagctgtcgggagtggcgggaatcggggccatgcccggggagctgtcgggagtggcgggaattggggccatgcccggggagctgtcgggagtggcgggaaatggggggcatcagcatgcctgccgtcgggttcctgcgctgacacctggtctgtgcacctgtgttgctcacagttgaaaactggacacttttgtatgtatattatagagacactgtttccattctaatttatcaaaaatggattatctttagaaaaaaaaaaaaaaaaaa

SEQ ID NO: 25934 - DNA, 3656 bp, Homo Sapiens
ccgacccgctaggccccgcgcggctcggatccggcggcgctgtttcggtcgggagtgggtgggagagaagccggggcaggggaggagccgccggagctgtcggagccgtgacacccagggcagctacactcagaagccacaaggaatgctagtggagcccctcatccctcccagcttctcttccaagctgccccgtggggcttgatccaggaagctacttcagaaagtagacaatcattccaagggtacaacaaggtttaccacaatgtgagggactcagccattgcaaattgtacagatgagggcccttggaagaaaatcctcgctgtgtccaggctgaggcggggggctaatgacagtgtgagctctagatggtgtgagaccaccccaaagccaagaaatggctacagccgtggaaccagaggaccaggatctttgggaagaagagggaattctgatggtgaaactggaagatgatttcacctgtcggccagagtctgtcttacagagggatgacccggtgctggaaacctcccaccagaacttccgacgcttccgctaccaggaggcagcaagccctagagaagctctcatcagactccgagaactttgtcaccagtggctgagaccagagaggcggacaaaggagcagatcctagagctgcttgtgctggaacaatttcttaccgtcctacctggagaactacagagctgggtgcggggccaacggccagaaagtggcgaggaggcagtgacgctggtggagggtttgcagaaacaacccaggagaccaaggcggtgggtgactgtccatgttcacggccaggaagtcctgtcagaggagacggtgcatttaggagcggagcctgagtcacctaatgagctgcaggatcctgtgcaaagctcgacccccgagcagtctcctgaggaaaccacacagagcccagatctgggggcaccggcagagcagcgtccacaccaggaagaggagctccagaccctgcaggagagcgaggtcccagtgcccgaggacccagaccttcctgcagagaggagctctggagactcagagatggttgctcttcttactgctctgtcacagggactggtaacgttcaaggatgtggccgtatgcttttcccaggaccagtggagtgatctggacccaacacagaaagagttctatggagaatatgtcttggaagaagactgtggaattgttgtctctctgtcatttccaatccccagacctgatgagatctcccaggttagagaggaagagccttgggtcccagatatccaagagcctcaggagactcaagagccagaaatcctgagttttacctacacaggagataggagtaaagatgaggaagagtgtctggagcaggaagatctgagtttggaggatatacacaggcctgttttgggagaaccagaaattcaccagactccagattgggaaatagtctttgaggacaatccaggtagacttaatgaaagaagatttggtactaatatttctcaagtgaatagttttgtgaaccttcgggaaactacacccgtccaccccctgttagggaggcatcatgactgttctgtgtgtggaaagagcttcacttgtaactcccaccttgttagacacctgaggactcacacaggagagaaaccctataaatgtatggaatgtggaaaaagttacacacgaagctcacatcttgccaggcaccaaaaggttcacaagatgaacgcgccttacaaatatcccctaaaccggaagaatttggaagagacctcccctgtgacacaggctgagagaactccatcagtggagaaaccctatagatgtgatgattgcggaaagcacttccgctggacttcagaccttgtcagacatcagaggacacatactggagaaaaacccttcttttgtactatttgtggcaaaagcttcagccagaaatctgtgttaacaacacaccaaagaatccacctgggaggcaaaccctacttgtgtggagagtgtggtgaggacttcagtgaacacaggcggtacctggcgcaccggaagacgcacgctgctgaggaactctacctctgcagcgagtgcgggcgctgcttcacccacagcgcagcgttcgccaagcacttgagaggacacgcctcagtgaggccctgccgatgcaacgaatgtgggaagagcttcagtcgcagggaccacctcgtcaggcatcagagaacacacactggggagaaaccattcacgtgccctacctgtggaaaaagcttcagcagaggatatcacttaattaggcatcagaggacccactcagaaaagacctcctagctaggtccccatgtgaggagatctgctttcagccctcacctaagggaggtgaggaagaggaaaagccctcttgtcagcctgggaagaccttttcgagggagtctccctgacctgctcagatctgacattacctcttcctgcaactaaacacgagcctgggcagaacctctcagccttcctctacgccttgaggggatgtttcatccaaagtacaacctgaattgaggcttctccttcactggagtgcacctgcctctacctcatgggtataaagtaggagaactaagagacttaagaggtcgtggttcctatatcgtccaaaaaataggctgttacatatcctaaagactgctcaacagcttcaagttgaaagtggccaaggacagccccttaggtttgggaagggacgagcctgaaggattctgtctttactggggtcaaatcttaaagcacacagctctggactcaagacaggaggtttgcgtcctgatggctttgccacacattcacaggataactgcatagatccctcgctgtctgattcacttcttaccatgcactttcctttgatgctgaggagaaatggaagtgggcgaaaaatctcaaggctgcttcatgtggaccttgtcaagctgctccctcccccagcgtcaaattgttatcaggtgccaaacactgctagaaaggagggcctagtcagaagcctctttccatacgagttttggttttgtttttaatatttttttctattaaaatactcatgcatttaaccttcccgttattcaaccagtctcttggttgcatccctagcacttctactacaagtgagatggtagtgtttgagtgcttattgagtaaagcataattcggtcataatgaaatcgttcacattccctcatatgcacaagcccaccaaccccttcacaccccccttcacaggggtcgtatgagtaaggggatttggaaactgtcaacttacaaaggcactataacaattacagaatcatgattgccatgggccactttatttacatgaagacaactggagaacgactaagaccaaattatggaaaataagaaaaagctgttgctggcaagaccatcaagactgttctgacaccctgtccccatcatccctgactgagtactctgacatcacggaaagtgttgaacctgggaccctgaggaattcaccaggagtaaatggctttcatgtaaaaaaaaaaaaaaaaaaaaaaaaaaaaaaaaaaaaaaaaaaaaaaaaaaaaaaaaaaaaaaaaaaaaaaaaaaaaaaaaaaaaaaaaaaaaa

SEQ ID NO: 25935 - DNA, 3764 bp, Homo Sapiens
gctgcgggccaggggacgggggcggagccggagccggagccgacgggcggtggccgcactgggaccccggaatcccgcgcgctgcccacgattcgcttctgaggaacctagaaagattgtacaatgaatggtgattctcgtgctgcggtggtgacctcaccacccccgaccacagcccctcacaaggagaggtacttcgaccgagtagatgagaacaacccagagtacttgagggagaggaacatggcaccagaccttcgccaggacttcaacatgatggagcaaaagaagagggtgtccatgattctgcaaagccctgctttctgtgaagaattggaatcaatgatacaggagcaatttaagaaggggaagaaccccacaggcctattggcattacagcagattgcagattttatgaccacgaatgtaccaaatgtctacccagcagctccgcaaggagggatggctgccttaaacatgagtcttggtatggtgactcctgtgaacgatcttagaggatctgattctattgcgtatgacaaaggagagaagttattacggtgtaaattggcagcgttttatagactagcagatctctttgggtggtctcagcttatctacaatcatatcacaaccagagtgaactccgagcaggaacacttcctcattgtcccttttgggcttctttacagtgaagtgactgcatccagtttggttaagatcaatctacaaggagatatagtagatcgtggaagcactaatctgggagtgaatcaggccggcttcaccttacactctgcaatttatgctgcacgcccggacgtgaagtgcgtcgtgcacattcacaccccagcaggggctgcggtctctgcaatgaaatgtggcctcttgccaatctccccggaggcgctttcccttggagaagtggcttatcatgactaccatggcattctggttgatgaagaggaaaaagttttgattcagaaaaatctggggcctaaaagcaaggttcttattctccggaaccatgggctcgtgtcagttggagagagcgttgaggaggccttctattacatccataaccttgtggttgcctgtgagatccaggttcgaactctggccagtgcaggaggaccagacaacttagtcctgctgaatcctgagaagtacaaagccaagtcccgttccccagggtctccggtaggggaaggcactggatcgcctcccaagtggcagattggtgagcaggaatttgaagccctcatgcggatgctcgataatctgggctacagaactagcagcagcgggagaagacaagatggctgaactctggccggggcgacgaagcttccgaggaagggcagaatggaagcagtcccaagtcgaagactaagtggactaaagaggatggacatagaacttccacctctgctgtccctaacctgtttgttccattgaacactaacccaaaagaggtccaggagatgaggaacaagatccgagagcagaatttacaggacattaagacggctggccctcagtcccaggttttgtgtggtgtagtgatggacaggagcctcgtccagggagagctggtgacggcctccaaggccatcattgaaaaggagtaccagccccacgtcattgtgagcaccacgggccccaaccccttcaccacactcacagaccgtgagctggaggagtaccgcagggaggtggagaggaagcagaagggctctgaagagaatctggacgaggctagagaacagaaagaaaagagtcctccagaccagcctgcggtcccccacccgcctcccagcactcccatcaagctggaggaagaccttgtgccggagccgactactggagatgacagtgatgctgccacctttaagccaactctccccgatctgtcccctgatgaaccttcagaagcactcggcttcccaatgttagagaaggaggaggaagcccatagacccccaagccccactgaggcccctactgaggccagccccgagccagccccagacccagccccggtggctgaagaggctgccccctcagctgtcgaggagggggccgccgcggaccctggcagcgatgggtctccaggcaagtccccgtccaaaaagaagaagaagttccgtaccccgtcctttctgaagaagagcaagaagaagagtgactcctgaaagccctgcgctaacactgtcctgtccggagcgaccctggctctgccagcgtccccggccacgtctgtgctctgtccttgtgtaatggaatgcaaaaaagccaagccctccgcctagaggtcccctcacgtgaccagccccgtgtagccccgggctgacccagtgtgtgctcagcagccccaccccaccctgccccttgtcctctcagagcctcagcttctgggggagacatgctctccccacaggggggaggcactaagtcatggtcctggctggaaggtactgaaggcttctgcagctttggctgcacgtcaccctcctgagcctcacctttcctgccgtccctcctgttgtgaaatcaccacattctgtctctgcttggcttcccctccaccctaaagtctcaggtgacggactcagactcctggcttcatgtggcattctctctgctcagtgatctcacttaaatctatatacaaagccttggtcccgtgaaaacactcgtgtgcccaccagcggccttgaagaggcaggtctgggccagatgctgggcaggaaaccccagcggcagatgggcctgtgtgcacccaacgtgatgctatgcatgtctgaccgacgatccctcgaccagaatcagattcaggagctcagtttctttttcacttgggtctctggattcctgtcatagggaaggtatatcaggaggggaagaggcctttctagaattttctttgagcaggtttacaatttagcttacatttttcgactgtgaacgtgaataggctgctttttgctttcttctttccagaccccacagtagagcacttttcacttatttgggggaggcttcaggggactgttctcaccttaactcagccagaaagatgccctagttgtgatcaaaggtaactcgaggtggagggtagccctggggcccctcgacatcaccgtcattgatggagcctgaaccgtgtgctcctcggcagatgctgttgttgttacttccctccaagaggctggaaaagggctcagagctgctgagcaggaaccggagggtgacccatttcaggaggtgccggtaccagcctgactaggtacaggcaagcttgtgtgggcccaacaggcccttggtagagctggtgccagatgtgggctcagatcctgggcatgatgggccgagccacctcggatcccactgattggccagccgagcgagaaccaggctgctgcatggcactgaccgccgcttccagcttcctctgagccgcagggcctgctacgcgggcaagcgtgctgcctctcttctgtgtcgttttgttgccaaggcagaatgaaaagtccttaaccgtggactcttcctttatcccctcctttaccccacatatgcaatgacttttaattttcacttttgtagtttaatcctttgtattacaacatgaaatatagttgcatatatggacaccgacttgggaggacaggtcctgaatgtcctttctccagtgtaacatgttttactcacaaataaaattctttcagcaagttccttgtctaaaaaaaaaaaaaaaaaaa

SEQ ID NO: 25936 - DNA, 2025 bp, Homo Sapiens
ggacgagggtcttggcggcagttggtggaaccggagcttcgagtccgtccccggtgctgcctgcgcgttcacctgagtctcgctggagctcttctcgcccgcccacctcatctcaacccactttccgcggggagcggcgccaagctgggccttcctcggatcaggcgtcccctgaagtcggcacgcccctctgcgtcccccttcggtcccgctaggaccccgtccgggctgccgtcgcctcgtcgctatggcgcccaccatccagacccaggcccagcgggaggatggccacaggcccaattcccaccggactctgcctgagaggtctggagtggtctgccgagtcaagtactgcaatagcctccctgatatccccttcgaccccaagttcatcacctaccccttcgaccagaacaggttcgtccagtacaaagccacttccttggagaaacagcacaaacatgacctcctgactgagccagacctgggggtcaccatcgatctcatcaatcctgacacctaccgcatcgaccccaatgttcttctagatccagctgatgagaaacttttggaagaggagattcaggcccccaccagctccaagagatcccagcagcacgcgaaggtggtgccatggatgcgaaagacagagtacatctccactgagttcaaccgttatggcatctccaatgagaagcctgaggtcaagattggggtttctgtgaagcagcagtttaccgaggaagaaatatacaaagacagggatagccagatcacagccattgagaagacttttgaggatgcccagaaatcaatctcacagcattacagcaaaccccgagtcacaccggtggaggtcatgcctgtcttcccagactttaagatgtggatcaatccatgtgctcaggtgatctttgactcagacccagcccccaaggacacgagtggtgcagctgcgttggagatgatgtctcaggccatgattaggggcatgatggatgaggaagggaaccagtttgtggcctatttcctgcctgtagaagagacgttgaagaaacgaaagcgggaccaggaggaggagatggactatgcaccagatgatgtgtatgactacaaaattgctcgggagtacaactggaacgtgaagaacaaagctagcaagggctatgaggaaaactacttcttcatcttccgagagggtgacggggtttactacaatgagttggaaaccagggtccgccttagtaagcgccgggccaaggctggggttcagtcaggcaccaacgccctgcttgtggtcaaacatcgggacatgaatgagaaggaactggaagctcaggaggcacggaaggcccagctagaaaaccacgaaccggaggaggaagaggaagaggagatggagacagaagagaaagaagctgggggctcagatgaggagcaggagaagggcagcagcagtgagaaggagggcagtgaagatgagcactcgggcagcgagagtgaacgggaggaaggtgacagggacgaggccagtgacaagagtggcagtggtgaggacgagagcagcgaggatgaggcccgggctgcccgtgacaaagaggagatctttggcagtgatgctgattctgaggacgatgccgactctgatgatgaggacagaggacaggcccaaggtggcagtgacaatgattcagacagcggcagcaatgggggtggccagcggagccggagccacagccgcagcgccagtcccttccccagtggcagcgagcactcggcccaggaggatggcagtgaagctgcagcttctgattccagtgaagctgatagtgacagtgactgagtcccagggcattcagggctggttcagacaccattattgtgagcagcaaagcacttttctagtggtctgtttgtgagcctttcacttgtttgttccccacccccaaacctttgctgttaataaagtcaacttctttttaaaaaaaaaaaaaaaaaaaaaaaaaaaaaaaaaaaaaaaaaaaa

SEQ ID NO: 25937 - DNA, 2990 bp, Homo Sapiens
gctcaagatggcgtgcttgttggagaccccaatccgcatgagcgtcctttcgtttttttaaagaaaaagacgactttcacctttcactatgttgctcttgaaccaggaccaggaatgaaagttactgggagataacttcgaaggattttgcaacaaattcgagctgtccgactctgagaatggaagtaacagctagcagtcgccactatgttgacaggctatttgaccctgatccccagaaagttctacaaggtgtcatagacatgaaaaatgctgtaattggaaacaacaagcagaaagccaatctcattgttttaggagctgttccaagattgttgtacttgcttcagcaagaaacctcaagcacagagctgaaaactgaatgtgcagtggtgttgggaagtcttgctatgggtactgaaaacaatgtcaagtctctactggactgccatattatccctgccttattgcaaggactactgtccccagacctgaagtttattgaagcttgcctccgatgcctgcgtaccatcttcaccagtcctgtcactccagaggagctactgtatacagatgccacagtgataccacacctcatggcactgcttagcaggtcccgctatacccaggagtacatctgtcagatcttctcacactgctgtaaagggccagatcatcaaacaattttatttaaccacggtgcagttcagaatattgctcacctactaacctcactgtcctacaaagttcgaatgcaagcactgaaatgtttctcagttttagcttttgaaaacccccaggtatcgatgaccctggtaaatgttttggttgatggagaattgttaccacagatttttgtgaagatgttacagagggataagcctattgagatgcagctcacatcagcaaaatgtttaacttacatgtgtagagctggagcaattcggacagatgataactgtattgtattaaagacattaccttgtttggttcgaatgtgcagtaaggagagattactagaggagagagttgaaggagctgagacacttgcctatctgattgaaccagatgttgagctacagagaatcgctagcataactgatcacctcattgccatgcttgctgattatttcaagtatcccagctcagtgagtgccatcactgatattaaaaggcttgatcatgatttaaaacatgctcacgaactccgccaggctgcattcaagctctatgcctctcttggagcaaatgatgaagacatccggaagaaggtgagtctgggagaggggcgtcccccagtcctgacagccagcaggcagggagtgacgtcaacctgaaagtcgtggtgaagagcactaacagtgactgtttgaatataataaagcagagtgactaaaggcataattgaagaatgaatgggacccggatttggggggttgtttgtttgtttttagaacatagagtggcatggccgtgctggaatgacaaataactggcgtgctttttttttgtgtcattaatatgaattattatgttgcacatttttgcatgtgttctgataaaaatcaattctagcactgtgaagcttcagacaccttgaaagtcctaacattagaattgtaaatgttatttatggaaataccttccaatgctattgagaaattcaaatctctattgtatattgttctttgatatgtggcttagttttatgttttgattttttttgctactgtgcaagtttaatgtgaataaaatctttgtggaatgatgattttatgtttagtgagtggtcatctgaattttccagctccccagaaaatgtatgcactggtatagcacccttatgttactaaagcctagtctaacactgaactcatgttcttgatgagaatacttctagatgaggagtatagtggtaagtaagctctgacttggctccttccacaaaccaaaaagctggaacttaccactcaaaaacatgtataacctaataaattctacacaaggctttcaagaccatcagagagcaaaaccacatgttctgtcttgaggagccatagcagaaagagcaaattagtcattatttactgaacatgatgatttactaaatctctccatctgcattagtattttaaggagcactgtgagagaaatcacaaagtattagagtttaccatgattcagagaagttcttcaggcctgtagaaagaggagtatggaacaaccttacatttgttgaaataacttgaaaaggaaccatttcttgaagaaactgaagtaatagcaataagatttgatgtgtgagtagctttgatttaaaatcaatgcaaaaagcacaactaataaattgaatgtttccatgtacctcactttatttcagttaacaagatactttgacttgaagtgtttttagtgtatccctatgaaaatcatttttggtacatctaagttttcacttataaactgttatttcaaagcaaacatactagtgatatatatatgatttatggatgttgacgccaatgttcagtttgggtacgttggtgtattgcaaggggagaggcttttataacaatagatttgaacatttttaaaaaattggactgtgtaacttaaatacacaattatttggtttaggatggttattagggcccattagaaacaggagaagtattttacccattcttaaagctctaaaaaaccatctcatggactgaaaggtagatagacagatggaccacaatgggaaataggatgtccatttgtacttctttgtacttttttgttaataaactgttttggaattaatggcttaatttgtgatatcatgttctagaaatacctgcaacatgacagtctaatcagtagtctattaaaacttgtattcataatgtgtataatttcctggtaaggctaactcctgatcgtttctgtagaaagatgacaaataaagaaaaagttataattattaattaaaaaaaaaaaaaaaa

SEQ ID NO: 25938 - DNA, 2362 bp, Homo Sapiens
gcgcggagccccagccgagcctagccctgcccggccccggaggacttgcaacactccgaggccaggaacgctccgtctggaacggcgcaggtcccagcagctggggttccccctcagcccgtgagcagccatgtccaaccccagcgccccaccaccatatgaagaccgcaaccccctgtacccaggccctctgccccctgggggctatgggcagccatctgtcctgccaggagggtatcctgcctaccctggctacccgcagcctggctacggtcaccctgctggctacccacagcccatgccccccacccacccgatgcccatgaactacggcccaggccatggctatgatggggaggagagagcggtgagtgatagcttcgggcctggagagtgggatgaccggaaagtgcgacacacttttatccgaaaggtttactccatcatctccgtgcagctgctcatcactgtggccatcattgctatcttcacctttgtggaacctgtcagcgcctttgtgaggagaaatgtggctgtctactacgtgtcctatgctgtcttcgttgtcacctacctgatccttgcctgctgccagggacccagacgccgtttcccatggaacatcattctgctgaccctttttacttttgccatgggcttcatgacgggcaccatttccagtatgtaccaaaccaaagccgtcatcattgcaatgatcatcactgcggtggtatccatttcagtcaccatcttctgctttcagaccaaggtggacttcacctcgtgcacaggcctcttctgtgtcctgggaattgtgctcctggtgactgggattgtcactagcattgtgctctacttccaatacgtttactggctccacatgctctatgctgctctgggggccatttgtttcaccctgttcctggcttacgacacacagctggtcctggggaaccggaagcacaccatcagccccgaggactacatcactggcgccctgcagatttacacagacatcatctacatcttcacctttgtgctgcagctgatgggggatcgcaattaaggagcaagcccccattttcacccgatcctgggctctcccttccaagctagagggctgggccctatgactgtggtctgggctttaggcccctttccttccccttgagtaacatgcccagtttcctttctgtcctggagacaggtggcctctctggctatggatgtgtgggtacttggtggggacggaggagctagggactaactgttgctcttggtgggcttggcagggactaggctgaagatgtgtcttctccccgccacctactgtatgacaccacattcttcctaacagctggggttgtgaggaatatgaaaagagcctattcgatagctagaagggaatatgaaaggtagaagtgacttcaaggtcacgaggttcccctcccacctctgtcacaggcttcttgactacgtagttggagctatttcttcccccagcaaagccagagagctttgtccccggcctcctggacacataggccattatcctgtattcctttggcttggcatcttttagctcaggaaggtagaagagatctgtgcccatgggtctccttgcttcaatcccttcttgtttcagtgacatatgtattgtttatctgggttagggatgggggacagataatagaacgagcaaagtaacctatacaggccagcatggaacagcatctcccctgggcttgctcctggcttgtgacgctataagacagagcaggccacatgtggccatctgctccccattcttgaaagctgctggggcctccttgcaggcttctggatctctggtcagagtgaactcttgcttcctgtattcaggcagctcagagcagaaagtaaggggcagagtcatacgtgtggccaggaagtagccagggtgaagagagactcggtgcgggcagggagaatgcctgggggtccctcacctggctagggagataccgaagcctactgtggtactgaagacttctgggttctttccttctgctaacccagggagggtcctaagaggaaggtgacttctctctgtttgtcttaagttgcactgggggatttctgacttgaggcccatctctccagccagccactgccttctttgtaatattaagtgccttgagctggaatggggaagggggacaagggtcagtctgtcgggtgggggcagaaatcaaatcagcccaaggatatagttaggattaattacttaatagagaaatcctaactatatcacacaaagggatacaactataaatgtaataaaatttatgtctagaagttaaaaaaaaaaaaaaaaaaaaaa

SEQ ID NO: 25939 - DNA, 2380 bp, Homo Sapiens
gtccccgccggggaggtcgggacgggcaggggctgaggaccccgcgccagcttgggagccctggagttctggcgggagggaagctgtcaaatggaagccggtagaaatgagacagacgcccggagaagcggggagccccgcccctccgccatagcagcctcgggcgccgcctcttcctttccagcctcccgccctcgtctgcttccggccctgtggcctggtggggctctgcaggctccctcgggagtggtccttgggccgtggcccctctgggaggcctgagggagctcaatcctggtagcaacacccctgaattcctggtggtgaaaggatgtggccccaggacccatcccggaaggaggtgctgaggtttgcagtcagctgccgtatcctgactctgatgctgcaggccctcttcaatgccatcatcccagatcaccatgcagaagccttctctcctcctcgcctggccccctcaggctttgtggaccaactcgtggaaggtcttctgggcggcctgtctcactgggatgctgaacacttcttgttcattgctgagcatggctacctgtatgagcacaactttgccttctttcctggtttccccttggccctgctggtggggactgaactgttgagacccttacgggggttactgagtctacgcagttgcctgctgatttcggtagcatcactcaatttcttgttcttcatgttggctgcagttgcacttcatgacctgggttgtctggttttgcactgtccccaccagtccttttatgcagctctgcttttctgtctcagccctgccaatgtcttcctggcagctggttactcagaagctttgtttgccctcctgacattcagtgccatggggcagctggagaggggccgagtctggactagtgtactcctctttgcctttgccactggggtacgctccaacgggctggtcagtgttggcttcctcatgcattctcaatgccaaggctttttctcttctctaacgatgctgaatcctctgagacagctctttaagctgatggcctctctgtttctgtcggtgttcacacttggccttccctttgccctctttcagtattatgcctacacccaattctgtctgccaggctcagcccgccccattcctgagcctttggtacagttagctgtagacaagggctaccggattgcagagggaaatgaaccgccttggtgcttctgggatgttccactaatatacagctatatccaggatgtctactggaatgttggctttttgaaatactatgagctcaagcaggtgcccaattttctactggctgcaccagtggctatactggttgcctgggcaacttggacatacgtgaccactcacccttggctctgccttacacttgggctgcaaaggagcaagaacaataagaccctagagaagcccgatcttggattcctcagtcctcaggtgtttgtgtacgtggtccacgctgcagtgctgctgctgtttggaggtctgtgcatgcatgttcaggttctcaccaggtttttgggctcctccactcctattatgtactggtttccagctcacttgcttcaggatcaagagccgctgttgagatccttaaagactgtgccttggaagcctcttgcagaggactccccaccaggacaaaaggtccccagaaatcctatcatgggacttttgtatcactggaaaacctgttctccagtcacacgatacattctaggctacttcctgacttactggctcctgggactactcctacattgcaacttcctgccttggacatgacctggactctccagggacaggttggaagccaacttaacccaggggtctgaaagtaaaaatacacattggaactgcctctgctgccctgggatcattactgtgtccattataatctttctctttctctttgaaagctggtcaggaatgggagaagtgtcagacactagagagccccttctggtcctggctagggcaaattttagacaactattttctctgtaagtgaagattgtcgtattccaagtctaaaatacacctggatctgtctagtcaatcaacatagcagagacagtcttaaacctaccattgacctgtgtgtaaatttaaatgtcaatttattgaagtgtaaatttcatcaaaggcattagctgacaggctggtaacagtccacacaagatggtataggcctgaacagtgtagtggcagtaataaagtgggaccattttttccaaatgcgacattgtttctgatgtttttttttatgatttgtgcatgtatttttatatgaaaaaaacttacaaagatatgcaaattaaacttctttcagttataaaaaaaaaaaaaaaa

SEQ ID NO: 25940 - DNA, 1333 bp, Homo Sapiens
gtggcggcggcgaaggtggcggcggctcggccagtactcccggcccccgccatttcggactgggagcgagcgcggcgcaggcactgaaggcggcggcggggccagaggctcagcggctcccaggtgcgggagagaggcctgctgaaaatgactgaatataaacttgtggtagttggagctggtggcgtaggcaagagtgccttgacgatacagctaattcagaatcattttgtggacgaatatgatccaacaatagaggattcctacaggaagcaagtagtaattgatggagaaacctgtctcttggatattctcgacacagcaggtcatgaggagtacagtgcaatgagggaccagtacatgaggactggggagggctttctttgtgtatttgccataaataatactaaatcatttgaagatattcaccattatagagaacaaattaaaagagttaaggactctgaagatgtacctatggtcctagtaggaaataaatgtgatttgccttctagaacagtagacacaaaacaggctcaggacttagcaagaagttatggaattccttttattgaaacatcagcaaagacaagacagggtgttgatgatgccttctatacattagttcgagaaattcgaaaacataaagaaaagatgagcaaagatggtaaaaagaagaaaaagaagtcaaagacaaagtgtgtaattatgtaaatacaatttgtacttttttcttaaggcatactagtacaagtggtaatttttgtacattacactaaattattagcatttgttttagcattacctaatttttttcctgctccatgcagactgttagcttttaccttaaatgcttattttaaaatgacagtggaagtttttttttcctcgaagtgccagtattcccagagttttggtttttgaactagcaatgcctgtgaaaaagaaactgaatacctaagatttctgtcttggggtttttggtgcatgcagttgattacttcttatttttcttaccaattgtgaatgttggtgtgaaacaaattaatgaagcttttgaatcatccctattctgtgttttatctagtcacataaatggattaattactaatttcagttgagaccttctaattggtttttactgaaacattgagggaacacaaatttatgggcttcctgatgatgattcttctaggcatcatgtcctatagtttgtcatccctgacgaatgtaaagttacactgttcacaaaggttttgtctcctttccactgctattagtcatggtcactctccccaaaatattatattttttctataaaaaaaaaaaaaaa

SEQ ID NO: 25941 - DNA, 1129 bp, Homo Sapiens
aaccgcctggagccgccgggagtggacgccgccgaggcccggagtcgcgcctgcagacacagcatctactcagcgtgggtcacctctgtgaacatcactgactgcaagcctccctcaatttctggtgcagcccatcagggacccacagcgcctgggaggatggtgcggatcttggccaatggggaaatcgtgcaggatgacgacccccgagtgaggaccactacccagccaccaagaggtagcattcctcgacagagcttcttcaataggggccatggtgctcccccagggggtcctggcccccgccagcagcaggcaggtgccaggctgggtgctgctcagtcccccttcaatgacctcaaccggcagctggtgaacatgggctttccgcagtggcatctcggcaaccatgctgtggagccggtgacctccatcctgctcctcttcctgctcatgatgcttggtgttcgtggcctcctcctggttggccttgtctacctggtgtcccacctgagtcagcggtgacctctgagggctgataggggtgggtttgttgagagggacttgctgggccttggtgtgagagcaggcatatttggaggggatctggtggtgccttgaaggtatgatcagagaggggaccacaggtgtgtgtttcccctttgtgttaagcgtgaggcagagggagacgttagtccagcatttccaaagtgtgggtgggtccgttggttcccgagatacttttaggtggtatggggcctgcattaagtggcacaaaatcagagcaagaaagcgatgcccttcccaattctctcaatccttttatgccgagaagatctcagctggatgccaacatgttccgatgcctgtggaagacatgccgacgtctcctctgcctagggagcaggacttgggcttagggcaggtggaaaaaattccagacttttttagcactgtttttgttttaatggtatatttttattggctactttattgtttaggacaagtggtagtggcattctatttattgtgaccttttcaataaatagatttaagtaaaaaaaaaaaaaaaaaaaaaaaaaaaaaaaaaaaaaaaaaaaaaaaaaaaaaaaaaaaaaaaaaaaaaaaa

SEQ ID NO: 25942 - DNA, 2706 bp, Homo Sapiens
ctttgcgactaactgctccgctacatttggcctggaagatgatgttgtcaagaagggcgctatttgtacttctaaatactccagtccttttccatgcactggaggagaggttattttcaaagctttgtcaccaccatacgatacagagaacccttacagtgccaaagttcaggagcagctgaagatcaccaaccttcgcgtgcagctgctgaaacgacagtcttgtccctgtcagagaaatgacctgaacgaagagcctcaacattttacacactatgcaatctatgatttcattgtcaagggcagctgcttctgcaatggccacgctgatcaatgcatacctgttcatggcttcagacctgtcaaggccccaggaacattccacatggtccatgggaagtgtatgtgtaagcacaacacagcaggcagccactgccagcactgtgccccgttatacaatgaccggccatgggaggcagctgatggcaaaacgggggctcccaacgagtgcagaacctgcaagtgtaatgggcatgctgatacctgtcacttcgacgttaatgtgtgggaggcatcagggaatcgtagtggtggtgtctgtgatgactgtcagcacaacacagaaggacagtattgccagaggtgcaagccaggcttctatcgtgacctgcggagacccttctcagctccagatgcttgcaaaccgtgttcctgccatccagtaggatcagctgtccttcctgccaactcagtgaccttctgcgaccccagcaatggtgactgcccttgcaagcctggggtggcagggcgacgttgtgacaggtgcatggtgggatactggggcttcggagactatggctgtcgaccatgtgactgtgcagggagctgtgaccctatcaccggagactgcatcagcagccacacagacatagactggtatcatgaagttcctgacttccgtcccgtgcacaataagagcgaaccagcctgggagtgggaggatgcgcaggggttttctgcacttctacactcaggtaaatgcgaatgtaaggaacagacattaggaaatgccaaggcattctgtggaatgaaatattcatatgtgctaaaaataaagattttatcagctcatgataaaggtactcatgttgaggtcaatgtgaagattaaaaaggtcttaaaatctaccaaactgaagattttccgaggaaagcgaacattatatccagaatcatggacggacagaggatgcacttgtccaatcctcaatcctggtttggaataccttgtagcaggacatgaggatataagaacaggcaaactaattgtgaatatgaaaagctttgtccagcactggaaaccttctcttggaagaaaagtcatggatattttaaaaagagagtgcaagtagcattaagatggatagcacataatggcacttgtctatgtacaaaacacaaactttagagcaagaagacctcagacaggaaactggaattttttaaagtgccaaaacatatagaaatgtttgaatgcatgggtcttatctaacttatctcttctggacccatgtttaaatacagttttatttcatgaagagaaatgaaaacccctacactgatatctgttttctatgggactgattctgaaattcttaactattaagaatattttaatagcagcatgacatttagcagtaatccattaagggcagtacctctaacaaggacgccttccagcttcagcgatgttacttacgtttgatgctacttaaagtaatgaatgacgttttaaggaatccctaaccctactatcagaaaaggtgtttgttaaagagccttctcttgtgtgttacgcatgaactttggtctgtaggtgttaaatggaacctctccatgtgtatatagtatttccttgtataaagcactttactacctaccacttgtgttgtgaacgtttggtgactgctgttgaaagaaggaaaagggtgtgtgagaaagcctactgaagcagcagcactgccactacatgtggacaaaagtgaccatataaaagaagttgtgctatttaactctgaatacttggagaaactaggtgaagatgcaaccagaaaggagaatatgtatgcgtgaagtctcagctttgagctggaggctagattccaagatgacagccatgatgaaactttttaaaaaactaaaccagaagagactttaaaataagagaaagaaatcataaatgtagacatatgcttggctaaaggggaaatggactttaaattttaaagagctcatttgcaatgcacttgtatacacttcaaaaattattgtagacacagaatttgttatatttttgtgcttagtatttaaacctgaacattgaaacagttctcctccttgtctttcttaacagtaatagtcattatatttacctgttttttaacacaatgtatgtgatagtcaaaaaatcacagtttttcattattattcatcttctgtacccacgcataaccactatacatagtttcttttgtacttgaatatacaaaacatgaacacagtgccatatgaataatttcacatacagaacctttttttctctgaagtcctgtggacttgcaaatatatatatatattgctttgttaatttgtttttatatttcatatatgtaataaaggaatatgatctgaaaaaaaaaaaaaaaaa

SEQ ID NO: 25943 - DNA, 1150 bp, Homo Sapiens
ggaaagggcaggagccggaccaaggtgaggacagtggaactgaaggctgctggttacctctcctgccctccgctggccacggtggagaagacagcccctccctcctgctctgacctgacagtgttcatccatcgccctgtattagcgaagaacaacatcaagctggctagcaaggaactgtatacagggtccagctgggtatcacactggatctcacccaaagcttagatgtgatccagctcagtatcacaaagcagaacgaaaaggatgtgtttgggctgagaggccatacattggctccggcatgacgggtgacttcttccgagtctggcttctgcagcacacagggcttcgccagcacccagctcctgcagcatgggcagctcctgtgacagcaggcgcccgcagcctgcaaagcgtctccagtgccgccgcctcagtgaacctcaaccagcggcacctagcagctttctctgccaccctcttcaggtagttctgtagcagcgcgtttctcatgagacacttccctgtgagcagctttttctacccttgaggatggatttccagcaaattctgcccatgtggtaccacagccacttctctgccattcagtgaaactgccgttgtgccctcttcaaggtctggatctaagcccagggaccaggaaacctcttgcttgagtgctggaactcaggccagaaggtatggctgctgctatgtgctgtgaccagagaatcagagttctctttacttcttaccagccaacctcttgaaaatgcctttttgttttttggttttttttgagacggagtctcgctctgttgcccaggcagtgcagtggctcactgcaacctccgcctcctgagttcaagtgattctcctgcctcagcctcacaagtaggtgggattacaggcatgtgccaccacgcccagctaattttgtatttttagtagtgacggggtttctccatgttggtcaggttggtctcaaactctcgacctcaggtgatccacctgtctcagcctcccaaagtgctgggattacagacgttagccagagcgcccagtctaagccctttatagcttaattctatatattaaattttcccagttcaaaaaaaaaaaaaaaaaaaaaaaaaaaaaaaaaaaa

SEQ ID NO: 25944 - DNA, 3440 bp, Homo Sapiens
agaagctaactggggacgtgggcagccctgacgtgatgagctcaaccagcagagacattccatcccaagagaggtctgcgtgacgcgtccgggaggccaccctcagcaagaccaccgtacagttggtggaaggggtgacagctgcattctcctgtgcctaccacgtaaccaaaaatgaaggagaactactgtttacaagccgccctggtgtgcctgggcatgctgtgccacagccatgcctttgccccagagcggcgggggcacctgcggccctccttccatgggcaccatgagaagggcaaggaggggcaggtgctacagcgctccaagcgtggctgggtctggaaccagttcttcgtgatagaggagtacaccgggcctgaccccgtgcttgtgggcaggcttcattcagatattgactctggtgatgggaacattaaatacattctctcaggggaaggagctggaaccatttttgtgattgatgacaaatcagggaacattcatgccaccaagacgttggatcgagaagagagagcccagtacacgttgatggctcaggcggtggacagggacaccaatcggccactggagccaccgtcggaattcattgtcaaggtccaggacattaatgacaaccctccggagttcctgcacgagacctatcatgccaacgtgcctgagaggtccaatgtgggaacgtcagtaatccaggtgacagcttcagatgcagatgaccccacttatggaaatagcgccaagttagtgtacagtatcctcgaaggacaaccctatttttcggtggaagcacagacaggtatcatcagaacagccctacccaacatggacagggaggccaaggaggagtaccacgtggtgatccaggccaaggacatgggtggacatatgggcggactctcagggacaaccaaagtgatgatcacactgaccgatgtcaatgacaacccaccaaagtttccgcagagcgtataccagatgtctgtgtcagaagcagccgtccctggggaggaagtaggaagagtgaaagctaaagatccagacattggagaaaatggcttagtcacatacaatattgttgatggagatggtatggaatcatttgaaatcacaacggactatgaaacacaggagggggtgataaagctgaaaaagcctgtagattttgaaaccaaaagagcctatagcttgaaggtagaggcagccaacgtgcacatcgacccgaagtttatcagcaatggccctttcaaggacactgtgaccgtcaagatcgcagtagaagatgctgatgagccccctatgttcttggccccaagttacatccacgaagtccaagaaaatgcagctgctggcaccgtggttgggagagtgcatgccaaagaccctgatgctgccaacagcccgataaggtattccatcgatcgtcacactgacctcgacagatttttcactattaatccagaggatggttttattaaaactacaaaacctctggatagagaggaaacagcctggctcaacatcactgtctttgcagcagaaatccacaatcggcatcaggaagccaaagtcccagtggccattagggtccttgatgtcaacgataatgctcccaagtttgctgccccttatgaaggtttcatctgtgagagtgatcagaccaagccactttccaaccagccaattgttacaattagtgcagatgacaaggatgacacggccaatggaccaagatttatcttcagcctaccccctgaaatcattcacaatccaaatttcacagtcagagacaaccgagataacacagcaggcgtgtacgcccggcgtggagggttcagtcggcagaagcaggacttgtaccttctgcccatagtgatcagcgatggcggcatcccgcccatgagtagcaccaacaccctcaccatcaaagtctgcgggtgcgacgtgaacggggcactgctctcctgcaacgcagaggcctacattctgaacgccggcctgagcacaggcgccctgatcgccatcctcgcctgcatcgtcattctcctggtcattgtagtattgtttgtgaccctgagaaggcaaaagaaagaaccactcattgtctttgaggaagaagatgtccgtgagaacatcattacttatgatgatgaagggggtggggaagaagacacagaagcctttgatattgccaccctccagaatcctgatggtatcaatggatttatcccccgcaaagacatcaaacctgagtatcagtacatgcctagacctgggctccggccagcgcccaacagcgtggatgtcgatgacttcatcaacacgagaatacaggaggcagacaatgaccccacggctcctccttatgactccattcaaatctacggttatgaaggcaggggctcagtggccgggtccctgagctccctagagtcggccaccacagattcagacttggactatgattatctacagaactggggacctcgttttaagaaactagcagatttgtatggttccaaagacacttttgatgacgattcttaacaataacgatacaaatttggccttaagaactgtgtctggcgttctcaagaatctagaagatgtgtaaacaggtatttttttaaatcaaggaaaggctcatttaaaacaggcaaagttttacagagaggatacatttaataaaactgcgaggacatcaaagtggtaaatactgtgaaataccttttctcacaaaaaggcaaatattgaagttgtttatcaacttcgctagaaaaaaaaaacacttggcatacaaaatatttaagtgaaggagaagtctaacgctgaactgacaatgaagggaaattgtttatgtgttatgaacatccaagtctttcttcttttttaagttgtcaaagaagcttccacaaaattagaaaggacaacagttctgagctgtaatttcgccttaaactctggacactctatatgtagtgcatttttaaacttgaaatatataatattcagccagcttaaacccatacaatgtatgtacaatacaatgtacaattatgtctcttgagcatcaatcttgttactgctgattcttgtaaatctttttgcttctactttcatcttaaactaatacgtgccagatataactgtcttgtttcagtgagagacgccctatttctatgtcatttttaatgtatctatttgtacaattttaaagttcttattttagtatacatataaatatcagtattctgacatgtaagaaaatgttacggcatcacacttatattttatgaacattgtactgttgctttaatatgagcttcaatataagaagcaatctttgaaataaaaaaagatttttttttaaaaaaaaaaaaaaaaaaaaaaaaaaaaaaaaaaaaaaaaaaaaaaaaaaaaaa

SEQ ID NO: 25945 - DNA, 1494 bp, Homo Sapiens
ggccgttcgaagagtcgtgagggggtgacgggttaagattcggagagagaggtgctagtggctggacttgacctggaaagaatcttctgctgactctcaacttttcctggaaaaaatggatcattcccaccatatggggatgagctatatggactccaacagtaccatgcaaccttctcaccatcacccaaccacttcagcctcacactcccatggtggaggagacagcagcatgatgatgatgcctatgaccttctactttggctttaagaatgtggaactactgttttccggtttggtgatcaatacagctggagaaatggctggagcttttgtggcagtgtttttactagcaatgttctatgaaggactcaagatagcccgagagagcctgctgcgtaagtcacaagtcagcattcgctacaattccatgcctgtcccaggaccaaatggaaccatccttatggagacacacaaaactgttgggcaacagatgctgagctttcctcacctcctgcaaacagtgctgcacatcatccaggtggtcataagctacttcctcatgctcatcttcatgacctacaacgggtacctctgcattgcagtagcagcaggggccggtacaggatacttcctcttcagctggaagaaggcagtggtagtggatatcacagagcattgccattgacatcaaactctatggcgtggccttatcgattgcagtgggaagttgttgaagacttgaagacgtgattcctgctccaatcatcccttcttgctcctctttgtgcacgtacacacacacacacacacacacacacacacacacccctgctcaacagaggtttagtttacagtctctgaactaaagtagtaacctcccaaattgttttttctaataagctgagattcccatttctcttaaggagaagccacccatgagatgtcttttccttctccatcatcttagagccaagttatatgttcttgtctaatccatgtagctttttgttcaatgacttgatcatctgcttcctttttgaatttttaacagatagtaagtaaatttggtggttttttcccctgggtcagtgatggaaaggggttaacttcagccaggattgatggcagctgagggaaattcttgcccaactaaacccagaactcaaacttaacattagaaaataaggtccagggccggacacagtggcccatgcctgtaatcccagcactttggggggccaaggcaggctggatcacctgaggacaggagttcgagaccagtctggccaacatggggaaaccccgtctctactaaaaatacaaaaattagccgggcatggtggtgggcgcctgtaatcccagctactcagaaggctgaggcaggagaatcacttgaacctaggaggcggaggttgcagtgagccaagatggcgccattgcactccagcctgggtgacaagagtgaaactccatctcaaaaaaaaaaaaaaa

SEQ ID NO: 25946 - DNA, 1239 bp, Homo Sapiens
cggaaagaaggagggctagccgcgtgcgttcgcgccgcgcctccttgcgtttctgttccccaaatagggcctctccttctcccgccgcccaggcccctgcgtgggctggacgcgtcagccccacacattagcctcgctgcggcgcccagactctgctttgcctccccgtcccggtccctggcccctgccctgtcgcccgccgccggagcggtgaccgcccggcccgccgttcttctgctgccaccgctgtcggcaccatgggcagtgagcagagctccgaggccgagagccgacccaacgatctgaactcctcagtgactccttcaccagccaagcatagagccaagatggatgatattgtggttgtagctcagggctcccaggcctcacggaacgtcagcaacgatcccgatgtcatcaagttgcaagagattccaaccttccagccccttttgaaagggctattgagtggccagacttccccaacaaatgccaaattggagaaactggactctcagcaggtgttgcagctctgcctccgatatcaagatcacctgcatcagtgtgcagaggccgttgcttttgaccagaatgctttggttaaacgaatcaaagagatggatctgtctgtagaaactctgttcagcttcatgcaggagcgccagaaaagatacgccaagtatgccgagcagatccagaaagtgaacgagatgtccgccatcctccgccgcatacagatgggcatcgaccagactgtgcccctgctggacaggctcaacagcatgctgcccgagggcgagcggctggagcccttcagcatgaagcccgaccgcgagctcaggctgtagctgccgcccggcctgcctggggctgggagccccagacaccgacaccctgaggacgtgtggagctaaggtcatatcatctgaccaggtctggaggctggcgggaggctccctgaaagtgggtgcgaaggagtccggctggcatgaaaatctgactttgcccagctcttttccttgatgcagtttcccggtgtggaaggaacctaaccagttctcggtgataactgaagctggaacgtgtgaattattaggaattctttgaagaactctgcattgagaattatttttatttagttttttttttttttaattgagagtatatagtccagtccaggtaccggaataaaaatatggagacaaggggaaaaaaaaaaaaaaaaaaaaaaaaaaaaaa

SEQ ID NO: 25947 - DNA, 2627 bp, Homo Sapiens
ggtctgtccacttgccggtccctcagaccgtcggcggtctctgtccgcttcgggacctgtccgctggtcgctccgcgtccgatggctcctggccgcggaaccttaggcctggccctggtctccgagcgcgggttcgccgggaggagcgtgtggcgggggtgtgccggggcgtgagtgcgccgagcatggggctgagcctggtgtggggagtgggtatctgcggagccggcctgaaccccacctcagccgggcgcggggagggggctccgtgcgtgtgatcgtgcagctgtgagcgcgtggccgccccgcggggctccgctgcaggcccctcagccccaggagcagtactcgctcttcagggcctgccctggatcctggaggctacacagctgcccactcctcctggggaggctgccgtggaggccatggagatccctgccccggagcccgagaagacaggaatcggtgagtttcaaggatgtggctgtggacttcacccaggaggagtggggtcaactagactcccctcagagggccttgtaccgggatgtgatgttggagaactaccagaaccttcttgccctaggacctccactgcacaagccagatgtgatctctcatctggaacgaggcgaggagccatggagcatgcagagggaagtccccagagggccctgtccagaatgggagctgaaggcggtgccctctcaacagcagggcatttgcaaagaagaaccggcccaggagcccatcatggagcggcccctcggcggggcgcaggcgtgggggcgccaggcaggtgctctgcagaggagtcaggctgcgccctgggcgcccgcacctgccatggtctgggacgtccctgtagaggaattccccctcaggtgtcccctcttcgcccagcaacgcgttcccgaggggggacccttgctggacacacgcaagaacgtccaggccactgagggcagaaccaaggcccccgcgagactgtgtgcaggggaaaacgcctccacgccaagtgagccagaaaagttcccccaggtgcgccggcagcgcggggcgggcgccggggagggcgagttcgtgtgcggcgagtgcgggaaggcgttccgccagagctcctccctcacgctgcaccggcgctggcacagccgggagaaggcttacaagtgcgatgaatgcggcaaggccttcacctggagcaccaaccttctggagcaccggcgcatccacaccggcgagaagcccttcttctgcggcgagtgcgggaaggccttcagctgccactcgtccctcaacgtgcaccagcgcatccacacgggcgagcggccctacaagtgcagcgcctgcgagaaggccttcagctgcagctcgctgctcagcatgcacctgcgggtgcacaccggcgagaagccctaccggtgcggcgagtgcggcaaggccttcaaccagcgtacacacctcacacgccaccaccgcatccacacgggcgagaagccctaccagtgcggctcctgcggcaaggccttcacctgccactcatccctcaccgtgcatgagaagatccacagcggggacaagccgttcaagtgcagcgactgcgagaaggccttcaacagccgctcgcgcctcaccctccaccagaggacgcacacgggcgagaagcccttcaagtgcgccgactgcgggaagggcttcagctgccacgcgtacctgctcgtgcaccggcgcatccacagcggcgagaagcccttcaagtgcaacgagtgcggcaaagccttcagctcccacgcctacctcatcgtgcaccggcgcatccacacaggcgagaagcccttcgactgcagccagtgttggaaggccttcagctgccactcgtccctcatcgtgcaccagcgcatccacaccggtgagaagccctacaagtgcagcgagtgcggcagagccttcagccagaaccactgtctcattaaacatcagaaaatccactccggggagaagtcgtttaagtgtgagaaatgtggggagatgttcaactggagctcgcacctcactgagcaccagaggctgcacagcgaggggaagcccttggccatccagttcaacaaacacctgctcagcacatactacgtgcctggcagcctgctgggtgcaggggatgctggactgagggacgtggatcccatcgacgcgctggatgtggcaaagctcttgtgcgtggttccccccagagctggcaggaatttctccctggggagcaaacctcgaaactaacatgatgtgctttggtgtcagtagctgctttctgagctactcaacaaggaaagcaccctggtcctccctggctcctagatccagaccaccttcctccaggtgtgggagccttgccttatcaccccaatcaggtctgcatgccagggtgcctcctctagttaaagtcagtcacctccccagaagggccacactccaggaggagtgttgagagtcatttgaggtagtcttgccacctgttttccttgatgggcctggaagttgttgacaaggggaaagatctttcttgccaataaaaagaagggatatcgttgggaaaaaaaaaaaaaaaaaaaaaaaaaaaaaaaaaaaaaaaa

SEQ ID NO: 25948 - DNA, 2398 bp, Homo Sapiens
atgctttggtggcagccatgagctttgctggaggccttgcttcccatagccttggctgtggggcaaggaactctgccaggcgagggggatgctgccctggatcaacagaagcctggtgggtttgctcgtgttagagtgtcctgccttcttactgacaactcttctcggtgatagcctctcttccctggattgtgacatatggaatgacagtgcaggtaccaccgaggctagcacagtcaagcctccagctaagctggatccctgaagcctgctatcatgcagacaggctatgcggctgcctcggaccatgctaggccacttgctggggtgtcaacctaccaccaaaggggtcttttagcaaacctcatggggaacaggaacattcctgttcatccctggccacaggctgcagacccagcactggcccttgcgtgagtcagagcctggggctggccctagccccttctactgacttcctcatttaagccaattatataagctcacattgatcagggagggagggaaagagctaaagagggtcacacaagtggctattttccctgcagtgtttctgtgtggtgaaaataacccagtccactaaggggcgggagtgaatggatggctggattttccccaagctccttatagcctaatgttgtcaggatgtgagtatgaggaatttagcctcttatagtgaaatgagtccaactctgggctttgcttagaggagagctcccgtcaggcttcctataatatgaaaagaagtcaccattggggaactagagaccccagaccttttcatatggatatttgagaatgtaatgcatctcaggcctcgtgctggaactctagggcactctgggcaggctcagaacacttgatattcctgacagctacacacctgacatgcaggtacatacctgatcggtgtcatctcctaacaaggattttcagttcctcgggagagcaataatctttgtaggaaagacatccctgcaataggtgatatgtggtccttagaagttttattcctttactacttggaagaaaagttctttggtgattcttctctgcttttgaagatgatcaaaagcatcttcattgattttctgaaacgaaagccttgtctgaaaccaattaatacttgggaaacagctgggcttggaggagtagaatgccagagataaatccatggctcctgctctggctctcttctgcagaaatgagggcaacagtgaggccacttccctggcaaatgtgcagctcaggatagggaagcataagaccctctgtttaaaagagagtcaagtaggtaaccaaagccaagctctgtgcaaggtgctttggagttgtaaattgaggagtgcatccttgctgtcttgaaccattctgtttgcaatggtgagaccttacataacctagccttgcagggccgccacacaaccctggagtcctagagttggaggaacctttgtatccatctgacttctcattttgcagaatatgatgagaaagtagaggatcgctctgttcaccactcttgctattccattagtggggagatgcctgctagcatgtgtgaggggaacactctgatacactgggaagtatcggaaattcccagaaacacaaacataaaataactctcctagacccaggtactggggactgtctcagtccgtgtggcatgataaataaaaggttaggatcaagtctttgtatttttcaagatgtggtagctgattattcctgttttaagtactctgaaattgatctgtgatcaataatactaatatgttatcttttaccgtattctgcctctcactattgattttaattagttaggagtatttgagctgttatttcttgagcttaatatttttttagagttaactctttaaggagataatcatggctgtagacaaggccagggctggctgacgtgccttagaaggtttgaatgcaataaagcggtgtttggcgttctcctgcattgtagtgcgggtacaaaatgctatttgttcgtcatactgttgtcagcagatgagccgcccactacagacggctactgcccagggacctgcccaggccccacccaagggctcccaagggttgagatttctgcagacctatagccagcacacttagtcctgccctatatagagttcctcttcgggaagcttttgataaggaattctcagaccgataggatgtctgtctgggctttgctgcgggacagtctaactgtgggggctaggggaaagcaggagagtatcgatcaaagagtaagccacacacggataatcagttactagggatggaggtgtgagggttcattatattattcattttactgttgtatatgtttgaaaatgtctataataaaaaaaaaaaaaaa

SEQ ID NO: 25949 - DNA, 1778 bp, Homo Sapiens
catgcttcatagggcaccttgaggtgtgctgcccagtgtggcttagactaaatgttgagtttgggttttttgtttttttttttttttgagtcagagtctcactgtccctcaggctggagtgcaatggcgcaatcttgcctcactgcaacctccacctcccaggttcaagcgattctcctgcctcagcctcccaagtagctgggattacaggtgtgtgccaccacgccccaccgatttttgtacttttagtagagacaggatttcaccatgttggccaggctggtcttgaactcctgacctcaagtgatctgcccgcctgggcctcccaaagtgctgggattacaggcgggagccaccgtgcctggccaatgttaagtattttaaaagtcattttaaaatatttgtcattgatgaaacttggtttcagcacacgtaattgctttccctctcttcttgtgattaggtgtaaacctctatttaactcaagtcctagattagaatgtcctttgtcctgatgtttgcagtaattgcttccttggttaataaagatatttttgaaatatactctggactgttggtgaaagaggcaggcatggctttactggtactagtttggcactgaactgtttgggtgcccatgaggtaggcagaccttatgctttttttttttgagacggagtcttgctctgttgcccaggctggagtgcagtgatgtgatctcggctcactgcaacctctgcctcccaggttcaagtgattctcctgcctcagcttccccaatagctgggactacaggtgtgcgccaccactcccagctaatttttgtatttttagtagagacagggttttgccatgttggtcaggctggtctcggaactcctgacctcaggtgatccacccgcctctgcctcacaaagtgctgggattacaggcatgagctaccgtgcctggcctaaaccttacgcttttgaggttgagtgcaggccttgtgataactaagtgctacttttgacgagccttcaacaagctgcccagtcctctcctcagcagacgcatcaggttgtagttgcatctttacagtggtctttccttttattaaatctatagcagtgaatatagatttgattcaacttttagttacgttctctcaagaatcctaatcaactttcagttagcctcttaagaaagggaaaaaaaggtgctgccagtcatccccaaattatgtttttggctgtgcattctattttctacatagcactgaatctgagtaacagtcatcctggatttatagttggaacagaacagtaacagacctaactgggactcagccagcactagcctcatcttagctgccccttttctctgctttgcagtttactgcttccctgggctagccataacggggttctgggcaggtcagactcttcagcaagacagtgtattaatagtgtgaattagatacactgatgacctgctctgcctagttaagaaactgaattaatcagcagttacaaagcacatactttgttacgtgctaggctttgcctcctggcctctagataattaagacggcccagggaataccagcagagaagtgctaattgtatttgggtgttacaaaagcagacctagacgagctgttcacttaactggtacctgttggtcagaaaaagaatttatttagagattatgatcatgtaaaattacagtactcaacccttctagcaaagtatttttttgaaaaataaactaaatgcctttataaaaaaaaaaaaaaa

SEQ ID NO: 25950 - DNA, 2182 bp, Homo Sapiens
cctgtgtggggggagactgacgagacgtccttcgaagcaggcatcaaagtgcagatccatagtcaggatgaacctcctttcatcgaccagctgggctttggcgtggccccaggcttccagacctttgtggcctgccaggagcagcggctcatctacctgcccccaccctggggcacctgcaaagctgttaccatggactcggatttggatttcttcgactcctacagcatcactgcctgccgcatcgactgtgagacgcgctacctggtggagaactgcaactgccgcatggtgcacatgccaggggatgccccatactgtactccagagcagtacaaggagtgtgcagatcctgctctggacttcctggtggagaaggaccaggagtactgcgtgtgtgaaatgccttgcaacctgacccgctatggcaaagagctgtccatggtcaagatccccagcaaagcctcagccaagtacctggccaagaagttcaacaaatctgagcaatacataggggagaacatcctggtgctggacattttctttgaagtcctcaactatgagaccattgaacagaagaaggcctatgagattgcagggctcctgggtgagctgctgatgacacctgtccccttctcatgccatgggcatggcgtggctccctatcatccaaaagcagggtgctcacttctgtcccatgagggtcctccaccccagaggcccttccccaaaccctgttgtcttggtgacatcgggggccagatggggctgttcatcggggccagcatcctcacggtgctggagctctttgactacgcctacgaggtcattaagcacaagctgtgccgacgaggaaaatgccagaaggaggccaaaaggagcagtgcggacaagggcgtggccctcagcctggacgacgtcaaaagacacaacccgtgcgagagccttcggggccaccctgccgggatgacatacgctgccaacatcctacctcaccatccggcccgaggcacgttcgaggactttacctgctgagccccgcaggccgctgaaccaaaggcctagatggggaggactaggagagcgagggggcccccagctgcctcctcacatctgccctggggactccccacactccggggcagatctttcctcttgtctgtggtaaggaaggagtcttgaccatagagtcctctctctgcctctatcccattctttttacatttaacaaaactaatctaaaaaagaactaaaaagggagaacggggcaagggacctcaggctgcccctctctcctccatgctgcctcccctagctcccagcctgaattctgtctatctagctgtctgccatctgagtgtccatctacattctgctgccaccagtcaccaaaggcccttcccagtgaggggtggaagggatctctggggtctggaatttggccccaaaccagagaatgtaccttaagggggagggctagtgtgggggagggaggcttccccagccttaagagaccctctcagcccagtgactgtccccaaacccaagtctcctggcaggaactaaaacctcagccccactctctcacaccatgtggaatctcgtgggggtcggggatccccttaagaagtggtaatggggacaagatgcggccctggtgctgtaggctacatcctgatacctataagttcacccccaccccacagctgctggagagaaatcccaagaggcagcccttcctcaccatcccattaaagacctggctggttagcgtccagctcagggagaagggcgctagtgcctaacctcactggtccctctcccggaggcccttgtagagggccacgtccataaattttcttatggaactctcccacatcctcttccccaacttcatttgcttctctcaacaacctcatctgcattttctatttctatatgatacagactctatattgctatatctctgtatatactttcccagccctgtctgtctccaccccatcccctcttgtctctgagaaccattctcccaccccaagttccaccttctatgtttctactccctccctggtctctgaatgccttcgcctgtataaagagttggactctcaaaaaaaaaaaaaaaaaaaaaaaaaaaaaaaaaaaaaaaaaaaaaaaaaaaaaaaaaaaaaaaaaaaaa

SEQ ID NO: 25951 - DNA, 2494 bp, Homo Sapiens
gatcacccacatcctccacgtgtccttccttgctgaggcctctgtgaggggccttgaagaccaaaatctgtggcacattggcagagaaggagctatgctcaagtgcctgagtgaagggcagccccctccctcatacaactggacacggctggatgggcctctgcccagtggggtacgagtggatggggacactttgggctttcccccactgaccactgagcacagcggcatctacgtctgccatgtcagcaatgagttctcctcaagggattctcaggtcactgtggatgttcttgacccccaggaagactctgggaagcaggtggacctagtgtcagcctcggtggtggtggtgggtgtgatcgccgcactcttgttctgccttctggtggtggtggtggtgctcatgtcccgataccatcggcgcaaggcccagcagatgacccagaaatatgaggaggagctgaccctgaccagggagaactccatccggaggctgcattcccatcacacggaccccaggagccagcggaggagagtgtagggctgagagccgagggccaccctgatagtctcaaggacaacagtagctgctctgtgatgagtgaagagcccgagggccgcagttactccacgctgaccacggtgagggagatagaaacacagactgaactgctgtctccaggctctgggcgggccgaggaggaggaagatcaggatgaaggcatcaaacaggccatgaaccattttgttcaggagaatgggaccctacgggccaagcccacgggcaatggcatctacatcaatgggcggggacacctggtctgacccaggcctgcctcccttccctaggcctggctccttctgttgacatgggagattttagctcatcttgggggcctccttaaacacccccatttcttgcggaagatgctccccatcccactgactgcttgacctttacctccaacccttctgttcatcgggagggctccaccaattgagtctctcccaccatgcatgcaggtcactgtgtgtgtgcatgtgtgcctgtgtgagtgttgactgactgtgtgtgtgtggaggggtgactgtccgtggaggggtgactgtgtccgtggtgtgtattatgctgtcatatcagagtcaagtgaactgtggtgtatgtgccacgggatttgagtggttgcgtgggcaacactgtcagggtttggcttgtgtgtcatgtggctgtgtgtgacctctgcctgaaaaagcaggtattttctcagaccccagagcagtattaatgatgcagaggttggaggagagaggtggagactgtggctcagacccaggtgtgcgggcatagctggagctggaatctgcctccggtgtgagggaacctgtctcctaccacttcggagccatgggggcaagtgtgaagcagccagtccctgggtcagccagaggcttgaactgttacagaagccctctgccctctggtggcctctgggcctgctgcatgtacatattttctgtaaatatacatgcgccgggagcttcttgcaggaatactgctccgaatcacttttaatttttttcttttttttttcttgccctttccattagttgtattttttatttatttttatttttatttttttttagagatggagtctcactatgttgctcaggctggccttgaactcctgggctcaagcaatcctcctgcctcagcctccctagtagctgggactttaagtgtacaccactgtgcctgctttgaatcctttacgaagagaaaaaaaaaattaaagaaagcctttagatttatccaatgtttactactgggattgcttaaagtgaggcccctccaacaccagggggttaattcctgtgattgtgaaaggggctacttccaaggcatcttcatgcaggcagccccttgggagggcacctgagagctggtagagtctgaaattagggatgtgagcctcgtggttactgagtaaggtaaaattgcatccaccattgtttgtgataccttagggaattgcttggacctggtgacaagggctcctgttcaatagtggtgttggggagagagagagcagtgattatagaccgagagagtaggagttgaggtgaggtgaaggaggtgctgggggtgagaatgtcgcctttccccctgggttttggatcactaattcaaggctcttctggatgtttctctgggttggggctggagttcaatgaggtttatttttagctggcccacccagatacactcagccagaatacctagatttagtacccaaactcttcttagtctgaaatctgctggatttctggcctaagggagaggctcccatccttcgttccccagccagcctaggacttcgaatgtggagcctgaagatctaagatcctaacatgtacattttatgtaaatatgtgcatatttgtacataaaatgatattctgtttttaaataaaaaaaaaaaaaaaaaaa

SEQ ID NO: 25952 - DNA, 2369 bp, Homo Sapiens
cctgggcgccagcgcagcgtagcaaatccaggcagcgccacgcgcggccggggccgggcggaaccgagaagccgggaccgcgctgcgacgcgccggccgcatggagcctgccgccggtttcctgtctccgcgccccttccagcgtgcggccgccgcgcccgctcccccggccgggcccgggccgcctccgagtgccttgcgcggacctgagctggagatgctggccgggctaccgacgtcagaccccgggcgcctcatcacggacccgcgcagcggccgcacctacctcaaaggccgcttgttgggcaaggggggcttcgcccgctgctacgaggccactgacacagagactggcagcgcctacgctgtcaaagtcatcccgcagagccgcgtcgccaagccgcatcagcgcgagaagatcctaaatgagattgagctgcaccgagacctgcagcaccgccacatcgtgcgtttttcgcaccactttgaggacgctgacaacatctacattttcttggagctctgcagccgaaagtccctggcccacatctggaaggcccggcacaccctgttggagccagaagtgcgctactacctgcggcagatcctttctggcctcaagtacttgcaccagcgcggcatcttgcaccgggacctcaagttgggaaattttttcatcactgagaacatggaactgaaggtgggggattttgggctggcagcccggttggagcctccggagcagaggaagaagaccatctgtggcacccccaactatgtggctccagaagtgctgctgagacagggccacggccctgaggcggatgtatggtcactgggctgtgtcatgtacacgctgctctgcgggagccctccctttgagacggctgacctgaaggagacgtaccgctgcatcaagcaggttcactacacgctgcctgccagcctctcactgcctgcccggcagctcctggccgccatccttcgggcctcaccccgagaccgcccctctattgaccagatcctgcgccatgacttctttaccaagggctacacccccgatcgactccctatcagcagctgcgtgacagtcccagacctgacaccccccaacccagctaggagtctgtttgccaaagttaccaagagcctctttggcagaaagaagaagagtaagaatcatgcccaggagagggatgaggtctccggtttggtgagcggcctcatgcgcacatccgttggccatcaggatgccaggccagaggctccagcagcttctggcccagcccctgtcagcctggtagagacagcacctgaagacagctcaccccgtgggacactggcaagcagtggagatggatttgaagaaggtctgactgtggccacagtagtggagtcagccctttgtgctctgagaaattgtatagccttcatgcccccagcggaacagaacccggcccccctggcccagccagagcctctggtgtgggtcagcaagtgggttgactactccaataagttcggctttgggtatcaactgtccagccgccgtgtggctgtgctcttcaacaatggcacacatatggccctgtcggccaacagaaagactgtgcactacaatcccaccagcacaaagcacttctccttctccgtgggtgctgtgccccgggccctgcagcctcagctgggtatcctgcggtacttcgcctcctacatggagcagcacctcatgaagggtggagatctgcccagtgtggaagaggtagaggtacctgctccgcccttgctgctgcagtgggtcaagacggatcaggctctcctcatgctgtttagtgatggcactgtccaggtgaacttctacggggaccacaccaagctgattctcagtggctgggagcccctccttgtgacttttgtggcccgaaatcgtagtgcttgtacttacctcgcttcccaccttcggcagctgggctgctctccagacctgcggcagcgactccgctatgctctgcgcctgctccgggaccgcagcccagcctaggacccaagccctgaggcctgaggcctgtgcctgtcaggctctggcccttgcctttgtggccttcccccttcctttggtgcctcactgggggctttgggccgaatcccccagggaatcagggaccagctttactggagttgggggcggcttgtcttcgctggctcctaccccatctccaagataagcctgagccttagctcccagctagggggcgttatttatggaccacttttatttattgtcagacacttatttattgggatgtgagccccaggggggcctcctcctaggataataaacaattttgcagaaaaaaaaaaaaaaaaaa

SEQ ID NO: 25953 - DNA, 2011 bp, Homo Sapiens
cacggccgcggcggcggcggcggcggcggctgctggagcccggatgcggcgccgtgaggcaggcccgggagagcggcgcggatggatccaacatggcggcgccgagcctgagccgagagaagagacctgggaaattaagtttcttgcggagtacggtggggattgcagctgctgagcagggattctggaaagcattgcgtacctgagcccccagcatggcgggcctaaagcggcgggcaagccaggtgtggccagaagagcatggtgagcaggaacatgggctgtacagcctgcaccgcatgtttgacatcgtgggcactcatctgacacacagagatgtgcgcgtgctttctttcctctttgttgatgtcattgatgaccacgagcgtggactcatccgaaatggacgtgacttcttattggcactggagcgccagggccgctgtgatgaaagtaactttcgccaggtgctgcagctgctgcgcatcatcactcgccacgacctgctgccctacgtcaccctcaagaggagacgggctgtgtgccctgatcttgtagacaagtatctggaggagacatcaattcgctatgtgacccccagagccctcagtgatccagaaccaaggcctccccagccctctaaaacagtgcctccccactatcctgtggtgtgttgccccacttcgggtcctcagatgtgtagcaagcggccagcccgagggagagccacacttgggagccagcgaaaacgccggaagtcagtgacaccagatcccaaggagaagcagacatgtgacatcagactgcgggttcgggctgaatactgccagcatgagactgctctgcagggcaatgtcttctctaacaagcaggacccacttgagcgccagtttgagcgctttaaccaggccaacaccatcctcaagtcccgggacctgggctccatcatctgtgacatcaagttctctgagctcacctacctcgatgcattctggcgtgactacatcaatggctctttattagaggcacttaaaggtgtcttcatcacagactccctcaagcaagctgtgggccatgaagccatcaagctgctggtaaatgtagacgaggaggactatgagctgggccgacagaaactcctgaggaacttgatgctgcaagcattgccctgacctattccctcttctcactttggggactgttcccatcacccacctctggagcttacactgttctggggtttgttctctacccttccaaccaatcacacccctgcctttttttttttttttttaaagaaaaagacaaaagaaagtggaagtggtattccccacccctccctgcacccatgtgcctgggcttcccctttatttcccttttccatttaccccgtaatgtgtctctacagctaccttaccactgagccgtaagacaaatgtataggaagaagcaaagtctacagcacatagtctttgtaagggattgatgtgaacacttttttttggatgcactaaggagttatcaatacttctggctttatgagagctcttaaattttgtctaaaaaaccaaagggctgtgagtaagggagctatgtggaaagtgggactctgaagtgtattttgaaaattaatcgccaccctcttccaaattatagaattttttaaaaacaagctgtggccctttccactctctcctggcctctggtgctgctcctctctgccgcctttcctccattccatggcttgaaacctctgcctgatgtggctccttcctttttcccatttgtcaaaccctcttcaaaggaggaacagataagactgggtcagcctagtcatgcctcccaactgtggtggtatatgtgtacacacatacacagggtggatggagaagaggttgctgattaaaatacactccccctataaaggggaagggggagtgtgacactttctttccatgttcaagtgaaaataaataatgtaccctgcaaaaaaaaaaaaaaaaaaaaaaaa

SEQ ID NO: 25954 - DNA, 1227 bp, Homo Sapiens
gggagaacgtgctgtgtggatgcggcgaaacgctgaggcgcggccttcgctgtgtggtggggactcacaagaccgacgtcaagatgatgctttcaagggccaaacctgctgtaggcagaggcgtacagcacactgacaaaagaaagaagaaaggtaggaagattccaaaactagaggagctactttcaaaaagagatttcactggagctattaccctgttggagttcaaacgtcatgttggggaagaagaagaggatactaatttgtggattggatattgtgcctttcacctgggtgactacaagagagctctggaggaatacgaaaatgctacaaaagaggaaaattgtaattctgaagtctgggtgaacctagcttgcacctacttctttcttgggatgtataaacaagctgaagcagctggatttaaagcttcaaaaagccgactccaaaaccgcctcctcttccacttggctcacaagtttaatgatgagaaaaaattgatgagctttcatcaaaatcttcaggatgtcacagaagatcaactcagtttggcctcaatccactatatgcgatctcactaccaagaagctatagatatatataagcgaatactgctagataacagggaataccttgcccttaatgtttatgtggccctctgctactacaagttggattactatgatgtgtctcaagaagttttggctgtttaccttcagcaaattcctgatagtaccatcgcactcaatcttaaagcctgtaaccattttcgcctttacaatggcagagcagctgaggcagaactcaaaagcttgatggacaatgcttcttcatcctttgaatttgctaaagaactcatcaggcacaatctggtgaataacgatttcccgtcttgactgagttcagtcctactctgctttggtacatcacagcaattagaaagattaataaaaggagatgcgccagcaagtaatgctttactccaagggaacccctcctcactgtggaggagataagttttaaagtactaatctgtttccttaaggaaatccttgttgggagaacaggaatatatttaatatttggaaagaagcacaaggcagtgtagatccaggtgtctgtttttttgagaaagacaaaggaacgtatccctctgtggtttaaaataaatgggaaatatttttgcatctttgtaaaaaaaaaaaaaaaaaaaaaaaaaaaaaa

SEQ ID NO: 25955 - DNA, 1422 bp, Homo Sapiens
ggggtatgaatccatgtcatcagtcatctcctgtattggatgatataagatcaggtcattcccttgaactttttcttcacctctcactggttgcaattatcagaaaaatgaaagttcaaaagaaaattttaacagtggcccatgatggctgcagttgggcacatcgataataaaacctaggcctataagctaccgctgacctcttacctgtgtaactggagtttgttaaatatttaacactgacaagtattggttataaacctccttatcacatgcagaactaagacaggatgaaatcagtcaccctccaccaggccttaagatgcctcacctttctccctacccactcaactgcacacataccctattttatatatagcatcaccaagcacccagcagaataaaaaaatgcaacaattgcttctctccctgcttctcttaccacctgtgccaaacggatactcctgttatatatactgtgccccaggtaacctactgtgggacacattctgggttgtactgagtttgtgttgttaagagttaagtccttaaacttggctcaaaataaatttaactgtgatttctctaatttttagtgcctactgtttcaccagacacctagagtcaatagtgtcctagaatctacggtgtccagggcttgagcaagatactttagtgaatataaacactaacgagaccttgccttttctcaagcctacaggatatcagcctatttgaaaagtgacactggctttacacccagaagcccacaaaatagaatgatgtaactgaattttttggtagctctctgggtaatttatgtggtgttagactcttgggtttgaaagaaagagactcgtgatcccattctggcatgacagaaacttcattggaagatgaggatgtttctctgggaaaatataaacaataagtgtgagcgttttagcagtgaatgtattaatattatgttggaaattgtattgctaaagagttaaagagaaaatagtgtaattaatttaaagaaaccttcaagaatttcagggtgcttttataaatgcaagttcctgaatatggtcaaacccaaaacgtcagtgaatttagaagagtagatgttttaaaagacctgattttaaaagaatgaccaaaaatagccaagtaaatagtcaaggaaatatataaaagaatatcaaagtaaactagaaaataacaaatggaacaatttgtaaaaatgaaagctataaataatgaaatggagaacaagacatagtgcaaaggatatataaagccaaaagttcatttttaaatggcaaaaacagagagagaagaagaaagagagagataaacttctggtaaggcatttattaaaagaaatacaagagaaagagaaaaaagcaaaaaaaaaaaaaaaaaaaaaaaaaaaaa

SEQ ID NO: 25956 - DNA, 289 bp, Homo Sapiens
gggggtttcatctcaaggtgaccacacaatcattgggaaggaaaaaggagggtctgagggcttcatccaggtttacagcccaagaaagtcctgcccacagagggtttgcatctgtgctggtcccgtcatgagtaaatcttgcctgcttgagctggcgaggagtgggaaggaggaggaggggagagagaagtagcgggacagagggaggtaagagtcagaaagacacacagtgacaaggaatcacagaaagatgcactcagggaaaaaaaaaaaaaaaaaaaaaaaaaaa

SEQ ID NO: 25957 - DNA, 1469 bp, Homo Sapiens
ggggctttttctcttggagctgagctataagacaacaggactgaacagggagccaactgtttctttgaacagtaaatcaggaacaccaatggaccaaaatgaacacagtcactggggaccacatgcaaagggccaatgtgccagcagatctgagctgagaatcatcctggtgggcaaaacaggaactggcaaaagtgctgcagggaacagcatcctcaggaagcaagcatttgaatcgaagctgggttcccagaccttgactaagacttgcagcaaaagtcagggaagctggggaaatagagagattgtcattattgacacaccagatatgttttcttggaaggaccactgtgaagctctgtacaaagaggtgcagaggtgctacttgctgtctgcaccaggaccccatgtgctgctcctggtgactcagctgggccgctatacctcacaggaccagcaggctgcacagagggtgaaggagatctttggagaggatgccatgggacacacaattgtcctctttacccacaaggaagacctcaatggtggctccctgatggattacatgcacgactcagataacaaagccctaagcaagctggtggcagcatgtggtgggcgaatctgtgcctttaataaccgtgctgaagggagcaatcaggatgaccaagtgaaggaactaatggactgtattgaggatctgttgatggagaaaaatggtgatcactataccaatgggttgtacagcctaatacagaggtctaaatgtggacctgtgggatcagatgaaagagtaaaggaattcaaacagagccttataaagtacatggaaactcaaagaagttacacagccttggctgaagcaaactgcctaaaaggagccttaatcaaaacacaactgtgtgttttattttgtattcagttgtttctcagattgataattctgtggctttgcatactgcacagcatgtgcaatttgttttgttgcttactctttagtatgtgcaatttattctgcagtttgctgtttattatacccaaaaagttaatgatatttttgagaacagttattagactagaacgcaagactcctaggttatagttacagatcccagttattatttactcactatcatttagtgggtgaatcacagtaatttccctgtaaaatgtggtacctgaagtcatatttgagattctatgaaatgtttaaatctgaacatcactccaattattaatgaaccaaatcatacgataagttactgtttgcattgaaatataatatcaaagccttttgaaatctgtaaacataaaattcctctcattttcaaatatctaaagccagttttatgttcctaaaatctcattttcttctttctagtactactatttctactgaatataatgaaaatggcaataaaataatattacataaactgaaaaaaaaaaaaaaaaaaaaaaaaaaaaaa

SEQ ID NO: 25958 - DNA, 1677 bp, Homo Sapiens
gggatattgttcacaaatcctgattagttaagtgcatacattatgaaacttacagaataaaacttattatacatctctttcttaaattaatatctttacacattttcaactggctccccaagtctgataaggaaggattaaaagaaaaaagaaatgtattagttgggtggccaaggagtttcctttgtaatgttgagagacttccgctttctgaatttcgctggttctctaaggtaaaagagttaaatagtacccttgttcaccaaggaaagtgatccaaactatatatctagtgcagatatttcctttgcattatttagtcttctctggagagaaaatacagtttccccttcctctttctcttcacatttactcttttcaacccaaaataagagacatagaaagcaaaccacagccagtttggcatcttctcagtgctactagtataggcacatacacatacacagtctcagcaaggttataaagaaccctgtcaggtccacttgcaacatggccttgctacttggattagctcctttaagcctgaaaataactttcctggtcatggaagaactggacgcatcttttaacttatgaaatagaagttgaacttgaaaactctttttaaaaaatcctggttttgcaggacagctacataatgaatgtatatattaagactgtagctgaattgcacatgaaatcagattgccaacttcttgactttcaatgttagacatttatccttaagttgtgagcgatatatgtagcatgctgtgaaatgtctgttatagctctttaattcatcagtattaatacagaattatcatttgcgtttcttggtactttttattcaatgtaatcagaagctgtgatgttttgcctttgtagtcctgtgctttgttactgtaatttttttttttttttacgaagcacgtgactggactaatgtaaggcagatgacgtgatctttaagactgctatatatatcagtctcttactctataaggtttaaattagaataagcttttatcaaatagataattgatgcaatttaggattcacgcaagtttcagtgtcaaatggcggtcttatagtttcaattctgaaaatagcaaacttaataaacagccactttaaacttgttctggcaaaccagaccctgctgtagatatagtctaaggtagttaaccatataagccttttcaactcttaatgccctccacatgaatcagcagttaagaaggttctagaacccatgaaagcttttgtatgtattactaggttttgtttttcttatgtttgctgattttacagttctgactaaagctgacctaaatggatcagtttatgtgtaatattctagtgctttaatgactctttttttctttggagggagggtaacattatttggacagatgcagaaggaactgttagtgagtcaagacaaacacatctgaaataaaggaactgtgtattaacatgttaacaattcataactgcactttttatgacattttgaaaatctatttataggtacagaacaatgggttttgttaaactgtatcacatttatacttgcagaaatttatttcattgttattagtaggaattttattggttcaataaaattggcaaaactgaacaccgaaaaaaaaaaaaaaaaaaaaaaaaaaaaaa

SEQ ID NO: 25959 - DNA, 2289 bp, Homo Sapiens
cggcgatgagctaagacgctgtttcagagcgtttgggtcctctgaggccccttgaccaggagtgtctctgaagatacagtccaaagaaagttctccaaaacaaggagaacagtctgaagctggggatggcaacagcattggacccagaccagccaaagaaacaaaaaaatacttgtggaggagatggcccctctgaaaggagtacaggaacagcaggttcggcatgagtgtgaagttacaaagcctgagaaagagaagggtgaggagacaaggattgagaatgggaagcttattgtagtaacagactcttgtggaagagtagagtcatctgggaaaatatctgaacccatggaggctcataatgagggctctaacttggaaagtcatcaggccaagcccaaagagaagattgagtataaatgctcagaacgtgagcagagattcatccagcacttggacctgattgaacatgcgagtacacacacgggaaagaaactctgcgagtctgatgtgtgtcagagttccagtcttacaggacataagaaagtcctctctagagagaaaggtcatcagtgtcatgagtgtgggaaagcctttcagaggagttcacacctcgtcagacatcagaaaatccatcttggtgagaagccttatcagtgcaatgagtgtggcaaagtctttagccagaatgcaggccttttggaacatctcagaattcatactggagagaaaccttatctatgtatccattgtggaaaaaattttaggcgcagctctcaccttaatcgacatcagagaattcacagtcaggaggagccctgtgagtgcaaggagtgtggaaaaacctttagtcaggccttactcctcacccaccatcagagaatccatagtcactccaaaagccatcaatgtaacgagtgtggaaaagctttcagtttgacctcagaccttattcgacaccacagaattcatactggagaaaaacctttcaagtgtaacatatgccagaaagccttccgactaaactcacaccttgctcagcatgtaagaatccacaatgaagaaaaaccctatcagtgtagtgaatgtggagaagccttcaggcaaaggtcaggtctttttcaacatcagagatatcaccacaaagacaaactggcttgatgaggtgttctctccttgtagaacatcagagaaggcacattgactagcaaacagcactttaggaaaagtcaccgtagcccactgtggcatcagaaaattcttgggggctgagttggaggctccctgcctctattctctctcctttgctttccttgaagtcagctttggaccacaataatttcactgtagatgatatgctaggatcaaagttaaacagcattcttcactgcaggacatctcagagcatgtaacataactgcatgattatatactctaagcaatagagagcttcatgactgagtaagagttttgaagtcagcagtgaatcaagtgcccacagatttgcaggcttaagcagaacaagggaagattgatatttttggatatgctatagcagctttctcctatgaaataaaactgatgatgtttggaagtatactactctcaaaggtgtctttaaagtacaggttaatggtgaacattttcccccagtggcttcacctcattcctcccactggccttaccccttccttccccagtggaagcattttcaaaagcaaagataattttcgctggtgaacttcagaacttgccttcagggttagcttcatgtaattttaccatttcccatccccattccccaccacattatgtcaagattcaagttataaattaacgttttacttagactttgaaagagatttcatgagtaatttgaatgaaccttgctgaattaatctgaatagcaactgtctgacttgataactccagtgccagtatagtggctgctgcatagacactattcagtaaatgtctgatgaaagaaattggactttttccctttaatactgatgatgcaattttgaaatgttgcttgttctggaatacttcggaagttaaacaataaagtcagcttggagaggagatcatgatctttatactgtgaatagcagaatgtcacagatgaagaatattaaaattaggggcgtccactccaaaacatatcaccagagtgacaacttcagccctcagcctctgcaatccatatatatcctggtcttgggagtccatagaatactgtttccttctaataaaggtttcaaacaaaaaaaaaaaaaaaaaaaaaaa

SEQ ID NO: 25960 - DNA, 2187 bp, Homo Sapiens
tagcggtgctgggtcgggccgacgtgccacccacccggagccgggatgccagaagggccgttggtgaggaaatttcaccatttggtctccccctttgtgggtcagcaggtggtcaagacagggggcagcagtaagaagctacagcccgccagcctgcagtctctgtggctccaggacacccaggtccatggaaagaaattattccttagatttgatctagatgaagaaatggggccccctggcagcagcccaacaccagagcctccacaaaaagaagtgcagaaggaaggggctgcggacccaaagcaggtcggggagcccagcgggcagaagacccttgatggatcctcacggtctgcagagctcgtcccccagggcgaggatgattctgagtatttggagagagacgcccctgcaggagatgctgggaggtggctgcgtgtcagctttggtttgtttggcagcgtttgggtgaacgatttctccagagccaagaaagccaacaagaggggggactggagggacccttccccgaggttggtcctgcactttggtggtggtggcttcctggcattttataattgtcagttgtcttggagctcttccccggtggtcacacccacctgtgacatcctgtctgagaagttccatcgaggacaagccttagaagctctaggccaggctcagcctgtctgctatacactgctggaccagagatacttctcagggctagggaacatcattaagaatgaagccttgtacagagctgggatccatcccctttctctcggttcagtcctgagtgcctcgcgtcgggaggtcctggtggatcacgtggtggagttcagtacagcctggctgcagggcaagttccaaggcagaccgcagcacacacaggtctaccagaaagaacagtgccctgctggccaccaggtcatgaaggaggcgtttgggcccgaagatgggttacagaggctcacctggtggtgcccgcagtgccagccccagttgtcagaggagccagagcagtgccagttctcctaaggagctggtggtgctcctcatggaaccttgccgttggggaacctgacgtctaagtgtccagaaaggaggatgtgggcagggacggggtacagaggatagtgtgggtcagaggtgccagtagtataatattcatctccctggagttatgttgaaggcagagttttcatagggttagattttttttatccttttctagttcagttaattcatcctgttgaattgcaccatcgtgaaagatgggaaaaatcgtgatgatgggtaaggggaaaacttcccggaaggcaatggggcaaggaaaaagaaagcctatgggaaatggctgtgctcccaacatagctttgcagatgatgtgggttttttttttttttttttggttgtttgttttgagagagagtcttgctctgtctccctggctagggtgtggtggtgtgatcttggctcacggcagccttgccctccctggctcaagcagtcttcatctcagcctccagagtagctgggactacaggcatgtgatatgatgctcggctgatttttgtttactttttagagagatggggtcttgccatatttgccaggctggtttgaactcctacaactcaagcattcctcccaccttggtctcccaaaatgttgggaccacgggtgtgagccaccgcgcccagctagctcctgtgttttgtttttgttttgtaactttggttgatgttaaggccctccattttggaaagcaggaaaacaggattttttttttttatcttgttccctggaggatccagggatgaggatagagtggcctgagagcagtgcttggattcagcctcctgctgggtccttctgctggatacaggcaccaagaggcgggggtggagcagggagctgcgccttcctggggtgcccggtggtgtgtagagaaaagctgcttgtttactccttaagtcaatgtattggtgactgttgatttgttgaacaattcaggaatcaagggctgtggagaaactccctcatgttgttggcaacaggtgaatgaacctagagcggtgacatgaaaataaagctcactgttactcgcaaaaaaaaaaaaaaaaaaaaaaaaaaaaaaaaaaaaaaaaaaaaaaaaaaaaaaaaaaaaaaaaaaaaaaa

SEQ ID NO: 25961 - DNA, 2618 bp, Homo Sapiens
gtcagccagaaagggctatctgctcccttcgccaaattatcccacaacaatgtcatgctcggagagccccgccgcgaactcttttttggtcgactcgctcatcagctcgggcagaggcgaggcaggcggcggtggtggtggcgcggggggcggcggcggtggcggttactacgcccacggcggggtctacctgccgcccgccgccgacctgccctacgggctgcagagctgcgggctcttccccacgctgggcggcaagcgcaatgaggcagcgtcgccgggcagcggtggcggtggcgggggtctaggtcccggggcgcacggctacgggccctcgcccatagacctgtggctagacgcgccccggtcttgccggatggagccgcctgacgggccgccgccgccgccccagcagcagccgccgcccccgccgcaaccaccccagccagcgccgcaggccacctcgtgctctttcgcgcagaacatcaaagaagagagctcctactgcctctacgactcggcggacaaatgccccaaagtctcggccaccgccgccgaactggctcccttcccgcggggcccgccgcccgacggctgcgccctgggcacctccagcggggtgccagtgcctggctacttccgcctttctcaggcctacggcaccgccaagggctatggcagcggcggcggcggcgcgcagcaactcggggctggcccgttccccgcgcagcccccggggcgcggtttcgatctcccgcccgcgctagcctccggctcggccgatgcggcccggaaggagcgagccctcgattcgccgccgccccccacgctggcttgcggcagcggcgggggctcgcagggcgacgaggaggcgcacgcgtcgtcctcggccgcggaggagctctccccggccccttccgagagcagcaaagcctcgccggagaaggattccctgggcaattccaaaggtgaaaacgcagccaactggctcacggcaaagagtggtcggaagaagcgctgcccctacacgaagcaccagacactggagctggagaaggagtttctgttcaatatgtaccttactcgagagcggcgcctagagattagccgcagcgtccacctcacggacagacaagtgaaaatctggtttcagaaccgcaggatgaaactgaagaaaatgaatcgagaaaaccggatccgggagctcacagccaactttaatttttcctgatgaatctccaggcgacgcggttttttcacttcccgagcgctggtcccctccctctgtcttcaggctctgcccaggaactcgcacctgtgctggagccctgttcctccctcccacactcgccatctcctgggccgttacatctgtgcagggctggtttgttctgactttttgtttctttgtgtttgcttggtgctggtttatttgttgttttctgggggaaaaagccatatcatgctaaaattctatagagatagatattgtcctaagtgtcaagtcctgactgggctgggtttgctgtcttggggtcccactgctcgaaatggcccctgtcttcggccgagctggtttcctgcccagcctggggcaaacctagccggaaggccgaggtcccattgttggcgctgaggtgtctggcctgaggtcaatggtgcaaaggagccgccaccgggcatgtctgcctggagtgctgtgctgtgtttaatcaggggatacaggcccctgggtttcttttttctttcttcctttcttccttggccaagagaagggcttacaggcatggacatgcaggttggcaaacgggcttgactttggctgatttaaaaagtgagaaagaaagtaaaaaaggttaatttttccttcctctgtaagatatcccagctttaaaaagaaaaaaaaagaattaccaagagaaggggacttctcttccagtttctgtaaggtcttacattgcctgactaaaatgtttcatttacctctaaatttccatatccttctggctgtagataaataatgtagttttgtttatgcatttggaattagtggatttttttgtcattaaaattgttaccactggtaacatgtgacaagcacaccacaattctccctatcttgtgaagttgtttttttaaatcgccttgaacaaaaagtttttttttttgtttgtttttgctttctgaaattcacagaagcctaggaggactggggtaagcggaataaactagagaagggagacattgtttggatttcctttatactgtgaagttacatgcataaaagggtcaaacctgtagatgcagaaaaagaaaaaaacctataaatacaaatctgtataaatgtctattattatgaagaattgccaatcttgttttaagcaaatgcattctatcgttattataaatgttagttctagctctatttacttctaatcttaaatcagaataaattaatattgtattgctgctgtgcgtggaaaaagacgatgtttatgttcttatagaataaaagctgtggaatgaagctttttaattttaaaaaaaaaaaaaaaaaaaaaaaaaaaaaaaaaaaaaaaaaaaaaaaaaaaaaaaaaaaaaaaaaaaaaaaaaaaaaa

SEQ ID NO: 25962 - DNA, 2816 bp, Homo Sapiens
gcagagtccagggcagctcaaggctcctccacacacacacccgctgaaccctgagcaccctgagctgctgagatggggcgggccggggctgccgccgtgatcccgggcctggccctgctctgggcagtggggctggggagtgccgcccccagccccccacgccttcggctctccttccaagagctccaggcctggcatggtctccagactttcagcctggagcgaacctgctgctaccaggccttgctggtggatgaggagcgtggacgcctgtttgtgggtgccgagaaccatgtggcctccctcaacctggacaacatcagcaagcgggccaagaagctggcctggccggcccctgtggaatggcgagaggagtgcaactgggcagggaaggacattggtactgagtgcatgaacttcgtgaagttgctgcatgcctacaaccgcacccatttgctggcctgtggcacgggagccttccacccaacctgtgcctttgtggaagtgggccaccgggcagaggagcccgtcctccggctggacccaggaaggatagaggatggcaaggggaagagtccttatgaccccaggcatcgggctgcctccgtgctggtgggggaggagctatactcaggggtggcagcagacctcatgggacgagactttaccatctttcgcagcctagggcaacgtccaagtctccgaacagagccacacgactcccgctggctcaatgagcccaagtttgtcaaggtattttggatcccggagagcgagaacccagacgacgacaaaatctacttcttctttcgtgagacggcggtagaggcggcgccggcactgggacgcctgtccgtgtcccgcgttggccagatctgccggaacgacgtgggcggccagcgcagcctggtcaacaagtggacgacgttcctgaaggcgcggctggtgtgctcggtgcccggcgtcgagggcgacacccacttcgatcagctccaggatgtgtttctgttgtcctcgcgggaccaccggaccccgctgctctatgccgtcttctccacgtccagcatcttccagggctctgcggtgtgcgtgtacagcatgaacgacgtgcgccgggccttcttgggaccctttgcacacaaggaggggcccatgcaccagtgggtgtcataccagggtcgcgtcccctacccgcggccaggcatgtgccccagcaagacctttggcaccttcagttccaccaaggacttcccagacgatgtcatccagtttgcgcggaaccaccccctcatgtacaactctgtcctgcccactggggggcgccctcttttcctacaagttggagccaattacaccttcactcaaattgccgcggaccgggttgcagccgctgacggacactatgacgtcctcttcattggcacagacgttggcacggtgctgaaggtgatctcggtccccaagggcagtaggcccagcgcagaggggctgctcctggaggagctgcacgtgtttgaggactcggccgctgtcaccagcatgcaaatttcttccaagaggcaccagctgtacgtagcctcgcggagcgcggtggcccagatcgcgttgcaccgctgcgctgcccacggccgcgtctgcaccgaatgctgtctggcgcgtgacccctactgcgcctgggacggggtcgcgtgcacgcgcttccagcccagtgccaagaggcggttccggcggcaagacgtaaggaatggcgaccccagcacgttgtgctccggagactcgtctcgtcccgcgctgctggaacacaaggtgttcggcgtggagggcagcagcgcctttctggagtgtgagccccgctcgctgcaggcgcgcgtggagtggactttccagcgcgcaggggtgacagcccacacccaggtgctggcagaggagcgcaccgagcgcaccgcccggggactactgctgcgcaggctgcggcgccgggactcgggcgtgtacttgtgcgccgccgtcgagcagggctttacgcaaccgctgcgtcgcctgtcgctgcacgtgttgagtgctacgcaggccgaacgactggcgcgggccgaggaggctgcgcccgccgcgccgccgggccccaaactctggtaccgggactttctgcagctggtggagccgggcggaggtggcagcgcgaactccctgcgcatgtgccgcccgcagcctgcgctgcagtcactgcccctggagtcgcggagaaagggccgtaaccggaggacccacgcccctgagcctcgcgctgagcgggggccgcgcagcgcaacgcactggtgaccagactgtccccacgccgggaaccaagcaggagacgacaggcgagagaggagccagacagaccctgaaaagaaggacgggttggggccgggcacattgggggtcaccggccgatggagacaccaaccgacaggccctggctgagggcagctgcgcgggcttatttattaacaggataacccttgaatgtagcagccccgggagggcggcacaggtcgggcgcaggattcagccggagggaagggacggggaagccgagctccagagcaacgaccagggccgaggaggtgcctggagtgcccaccctgggagacagaccccacctccttgggtagtgagcagtgagcagaaagctgtgaacaggctgggctgctggaggtggggcgaggcaggccgactgtactaaagtaacgcaataaacgcattatcagccaaaaaaaaaaaaaaaaaaaaaaaaaaaaaaaaaaaaaaaaaaaaaaaaaaaaaaaaaaaaaaaa

SEQ ID NO: 25963 - DNA, 2387 bp, Homo Sapiens
gctgtgcgggtggcggccggcgcgcggtggggcatggcgggttcgcggggtgcggggcgcacggcggcgccgagcgtgcggccggagaagcggcggtctgagcccgaactggagcctgagcccgagccggagccccccctcctctgcacctctcctctcagccacagcaccggcagcgattctggcgtctccgacagcgaggagagtgtgttctcaggcctggaagattccggcagtgacagcagtgaggatgatgacgaaggcgacgaggagggagaggacggagcccttgatgacgagggccacagtgggattaaaaagaccactgaggagcaggtgcaggccagcactccttgcccgaggacagagatggcgagcgcccggattggggatgagtatgcggaggacagctctgatgaggaggacatccggaacacggtgggcaacgtgcccttggagtggtacgatgacttcccccacgtgggctacgacctggatggcaggcgcatctacaagcccctgcggacccgggatgagctggaccagttcctggacaagatggacgatcctgactactggcgcaccgtgcaggacccgatgacagggcgggacctgagactgacggatgagcaggtggccctggtgcggcggctgcagagtggccagtttggggatgtgggcttcaacccctatgagccggctgtcgacttcttcagcggggacgtcatgatccacccggtgaccaaccgcccggccgacaagcgcagcttcatcccctccctggtggagaaggagaaggtctctcgcatggtgcacgccatcaagatgggctggatccagcctcgccggccccgagaccccacccccagcttctatgacctgtgggcccaggaggaccccaacgccgtgctcgggcgccacaagatgcacgtacctgctcccaagctggccctgccaggccacgccgagtcgtacaacccaccccctgaatacctgctcagcgaggaggagcgcttggcgtgggaacagcaggagccaggcgagaggaagctgagctttttgccacgcaagttcccgagcctgcgggccgtgcctgcctacggacgcttcatccaggaacgcttcgagcgctgccttgacctgtacctgtgcccacggcagcgcaagatgagggtgaatgtagaccctgaggacctcatccccaagctgcctcggccgagggacctgcagcccttccccacgtgccaggccctggtctacaggggccacagtgaccttgtccggtgcctcagtgtctctcctgggggccagtggctggtttcaggctctgacgacggctccctgcggctctgggaggtggccactgcccgctgtgtgaggactgttcccgtggggggcgtggtgaagagtgtggcctggaaccccagccccgctgtctgcctggtggctgcagccgtggaggactcggtgctgctgctgaacccagctctgggggaccggctggtggcgggcagcacagatcagctgttgagcgccttcgtcccgcctgaggagccccccttgcagccggcccgctggctggaggcctcagaggaggagcgccaagtgggcctgcggctgcgcatctgccacgggaagccagtgacgcaggtgacctggcacgggcgtggggactacctggccgtggtgctggccacccaaggccacacccaggtgctgattcaccagctgagccgtcgccgcagccagagtccgttccgccgcagccacggacaggtgcagcgagtggccttccaccctgcccggcccttcctgttggtggcgtcccagcgcagcgtccgcctctaccacctgctgcgccaggagctcaccaagaagctgatgcccaactgcaagtgggtgtccagcctggcggtgcaccctgcaggtgacaacgtcatctgtgggagctacgatagcaagctggtgtggtttgacctggatctttccaccaagccatacaggatgctgagacaccacaagaaggctctgcgggctgtggccttccacccgcggtacccactctttgcgtcaggctcggacgacggcagtgtcatcgtctgccatggcatggtgtacaatgaccttctgcagaaccccttgctggtgcccgtcaaggtgctgaagggacacgtgctgacccgagatctgggagtgctggacgtcatcttccaccccacccagccgtgggtcttctcctcgggggcagacgggactgtccgcctcttcacctagctgttctgcctgcctggggctggggtggtcgtgctgaagtcaacagagcctttaccctgtgcaaaaaaaaaaaaaaaaaaaaaaaaaaaaaaaaaaaaaaaaaaaaaaaaaaa

SEQ ID NO: 25964 - DNA, 3583 bp, Homo Sapiens
ggccattttgtgaagcggcgaaggaggtggtggctgcgttgggctccgggaagccgttcgggctggggctgtcggccgcggggcggaggcactcgcgcggggggtaattcggggtctgggttctggtgccgcgcagctttccccgtctaaaagttggttttaattggttgcccacaggattgacttggcctctacttcttgttaaggaaattcatctcttgttttatcaggtgtgtgtggtttcagcgcagcatggctgtggtcatccgtttgcaaggtctcccaattgtggcggggaccatggacattcgccacttcttctctggattgaccattcctgatgggggcgtgcatattgtagggggtgaactgggtgaggctttcatcgtttttgccactgatgaagatgcaaggcttggtatgatgcgcacaggtggtacaattaaagggtcaaaagtaacactattgttgagtagtaaaacggaaatgcagaatatgattgaactgagtcgtaggcgttttgaaactgccaacttagatataccaccagcaaatgccagtagatcaggaccaccacctagctcaggaatgagtagcagggtaaacttgcccacaacagtatccaactttaataatccatcacccagtgtagttactgccaccacttctgttcatgaaagcaacaaaaacatacagacattttccacagccagcgtaggaacagctcctccaaatatgggggcttcctttgggagcccaacgtttagctcaactgttccaagcacagcctctccaatgaacacagtcccgccgccaccaattcctccaattccagcgatgccatctctgccaccaatgccatccattcccccaattccagttcctcctccagtacctacattgcctcctgtgcctcctgtgcccccgattcccccagttccttctgtgccacccatgaccccactgccacccatgtcgggcatgccgcccttgaatccgccacctgtggcacctctacctgctggaatgaatggctctggagcacctatgaatttgaacaataatctgaatcctatgtttcttggtccgttgaatcctgttaaccctatccagatgaactctcagagcagtgtgaagccactccccatcaaccctgatgatctgtatgtcagtgtgcatggaatgcccttttctgcaatggaaaatgatgtcagagatttttttcatgggctccgtgttgatgcagtgcatttgttgaaagatcatgtaggtcgaaataatgggaatggattggttaagtttctctcccctcaagatacatttgaagctttgaaacgaaacagaatgctgatgattcaacgctatgtggaagttagccctgccacagaaagacagtgggtagctgctggaggccatatcacttttaagcaaaatatgggaccttctggacaaactcatccccctcctcagacacttcccaggtcaaaatcgcccagtgggcagaaaagatcaaggtcaagatcaccacatgaggctggtttttgtgtttacttgaaagggctaccatttgaagcagaaaacaaacatgtcattgatttttttaaaaagctggatattgtggaagatagtatttatatagcttatggacccaatgggaaagcaactggcgaaggctttgtagagttcagaaatgaggctgactataaggctgctctgtgtcgtcataaacagtacatgggcaatcgctttattcaagttcatccaattactaagaaaggtatgctagaaaagatagatatgattcgaaaaagactgcagaacttcagctatgaccagagggaaatgatactaaatccagagggggatgtcaactctgccaaagtctgtgcccacataacaaatattccattcagcattacaaagatggatgttcttcagttcctagaaggaatcccagtggatgaaaatgctgtacatgttcttgttgataacaatgggcaaggtctaggacaggcattggttcagtttaaaaatgaagatgatgcacgtaagtctgaacgcttacaccgtaaaaaacttaatgggagagaagcttttgttcatgtagttaccctagaagatatgagagagattgagaaaaatccccctgcccaaggaaaaaagggattaaagatgcctgtgccaggtaatcctgcagttccaggaatgcccaatgcgggactgcccggtgtgggactgcccagtgcaggacttcccggtgcaggcctgcccagcacaggactgcctggttcagcaataaccagtgcaggactgcctggtgcgggaatgcccagtgcaggaatacctagtgcaggaggtgaagagcatgccttcctgactgtaggatcaaaggaagccaataatgggcctccatttaactttcctggtaattttggtggatcaaatgcctttgggccaccaatccctcctccaggattaggaggcggggcctttggtgatgctaggcctggtatgccttcagttggaaacagtggtttgcctggtctaggactggatgttccgggttttggaggtggaccaaacaatttaagtgggccatcgggatttggagggggccctcagaattttggaaatggccctggtagcttaggcggtcccccggggtttggaagtggccctcctggtcttggaagtgcccctgggcatttgggtgggccaccagcttttgggcctggccccggccccggccccggccctggcccaatccatattggtggtccccctggctttgcatctagttctggaaaaccaggaccgacagtaattaaagtgcaaaacatgccctttactgtgtctattgatgagattttagatttcttttatggctatcaagtaatcccaggctcagtgtgtttaaaatacaatgaaaaaggtatgcccacaggtgaagccatggtggcctttgagtctcgggatgaagccacagctgctgtcattgacttaaatgacaggcctataggttcaagaaaagtaaaacttgtattagggtagccattcacatcattttttatagggtagatcttcatattgctgtgattaatgcatccagattgttttcctagtatttccaggttagaacctgtggattgtttcaattgcatatagcttggtttccataacatagagcattggttgactgtttacagaagactcactcaccaggataaacattgctgtatgttacagtaaagctatctggagagaacacataaatgattttggcataccattagagaaaccatttgtaaaactcaaatgaccacataaagcttatcaaggagtctagattggttttgttttataccatatgggatgaagaaaatagaaatgtcagtagaactcattgagggtgctcttgccagctgctgaaaatagaagttggctactctcagaatttggtttaaagctggacagatttgctttgttatagggtaaagctttgtctaaagtcctcattttcttttaaaattgaataaaatttctgtatacagaaaaaaaaaaaaaaaaaaaaaaaaaaaaaaaa

SEQ ID NO: 25965 - DNA, 1802 bp, Homo Sapiens
gcgatctcggctgcggcgctgccgcagctgcccggcccgcggggcgcgccctgacccttcatctttgggcaggctcgagggcgcgcgcacggttggcgttctggggcctcaaactcctgggccttgaccgggcaggccgcgtctccccgggtgtgagtccaccgggacccggccgccgcctaagcgcgggcgccacagaagcggcggcgcccgaagacgcgctcctggctcggcccgacagcctcgcttggccgccagttcttctgcagccgaaggcggttgttcttttaaagaattattgaagacgaaggtttttttctttttatttttttaatggctttacagaatcttaaatagaatacagtttgacatgacggcaaaaaatgttggtttgacttccacaaatgcagaagtaagaggatttatagatcagaatctcagtccaacaaaaggtaaatacctagaagtggaattgctgggtcatatggcaacatttcatttgttgcatttccagtttccaataccaactcacctacaaagattttaccaaaaaccttaggaccaataaatgtgaatgttggaccccaaatgattataagcacaccacagagactaaccagttcaggaagtgttctgattgggagtccatatacccctgcaccagcaatggttactcagacacacatagcagaagctactggctgggtccctggtgatagaaaacgggctagaaaatttatagactctgatttttcagaaagtaaacgaagcaaaaaaggagataaaaatgggaaaggcttgagacacttttcaatgaaagtgtgtgagaaagttcaacgaaaaggtacaacatcgtacaatgaagtcgctgatgagctggtgtcagagttcaccaattcaaataaccatttggctgctgattcgcaggcttatgatcagaagaacattaggcgaagagtttatgatgctttaaatgtgctaatggcaatgaacataatttcaaaggaaaaaaaagaaatcaagtggattggcctgcctaccaattctgctcaggaatgtcagaatctggagatagagaagcagaggcggatagaacggataaagcagaagcgggcccagctgcaagaacttctcctacagcaaatcgctttcaaaaacctggtacagagaaatcgacaaaatgagcagcaaaaccagggcccgccggctctgaactctaccattcagctgccattcataatcatcaatacaagcagaaaaacagtcatagattgcagcatctccagtgacaagtttgagtatcttttcaattttgacaacacctttgagatccatgatgacatagaagtactaaagcggatgggaatgtcgtttggcctggagtcaggcaaatgctctctggaggatctgaaacttgcgaaatccctggtgccaaaggctttagaaggttatatcacagatatctccacaggaccttcttggttaaatcagggactacttctgaactctacccaatcagtttcaaatttagacctgaccactggtgccaccttaccccagtcaagtgtaaaccaagggttatgcttggatgcagaagtggccttagcaactgggcagttcctggccccaaacagtcaccagtccagcagtgcggcctctcactgctccgagtcccgaggcgagaccccctgttcgttcaatgatgaagatgaggaagatgatgaggaggattcctcctccccagaataaagacaagagaaagcctacgtttcaatatgtgaaaaaaaaaaaaaaaaaaaaaa

SEQ ID NO: 25966 - DNA, 1714 bp, Homo Sapiens
gggacggctgctggagcggcgcccgccgcggctcagcgcattcccgctctccgcttccctctccgctgcgtccccgcgcgaagatggcaaccgaggggctgcacgagaacgagacgctggcgtcgctgaagagcgaggccgagagcctcaagggcaagctggaggaggagcgagccaagctgcacgatgtggagctgcaccaggtggcggagcgggtggaggccctggggcagtttgtcatgaagaccagaaggaccctcaaaggccacgggaacaaagtcctgtgcatggactggtgcaaagataagaggaggatcgtgagctcgtcacaggatgggaaggtgatcgtgtgggattccttcaccacaaacaaggagcacgcggtcaccatgccctgcacgtgggtgatggcatgtgcttatgccccatcgggatgtgccattgcttgtggtggtttggataataagtgttctgtgtaccccttgacgtttgacaaaaatgaaaacatggctgccaaaaagaagtctgttgctatgcacaccaactacctgtcggcctgcagcttcaccaactctgacatgcagatcctgacagcgagcggcgatggcacatgtgccctgtgggacgtggagagcgggcagctgctgcagagcttccacggacatggggctgacgtcctctgcttggacctggccccctcagaaactggaaacaccttcgtgtctgggggatgtgacaagaaagccatggtgtgggacatgcgctccggccagtgcgtgcaggcctttgaaacacatgaatctgacatcaacagtgtccggtactaccccagtggagatgcctttgcttcagggtcagatgacgctacgtgtcgcctctatgacctgcgggcagatagggaggttgccatctattccaaagaaagcatcatatttggagcatccagcgtggacttctccctcagtggtcgcctgctgtttgctggatacaatgattacactatcaacgtctgggatgttctcaaagggtcccgggtctccatcctgtttggacatgaaaaccgcgttagcactctacgagtttcccccgatgggactgctttctgctctggatcatgggatcataccctcagagtctgggcctaatcatcttctgacagtgcactcatgtatacctgagaatttgaaatcttcacatgtaaatagatattacttctagaggagcttagagtttattgcagtgtagcttaggggagcaacccatggctcacaggtcactaagcgtctccaatatgactattaaaactgtcacctctggaaatacactagtgtgagccttcagcactgcgagaataccttcaagtacagtatttttcttttggaacactttttaaaatgtatctgtttttaaggttattctaaattatagtagcctcaactcattctgtcaccagtagaattcagcagttaatatattccatattatttctttgaatcaattcattttcagagcactttaaagtctgatatttctcgatgtgcactgtgatgcctggaaccttcctctggaagtgctgattttatggactgaggactggtgactggtctgtgatagaagcaaattccaattccaaatgtaattagacaaaaatcatttttttagaatgtgtttttattgtaaaagtatctttttcagcaaaaaaaaaaaaaaaaaa

SEQ ID NO: 25967 - DNA, 1236 bp, Homo Sapiens
ccttgagaggctctggctcttgcttcttaggcggcccgaggacgccatggccgagtgcccgacactcggggaggcagtcaccgaccacccggaccgcctgtgggcctgggagaagttcgtgtatttggacgagaagcagcacgcctggctgcccttaaccatcgagataaaggataggttacagttacgggtgctcttgcgtcgggaagacgtcgtcctggggaggcctatgacccccacccagataggcccaagcctgctgcctatcatgtggcagctctaccctgatggacgataccgatcctcagactccagtttctggcgcttagtgtaccacatcaagattgacggcgtggaggacatgcttctcgagctgctgccagatgactgatgtcttggcagcacctgtctcctttcaccccagggcctgagcctggccagcctacaatggggatgttgtgtttctgttcaccttcgtttactatgcctgtgtcttctccaccacgctggggtctgggaggaatggacagacagaggatgagctctacccagggcctgcaggacctgcctgtagcccactctgctcgccttagcactaccactcctgccaaggaggattccatttggcagagcttcttccaggtgcccagctatacctgtgcctcggcttttctcagctggatgatggtcttcagcctctttctgtcccttctgtccctcacagcactagtatttcatgttgcacacccactcagctccgtgaacttgtgagaacacagccgattcacctgagcaggacctctgaaaccctggaccagtggtctcacatggtgctacgcctgcatgtaaacacgcctgcaaacgctgcctgccggtaaacacgcctgcaaacgctgcctgcccgtaaacacgcctgcaaacgctgcctgcccacacaggttcacgtgcagctcaaggaaaggcctgaaaggagcccttatctgtgctcaggactcagaagcctctgggtcagtggtccacatcccgggacgcagcaggaggccaggccggcgagccctgtggatgagccctcagaacccttggcttgcccacgtggaaaagggatagaggttgggtttccccccttttatagatggtcacgcacctgggtgttacaaagttgtatgtggcatgaatactttttgtaatgattgattaaatgcaagatagtttatctaaaaaaaaaaaaaaaaaaaa

SEQ ID NO: 25968 - DNA, 1402 bp, Homo Sapiens
ggactctgcccctctacctcagcacagaatcgccccgggtcctactacagaatcaatccttgaacactgcctccacgtcgccggctcaatctgggcgagaacccagacttccaccgcagccccgcaatctgcagacctcagcggcagcgcaggtggcagacctgcctcctttgcctgtgagtcatggcagctcccatgaatggccaagtgtgtgtggtgactggtgcctccaggggtattggccgtggcattgccttgcagctctgcaaagcaggcgccacagtttacatcactggccgccatctggacacccttcgcgttgttgctcaggaggcacaatccctcgggggccaatgtgtgcctgtggtgtgcgattcaagccaggagagtgaagtgcgaagcctgtttgagcaagtggatcgggaacagcaagggcgtctagatgtgctggtcaacaatgcttatgcaggggtccagacgatcctgaacaccaggaataaggcattctgggaaacccctgcctccatgtgggatgatatcaacaacgtcggactcagaggccactacttttgctcagtgtatggggcacggctgatggtaccagctggccaggggctcatcgtggtcatctcctccccaggaagcctgcagtatatgttcaatgtcctctatggtgtgggcaaagctgcgtgtgacaagctggctgctgactgtgcccacgagctgcggcgccatggggtcagctgtgtgtctctgtggccggggattgtgcagacagaactgctgaaggagcatatggcaaaggaggaggtcctgcaggatcctgtgttgaagcagttcaaatcagccttctcatctgcggaaaccacagaattgagtggcaaatgtgtggtggctttggcaacagatcccaatatcctgagcctgagtggtaaggtgctgccatcctgtgaccttgctcgacgctatggccttcgggatgtggacggccgccccgtccaagactatttgtctttgagctctgttctctcacacgtgtccggcctgggctggctggcctcctacctgccctccttcctccgtgtgcccaagtggattattgccctctacactagcaagttctaaccctcctggtctgacactacgtctctgcttgtcttctcatttggacttggtggttcgtcctgtctcagtgaaacagcagcctttcttgtttacccatacccttgatatgaagagaagccctctgctgtgtgtccgtggtgagttctggggtgcgcctaggtcccttctttgtgccttggttttccttgtccttctttttactttttgccttagtattgaaaaatgctcttggagctaataaaagtctcatttctctttcaaaaaaaaaaaaaaaaaa

SEQ ID NO: 25969 - DNA, 2510 bp, Homo Sapiens
ttcctgcggcgcgttgcgacatggagggcgcgatggcagtgcgggtgacggccgctcatacggcagaagcccaggccgaagccgggcgggaagcgggcgagggtgcagttgcggcggtggcggcggccttggcccccagcggcttcctcggcctcccggcgcccttcagcgaggaagatgaggacgatgtgcacagatgcggccgctgccaggcagagttcaccgccttggaggattttgttcagcacaagattcagaaggcctgccagcgggcccctccggaggccctgcctgccacccctgccaccacagcgttgctgggccaggaggtggtgccggcagcaccaggcccagaggagcccatcactgtggcccacatcgtggtggaggcggcctctctggcagcagacatcagccacgcatctgaccttgttggtggtgggcacatcaaagaggtcatcgtggctgctgaggcggagctgggagacggtgagatggccgaggccccgggcagcccccaccagcaggggctggggctcgcaggggagggtgagcaggcccaggtgaagctactggtgaacaaggatggccgctatgtgtgtgcgctgtgccacaagaccttcaagacgggcagcatcctcaaggcccacatggtcactcacagcagccgcaaggaccacgagtgcaagctctgtggggcctccttccgcaccaagggctcactcatccggcaccaccggcggcacacggatgagcgcccctacaagtgctccaagtgtggaaagagcttccgggagtcgggtgcactgacccggcacctcaagtctctcaccccctgcacagagaaaatccgcttcagtgtgagcaaggacgtggttgtcagcaaagaggacgcacgtgcaggttctggagctggagctgccggcttggggacagccacatcatcggtgacaggcgagcctatagagacttcacccgtgattcacctggtgacagatgccaagggcaccgtcatccacgaagtccacgtccagatgcaggagctgtccctgggcatgaaagccctggccccagagccccccgtctcccaggagctcccctgctccagcgagggcagccgtgagaacctgctgcaccaggccatgcagaactccggcatcgtccttgagcgcgctgctggggaggagggtgccctggagccagctcctgctgccgggtccagtccccagcccctggcagtggcagccccgcagctgccggtactggaagtgcagccgctggagacacaggtggccagcgaggcctcagcggtgcccaggacccacccatgtcctcagtgcagtgagaccttcccgacagcagccaccctggaggcccacaagaggggccacaccgggccgaggccgttcgcctgcgcgcagtgtggcaaggccttccccaaggcctacctgctcaagaagcaccaggaggtgcacgtgcgtgagcgccgcttccgctgtggcgactgcgggaagctctacaagaccattgcccatgtgcgtggccaccggcgcgtccactcagacgagcggccctacccttgtcccaagtgtggcaagcgctacaagactaagaacgcacagcaggtgcacttcaggacacacctggaggagaagccgcacgtgtgccagttctgcagccgtggcttccgagagaagggctcactggtgcggcacgtgcgacaccacacaggcgagaagccgttcaagtgctacaagtgcggccgtggcttcgccgagcacggcacgctgaaccggcacctgcgcaccaaagggggctgcctgctggaggtggaggagttgctggtgtctgaggacagccccgcggcagccaccaccgtcctcacggaagacccgcacacagtgccactgcggacgatgcggagaccagtgaggccacggagatcatcgagggcacccagacagaggtggacagccacatcatgaaggtggtgcagcagatcgtgcaccaggctagcgccggccaccagatcatcgtgcagaacgtcaccatggacgaggagacggcgctgggcccagaggcggctgccgccgacaccatcaccattgccacccccgagagcctgacagagcaggtggccatgacgctggcctcggccatcagcgagggcactgtgcttgccgcccgggcagggacaagtggcactgaacaggccactgtgaccatggtgtcatcagaggacatcgagatcctggagcatgcaggcgagctggtcatcgcctcgccggagggccagctggaggtgcagacggtcatcgtctagcatgaggtctgcggggtcctggccgggcagggacagggcagaggactctgagcgccccacccatgcctgcctggcctggtagagaagatggcacaggatggaggcgccccaagacggacagtgtacataagagtttcttgttgctttacaataaaacatgagaacctgcaaaaaaaaaaaaaaaaaa

SEQ ID NO: 25970 - DNA, 3564 bp, Homo Sapiens
ggagcgcagtcgctccgcgatggactcgccggtcccggcctctatgttcgcccccgagcccagctccccgggggcggccagggccgcggcggccgccgcccgactccacggcggctttgactcggactgcagcgaggacggcgaggcgctcaacggcgagccagagctggacctcaccagcaagctggttctagtgagccctacatcagagcagtatgacagcctacttcggcagatgtgggagaggatggacgagggatgcggagagaccatatatgtcattgggcagggatcagatgggactgagtatgggctgagtgaagctgacatggaggcctcctacgccacagtgaagagcatggcggaacagatagaggccgatgtcatccttctgcgggaacggcaagaagctgggggccgcgtgcgtgattacctggtccggaaacgagtaggagacaatgacttcctggaggtcagggtagcagtggtgggcaacgtggatgctggcaaaagcacgcttctgggggtcctgacacatggggagctggacaatggccgaggctttgcccgccagaaactcttccgccacaaacatgaaattgaatctggtcgcaccagcagtgtgggcaacgacattctgggctttgacagtgaaggcaatgtagtgaacaagcctgacagccacggcggcagcctggagtggaccaagatctgtgagaagtccacgaaagtcattaccttcatcgacttggctggtcatgagaagtacctgaaaaccactgtcttcggcatgacaggccatctgcctgacttctgcatgctcatggtgggcagcaatgctggcatcgtggggatgaccaaagaacacctgggcttggcactggcactcaatgtacctgtctttgtggtagtcaccaagattgacatgtgtcctgccaacatcctgcaagaaaccctgaagctgttacagcgcctgctgaagtcaccaggctgccggaagatccccgtgctggtgcagagcaaagatgatgtgattgtcacagcctccaacttcagctctgaaaggatgtgcccgatattccagatctccaacgttacaggcgagaacctagatctgctgaagatgttcctcaacctcctctccccccgcaccagctacagggaggaggagcctgctgagtttcagattgatgacacctactccgtcccgggtgtggggacagtggtttcggggacaacactgagaggcctgatcaagctgaatgacacgctgctgctgggcccagaccccttgggtaacttcctgtccattgctgtcaaatccatccatcgcaagcgcatgcctgtcaaggaggtgcggggtggccagacagcatcctttgcgctgaagaagatcaagcgctcgtccatccggaagggcatggtgatggtttccccacgtttgaatccccaagcctcctgggagtttgaggccgagattctcgtcctccaccaccccaccacaattagcccgcgctaccaggccatggtgcactgtgggagcatcaggcagacagccaccattctgagcatggacaaggactgtctgcgcactggggacaaggccactgtacacttccgcttcatcaagacccctgagtacctgcacatagaccagcggctggtgttccgggaaggccgcaccaaggctgtcggcaccatcaccaagctcctccagaccaccaacaactccccaatgaactccaagccgcagcagattaaaatgcagtcgacgaaaaagggccccctgacgaaacgagacgaggggggcccgtctggtgggccagcagtaggagcacccccacctggagatgaagcctcctctgtaggggcagggcaaccagctgcgtccagcaatctccagcctcagcctaagcccagcagtggaggccggcgacgagggggccagcgccacaaggtgaagtcccagggggcctgtgtgactcctgccagcggctgctgaaccttcccctggcccaccctcaccacccaaggggtcatcatctctggccaccactccaccagatgggcagagcagctatgaccgccacccagccctcccgctcaggccacagccggagcctccgcattgcccccacccccattttccaggggggttgtaatttataagctgacgaaggtagccagacttccggaggactgaccatctctcactgtcctccccaccttcttcctcactcacacattttttgtacatctgggcccttagtttttattctgtttattatatgtctctgtctctctctattgtgtgtgtgtgtgtgtgtgtgtgtgtgtgtgtgtgtgtgtggtgcaggagtgccacccccagggccctgtcaacctctcttttctcctccatggctgtctgcctgcgtatctgtctctgagaatcctcggggcggtcaggggatgtcaggaggggaaggagccgccctccctatcttgctgctcctcttggcactcaggggcaccttccatggagccagaccgggtggaggggcttctgggatttggtgtctgctgctgccagagcaggaacccccagtctaggacttgggcattttaacagggagaaagtagtggcttcccttttctctctctcctcctttttccctttaagcccacagattcaggtcatgccaaaagctctctggttgtaacctggagacatgtggaggggaatggcgatgggattataggactctccccatctcgggccctgaccctgacccttgccaccaacccaaagacagctggtgggtttccccttggagacaatcctgcgtttgcctgggccggccctggctgccctcagctttcgctgatctgcccggcctggagcctcccatcaccccgcttcttgttgggcctcaggcactggttaccagaagggggtctgggtctgctcaggatcatgttttgtagcacctcctgttggaggggtggagggatgttcccctgagccaggctgagactagaaccccatcttccctgagccaggctgagactagaaccccatcttccccaccacgccacccctgtggctgctacaggagcacagtagtgaaggcctgagctccaggtttgaaagacccaactggagcgtggggcgggcaggcaggggttagtgaaaggacacttccagggttaggacagagcatttagccttctggaagaacccctgcctggggtgggactgtgcaggccagagaaggtggcatgggcctgaacccacctggactgacttctgcactgaagccacagatggagggtaggctggtgggtgggggtggttcgttctctagccggggcagacacccagctggctgggtccttcctcagccttgcctcctcctgtccccaaccctttcctttcctcctgcttgcggactgctggtcccctctccttccctccttccagctgtttctagttaccacctacccctggccgtggactgatcagaccagcattcaaaataaaagtttgttccaaaaaaaaaaaaaaaaaaaaaaaaaaaaaaa

SEQ ID NO: 25971 - DNA, 2446 bp, Homo Sapiens
ctggaagcagagcgaactgggagcagagcacacagagccgtggagcgagagatgccggccctgggctgggccgtggctgccatcctgatgctgcagacggccatggcggagccctccccggggactctgcccaggaaggcaggggtgttttcagacctaagcaaccaagagctgaaggcagtgcacagcttcctctggtccaagaaggagctgaggctgcagccctccagtaccaccaccatggccaagaacaccgtgtttctcatcgagatgctgctgcccaagaagtaccatgtgctgaggtttctggataaaggtgaaaggcatcctgtgcgggaagcccgtgccgtcatcttctttggtgaccaggagcatcccaatgtcaccgagtttgctgtggggcccctgccagggccctgctacatgcgagcactgtcccccaggcctgggtaccagtcctcctgggcatcgaggcccatctccacagcagagtatgccctcctctaccacaccctgcaggaagccaccaagcccctgcatcagttcttcctcaataccacaggcttctcattccaagactgccatgacagatgcctggccttcaccgatgtggccccccggggtgtggcttctggccagcgccgcagttggcttatcatacagcgctatgtagaaggctactttctgcaccccactgggctggagctcctcgtggatcatgggagcacagatgctgggcactgggccgtggagcaggtgtggtacaacgggaagttctatgggagcccagaggaactggctcggaagtatgcagatggagaggtggacgtggtggtcctggaggacccgctgcctgggggcaaggggcatgacagcacagaggagccgcccctcttctcctcccacaagccccgcggggacttccccagccccatccatgtgagcggcccccgcttggtccagccccacggccctcgcttcaggctggagggcaacgctgtgctctacggcggctggagctttgccttccggctgcgctcctcctccgggctgcaggtcctgaacgtgcacttcggcggagagcgcattgcctatgaggtcagcgtgcaagaggcagtggcgctgtatggaggacacacacctgcaggcatgcagaccaagtacctcgatgtcggctggggcctgggcagcgtcactcatgagttagcccccggcatcgactgcccggagaccgccaccttcctggacactttccactactatgatgccgatgacccggtccattatccccgagccctctgcctctttgaaatgcccacaggggtgccccttcggcggcactttaattccaactttaaaggtggcttcaacttctatgcagggctgaagggccaggtgctggtgctgcggacaacttcaactgtctacaattatgattacatttgggactttatcttctaccccaacggggtgatggaggccaagatgcatgccactggctacgtccacgccaccttctacacccccgaggggctgcgccacggcactcgcctgcacacccacctgattggcaacatacacactcacttggtgcactaccgcgtagacctggatgtggcaggcaccaagaacagcttccagacactgcagatgaagctagaaaacatcaccaacccctggagcccgagacaccgcgtggtccagccaactctggagcagacgcagtactcctgggagcgccaggcggccttccgcttcaaaaggaagctgcccaagtacctgctctttaccagcccccaggagaacccctggggccacaagcgcagctaccgcctgcagatccactccatggccgaccaggtgctgcccccaggctggcaggaggagcaggccatcacctgggcaaggtaccccctggcagtgaccaagtaccgggagtcagagctgtgcagcagcagcatctaccaccagaacgacccctgggacccgcccgtggtctttgagcagtttcttcacaacaacgagaacattgaaaatgaggacctggtggcctgggtgacggtgggcttcctgcacatcccccactcagaggacattcccaacacagccacacctgggaactccgtgggcttcctgctccggccattcaacttcttcccagaggacccctccctggcatccagagacactgtgatcgtgtggcctcgggacaacggccccaactacgtccagcgctggatccctgaggacagggactgctcgatgcctcccccttttagctacaatgggacctatagacctgtgtgaccagcccccagttcctcccccagttcctcccaggaagcccaggagcctcactggggcagacaataaaccctcagagcctcgcaaaaaaaaaaaaaaaaaaaaaaaaaaaaaaaaaaaaaaaaaaaaaaaaaaaaaaaaa

SEQ ID NO: 25972 - DNA, 2379 bp, Homo Sapiens
ctctgctggggagtaaggttcatgggggccgtcccaatgcaaaagggaatctctgccatcacccactgcaaccacatggtagccactctgcagccggcaggcgtgaggcatgctgcgctaacatgggagggcggaggctctgcctgacttcccagaagcccagtgagaagtccaggacaatcagcaggtgctatgggaaccttggctggcaggcaccatgtcgtcctgtatgatcggcaggaccggctccttcctgaagacaccgattcttggcggctcctgacaaggattgagaggatttgtgggggacagccctgaagccctgagccctcaactcaatgaagggattgtgctggtgtagacccacagccatccagctctgtcactgatgaaggtctgaactgccatactctgcccctttggtgtcagccttaaaggtcagttttaggtgagtttcaaccagtggctgtagatgggtcctttgtttaccagtttccccacatcctgtctgagaccattgctagtttttgcctgcaccagtcttagggaaaacaacctggacaccgtgggtgagatcaccagtgggctccaagccagagcatgggcctgggacagggtgggttaccttggcatactctaacatactcaaacctcatttcttttggggtgatcagacccaacagcaggtcatgggggcgacgaagtccagtggagtccaaggaatgagaaagacagtttgagagacaaaatgggaccagggggctatcacaagtgtggaggctgcaacaaacaggtggtgaggatgtgggggttgaaaggaaacggtgtatcaagtgaatgagaaacatatggctacttgagaacatgggaatgctagaagcaaggagcagcaagtctagcaaacatgcaagccctgcctcagcttctctcccaacactcagcttttcttccaacacatttcatgtgcaaggttctcgtgcccactcctcttgtacagtttggcagcctcatggagcttccctggtaggaaaacacatctgccagaaacaggtcattgttggtctctccccgcttcttcctctcctggaaaaattagaagcaaaggaaatggcctctgcagccatgggcagaaagcagcctttacaaaggttagatgtggctatttcaagtgaggcccctgggccttcctactggaacctgggcttggctcctggctgttgtctctctcccctaggttcccgctgggaaggcttgacaacaaaagcaggcttttaccagacaagcaaagatcaaaaaaagatgcaaacctttgtttgtttaatggaaattcctcagggttgctttcctgtgtattccaaagctatgacggaatagtttgaatagtgtgtgctctgactcatccatgacccctaagctcccaagatctcccaaatccgcaggccccgtttggcagagttgtggctcatggggatgacagagcagaatgtttagggtttctgcccaagagggagaccaataaaataggatgacaagtcttacgatgtccctacttctaaagagaaggtaagaaatcccgtgctgaacatccactaggttctgggtatatactttatacacacatggcccctttattcctctcagtgaccctcagggtaggtctcactacccaagtgttagagtgaaggacgctgagaccaagaagaggaacaggtcagggtcagacagagctggaatttggacacagttctgtctgactccagatattccttgtatcacacaatactgtcttctgaagcaagtgattgtccccaacacacacacacacacacacacactctctctctctctctctctctctctctctctctcagcagagctgaggataaagaggaatatcctgcacccttcttccttctgtgtcagggaacatttgcttgtctacagctcgagtatttgtaaacactcagtagcacccaaaccctgagccctagcagtttccttttgcttgtttactagcaagagtagcatgtcggaggacgatgagacattgaatcaaactcttagacaagctggtgaaagttttaacgactgctggaggcaacatgcttccacactgacagaaatcatctttcaaaaatcctgcacatatctcaggcttatgaaacaaactaattcctaatagttggaaatgaattaaaagcttgcggtgagataaaagatagattttggctggatgtgatgactcatgcctgtgatccctacactttaggagggcacagcaggaggatcgcctgagcccaggaattcaagaccagcctggtcaacatagcaagactctctctctgcaaaaaaaaaaaaaaaaaaaaaaaaaaaaaaaaa

SEQ ID NO: 25973 - DNA, 1549 bp, Homo Sapiens
gccaagggcggttgtaggacccggagcagccggacatggaacaaccgtggccgcctccgggaccctggagcctccctcgggccgagggtgaggctgaggaagagagtgacttcgacgtgttccccagttctccccgctgcccgcagctgccaggcggcggcgcccagatgtatagccatggaattgaattggcttgccaaaagcagaaagagtttgtgaagagctctgtggcgtgcaaatggaatcttgctgaagctcaacagaaacttggtagcttagcactgcataattctgagtccttggatcaggagcatgccaaagcacaaacagcagtatcagaactgaggcaacgggaagaagagtggcgacagaaagaagaagctctagtacaaagagagaagatgtgtctgtggagcacggatgccattagcaaggatgtttttaataagagttttattaatcaagataaaagaaaagacacagaagatgaagataaatcagaatcatttatgcaaaaatatgagcaaaaaatcagacattttggtatgttgagtcgatgggatgatagccagagatttttgtctgaccatccataccttgtatgtgaagaaactgctaaatatcttattttatggtgttttcacctggaagctgagaagaaaggggctttaatggaacaaatagcacatcaagctgttgtaatgcagtttattatggaaatggccaaaaactgtaatgtggatccaagagggtgttttcgtttatttttccagaaagccaaagcagaggaagaaggttattttgaagcattcaaaaatgaacttgaagctttcaagtcaagagtaagactttattctcaatcacaaagttttcaacctatgacagttcagaatcatgttccccattctggtgttggatctataggtttattagaatccttaccacagaatccagattatcttcagtattctatcagtacagctctctgcagcttaaactcggtggtacataaagaagatgatgaacccaaaatgatggacactgtataatttggttaagactgctgaggccaagtgctattttgttacaagaaaggaagaacttggctattttcttgacacttttatgggtgctgcactttatttttgttcggtttttgatgggagggaaagagtactgaaatgttttgtaaattttttttaatgtgctgctaggttttttgttttgttttgttctgaagagaagagtggtaccatatgttgcaggaagtcaaactggactttttgtggctactaaatttgcttttaatcttattgttctcaattttggaatcaagtatgaaaatctgcacaaatgcaatgtttacaagaactggttgattctgggaggcatctgctacagtctctttttatatggatatgtacatgtcctattctacaaaaatgattaaagataaaaacatacttgtatcccactgctactttagctgtcaaatttggtgtttcatcacattaaaagcaataaatcagtaaaaaaaaaaaaaaaaaaa

SEQ ID NO: 25974 - DNA, 1811 bp, Homo Sapiens
ggcacgaggggctgttctgacaggcccccagtttgtcccatctgaactgctgggaggtttccgggtggccagaggagcaaagctgccttccaagtgcctgtctgtgcctgggagaacagagcaggagcgtcgtgcggtccaccgcgcagtgcatggcgattccaggcgctgaacaactcccctggacccttgggcctgcatctgactcccagctgcagagtcagaagctgagtccaggcaactgcttggccactcccgatcgctcctccctggacacccggttaccaaagtcagcaaagaagatgcggtaatcgccgcctgatctccacatggtgaacacaacactcccaccaacacctccttgactggtcggtcttcagcaccgggggtgggcaggcaggtgttctgtgttgacgagaattgcacaggctaaacacaaacacggaaccagagtgagaacacctcactcacggcagcccaggctgctccctaccaggtgacggagcgcgccggggctgtgggtgccaggggctgagtgctagggactcgtcatgagtggggatccccacgttcctgtcactgctgtcaaacagaaggtaaacagtcttatgaatgtatttccttaggaaaacttgtaaaaacttttattaggatatctatttaatactgaactttggcctactttgtgatagactataaacaaattgaggaaatcactatttctcacttctgtattttctcaaaaataattttgttacagagttcaatatactgtgtaccattgatcttctattgtgaaagcaaagaatttcatcaaaatattttaaattatgagtgaaaattgtgtatgttaattttgcagctataatattaatcaaattttgtgtaattctaatcacaaaatgacgtgccttaagtgcccctccagctgtgggttggcagtgtccagacagggagggcccatcaccgaaatcctgaacgattactagaccaattctattaaaaacatttcaaggcattttgggtgcaaactttgtttataaaagagaaatatccacctatgagaatttaaggagacgtctcctgtaggcagacatcgctctgcccaaaaattagtactgacacatgcgtgtgtgtgcgcgttgtgtgcgtgtgtgcgtgcacgtgctgttgctgcccttcctagctggtgtgaggaagccactggacacagctgtggcgcgacccctggatctgagcacagcccctccggtgcagacagatggggtcagagccccctgcggaggcctgtcattgcaggcacccgtgaggaggatgtgaccagtgaccgtgggtcccagcggtgaccctcacacagaatcagagcaaaacaccagtgagggctgcacactcaccaccattcgccctgggcactcattccagaagtaacaagaattccctctcagtgggaaaataaatgcatttttcattcttataagggacactctaatgactgtgaacactacgaattctaattcatatgcatttactgagcacttactgtatgccaggtgcactcaagacctgctgctaagtgggaagctgggttcagaggcacatggaacagctcgcccgctggatgccctgggaagagctacctcttctgagcccctgatgcttgttaagagctgcttctacttctcagttacttctcaagttttgattctttcaagaagtcccatttgtgaatttttcacatcttgtgaggatgaaataaaagcaaaatgtcaactctgccatctcaaaaaaaaaaaaaaaaaaaaaaaaaaaaa

SEQ ID NO: 25975 - DNA, 2697 bp, Homo Sapiens
ccaacaatggctcagagagaagatctacttcctttccactctctggccctccccggaaacctcaagaaagcagagggcacgtctcaccagcagaggatcaaaccatccaagcccccccagtttcagtctctgcactagccagggattcccctttgaccccaaatgaaatgagctccagtactctgaccagccccatagaggcatcctgggtcagcagccagaatgattccccaggtgatgccagtgaggggcctgagtacctggccattggcaacttggacccccgaggccggactgccagctgtcagagtcacagcagcaatgccgagagcagcagttccaatttgttctcctccagcagctcccagaagccagattctgctgcctcttccttaggggaccaggaaggaggtggggagagccagctgtccagtgtcctccgcaggtccagcttctcagaggggcagacactcactgtcaccagtggggcaaagaaaagccacattcgctcccattcggataccagcattgcctccaggggagctccagaatcctgcaatgataaggcgaagttgagaggccctttgccctactctggtcaaagcagtgaagtcagcacacccagctctctgtacatggaatatgaaggtggtcggtacctgtgctcaggggaaggcatgttccgaagaccatcagaaggacagtccctcatcagctacctctctgagcaagacttcggcagctgtgccgacctggaaaaggagaatgcccacttcagcatctcagagtccttaattgctgccatcgagctaatgaagtgcaacatgatgagccagtgcctagaggaggaggaagtggaagaggaagacagtgatagagagatccaggagctgaagcagaagatccgccttcggcgccagcaaatccgcaccaagaacctgctccccatgtaccaggaggctgagcacggaagctttcgggtcacctccagcagctcccagttcagctcacgtgattcggcacagctctctgactctggctctgctgatgaggttgatgaatttgaaatccaagatggtagcgaaggatctaacctgactcacatatcaaagaacggactgtcagtgtcactggcctcgatgttctcagatgctgacatcagaaggaacacagcctcaagcagcaaatccttcgtttcctcccagtccttctcccactgcttcctgcactccacgtctgctgaggcggtggccatggggctcctgaagcagtttgaggggatgcagcttccagccgcctcggagctggagtggcttgtcccggagcatgatgcccctcagaagctcctgcccattcctgactcactgcccatctcaccggatgacgggcagcacgctgacatctacaagctgcggattcgtgttcgtggcaacttggagtgggccccgccccggcctcagataatttttaatgttcatccagccccaacgaggaaaattgccgtggccaagcagaattaccgctgtgcaggatgtggcatccggactgaccctgattacatcaagcgactgcggtactgtgagtacctgggcaagtacttctgccagtgctgccacgagaatgcccagatggccatccccagccgggttctgcgcaagtgggacttcagcaagtactacgtcagcaacttctccaaggacctgctcattaagatctggaatgatcctctcttcaacgtgcaggacataaacagtgccctctataggaaggtcaagctgctcaatcaagtccggctgctgcgggtccagctgtgtcacatgaagaacatgttcaagacttgccgactggccaaggagcttctggattcctttgacacagtcccaggccacctgacagaggacctccacctgtactcactgaatgacctgactgcgaccaggaagggggagctggggccccggcttgctgagctcaccagggcaggggctacccatgtggagagatgcatggtgagaaagtctcactgtagcatgcagctgagcccttgcttttagggatacagggaggggggtggacctggggttcttgccacttagcttgaggaagttgaaatggccagtcagcactgggagaggaactggaaagggctgctgttccttagcctggagagcagccaaatcatcctgatctaaagaacctcgagtgaggggaggagctggtgctggctgtggtcctgggtagctccgggcaagaccgagtagactttcactcaagaagtgttggccaggcacggtggcttaggcctctcatcccagcaatttgggaggccgaggtgggcgggtcacctgaggtcaggagttcaagaccagcctgacgaacatgatgaaaccccatctctactaaaatacagaaattagccgggcatgatggcgggtgcctgtaatcccagctactcgggaggctgaggcaggagaattgcttgaatccaggaggcggaggttgcagtgagccgagatcatgccactgcactccagcctgagcgacaagagtggaaaaaaaaaaggcagttgtcatgatgtgagaggagagctctggattggaatcgagagggagtctaccctcggccgtcatttgttgttctcagtcattatgaccaaaataaatactttgtcccctcaaaaaaaaaaaaaaaaaaaa

SEQ ID NO: 25976 - DNA, 1564 bp, Homo Sapiens
gttctgagtgcgacggcgcaggtctgcaccatggcggcccggcttgtcagccgatgcggggctgtgcgtgcagctccccacagcggcccgctggtgtcctggcgcaggtggtccggcgcctcaacagacaccgtgtatgacgtggtggtgtcgggtggaggcctggtgggcgctgccatggcctgtgccttgggatatgatattcactttcatgacaagaaaatcctgttgctcgaagcaggtccaaagaaagtactggagaaattgtcagaaacttacagcaacagggtcagctccatttcccctggctctgcaacgcttctcagtagttttggtgcctgggaccatatctgcaacatgagatacagagcctttcggcgaatgcaggtgtgggacgcctgctcagaggccctgataatgtttgataaggataatttagatgacatgggctatatcgtggagaatgatgtcatcatgcatgctctcactaagcagttggaggctgtgtctgaccgagtgacggttctctacaggagcaaagccattcgctatacctggccttgtccatttcctatggccgactccagcccttgggttcatattaccctaggtgatggcagcaccttccagaccaaattgttgataggtgcagatggtcacaactccggagtacggcaggctgttggaatccagaatgtgagctggaactatgaccagtctgctgttgtggctactctgcatttatcagaggccacagaaaacaacgtagcctggcagagatttcttccctctgggcctattgctctgctcccgctctcagacaccttgagttccttggtttggtccacgtcccatgaacatgcagcagagctagttagcatggatgaggaaaaatttgtggatgccgttaactctgccttttggagtgatgctgaccacacggacttcatcgacacagctggtgccatgctgcagtatgctgtcagccttctgaagcccactaaggtctcggctcgccagctgcccccaagcgtagccagggtggatgccaaaagccgagttctgtttcctcttgggttgggacatgctgctgagtacgtcaggcctcgggtggcgctcattggggatgcagcccacagagtccatccgcttgcaggacagggtgtcaacatgggctttggggatatctccagcttggcccatcacctcagtacggcagccttcaatgggaaggacttaggttccgtgagccacctcacaggttatgaaacagaaagacagcgtcacaacactgctcttctggctgctacagacttactaaaaaggctctattctaccagtgcctccccgcttgtgttgctcaggacgtggggcttgcaggccacaaatgcagtgtctccactcaaagaacagattatggcctttgcaagcaaatgagtactcctctcctaaagaaagattacgttgatgaaaaagaacatcctgcccaggacccatcatacatattttcaagatcttatttaatttaataaacttactttacattaaaaaaaaaaaaaaaaaa

SEQ ID NO: 25977 - DNA, 1685 bp, Homo Sapiens
gttgggggaggacgggttgccgactcgcctacctagcggtctcttgattgtcgatattttgttggcataggtttatgtagagacgtatacatatatatagacacactgtctttaaatctaggcctgtatccggtgtccgaggcgaactcagtaagatgatgttaagaggaaacctgaagcaagtgcgcattgagaaaaacccggcccgccttcgcgccctggagtccgcggtgggcgagagcgagccggcggccgcggcagccatggcgctcgctcttgccggggagccggcaccgcccgcgcccgcgcctccagaggaccacccggacgaggagatggggttcactatcgacatcaagagtttcctcaagccgggcgagaagacgtacacgcagcgctgccgcctcttcgtgggaaatctgcccaccgacatcacggaggaggacttcaagaggctcttcgaacgctatggcgagcccagcgaagtcttcatcaaccgggaccgtggcttcggcttcatccgcttggaatccagaaccctggctgaaattgcaaaagcagagctggacggcaccattctcaagagcagacctctacggattcgcttcgctacacatggagcagccttgactgtcaagaacctttctccagttgtttccaatgagctgctagagcaagcattttctcagtttggtccagtagagaaagctgttgtggttgtggatgatcgcggtagagctacaggaaaaggttttgtagagtttgcagcaaaacctcctgcacgaaaggctctggaaagatgtggtgatggggcattcttgctaacaacgacccctcgtccagtcattgtggaacccatggagcagtttgatgatgaagatggcttgccagagaagctgatgcagaaaactcaacaatatcataaggaaagagaacaaccaccacgttttgctcaacctgggacatttgaatttgagtatgcatctcgatggaaggctcttgatgaaatggaaaagcagcagcgtgagcaggttgatagaaacatcagagaagccaaagagaaactggaggcagaaatggaagcagctaggcatgaacaccaattaatgctaatgaggcaagatctaatgaggcgtcaagaagaactcagacgcttggaagaactcagaaaccaagagttgcaaaaacggaagcaaatacaactaagacatgaagaggagcatcggcggcgtgaggaagaaatgatccgacacagagaacaggaggaactgaggcgacagcaagagggctttaagccaaactacatggaaaatggtgataaaagaaaatgtggctgaagttacccgaagttcagcttgcagtgtaattcagaagagttaagaccagaagtactggaatcatacttcctttcagtcttgccacttgcctagtgaggcttttccgaacctggaaggagacgtctagaaatcccaactttgctgtgtaaggaccattagctgcaagtcagtggaagtctatagaaagcagtgtgaattccatagtggtcttgacttcttagcaaggatttgggataagtctaaaacttcagacttaaagctttgaagcatgttaactgcatgaaatattaaacatttcgaacttcaaaaaaaaaaaaaaaaaaaaaaaaaaaaaaaaaaaaaaaaaaa

SEQ ID NO: 25978 - DNA, 1588 bp, Homo Sapiens
ccagaatgctggagcgtaggtgaaaggacaaaagccagacacatttcaacatgagggacccactgacagattgtccgggcaaacctggaaattagctatgccaaaggacttcagaaactggcaagcaagctgagcaaagcattacagaacacgagaaaaagttgtgttagcagtgcctgggcctgggcctcagagggaatgaaatccacagcggacctgcatcaaaaacttggcaaagcaattgaattggaagcaataaaaccgacttatcaagtcctaaatgtacaagagaagaagagaaaatcacttgacaatgaagttgaaaagacagcaaatcttgtcattagcaactggaatcagcaaattaaggccaagaagaaattaatggttagtaccaagaaacatgaagcacttttccagcttgtagaaagctccaagcaatctatgactgagaaggagaagcggaagctcctcaataaactgacaaaatcaactgaaaagttggaaaaggaagatgaaaattactaccaaaaaaacatggcgggttattctaccagactgaaatgggaaaacacactagagaactgctaccagagcattctggagctggagaaggaaagaattcaacttttatgcaataacttaaaccagtacagccaacatatttctctttttggccaaaccctgaccacatgccacacgcagattcactgtgccatcagcaagattgacattgaaaaagatatccaggctgtaatggaagaaactgcaattttatctacagaaaacaaatctgagttcctgttaacggattactttgaagaagatcctaacagtgcaatggataaagagagacgaaagtctttactaaaaccaaaattattgagactgcagagagacattgaaaaagcctcaaaagacaaggaaggcctggaacgaatgcttaaaacgtactccagcacctcctccttctctgatgcaaagagccagaaagacacagcagcgttaatggatgagaacaatttgaaactagaccttttggaagcgaactcctacaaactgtcatcaatgttagcagaacttgagcaaagacctcaacccagccatccttgtagtaattccatcttcaggtggagggaaaaggagcatactcatagctatgtgaaaatatctcggccttttttaatgaagagattagagaatattgtgagcaaggcatcttctggtgggcagagcaatccaggttcttcaactccagcccctggtgcagcccagctcagcagcagactttgcaaggccttgtattcttttcaagccaggcaagatgatgagttgaatttggaaaagggtgacattgtgattatacacgagaaaaaagaagaaggatggtggtttggatctttgaatgggaaaaaaggccattttcctgccgcttatgtggaggagttaccttcaaatgctggcaacacagctacaaaggcataaaacaagactctgaacatactaccttcacactcggtaatcaacaatacagtgtggttcaaataagaataaagtgctcttacctttaaaaaaaaaaaaaaaaaaa

SEQ ID NO: 25979 - DNA, 1619 bp, Homo Sapiens
ctccagctgagctaagtgtagcagcagcaccagggcagggactgactccagcccttggactcaggacatcgcagaccttcccttgcgtgcgtgactcattcgcacatccatttctgtttatgcctggggtggggagaaaaatcccaaaccagctccattggatatgactgtgcactggagccggttgtgctgttctctcagctgtacacacccatcaaatcacagtgcccctgaggacgagagaaaattgaagctgtgtaaatgagtatggaagattatgatttcctgttcaaaattgttttaattggcaacgctggtgtggggaagacgtgcctcgtccgaagattcactcagggtcttttccccccaggtcaaggagccacaattggagttgattttatgattaagacagtggagattaatggtgaaaaagtaaagctacagatctgggacacagcaggtcaagagagatttcggtccattacccagagttactaccgaagcgccaatgccttgatcctcacctatgacattacctgtgaggaatccttccgttgccttcctgagtggctgcgggagatagaacaatatgccagcaacaaggtcatcactgtgttagtgggcaacaagattgacctggctgaaaggagagaggtttcccagcagcgagctgaagaattctcagaagctcaggacatgtattatctggagacctcagccaaggaatctgataatgtggagaaactcttccttgacttagcatgccgactcatcagtgaagccagacagaacacacttgtgaacaatgtatcctcacccttacctggagaagggaaaagcatcagctatttgacttgttgtaatttcaactaaaggctgaggcacggagaagaaaaggaatcagcaactgccctgatgggccatgagatgctggggagatctggcgatgactgtggctcccgctctctgaccttctgactcctgtgggctcctgagcttacaaagcatggcaggccaagggcctcgaccacaggccagcattagcagaacatataatggtttcacccttttccagtctggagttggagcaaggagaaaattgcactaggcactccatgatctgcagagcatgttgcttttgtttttttaaaaagcaagtaaaagcgcattcctaaacagagtccggggggaaatgtactgtagggatccctcctgcacatcagtgggtgcatgtgggaactcttctttagggcttcggtggtaatcatctgggggccctggttttcttgtctaccagataaaccaaaactgggaaggccaagtacagtctctgtggtgcgtattgacgaccccatggagattttgaaaagtgttatttctcttgtccacaggcactttcaagaactttgggatgtaaaaatgaaatgaaacctttacccatgaccaacagtaacaatcattgttttaataatatatacaagctccataactccttttggtgctaatgattccgctatttcacagaccaaacgttttagtacattaatgtccttaaatgtgttatatagaaataaaaaaatgggggaagtccatgaatcagcaaaaaaaaaaaaaaaaaa

SEQ ID NO: 25980 - DNA, 3460 bp, Homo Sapiens
gtggagcgattaaaccgtgcgcggagctgcttctttggcggcagcggcggcggcggtggccggtgcggacgcgcggagctcgccggagacgccgggtggccggagccgtggagcggcggcggagcgggcgccgcggggggtgtggcgcggagaatgattacggacctgaagccaaagaacaagatgcgctagtggacagattgctgaccaggggcttgagagctgggttctattttccctcctcaaactgactttgcagccacggagaggcaggggaaatggaaggtgatgcagtcgaagccattgtggaggagtccgaaacttttattaaaggaaaggagagaaagacttaccagagacgccgggaagggggccaggaagaagatgcctgccacttaccccagaaccagacggatgggggtgaggtggtccaggatgtcaacagcagtgtacagatggtgatgatggaacagctggaccccacccttcttcagatgaagactgaagtaatggagggcacagtggctccagaagcagaggctgctgtggacgatacccagattataactttacaggttgtaaatatggaggaacagcccataaacataggagaacttcagcttgttcaagtacctgttcctgtgactgtacctgttgctaccacttcagtagaagaacttcagggggcttatgaaaatgaagtgtctaaagagggccttgcggaaagtgaacccatgatatgccacaccctacctttgcctgaagggtttcaggtggttaaagtgggggccaatggagaggtggagacactagaacaaggggaacttccaccccaggaagatcctagttggcaaaaagacccagactatcagccaccagccaaaaaaacaaagaaaaccaaaaagagcaaactgcgttatacagaggagggcaaagatgtagatgtgtctgtctacgattttgaggaagaacagcaggagggtctgctatcagaggttaatgcagagaaagtggttggtaatatgaagcctccaaagccaacaaaaattaaaaagaaaggtgtaaagaagacattccagtgtgagctttgcagttacacgtgtccacggcgttcaaatttggatcgtcacatgaaaagccacactgatgagagaccacacaagtgccatctctgtggcagggcattcagaacagtcaccctcctgaggaatcaccttaacacacacacaggtactcgtcctcacaagtgcccagactgcgacatggcctttgtgaccagtggagaattggttcggcatcgtcgttacaaacacacccacgagaagccattcaagtgttccatgtgcgattacgccagtgtagaagtcagcaaattaaaacgtcacattcgctctcatactggagagcgtccgtttcagtgcagtttgtgcagttatgccagcagggacacatacaagctgaaaaggcacatgagaacccattcaggggaaaagccttatgaatgttatatttgtcatgctcggtttacccaaagtggtaccatgaagatgcacattttacagaagcacacagaaaatgtggccaaatttcactgtccccactgtgacacagtcatagcccgaaaaagtgatttgggtgtccacttgcgaaagcagcattcctatattgagcaaggcaagaaatgccgttactgtgatgctgtgtttcatgagcgctatgccctcatccagcatcagaagtcacacaagaatgagaagcgctttaagtgtgaccagtgtgattacgcttgtagacaggagaggcacatgatcatgcacaagcgcacccacaccggggagaagccttacgcctgcagccactgcgataagaccttccgccagaagcagcttctcgacatgcacttcaagcgctatcacgaccccaacttcgtccctgcggcttttgtctgttctaagtgtgggaaaacatttacacgtcggaataccatggcaagacatgctgataattgtgctggcccagatggcgtagagggggaaaatggaggagaaacgaagaagagtaaacgtggaagaaaaagaaagatgcgctctaagaaagaagattcctctgacagtgaaaatgctgaaccagatctggacgacaatgaggatgaggaggagcctgccgtagaaattgaacctgagccagagcctcagcctgtgaccccagccccaccacccgccaagaagcggagaggacgaccccctggcagaaccaaccagcccaaacagaaccagccaacagctatcattcaggttgaagaccagaatacaggtgcaattgagaacattatagttgaagtaaaaaaagagccagatgctgagcccgcagagggagaggaagaggaggcccagccagctgccacagatgcccccaacggagacctcacgcccgagatgatcctcagcatgatggaccggtgatggcggagccttgtgcgtcgccaggacttctctgggctgtgtttaaacggcccgcatcttaatttttctcccttctttctttttttggctttgggaaaagcatcattttaccaaacataccgagaacgaaaacttcaaggatgatgttagaaaaaaatgtgatttaactagaacttgctgtctgatgttagcaaatcatggaatgttctgagtccctgagggtttactgtgaagtgctgaggacagtgttgacaactaactcgttttcctagatggaaacggagacattgacccctccctccatgtggtaaaccactccagaatggccaccaggcttcccagagttctatggtcttcttcccaagagagtttttaattgtaaatgcatacttgggaaggacttagagttttaaactgttttttgcttttgcttttccctgactccctttgcttggagtcagctgcacaccagtagtatggcatgctacgatcaggttctgtcctgaaagctttgcctctttcttggcaaagtttctggtatggtcaagcttgtaaataactttttttacattttaatcttttccattaattaagaggttgaaaagaagtgcagtgtaagaaaacccagcattttaattacttgcaaattaagttaccacagactctgtagtgtgtaaatgttgacaaggaattggatcacaatcatgtagcagaatggcacccagaccactgcccaccagtgacggacatgcacgtggcagatcatgatttccagcccacggagccagcatttgaaccttgtataattaactttcagttatgatttcccatcgacattttctttgccctgtttgtagctgattgttgtgttttataaatcttctgttaaggcagaagggtgattatgagtggttcacagcagcccttataagctgggccagaaaatttcactaggtcagtaatttaaaccttggatcttcaaaaaaaaaaaaaaaaaa

SEQ ID NO: 25981 - DNA, 3012 bp, Homo Sapiens
ggacgacggacggcagcggccaagcaagaagaaagacgtggcagcaagcgggagtcggggatagtgtcatcggttcgggtcccggtactttggagcttgtctcaaactccacatacagaaagccaccgaccttattccggtatcctacacccattccccactctcattacactcccacccctggccctcagcgtcggagtcaagagcaacagggacacttccgttctccttgtaggactggtgaaaccgtaatgaagaacacccctaaactcccataatcgatttggggatattccctgcccaaaaaattcctggaaaattgactagtattaagtgcgtaatagattggaactcagtgaagacacagatgttcctgttcagagcaaccagctaatgattacagtttaaagacaatttctgtgatcaagttgtcatttggaagattaaacccatttcacgaggacttggagcctggtccttgctttgaggaagcagtggcttgtttcaagaagccacttctgatctaagaatctacccagcatgcctaatcaaggagaagactgctatttttttttctattccacatgtaccaaaggcgacagctgcccattccgtcactgtgaagctgcaataggaaatgaaactgtttgcacattatggcaagaagggcgctgttttcgacaggtgtgcaggtttcggcacatggagattgataaaaaacgcagtgaaattccttgttattgggaaaatcagccaacaggatgtcaaaaattaaactgcgctttccatcacaatagaggacgatatgttgatggccttttcctacctccgagcaaaactgtgttgcccactgtgcctgagtcaccagaagaggaagtgaaggctagccaactttcagttcagcagaacaaattgtctgtccagtccaatccttcccctcagctgcggagcgttatgaaagtagaaagttccgaaaatgttcctagccccacgcatccaccagttgtaattaatgctgcagatgatgatgaagatgatgatgatcagttttctgaggaaggtgatgaaaccaaaacacctaccctgcaaccaactcctgaagttcacaatggattacgagtgacttctgtccggaaacctgcagtcaatataaagcaaggtgaatgtttgaattttggaataaaaactcttgaggaaattaagtcaaagaaaatgaaggaaaaatctaagaagcaaggtgagggttcttcaggagtttccagtcttttactccaccctgagcccgttccaggtcctgaaaaagaaaatgtcaggactgtggtgaggacagtaactctctccaccaaacaaggagaagaacccttggttagattgagtcttactgagagactggggaaacgaaaattttcagcaggcggtgacagtgatcctccattaaagcgtagcctggcacagaggctagggaagaaagttgaagctccagaaactaacattgacaaaacaccaaagaaagctcaagtttccaagtctcttaaggagcgattaggcatgtcagctgatccagataatgaggatgcaacagataaagttaataaagttggtgagatccatgtgaagacattagaagaaattcttcttgaaagagccagtcagaaacgtggagaattgcaaactaaactcaagacagaaggaccttcaaaaactgatgattctacttcaggagcaagaagctcctccactatccgtatcaaaaccttctctgaggtcctggctgaaaaaaaacatcggcagcaggaagcagagagacaaaaaagcaaaaaggatacaacttgcatcaagctaaagattgatagtgaaattaaaaaaacagtagttttgccacccattgttgccagcagaggacaatcagaggagcctgcaggtaaaacaaagtctatgcaggaggtgcacatcaagacgctggaagaaattaaactggagaaggcactgagggtgcagcagagctctgagagcagcaccagctccccgtctcaacacgaggccactccaggggcaaggcggctgctgcgaatcaccaaaagaacagggatgaaagaagagaagaaccttcaggaaggaaatgaagttgattctcagagcagtattagaacagaagctaaagaggcttcaggtgagaccacaggagttgacatcactaaaattcaagtcaagagatgtgagaccatgagagagaagcacatgcagaaacagcaggagagggaaaaatcagtcttgacacctcttcggggagatgtagcctcttgcaatacccaagtggcagagaaaccagtgctcactgctgtgccaggaatcacacggcacctgaccaagcggcttcccacaaagtcatcccagaaggtggaggtagaaacctcagggattggagactcattattgaatgtgaaatgtgcagcacagaccttggaaaaaaggggtaaagctaaacccaaagtgaacgtgaagccatctgtggttaaagttgtgtcatcccccaaattggccccaaaacgtaaggcagtggagatgcacgctgctgtcattgccgctgtgaagccactcagctccagcagtgtcctacaggaacccccagccaaaaaggcagctgtggctgttgtcccgcttgtctctgaggacaaatcagtcactgtgcctgaagcagaaaatcctagagacagtcttgtgctgcctccaacccagtcctcttcagattcctcacccccggaggtgtctggcccttcctcatcccaaatgagcatgaaaactcgccgactcagctctgcctcaacaggaaagcccccactctctgtggaggatgattttgagaaactaatatgggagatttcaggaggcaaattggaagctgagattgacctggatcctgggaaagatgaagatgaccttctgcttgagctatcagaaatgattgatagctgaaggtggtagtgaggacactttaaaaaaaaaaaaaaaaaa

SEQ ID NO: 25982 - DNA, 1143 bp, Homo Sapiens
gggggccctctgcccgggttgtccaagatggagggcgctccaccggggtcgctcgccctccggctcctgctgttcgtggcgctacccgcctccggctggctgacgacgggcgcccccgagccgccgccgctgtccggagccccacaggacggcatcagaattaatgtaactacactgaaagatgatggggacatatctaaacagcaggttgttcttaacataacctatgagagtggacaggtgtatgtaaatgacttacctgtaaatagtggtgtaacccgaataagctgtcagactttgatagtgaagaatgaaaatcttgaaaatttggaggaaaaagaatattttggaattgtcagtgtaaggattttagttcatgagtggcctatgacatctggttccagtttgcaactaattgtcattcaagaagaggtagtagagattgatggaaaacaagttcagcaaaaggatgtcactgaaattgatattttagttaagaaccggggagtactcagacattcaaactataccctccctttggaagaaagcatgctctactctatttctcgagacagtgacattttatttacccttcctaacctctccaaaaaagaaagtgttagttcactgcaaaccactagccagtatcttatcaggaatgtggaaaccactgtagatgaagatgttttacctggcaagttacctgaaactcctctcagagcagagccgccatcttcatataaggtaatgtgtcagtggatggaaaagtttagaaaagatctgtgtaggttctggagcaacgttttcccagtattctttcagtttttgaacatcatggtggttggaattacaggagcagctgtggtaataaccatcttaaaggtgtttttcccagtttctgaatacaaaggaattcttcagttggataaagtggacgtcatacctgtgacagctatcaacttatatccagatggtccagagaaaagagctgaaaaccttgaagataaaacatgtatttaaaacgccatctcatatcatggactccgaagtagcctgttgcctccaaatttgccacttgaatataattttctttaaatcgttaagaatcagtttcaaaaaaaaaaaaaaaaaaaaaaaaaaaaa

SEQ ID NO: 25983 - DNA, 2289 bp, Homo Sapiens
ggggtcaaacgagctgcagatgaagttttagcagaagcaaagaaaccacgaattgaggatgaagagtgtgtgcgccttgataaagagagattggctgcccgtttggagggtcacaaagaagggattgtacagactgaacagattaggtctttgtctgaagctatgtcagtggaaaaaattgctgcaatcaaagccaaaattatggctaagaaaagatctactatcaagactgatctagatgatgacataactgcccttaaacagaggagttttgtggatgctgaggtagatgtgacccgagatattgtcagcagagagagagtatggaggacacgaacaactatcttacaaagcacaggaaagaatttttccaagaacatttttgcaattcttcaatctgtaaaagccagagaagaagggcgtgcacctgaacagcgacctgccccaaatgcagcacctgtggatcccactttgcgcaccaaacagcctatcccagctgcctataacagatacgatcaggaaagattcaaaggaaaagaagaaacggaaggcttcaaaattgacactatgggaacctaccatggtatgacactgaaatctgtaacggagggtgcatctgcccggaagactcagactcctgcagcccagccagtaccaagaccagtttctcaagcaagacctcccccaaatcagaagaaaggatctcgaacacccattatcataattcctgcagctaccacctctttaataaccatgcttaatgcaaaagaccttctacaggacctgaaatttgtcccatcagatgaaaagaagaaacaaggttgtcaacgagaaaatgaaactctaatacaaagaagaaaagaccagatgcaaccagggggcactgcaattagtgttacagtaccttatagagtagtagaccagccccttaaacttatgcctcaagactgggaccgcgttgtagccgtttttgtgcagggtcctgcatggcagttcaaaggttggccatggcttttgcctgatggatcaccagttgatatatttgctaaaattaaagccttccatctgaagtatgatgaagttcgtctggatccaaatgttcagaaatgggatgtaacagtattagaactcagctatcacaaacgtcatttggatagaccagtgttcttacggttttgggaaacattggacaggtacatggtaaagcataaatcgcacttgagattctgaattatttggctcctccatttctggagattgagactcaagctttatgaatttatcaagaacttaaaaatgaagaaggtcacagattgatcttttataagaccttatttgatgctttgtgcttcaaggagatgatacctgtcatccatataagcaaactttttggcttacaactatttttttaatattagccttctagtctgtaatggaaattgtatattttgatagaagttttttctccattggttaaattagcattacttaaaatttgtttctttagaaaataaatgcaggttataaatgtgtgtatatttagagattataaggctctctgagccatcttctgatttttcattgctctataattctttttactgaaaatactatgttatgaatggtattaaattttagtctctggaacatccaaaaccaagcaaagggatgtgactattttgaatgaatcagaatgtcaacttgtatgtacactatatctacacttactcattatttaaaaagaataatgaaaaatctagatcaattcttcaatttgattgaactgttcagccttttcaagatttctttatttacaaatgattacatttaaatgaatgtacattcttctcactgactttggtgattttgaaacctagaatgatgtgtttctatctgtaatatctttccatttgaaaaaaatctcaaaacacagattaaaaccacaataggctgtagtattttttattttgggagccagagtatgatttgggggaagaatatgtatcagccctattgcagtataactttaagctccttttctctttagtccacttttgattgtaatttttatggtataggattttgaatcttctattttaggcttgtcagtcttggagttcttatcttccattatccctaaatattgataaactcccaggcaccaaagaaaacatttgcttaattgtctgaaaagaaacaagagaaaaacactggtatttttatgtctgtattcaatatggtataaaatataaaaactataaaaaaaaaaaaaaaaaaaaaaaaaaaaaa

SEQ ID NO: 25984 - DNA, 1104 bp, Homo Sapiens
ggggaggtgatagcggagcggctgggtaggaagcaattgttctcaaacttcactagccccgtcggcgcggacgcttgtcgagaatgcagattcctgggtactgccagatacgaattgagcataccacaaaaaagttctcattttgtgtcctcccatcccattctcctcactaaccaaaggctaggaattatctgtgaatgtaggaccactggatttgcagtcttcatctgacactgtggagagtttctaggaatgaaacagatatatggccttgggtcccctttttttttcttttttttttttttaatagagacgagcatctcactatgttgcctagggtagtcttgaactcctggcctcaagcaatccccacccgactccgcctctcgaagtgatgggattacaggcataaaccaccacgcctggccagaaggtgctttaacaccaaatctgaaaattgttcagaagagaaacattgagcatgaacaccatctgtgcgagtcatttacttattgcccctcacctctaaatctaccttctgtactcttcttccctgtaatgatggggctagttgtcctcaaactgtttctcagacttctttttaagcttgcttcctgttcagttctgccaataggggtcactagagagagactgggaggcagaaggagagaatatgcttcctgttttttctgttcttgttaatgttgcttacaggaccagcaatgcttcttcacctagagacacttctcccagcagtggcagtgccacttcagcttctttcagcactactggaatcagcctcagtgattccccctgtacccgctcagagattatccacagcagccagatggttctaccttccacaaagattgtggttgcaattctgggcttctaagttctggttacttcatatttttccttttgttcctccagccctagaggtggtagctgctttctgaagttattatttctagatgacttttggtttttcagcctttgtattttgcttttcagccctctaatgcctgtataaccaatttccctgtaataaataaatttcctccattgaaatccccaaaaaaaaaaaaaaaaaaaaaaaaaaaa

SEQ ID NO: 25985 - DNA, 1430 bp, Homo Sapiens
gggagcctaggaggcagaggtggcagtgagccgagatcacaccactgcactgcagcctgggcgacaaagactgtcaaaaaaaaaaaaaaaaaaaagttacgtaaccaacaagtcaaaggagaatttataaggaaatcagaaaatactttgaggtgaatgaaaatacagaaacaacatatcaaattctgtgagatgtgtgaaagcaacgcttacagtgaaattaatagctatgaacattgtaatgaaatgagaagtacttcaaattactaacctaactttccaactttagaaaatacagtaaaaaaagaacaaattaaaatcaaagcagaaaggatataaagtttagtgtggaaatagagaattaaaaataattgagaaacacagcacttcgttgacttattcataaaataaagctttattaaaatgagaaatgtaaaacgtgatgttcctaatgaccttattccatacaagggattagtattttgacaaatatctttgtggaagtagacaaattcctagaaagacactgactaccacaactcattcaagaacaaagtgaagacaataaattggtaatttaaaaactctcacccctgcccctgacacacatgtaaattcccagttcaaatgtattcttttgtatattataccaaacacatgaaaattaccaattcgataaaaatgtcttaaaaacttggaagagcatgtaacattttttactggttctatgatgctattgttatctagataccaaagtgaaacatcatacacagggaaaactctgataatatcgcttatgagtggatctgtgaaatttcctagtaaattttggcaaaccaaatacagtaacatataaacaggaatgtacaccagtacccagtacagtgtatccctggaatgcaacgttatttcatcagctggaaatgattagtgcaacagactgaaggaagaaaacaacatggtcatctcaatagattgtggacggctggaagtggaggctcacgcctgtaatcctaatactcctaccaacagtgtataagcattcctttttctctgtaacttcaccagaatctgtttttttgtttgtttgtttgtttgtttttgactttgtaatagccatgggctgggctcagtgactcacgcctgtaatcctagcactgggggaggctgaggtgggcggatcacttgaggtcaggagttcgagaccagcctggccaacatggtgaaaccccgtctctactaaaaatactaaaattacctgtgcatggtggcaggtgcctgtaatcccagctgctcgggagtctgaggcagtagaatcacttgaacccaggaggtggaggttgcagtgagcggagattgtgccactgcacttggacctggctgacacagcaagactatgtctaaaaaaaaaaaaaaaaaaaaaaaaaaaa

SEQ ID NO: 25986 - DNA, 1619 bp, Homo Sapiens
gcttcccgtccgctgtcctctgctgccagtcccctgccccgggcaaagcccatctggtccgccgagcaggccggagctattgggagtggcggatcctcccaccccagccggatctgggccatggccgagcctggagagggactgccagaggaggtgctggcactcatcttccgccacctgtccctgagagaccgtgctgccgccgccagggtctgcagggcctgggccgccgctgctacctgcagcgccgtgtggcacgacacaaaaatcagttgcgaatgtgagctggaaggcatgctgccaccttatctgtccgcctgcctcgaccacattcacaacctacggctggaatttgagccatcgaggaagccgagccgccgggcggccatcgagctgctgatggttctggcgggccgtgccccggggctgcgaggcctgcgcctggagtgccgcggagaaaaaccgctcttcgacgcgggccgcgacgtcctggaggctgtgcacgctgtatgcggggcggccagccagctacgccacctcgacctgcggcgcttgtccttcacactggacgacgcgctggtgctgcaggcggcgcgcagctgtcccgagctccacagcctttttctggacaacagtaccctagtgggcagcgtgggtcccggctcagtgctcgagctactggaggcctgcccgcgcctgcgcgctctcggcctgcacctagccagtttgtcgcacgccatcctcgaagcactggcggcgccagaccgagcgcctttcgcgctcttggctctgcggtgcgcgtgccccgaagatgcacgcgcgtccccgctgcccaacgaagcctgggtcgcgttgcgccgccgccaccctgggctggcagtggagctggagctggagcccgcgctgcccgctgagagcgtgacgcgcgtcctgcagccagccgtccccgtggctgcgctgcgcctcaacctctcaggcgacaccgtaggcccagtgcgcttcgcagcacaccactacgccgcaaccctgtgcgcgctcgaggtgcgcgcagccgcttcggccgagctgaacgccgcgctggaggagctggcggcgcgctgcgcggccctgcgcgaggtgcattgtttctgcgtggtgagccactcggtgctggacgccttccgcgcgcactgcccgcgcctgcgcacctataccctcaagctcacgcgcgagccgcatccctggaggcctacgctcgtggcgtgattgggcgacttctctcccccgtccccgtggacgtaagcgctctgagagggaacgggggggggtgtccaggcgcgccccgagtgctagtgccttcttttgggattgttgccccccgggtctttaccgagttgggaactgtgatggcatcgggaccagtcctgggcgccctgagaccactcgctgctctcaccctctgcagacgccccacccgctcggtcctggacacactgcccccctctcttgcctccacccctctgcggactctgcagctccgcggccccggcgcagggagagggagggcacgggcgcgggccgggcctcaagggtgagtgtgaaataaacaaatcctgcagtgaaaaaaaaaaaaaaaaaaa

SEQ ID NO: 25987 - DNA, 2407 bp, Homo Sapiens
agagaaagtgctctctgccgcattgatagcagcgagagctggaggtgttgggtcgggagaccagccgttcgatcccgccgcaggtaggagctggtttccatcctggcaccacggcacacacctccagcctcgagcccggcgctgctgcccgggggtctccttcaggctctttgacgccgttccagggggcacctatccaggcatcctctgggcctctagccagaggactggctcccggcttcagcactccgggctgcagtaagaagtgcccttatcgctctgagccctgccaccatcccgtgaaccaccgaaaccctggtccagcgcgacagccttggacctgggactggacggatccaaaacgctcagcctcggccccccacagacggggctctgcatcgtctctgatatgtcacccaccatctcccacaaggacagcagccggcaacggcggccagggaatttcagtcactctctggatatgaagagcggtcccctgccgccaggcggttgggatgacagtcatttggactcagcgggccgggaaggggacagagaagctcttctgggggataccggcactggcgacttcttaaaagccccacagagcttccgggccgaactaagcagcattttgctactactctttctttacgtgcttcagggtattcccctgggcttggcgggaagcatcccactcattttgcaaagcaaaaatgttagctatacagaccaagctttcttcagttttgtcttttggcccttcagtctcaaattactctgggccccgttggttgatgcggtctacgttaagaacttcggtcgtcgcaaatcttggcttgtcccgacacagtatatactaggactcttcatgatctatttatccactcaggtggaccgtttgcttgggaataccgatgacagaacacccgacgtgattgctctcactgtggcgttctttttgtttgaattcttggccgccactcaggacattgccgtcgatggttgggcgttaactatgttatccagggaaaatgtgggttatgcttctacttgcaattcggtgggccaaacagcgggttactttttgggcaatgttttgtttttggcccttgaatctgccgacttttgtaacaaatatttgcggtttcagcctcaacccagaggaatcgttactctttcagatttcctttttttctggggaactgtatttttaataacaacaacattggttgcccttctgaaaaaagaaaacgaagtatcagtagtaaaagaagaaacacaagggatcacagatacttacaagctgctttttgcaattataaaaatgccagcagttctgacattttgccttctgattctaactgcaaagattggtttttcagcagcagatgctgtaacaggactgaaattggtagaagagggagtacccaaagaacatttagccttattggcagttccaatggttcctttgcagataatactgcctctgattatcagcaaatacactgcaggtccccagccattaaacacattttacaaagccatgccctacagattattgcttgggttagaatatgccctactggtttggtggactcctaaagtagaacatcaagggggattccctatatattactatatcgtagtcctgctgagttatgctttacatcaggttacagtgtacagcatgtatgtttctataatggctttcaatgcaaaggttagtgatccacttattggaggaacatacatgacccttttaaataccgtgtccaatctgggaggaaactggccttctacagtagctctttggcttgtagatcccctcacagtaaaagagtgtgtaggagcatcaaaccagaattgtcgaacacctgatgctgttgagctttgcaaaaaactgggtggctcatgtgttacagccctggatggttattatgtggagtccattatttgtgttttcattggatttggttggtggttctttcttggtccaaaatttaaaaagttacaggatgaaggatcatcttcgtggaaatgcaaaaggaacaattaatatatatgctactggacattctagcaaggttgaattttagagtggggtttttataagtaatggaggataaaatgggtgggagaaaatggcacacagcacctgaagaaagatggggcagtgacctctagaactcatgcattgccattggaaagcctgtgttgggcatcgatgtcagatcctgaagaatcacctggaaaaaatcccatcctagaggcaaggaggctacaccaaaccatacactacagtactttgtcacatggttgtccattatcatgtattagagtctaaatgattacttgaataaagaaaaaaaaccacttaaaaaaaaaaaaaaaaaaaaaaaaaaaa

SEQ ID NO: 25988 - DNA, 2079 bp, Homo Sapiens
caaccatcctgcccagtctccgcttccccgtcttgtacacccctaactcctgaggctcctccgaatcacgcgagtggaagcggagaagctcaagtggccgccatgtcagaggcttatttccgagtggagtcgggtgcgctggggcctgaggagaactttctttctttggacgacatcctgatgtcccacgagaagctgccggtgcgcacggagaccgccatgcctcgccttggcgctttcttcctggagcggagcgcaggcgccgagactgacaacgcggtcccacagggttccaagcttgaactacccttgtggctggcaaaaggactttttgacaacaagcgacggatcctttctgtggaactccccaagatctaccaagagggttggaggactgtgttcagtgcagatcccaatgtggtggacctccacaaaatggggccccatttctacgggtttggctcccagctcctgcattttgacagtcccgagaatgcagacatttcccagtctctgctgcagacttttatcggacgttttcgccgcatcatggactcctcacagaatgcttacaacgaagacacttcagccctggtagccaggctagacgagatggagaggggcttatttcaaacagggcagaaaggactgaatgactttcagtgttgggagaaggggcaggcttctcagatcacagcttccaacctcgttcagaattacaagaagagaaaattcactgatatggaagactgaaagccggaagaacacagaatggctcctcacagacgtatccctccgtgtgtccttgataggagctggttgaccttgtacagaaccagaatcctgtcccatttcatggcttatttcctgtggccatagagaattatagggaactggacatgctggaggatgtgggtgtccctggctctgtgagtcttccaggaccgtcccaccctgctgacccacagcccaggccctttaacccaagaacccatggccaaggagaaatcaaagtccttcctaaataagaatcactgccatataatatatcacagtagagttgcaactgagattccttgtgtctgggagtttggacagcttcagatgtacagtttcactagccacaaagcacaggtacaaactgggtcatcgcctgttcacaaaatgctctcttgatcttatttgcctcatcttcctcatggttgtacagaggatagcaccccaccatgccagcctgacttggagatatctcctgctgcctgcctgcagggagttaccccagtttccaaaaacagtcgcccagataaaggaggaaaagggaaaggcagacgaatggcatggcttttactaaagaaaagatgttggcctcatactctatactcagggcttaatgaactggaatctgcataactcagcagtcaacccagaagggaaatggttaaactgagcttgttattgcctcggagagcctaagagcacccgcacacttaattctactccctgtctagaaaagctgtcagggagtcgtttggaattgcaatgtagttattaagggctgttaaccagcctgcattacatctggaagtcaggacttgggtgctgactatgaagggccctgttttcaaaatctaacattgcaagtgtaaatgggcaagaagcctccgttgtgctttttttttcctcttcagtaacttttgcaacattattgcatagaagatccctgaccatttactaggaacctggttaagcaagcactaatctcttttcctggagatcaaggatgcaacctcaggttgagaaagaaacagggttccctgggcccattagactgtttgcagggcatcactgcttccccctgacacctcacaactagcaaaaattgtctttgtctttggaaattatagagggatttgggtatccagattgtgcagatgcaaacttaggctgtcttgatgcaaacttagaaccacagaaatgcttttaaaatgcctgttttaagatggaattgttgtttttataatttgattttagtgctaaataaatgattggctttgtacatgaaaaaaaaaaaaaaaaaaa

SEQ ID NO: 25989 - DNA, 1716 bp, Homo Sapiens
cgggaacagacggatcggcagggcggggcggaacggtgaggccatctactgaaacacagaagcaattttaaaagaaaatggaggaagtataactgatctttgcagaaagtggggaagtgagttgaccagagaaggatgagagaattgccaagttgtactgaacgccaagctgagaatggtgattctgaagatagaatgcgtttgcaatggctgctactgtgaacttggaacttgatcccatttttttgaaagcactaggtttcttgcattcaaagagtaaagattctgctgaaaagctaaaagcactgcttgatgaatctttggctcggggcattgattccagttaccgtccatctcaaaaggatgtggagccacccaaaatttcaagcacaaaaaacatttccattaagcaagagcccaaaatatcatccagtcttccttctggtaataataatggcaaggtcctcacaactgaaaaggtaaagaaggaagctgaaaagagacctgctgataaaatgaaatcagacatcactgaaggagttgatattccaaagaaacctagattggagaaaccagaaacacagtcatctcccattactgtccaaagtagcaaggatttacctatggctgacctttccagttttgaggagaccagtgctgatgattttgccatggagatgggattggcctgcgttgtttgtaggcaaatgatggtggcatctggcaatcaattagtagaatgtcaggagtgccataatctctaccaccgagattgtcataaaccccaggtgacagacaaggaagcgaatgaccctcgcctggtgtggtattgtgcccgatgtaccagacaaatgaaaagaatggctcaaaaaactcagaaaccaccgcagaaaccagcccctgcagttgtttctgtaactccagctgtcaaagatccattggttaagaaaccagaaactaaactgaaacaagagacaacttttctagcgtttaagagaacagaagtcaagacatccacagttatttcaggaaattcttctagtgccagcgtttcctcgtcagtaactagtggcttaactggatgggcagcttttgcagccaaaacttcctctgctggtccttcaacagcaaaattgagttcaacaacacaaaacaatactgggaaacctgctacttcgtcagctaaccagaaacctgtgggtttgactggtctggcaacatcatccaaaggtggaataggttccaaaataggttccaataacagcactacgcccactgtacctttaaaaccacctccacctctaaccttgggtaaaactggccttagtcgctcagttagttgtgacaatgtcagcaaagtaggtcttcctagtccaagtagtttagttccaggaagcagcagccaactaagtgggaatggaaatagtggaacatcaggacctagtggaagtactaccagcaaaactacttcagaatccagcagctctccctcagcatcccttaaaggcccaacttcacaagaatcacagctcaatgctatgaagcgattacagatggtcaagaagaaagctgcccaaaagaaactcaagaagtaatgtggccaagtaggtttttgtatcatattagcctaaagatgaaaggcttattattatgatataatctgtaatacactgtaatttaataaaagtcttcataatcaaaaaaaaaaaaaaaaaa

SEQ ID NO: 25990 - DNA, 2362 bp, Homo Sapiens
atcgtgctgaggcgggtggcatggcggagaaggatgacaccggagtttgacgaagaggtggtttttgagaattctccactttaccaatacttacaggatctgggacacacagactttgaaatatgttcttctttgtcaccaaaaacagaaaaatgcacaacagagggacaacaaaagcctcctacaagagtcctaccaaaagtatcctgttaaaagtggctgaaaccatcaaaagttggatttttttttctcagtgcaataagaaagatgacttacttcacaagttggatattggattccgactcgactcattacataccatcctgcaacaggaagtcctgttacaagaggatgtggagctgattgagctacttgatcccagtatcctgtctgcagggcaatctcaacaacaggaaaatggacaccttccaacactttgctccctggcaacccctaatatttgggatctctcaatgctatttgccttcattagcttgctcgttatgcttcccacttggtggattgtgtcttcctggctggtatggggagtgattctatttgtgtatctggtcataagagctttgagattatggaggacagccaaactacaagtgaccctaaaaaaatacagcgttcatttggaagatatggccacaaacagccgagcttttactaacctcgtgagaaaagctttacgtctcattcaagaaaccgaagtgatttccagaggatttacacttttgcttgacagggtcagtgctgcttgcccatttaataaagctggacagcatccaagtcagcatctcatcggtcttcggaaagctgtctaccgaactctaagagccaacttccaagcagcaaggctagctaccctatatatgctgaaaaactaccccctgaactctgagagtgacaatgtaaccaactacatctgtgtggtgccttttaaagagctgggccttggacttagtgaagagcagatttcagaagaggaagcacataactttacagatggcttcagcctgcctgcattgaaggttttgttccaactctgggtggcacagagttcagagttcttcagacggttagccctattactttctacagccaattcacctcctgggcccttacttactccagcacttctgcctcatcgtatcttatctgatgtgactcaaggtctacctcatgctcattctgcctgtttggaagagcttaagcgcagctatgagttctatcggtactttgaaactcagcaccagtcagtaccgcagtgtttatccaaaactcaacagaagtcaagagaactgaataatgttcacacagcagtgcgtagcttgcagctccatctgaaagcattactgaatgaggtaataattcttgaagatgaacttgaaaagcttgtttgtactaaagaaacacaagaactagtgtcagaggcttatcccatcctagaacagaaattaaagttgattcagccccatgttcaagcaagcaacaattgctgggaagaggccatttctcaggtcgacaaactgctacgaagaaatacagataaaaaaggcaagcctgaaatagcatgtgaaaacccacattgtacagtagtacctttgaagcagcctactctacacattgcagacaaagatccaatcccagaggagcaggaattagaagcttatgtagatgatatagatattgatagtgatttcagaaaggatgatttttattacttgtctcaagaagacaaagagagacagaagcgtgagcatgaagaatccaagagggtgctccaagaattaaaatctgtgctgggatttaaagcttcagaggcagaaaggcagaagtggaagcaacttctatttagtgatcatgccgtgttgaaatccttgtctcctgtagacccagtggaacccataagtaattcagaaccatcaatgaattcagatatgggaaaagtcagtaaaaatgatactgaagaggaaagtaataaatccgccacaacagacaatgaaataagtaggactgagtatttatgtgaaaactctctagaaggtaaaaataaagataattcttcaaatgaagtcttcccccaaggagcagaagaaagaatgtgttaccaatgtgagagtgaagatgaaccacaagcagatggaagtggtctgaccactgcccctccaactcccagggactcattacagccctccattaagcagaggctggcacggctacagctgtcaccagattttaccttcactgctggccttgctgcagaagtggctgctagatctctctcctttaccaccatgcaggaacagacttttggtgatgaggaggaagaacaaataaaaaaaaaaaataaaaa

SEQ ID NO: 25991 - DNA, 2108 bp, Homo Sapiens
gggaccgcctcggaggcagaagagccgcgaggagccagcggagcaccgcgggctggggcgcagccacccgccgctcctcgagtcccctcgcccctttcccttcgtgccccccggcagcctccagcgtcggtccccaggcagcatggtgaggtctgctcccggaccctcgccaccatgtacgtgagctacctcctggacaaggacgtgagcatgtaccctagctccgtgcgccactctggcggcctcaacctggcgccgcagaacttcgtcagccccccgcagtacccggactacggcggttaccacgtggcggccgcagctgcagcggcagcgaacttggacagcgcgcagtccccggggccatcctggccggcagcgtatggcgccccactccgggaggactggaatggctacgcgcccggaggcgccgcggccgccgccaacgccgtggctcacggcctcaacggtggctccccggccgcagccatgggctacagcagccccgcagactaccatccgcaccaccacccgcatcaccacccgcaccacccggccgccgcgccttcctgcgcttctgggctgctgcaaacgctcaaccccggccctcctgggcccgccgccaccgctgccgccgagcagctgtctcccggcggccagcggcggaacctgtgcgagtggatgcggaagccggcgcagcagtccctcggcagccaagtgaaaaccaggacgaaagacaaatatcgagtggtgtacacggaccaccagcggctggagctggagaaggagtttcactacagtcgctacatcaccatccggaggaaagccgagctagccgccacgctggggctctctgagaggcaggttaaaatctggtttcagaaccgcagagcaaaggagaggaaaatcaacaagaagaagttgcagcagcaacagcagcagcagccaccacagccgcctccgccgccaccacagcctccccagcctcagccaggtcctctgagaagtgtcccagagcccttgagtccggtgtcttccctgcaagcctcagtgtctggctctgtccctggggttctggggccaactgggggggtgctaaaccccaccgtcacccagtgacccaccggggtctgcagcggcagagcaattccaggctgagccatgaggagcgtggactctgctagactcctcaggagagacccctcccctcccacccacagccatagacctacagacctggctctcagaggaaaaatgggagccaggagtaagacaagtgggatttggggcctcaagaaatatactctcccagatttttactttttcccatctggctttttctgccactgaggagacagaaagcctccgctgggcttcattccggactggcagaagcattgcctggactgaccacaccaaccaggccttcatcctcctccccagctcttctcttcctagatctgcaggctacacctctggctagagccgaggggagagagggactcaagggaaaggcaagcttgaggccaagatggctgctgcctgctcatggccctcggaggtccagctgggcctcctgcctccgggcaggcaaggtttacactgcggaagccaaaggcagctaagatagaaagctggactgaccaaagactgcagaacccccaggtggcctgcgtcttttttctcttcccttcccagaccaggaaaggcttggctggtgtatgcacagggtgtggtatgagggggtggttattggactccaggcctgaccagggggcccgaacagggacttgtttagagagcctgtcaccagagcttctctgggctgaatgtatgtcagtgctataaatgccagagccaacctggacttcctgtcattttcacaatcttggggctgatgaagaagggggtggggggagtttgtgttgttgttgctgctgtttgggttgttggtctgtgtaacatccaagccagagtttttaaagccttctggatccatggggggagaagtgatatggtgaagggaagtggggagtatttgaacacagttgaattttttctaaaaagaaaaagagataaatgagctttccagaaaaaaaaaaaaaaaaaaa

SEQ ID NO: 25992 - DNA, 2219 bp, Homo Sapiens
agccgctgggcaggaatagtccggggtgcgcgcgagcaggcgctgccaaccccacttctgcccgggattccaatctgaggagcaggaggaccggggcgccggtgtcctgccgcctccttctccttgctctcacctgcgcctattagtccacgcgccttcaaggccaggggctacagcccagacagagaggggacagcagagggagagagagcacctgaggatacagagctggcactggactgccttttcaccccccaggtgatgagtgaggttcgaagaacggaagatttaaaaagcagccggggcctccgtattgaatgaaagacccagtgcaaagacatcaccatgaacactagcattccttatcagcagaatccttacaatccacggggcagctccaatgtcatccagtgctaccgctgtggagacacctgcaaaggggaagtggtccgcgtgcacaacaaccacttccacatcagatgcttcacctgtcaagtatgtggctgtggcctggcccagtcaggcttcttcttcaagaaccaggagtacatctgcacccaggactaccagcaactctatggcacccgctgtgacagctgccgggacttcatcacaggcgaagtcatctcggccctgggccgcacttaccaccccaagtgcttcgtgtgcagcttgtgcaggacatctccagggatggagagctcatccccgcctcctgctttaccttccgcatcaccatcacttgttaattcagcaagtgaagcctttccccattggagacaaggtgaccttcagcggtaaagaatgtgtgtgccaaacgtgctcccagtccatggccagcagtaagcccatcaagattcgtggaccaagccactgtgccgggtgcaaggaggagatcaagcacggccagtcactcctggctctggacaagcagtggcacgtcagctgcttcaagtgccagacctgcagcgtcatcctcaccggggagtatatcagcaaggatggtgttccatactgtgagtccgactaccatgcccagtttggcattaaatgtgagacttgtgaccgatacatcagtggcagagtcttggaggcaggagggaagcactaccacccaacctgtgccaggtgtgtacgctgccaccagatgttcaccgaaggagaggaaatgtacctcacaggttccgaggtttggcaccccatctgcaaacaggcagcccgggcagagaagaagttaaagcatagacggacatctgaaacctccatctcaccccctggatccagcattgggtcacccaaccgagtcatctgcgacatctacgagaacctggacctccggcagagacgggcctccagcccggggtacatagactcccccacctacagccggcagggcatgtcccccaccttctcccgctcacctcaccactactaccgctctggtgatttgtctacagcaaccaagagcaaaacaagtgaagacatcagccagacctccaagtacagtcccatctactcgccagacccctactatgcttcggagtctgagtactggacctaccatgggtcccccaaagtgccccgagccagaaggttctcgtctggaggagaggaggatgattttgaccgcagcatgcacaagctccaaagtggaattggccggctgattctgaaggaagaaatgaaggcccggtcgagctcctatgcagatccctggacccctccccggagctccaccagcagccgggaagccctgcacacagctggctatgagatgtccctcaatggctcccctcggtcgcactacctggctgacagtgatcctctcatctccaaatctgcctccctgcctgcctaccgaagaaatgggctgcacaggacacccagcgcagacctcttccactacgacagcatgaacgcagtcaactggggcatgcgagagtacaagatctacccttatgaactgctgctggtgactacaagaggaagaaaccgactgcccaaggatgtagacaggacccgtttagagcgccacctgtcccaggaagagttctaccaagtctttggcatgaccatctctgagtttgaccggctggccctctggaagaggaatgaactgaagaagcaagcccggctgttctaggcagaggctctataaatatatatgcatttatataaagatatatgtaaaatctctctaaaaaaaaaaaaaaaaaaaa

SEQ ID NO: 25993 - DNA, 2377 bp, Homo Sapiens
gtgaggactccgcgacgcgtccgcaccctgcggccagagcggctttgagctcggctgcgtccgcgctaggcgctttttcccagaagcaatccaggcgcgcccgctggttcttgagcgccaggaaaagcccggagctaacgaccggccgctcggccactgcacggggccccaagccgcagaaggacgacgggagggtaatgaagctgagcccaggtctcctaggaaggagagagtgcgccggagcagcgtgggaaagaagggaagagtgtcgttaagtttacggccaacggtggattatccgggccgctgcgcgtctgggggctgcggaatgcgcgaggagaacaagggcatgcccagtgggggcggcagcgatgagggtctggccagcgccgcggcgcggggactagtggagaaggtgcgacagctcctggaagccggcgcggatcccaacggagtcaaccgtttcgggaggcgcgcgatccaggtcatgatgatgggcagcgcccgcgtggcggagctgctgctgctccacggcgcggagcccaactgcgcagaccctgccactctcacccgaccggtgcatgatgctgcccgggagggcttcctggacacgctggtggtgctgcaccgggccggggcgcggctggacgtgcgcgatgcctggggtcgtctgcccgtggacttggccgaggagcggggccaccgcgacgttgcagggtacctgcgcacagccacgggggactgacgccaggttccccagccgcccacaacgactttattttcttacccaatttcccacccccacccacctaattcgatgaaggctgccaacggggagcggcggaaagcctgtaagcctgcaagcctgtctgagactcacaggaaggaggagccgaccgggaataaccttccatacatttttttctttgtcttatctggccctcgacactcaccatgaagcgaaacacagagaagcggatttccagggatatttaggagtgtgtgacattccaggggtcgtttgcttttcagggttttctgagggaaagtgcatatgaaatccttgactggacctggtggctacgaatcttccgatggatgaatctcccactccagcgctgagtgggagaaggcagtgattagcacttgggtgacggcagtcgatgcgttcactccaatgtctgctgaggagttatggtgaacccacaacttaggccctagcggcagaaaggaaaacctgaagactgaggacaaagtggaggagggccgaggtgggcttcagtaagtccccggcggcgctttagtttgagcgcatggcaagtcacatgcgtaaacgacactctctggaagccctggagaccctcgcccaactccaccagatagcagaggggtaagagaggatgtgcaagcgacgacagatgctaaaatccctggatcacgacgctgcagagcacctttgcacaggatgctggcctttgctcttactacactgaggagagattcccgcgggttccgcaggcagactacacaggatgaggtggtggagtggagtgagagcaattgtaacggttaactgtaacgttttctttcacacacacacacacacacacacacacacacatgctaggatgcggaaatccccttatgacttgctactttttgattttgtgatattttgtactttttagttgttcagcaactgtcttatttaatggggagattttaagtaacataactagtggctctcagttaaaatgtgaggaagaactacagctcttaaatgtagcaatggcactgttgcaaactcagtgcaaacgcctagattgctttcttcttaacctatttatttctttgttaaatttttctgattgtttcctttatagagtgtctcagggtgcagaggtcagactaagaaatattccaaatgtcttttagaagatagatgcacttatgcagtaaattatcttgggatagttcccaaaagattgctgaaaaagtagattgagtataaaaacttgaaaatatatgatggctcgtgggatgtcctactatcactgaacaaactaaaggtgcactgctttgggatttaatttccagggttgcttgatcattatatcattggaacaactgatacttcactactttaataaagaattaacagagattgaactccaagaggtgggtaatttggtttaaaaatacatgttcatgggtttaccactaactcctgagaaatgttaaaggttcacaggggttcccttctctcaatgtttgtaataattgctcataagcaataccagcaattcataaaaactgcttacttatgccatagaaaattaaacacaaagtgtatacatgtaaaaaaaaaaaaaaaaaa

SEQ ID NO: 25994 - DNA, 1899 bp, Homo Sapiens
gttggagagggcagctcgggtagagagggctggcggagcggcgcagacggcggcagtcctgctcagcctctgcccggctccgtactccggccccggcctgcgccctcagaaaggtggggcccgaaccatgagctcctacctggagtacgtgtcatgcagcagcagcggcggggtcggcggcgacgtgctcagcttggcacccaagttctgccgctccgacgcccggcccgtggctctgcagcccgccttccctctgggcaacggcgacggcgccttcgtcagctgtctgcccctggccgccgcccgaccctcgccttcgcccccggccgcccccgcgcggccgtccgtaccgcctccggccgcgccccagtacgcgcagtgcaccctggagggggcctacgaacctggtgccgcacctgccgcggcagctgggggcgcggactacggcttcctggggtccgggccggcgtacgacttcccgggcgtgctggggcgggcggccgacgacggcgggtctcacgtccactacgccacctcggccgtcttctcgggcggcggctctttcctcctcagcggccaggtggattacgcggccttcggcgaacccggccctttttcggcttgtctcaaagcgtcagccgacggccaccctggtgctttccagaccgcatccccggccccaggcacctaccccaagtccgtctctcccgcctccggcctccctgccgccttcagcacgttcgagtggatgaaagtgaagaggaatgcctctaagaaaggcaaactcgccgagtatggggccgctagcccctccagcgcgatccgcacgaatttcagcaccaagcaactgacagaactggaaaaagagtttcatttcaataagtacttaactcgagcccggcgcatcgagatagccaactgcttgcacctgaatgacacgcaagtcaaaatctggttccagaaccgcaggatgaaacagaagaaaagggaacgagaagggcttctggccacggccattcctgtggctcccctccaacttcccctctctggaacaacccccactaagtttatcaagaaccccggcagcccttctcagtcccaagagccttcgtgaggccggtacttggggccgaaaaactgtggcctgcagaagtcccaggcgacccccatccctatctagacttaggagctcagtttgggatggaggtgggagaacaaaaatgaatagggatttcacttgggaaatgaagtactttagttggcttccgagttccagactatatgtccagatattaattgactgtcttgtaagccacttgtttggttatgatttgtgtcttatcagggaaaaggtgcccagctgccagcccagctccgctgctatctttgcctcacttagtcatgtgcaattcgcgttgcagagtggcagaccattagttgctgagttctgtcagcactctgatgtgctcagaagagcacctgcccaaagtttttctggttttaatttaaaggacaaggctacatatattcagctttttgagatgaccaaagctagttagggtctccttgatgtagctaagctgcttcagtgatcttcacatttgcactccagtttttttttctttaaaaaagcggtttctacctctctatgtgcctgagtgatgatacaatcgctgtttagttactagatgaacaaatccacagaatgggtaaagagtagaatctgaactatatcttgacaaatattattcaaacttgaatgtaaatatatacagtatgtatattttttaaaaagatttgcttgcaatgaccttataagtgacatttaatgtcatagcatgtaaagggttttttttgtaataaaaattatagaatctgcaaaaaaaaaaaaaaaaaaaa

SEQ ID NO: 25995 - DNA, 3395 bp, Homo Sapiens
gatggcagcccaggctttggcgctgctgagagaggtagcgaggctggaagcgccgctggaggagctacgcgcgcttcactccgtgctgcaggcagtgccgctcaacgagcttcgccagcaagcggcggagctgcgcctcggcccgctcttctccctgcttaacgagaaccatagggaaaagactactttgtgtgtatccattctggagagattgctccaagctatggaaccggttcacgtggcccggaacctcagggttgacctgcagaggggactaattcaccctgatgattctgtaaaaatcctcactctttcccagattggaagaattgttgaaaattctgatgctgttactgagattctaaataatgctgaattactaaaacaaattgtttattgcattggtggagagaatctatctgtagcaaaagcggctatcaaatccctgtcaagaatatcactaacccaagctggactggaggctttatttgaaagcaatctgctggatgatttgaaaagtgtaatgaaaacaaatgacattgttcgatacagggtgtatgagctaattatagagatttcttccgtgtcaccagaatctttaaactactgtaccacaagtggattggtaacccagctcctgagagagctgactggtgaggatgtgttggtcagagccacctgtatagaaatggtgacatcactggcatatactcatcatgggcgacaatatcttgctcaagaaggagtaattgaccaaatttctaatataattgttggggcagattcagaccctttctctagcttctatctgccaggattcgtgaagttttttggaaacctggctgtcatggatagtcctcaacagatctgtgagcgttatcctatctttgtggaaaaagtctttgaaatgatagaaagtcaggaccccactatgattggtgtagctgtagacacagttggaatcttgggatccaatgttgaaggaaaacaggttttacagaaaacaggaactcgctttgaacgcttgcttatgagaataggacatcaatcaaagaatgccccagtggagctaaaaattagatgtttggatgcaatttcatctcttctgtacttaccacctgagcagcagactgatgaccttctgaggatgacagaatcctggttttcttctttatctcgggatccactggagctcttccgtggcattagtagtcagcccttccctgaactacactgtgctgccttaaaagtgtttacggccattgcaaaccaaccctgggctcagaaacttatgtttaacagtccaggttttgtagaatatgtggtggaccggtctgtggagcatgacaaagcttcaaaggatgccaaatatgaactagtgaaagcacttgccaattccaagacaattgcagaaatctttgggaacccaaattatttgaggctcagaacttacctgagtgaagggccatactatgtgaaacctgtttccacgacagcagtagaaggagccgaatgatttcttctagagctcatctatagaggaccacgttttgaccaaaacttctcctaaggcatttgactccatctatatttcacaaaagagacttcctttccccaagaattatcatggaatgtcagatgttactttgttaccaacactgttatatttctacattgaaatgcaaagtggaactaggagtttggaatgcattaagagcagacaagcttggtcataatagatccagtgtttttcagattcctttcactgccttaatctttgcaacagggtggaagtttttttcttccctcaaaattttcatggacatgcaatcttatctaaaagcctgcttcagggctgggcgcggtggctaacacctataattcccagcactttgggaggccaagatgggcaaatcacttgagtctaggagttcaagaccagcctggccaatatggcaaaaccctgtctctactaaaaatataaaatcagccaggcatggtggcgcacacctataatctcagctactcaggaggctgaggcacgagaatcgcttgagcctgggaggcagaggttgcagtgagctgagatcttgccactgcacaccagcctgggcaacacagcaagactctgtctcaaaaataaatgaataaaataaaaacctgccaccaaattatttctggattctcttcactatctttttttttctttttggtcctttttccatttctgattccactttcaaagtcttggatatattctttgaaaaatgagtagtatggaatattaagattatgttccttatactcagaatactttttatgagctctcttgtttttttgttactattattcctttgaaaaaaagacaaaatatctaaaaaatgtttatagtgttcatgtaattttttttgctgtttaccaatgaactttgccctgttgtggttttgggggatcagaaggattcctaaactgtcatttcatttattggtaggtcatgattgctgagggttttgctttggatttttcatacctataaagtcaatcttgagttgatcagagaaagggaaacttactcctaataaacagactcagaacagaagggacatatgcataaatcaggataccatctcattaatttacaaaggataatctttcttttcattgacaacacctacacccacctgttttccagtgttcttctctctaaacagcaaagccaaagcactctgcacaccaaatcacctgttcagaggtttatgcatgagcatatttcttttaggccgtggtgaagttgataaaccacccctgctttgtaacaaaattattttaaagtgactggaattatctagtccccagattgatcatctcccctggcaacgtgactctgttttttgtgtgtgtttccatgctgactagtcccctactgttaatatcactactaattaggctataaccaggtctttcctggcctgagaaatattctcttaaaatgacctttgttttaatctcattcatgatgttgattttttttcaatgtggtgcaatatatacaataaaatttgtcataactattttaagtgtacagttcagtatattacatatgttcataagttgtacaaccatcaccaccatccatcttcagaattattttcatcttatacaattgaaactgtattcattaaacaataactgtctattccctcttttccccagcctctggcaaccaccattctgcttcatgacattgattttattcacttaacatcagattttggggggatgccctctctcctatgtatggtctacacattctgattttttttttagattgaataaaatttgtaaatcattattttcatttcataagtaaaaaaaaaaaaaaaaaaaaaaaaaaa

SEQ ID NO: 25996 - DNA, 3121 bp, Homo Sapiens
gctggaggaagcccccaggtgccaggatctgcccggatccgcgcccgctccggccggcaccatggacagcgaggcattccagagcgcgcgggactttctggacatgaacttccagtcgctggccatgaaacacatggatctgaagcagatggagctggacacggcggcggccaaggtggatgaactgaccaagcagctggagtcgctgtggtcagactctcccgcgcctcctggcccgcaggccggacccccttctaggccgccccggtacagctccagctcgatccctgagcccttcggcagccgagggtcccccccggaaggcggccaccgacggcgcagacaccccgttcggacgatcagagagtgccccaaccctacacccctacagcccgctgtcccccaagggacggccgtcgtcgccgcgcaccccgctctacctgcagccggacgcctacggcagcctggaccgcgcgacctcgccccggccccgcgccttcgatggcgcaggcagctccctcggccgtgcgccctccccgcggcccgggccaggcccgctccgccagcagggtccccccacgcctttcgacttcctgggccgcgcaggctccccccgcggcagccccctggcggaggggccccaggccttcttccccgagcgtgggccgtcaccgcgcccccctgccacagcctacgacgcgccagcgtccgccttcgggagctccctgctaggctccggcggcagcgcattcgccccgcctctgcgcgcgcaagacgacctgacgctgcgccggcggcctccgaaagcctggaacgagtctgacctggacgtggcgtacgagaagaagccttcgcagacagcgagctatgaacgcctggacgtcttcgcaaggcctgcctcgccgagcctgcagctgttgccttggagggagagcagcctggatggactggggggcaccggcaaggacaacctcactagcgccaccctgccgcgcaattacaaggtctctcctctggccagcgaccggcgttcagacgcgggcagctaccggcgctcgctgggctccgcggggccgtcgggcactttgcctcgcagctggcagcccgtcagccgcatccccatgcccccctccagcccccagccccgcggggccccgcgccagcgtcccatccccctcagcatgatcttcaagctgcagaacgccttctgggagcacggggccagccgcgccatgctccctgggtcccccctcttcacccgagcacccccgcctaagctgcagccccaaccacaaccacagccccagccacaatcacaaccacagccccagctgcccccacagccccagacccaaccccaaacccctaccccagccccccagcatccccaacagacatggccccctgtgaacgaaggaccccccaaaccccccaccgagctggagcctgagccggagatagaggggctgctgacaccagtgctggaggctggcgatgtggatgaaggccctgtagcaaggcctctcagccccacgaggctgcagccagcactgccaccggaggcacagtcggtgcccgagctggaggaggtggcacgggtgttggcggaaattcccccggcccctcaaacgcaggggctccatggagcaggcccctgctgtggccctgccccctacccacaagaaacagtaccagcagatcatcagccgcctcttccatcgtcatggggggccagggcccggggggccggagccagagctgtcccccatcactgagggatctgaggccagggcagggccccctgctcctgccccaccagctcccattccacccccggccccgtcccagagcagcccaccagagcagccgcagagcatggagatgcgctctgtgctgcggaaggcgggctccccgcgcaaggcccgccgcgcgcgcctcaaccctctggtgctcctcctggacgcggcgctgaccggggagctggaggtggtgcagcaggcggtgaaggagatgaacgacccgagccagcccaacgaggagggcatcactgccttgcacaacgccatctgcggcgccaactactctatcgtggatttcctcatcaccgcgggtgccaatgtcaactcccccgacagccacggctggacacccttgcactgcgcggcgtcgtgcaacgacacagtcatctgcatggcgctggtgcagcacggcgctgcaatcttcgccaccacgctcagcgacggcgccaccgccttcgagaagtgcgacccttaccgcgagggttatgctgactgcgccacctacctggcagacgtcgagcagagtatggggctgatgaacagcggggcagtgtacgctctctgggactacagcgccgagttcggggacgagctgtccttccgcgagggcgagtcggtcaccgtgctgcggagggacgggccggaggagaccgactggtggtgggccgcgctgcacggccaggagggctacgtgccgcggaactacttcgggctgttccccagggtgaagcctcaaaggagtaaagtctagcaggatagaaggaggtttctgaggctgacagaaacaagcattcctgccttccctccagacctctccctctgttttttgctgcctttatctgcacccctcaccctgctggtggtggtccttgccaccggttctctgttctcctggaagtccagggaagaaggagggccccagccttaaatttagtaatctgccttagccttgggaggtctgggaagggctggaaatcactggggacaggaaaccacttccttttgccaaatcagatcccgtccaaagtgcctcccatgcctaccaccatcatcacatcccccagcaagccagccacctgcccagccgggcctgggatgggccaccacaccactggatattcctgggagtcactgctgacaccatctctcccagcagtcttggggtctgggtgggaaacattggtctctaccaggatccctgccccacctctccccaattaagtgccttcacacagcactggtttaatgtttataaacaaaatagagaaactttccttataaataaaagtagtttgcacagaaaaaaaaaaaaaaaaaaaaaa

SEQ ID NO: 25997 - DNA, 1000 bp, Homo Sapiens
gcgcgtcctaggtcccccaggtctctccgggcctccggctccgtatagccgcgcatcctagcccgaagctgatgctgcccggtcggctccggccttcccggctgcctgacccgccgggccccaagccccgggctccggcctgggcccagcggcctggagcgcggccttggcccgtctgcccgccgcctcgccgccacgacttcgcccgtctgtgccccaccggccgcacctttgaataggtagtcgtactcgtcgtcccgggtccccattgtcctggcgcttccggcgggatcggcgactccgcagccccaccacaaacacccgacgggggcggagccggcgccgcgcagagcggcggttgaatggcctatcagcggcgagtggagtagcgacgggcacccagcgaagccaatcagagatggaagtagtgctctgagggtgggcgccgcttggtaccaccctcctcgccctcggtgtcctggagaaaggcggaaggaatgcggacctttttgaagtgacggacgcgccagcctatcaggggcgagctcaagagggcggggcggaagactgcaggaatgaaatggattgacagaccaaataactaatgagaggcttgattgagaacctacccgactatcagaggacctgtccgggaagagaaatggggctacgtccagacagaatctcgctctgttgcctgggctggagtgcagtggcactgtatccggaattggggggttcttggtctcactgacttcaagaatgaagccacggacccttgcgagatgggggttccaccatgttggcccggctggtctcgaactgctgacctcaagtgacctgcctgtctcagcctcacaaatggctgggattacaggcacgagacaccgtgcctggccctgggaacatgtttacatggactttgttcactttttaaaacaaactgagggtaacttactagatctgtgaactaaagaaagagaaaaaaaaaaaaaaaaaa

SEQ ID NO: 25998 - DNA, 3357 bp, Homo Sapiens
ggcacgaggcggtctcgccccgcagccctcgatctcccgtgacttcctcggccaggccgcctgcgcctctgggaccatgttgcgctggctgcgggacttcgtgctgcccaccgcggcctgccaggacgcggagcagccgacgcgctacgagaccctcttccaggcactggaccgcaatggggacggagtggtggacatcggcgagctgcaggaggggctcaggaacctgggcatccctctgggccaggacgccgaggagaaaatttttactactggagatgtcaacaaagatgggaagctggattttgaagaatttatgaagtaccttaaagaccatgagaagaaaatgaaattggcatttaagagtttagacaaaaataatgatggaaaaattgaggcttcagaaattgtccagtctctccagacactgggtctgactatttctgaacaacaagcagagttgattcttcaaagcattgatgttgatgggacaatgacagtggactggaatgaatggagagactacttcttatttaatcctgttacagacattgaggaaattatccgtttctggaaacattctacaggaattgacataggggatagcttaactattccagatgaattcacggaagacgaaaaaaaatccggacaatggtggaggcagcttttggcaggaggcattgctggtgctgtctctcgaacaagcactgcccctttggaccgtctgaaaatcatgatgcaggttcacggttcaaaatcagacaaaatgaacatatttggtggctttcgacagatggtaaaagaaggaggtatccgctcgctttggaggggaaatggtacaaacgtcatcaaaattgctcctgagacagctgttaaattctgggcatatgaacagtacaagaagttacttactgaagaaggacaaaaaataggaacatttgagagatttatttctggttccatggctggagcaactgcacagacttttatatatccaatggaggttatgaaaaccaggctggctgtaggcaaaactgggcagtactctggaatatatgattgtgccaagaagattttgaaacatgaaggcttgggagctttttacaaaggctatgttcccaatttattaggtatcataccttatgcaggcatagatcttgctgtgtatgagctcttgaagtcctattggctggataattttgcaaaagattctgtaaaccctggagtcatggtgttgctgggatgcggtgccttatccagcacctgtggtcagctggccagctacccattggctttggtgagaactcgcatgcaggctcaagccatgttagaaggttccccacagctgaatatggttggcctctttcgacgaattatttccaaagaaggaataccaggactttacagaggcatcaccccaaacttcatgaaggtgctccctgctgtaggcatcagttatgtggtttatgaaaatatgaagcaaactttaggagtaacccagaaatgatgttgcattttttgctttagcctgataattgaaactttcaacaatctctggagtgactttttctcctcgaattgaaacaagtctatggcaaaagaagctgcatttttttcacaaaagggaagatggtaacaatggtcacttcaaacttttgggctaaattatatgtacacagaaatgttcaaaatcatagttttaatgtgttttgaaaaggccacacaattatactttatcttttcttaataatcctgcaaatctctgccctgaatccgaaatctgaaaatgtactggcttgaacaaaatttgttttgtgtgttagagttataaatcattaatctttatttcgggtggtttacgtttatgccagttcctttatatttaaatttcttgttttatatattttgaatgtctttatagatttctttaaatttccttatagaaccattaatagaaaatcattacatttaaaatataccttacagcaaaagcatccaaataagtatagggtttatgtccttatttttctttcagctgaatacgaatgaacacagtggtggaatttctgaagggaagtgatgaaattatatttatttcagtgggcacttttccattttaccactgtaccattatttggttcctggagttatacactaattttcagtatattactgttaaattaccaacacaaggcaatttatttgaaagattccgtttatcctgccattgctttgaaaagcagcaggaaacgaaatcctttgacttgtatcagcttctgcagagcatctttgttttcctttgtcctttgtttcctaccttttgaatcagattccgttttagtcaggaagacttcttgggaccattcttagtaacctgaaatttcttttttaattgcatgaagtggattgatcatgagcaaatgatgtgcttatttctccctcactgttgaatatctttgaacttgctgttttcaatatgggcagcacaaaggtgagagatacatattaatagtagtatgtattactcttatacattagatacctatatttaaatgaaaggcccaatttgtaaacatatacattcatattctctcttgccccaagttttaggaacatgttaggatataggagacttaatttataataatgagagcatttttttattttactaaagccatttttatagtcaactatcttttcttatttgtgtgattagaacttagaaaaatatttactagttgaagttattatcagtttttaatttagttcttaaactcatttcacttctaataatttctgttataaatttccagcattttaatgaaaatctaatgatgtaataggcattttctttatttgaacctacctcttttattttctgaaccaaagagaaagatggactggtgtttgtgaaacatttttaaaaatgtagtttcatttatattagttatgtttgataaatgtctcagtatttttataatatgataagcctgggattctacttttagggttatttgtacttttgagtaatatataaagtgacaatattaaggtacatgatcagctctttctatttttactcgtaaaaattatggaaatgaataattttgctaacaactttgaaatttcaaacttctggaaaatatgaaaatattcattgttcattatgaatttaaattgtaaggtatgaatgtgatttgtctgtacatcttgtatcttttccaaaaaatgattctgtatcttttggaaaaaagccgagagttgaagatagtatatttctggtagtactgaatatttacttacagtttctatcaaaaatatatatttgtttctaaaaaaaaaaaaaaaaaaaaa

SEQ ID NO: 25999 - DNA, 4183 bp, Homo Sapiens
ggcacgaggagctgtccgggtggggagcccgcactaccttcttcctcttcctcctcctcctccgggtgaggggagcgaaggttgggggtccccgagcccatggaccaggaggaggcggaggccgccgagagccggggccccgctatgtggccctgagccccgtgtactggttctgcctgtctggagggccatggagaagaggctgggagtcaagccaaatcctgcttcctggattttatcaggatattattggcagacatctgcgaagtggttgagaagcctgtacctgttttatacttgcttttgcttcagcgttctgtggttgtcaacagatgccagtgagagcaggtgccagcaggggaagacacaatttggagttggcctgagatctgggggagaaaatcacctctggcttcttgaaggaaccccctctctccagtcatgtttggctgcctgctgccaggactctgcctgccatgtcttttggtggctagaagggatgtgcattcaggcagactgcagcaggccccagagctgccgggcttttaggacacactcctccaattccatgctggtgtttttaaaaaaattccaaactgcagatgatttgggctttctacctgaagatgatgtaccacatcttctggggctaggttggaactgggcatcttggaggcagagcccacccagagctgcactcagacctgctgtatcttccagtgaccagcagagcttaatcaggaagcttcagaagagaggtagtcccagtgacgtagttacacctatagtgacacagcattctaaagtgaatgactccaacgaattaggtggtctgactaccagtggctctgcagaggtccacaaggcgattacaatttccagtcccctaaccacagacctgactgcagagctgtctggtgggccaaagaatgtatcagtgcaacctgaaatatcagagggtcttgctactacgcccagcactcaacaagtaaaaagttctgagaaaacccagattgctgtcccccagccagtggctccctcctacagttatgctacccctaccccccaggcctctttccagagcacctcagcaccatacccagttataaaggaactggtggtatctgctggagagagtgtccagataaccctgcctaagaatgaagttcaattaaatgcatatgttctccaagaaccacctaaaggagaaacctacacctacgactggcagctgattactcatcctagagactacagtggagaaatggaagggaaacattcccagatcctcaaactatcgaagctcactccaggcctgtatgaattcaaagtgattgtagagggtcaaaatgcccatggggaaggctatgtgaacgtgacagtcaagccagagccccgtaagaatcggccccccattgctattgtgtcacctcagttccaggagatctctttgccaaccacttctacagtcattgatggcagtcaaagcactgatgatgataaaatcgttcagtaccattgggaagaacttaaggggcctctaagagaagagaagatttctgaagatacagccatattaaaactaagtaaactcgtccctgggaactacactttcagcttgactgtagtagactctgatggagctaccaactctactactgcaaacctgacagtgaacaaagctgtggattacccccctgtggccaacgcaggccccaaccaagtgatcaccctgccccaaaactccatcaccctctttgggaaccagagcactgatgatcatggcatcaccagctatgagtggtcactcagcccaagcagcaaagggaaagtggtggagatgcagggtgttagaacaccaaccttacagctctctgcgatgcaagaaggagactacacttaccagctcacagtgactgacacaataggacagcaggccactgctcaagtgactgttattgtgcaacctgaaaacaataagcctcctcaggcagatgcaggcccagataaagagctgacccttcctgtggatagcacaaccctggatggcagcaagagctcagatgatcagaaaattatctcatatctctgggaaaaaacacagggacctgatggggtgcagctcgagaatgctaacagcagtgttgctactgtgactgggctgcaagtggggacctatgtgttcaccttgactgtcaaagatgagaggaacctgcaaagccagagctctgtgaatgtcattgtcaaagaagaaataaacaaaccacctatagccaagataactgggaatgtggtgattaccctacccacgagcacagcagagctggatggctctaagtcctcagatgacaagggaatagtcagctacctctggactcgagatgaggggagcccagcagcaggggaggtgttaaatcactctgaccatcaccctatcctttttctttcaaacctggttgagggaacctacacttttcacctgaaagtgaccgatgcaaagggtgagagtgacacagaccggaccactgtggaggtgaaacctgatcccaggaaaaacaacctggtggagatcatcttggatatcaacgtcagtcagctaactgagaggctgaaggggatgttcatccgccagattggggtcctcctgggggtgctggattccgacatcattgtgcaaaagattcagccgtacacggagcagagcaccaaaatggtattttttgttcaaaacgagcctccccaccagatcttcaaaggccatgaggtggcagcgatgctcaagagtgagctgcggaagcaaaaggcagactttttgatattcagagccttggaagtcaacactgtcacatgtcagctgaactgttccgaccatggccactgtgactcgttcaccaaacgctgtatctgtgaccctttttggatggagaatttcatcaaggtgcagctgagggatggagacagcaactgtgagtggagcgtgttatatgttatcattgctacctttgtcattgttgttgccttgggaatcctgtcttggactgtgatctgttgttgtaagaggcaaaaaggaaaacccaagaggaaaagcaagtacaagatcctggatgccacggatcaggaaagcctggagctgaagccaacctcccgagcaggcatcaaacagaaaggccttttgctaagtagcagcctgatgcactccgagtcagagctggacagcgatgatgccatctttacatggccagaccgagagaagggcaaactcctgcatggtcagaatggctctgtacccaacgggcagacccctctgaaggccaggagcccgcgggaggagatcctgtagccacctggtctgtctcctcagggcagggcccagcacactgcccggccagtcctcctacctcccgagtctgcgggcagctgctgtcccagcatctgctggtcatttcgccctgacagtcccaaccagaacccctgggacttgaatccagagacgtcctccaggaacccctcaacgaagctgtgaatgaagaggtttcctctttaaacctgtctggtgggcccccagatatcctcacctcagggcctcctttttttgcaaactcctcccctcccccgagggcagacccagccagctgctaagctctgcagctccccagtggacagtgtcattgtgcccagagtgctgcaaggtgaggcctgctgtgctgcccgcacacctgagtgcaaaaccaagcactgtgggcatggtgtttccctctctggggtagagtacgccctctcgctgggcaaagaggaagtggcacccctcccctcaccacagatgctgagatggtagcatagaaatgatggccgggcgcggtggctcacgcctgtaatcccagcactttgggaggccgaggcgggcggatcatgaggtcaggagatcaagaccaccctggctaacacggtgaaaccccatctctactaaaaataaaaaaaaaaattagccgggtttggtggcgtatgcctgtaatcccagctactcgggaggctgaggcaggagaattgcttaaacctgggaggtggaggctgcagtgagccaagatcgtgccactgcactccagcctgagtgacagagcaagactccgtcaaaaaaaaaaaaaaaaaaaaaaaaaaaaaaaaaaaaaaaaaaaaaaaaaaaaaa

SEQ ID NO: 26000 - DNA, 2308 bp, Homo Sapiens
gggataatccaacagctaaatcaccagtttccaagggcatttgcatcacctatggaaagcatcggatccttatacaccagatgttcttgacagctcatcccgtcattcccccctgcacaaaagttgctataccagcggacaagcaagacaactactgagcttcttttgattgtcaagtagatataatatcactgccagcaaaacagcacaaaaagtgtctcttcacagtatcactaccagttgggactatgctaagtaaatcagcttgcctagatgaggaccccttctattcttgggtagccaggatttgaaggagatactctgacctgtgccagtggtaagtgactaatacttttacacactgaactggtcctggaaactgagatgtcttctttgtaagtgaagaatatacaacataatcttgaagaacggcacagtggtatgggccacaagcatactttatgtgtgtaacggactgaaagacaaattaatcttggtgaaaggatttttcatctcttatttctatttgccagtgttagtcagtgttctgctggcttagattattacctttttctggttccttactgtgttttattctgatgggtcctagaaatccctctcctgaccacttgtcagaatcagaaagtgaggaagaagaaaatattagttacctaaatgagagttctggggaagagtgggattcctctgaagaagaggactctatggtgcccaacttatcgcctcttgagagtcttgcctggcaggttaagtgccttttaaaatattccacaacttggaaacctttaaatcctaattcctggttgtatcatgctaaactgttggatccaagcacaccagtccatatacttcgagagataggtctaagactctcccattgttcccattgtgtccccaaactggaaccaattcctgaatggccccctctggcctcttgtggagtcccaccttttcaaaagcctcttacaagtcccagccggctctctagagatcatgccactctaaatggagcactgcaatttgccaccaaacagctaagccgaacattgagtagagccactcccatacctgaatacctaaaacagatccctaattcatgtgtttctgggtgttgctgtggctggctgactaaaacagttaaggaaacaactcgtactgaacccatcaacactacttattcttacactgacttccaaaaggcagttaacaaactcctaactgcatcactgtaaagatctaccatttgctctgatatctctgatgttgctaattgagaaagtggtacaaagttagtcattacacagcccactaatgccttctcagtcaaactctcttatgccctggcaagccaatgaggataccctttgacaaaccctgtggataaaatgataatatcaaggtcaggcatggtggctcacacctgtaatccagcactttgggaggctgaggcgggtggatctgctgaagtcagaagtttgagaccagccttgccaacacagggtttcaccgtgttagccaggatggtcttgatctcctgacctcgtgatccacctgcctcggcctcccaaagtgctgggattgaacccttctaattttaaagaaccttgttattagaaaatctcagcctaatacaatctgaagttaagagttttagcagcattgtttttctaagtagatttagctatagattttcttctggccaaacaaggaagagtatatgcccttgtaaatgagtcttgttttgtttatttaaatagtcagtcaaaacgtagaaatcagtatacgtaaaataaaatgcatgagactattaaatcttttcatatactctacaaataaaatgaaatctgtgtgtggtcctggttgactgggcatctaaagggaatcagaaaagagattgtgaaaagttatatatatatcctcttccttattttagttttgctttttcctattttccataattaagtgccgtttacaaagtggcatcaaaaaattgaagcaggccaggcatggtggctcatgcctgtaatcccaacagtttgggaggctgagggcaggtggatcacttgagatcaggagttcgtgaccagcctggccaacatggtgaaagcccatctctactaaaaatataaaaattagccgggcgtggtggcatgtgcctgtagtcgcagctacttgggaggctaagacaggagaattgcttgaacctgggaggtggaggttgcaatgagctgagatcgcgccactgcactccagcctgggcaacagtgagacaccgtcccaaaaaaaaaaa

SEQ ID NO: 26001 - DNA, 2500 bp, Homo Sapiens
gggggagtgagggtagcacgctgagctgaaggctgtgcggagcggcgcggcacagagcctgttgttgagctcagtatgtcgtgggaatccggggccgggccaggtctaggttcccaggggatggatctcgtgtggagtgcgtggtacggaaagtgcgttaaagggaaagggtcgttgccactctcggcccacggcatcgtggtcgcctggctcagcagggccgagtgggaccaggtgacggtttatctgttctgtgacgaccataagttgcagcggtacgcgcttaaccgcatcacggtgtggaggagcaggtcaggcaacgaactccctctggcagtggcttctactgctgacctgatacgctgtaagctcttggatgtaactggtggcttgggcactgatgaacttagactgctctatggcatggcattggtcaggtttgtgaatcttatctcagagaggaagacaaagtttgccaaggtccccctcaagtgtctggctcaagaggtaaatattccggattggattgttgaccttcgccatgagttgacccacaagaaaatgccccatataaatgactgccgcagaggctgctactttgtcctggattggctccagaagacctattggtgccgccaactggagaacagcctgagagagacctgggagttggaggagttcagggaagggatagaggaagaggatcaagaggaagataagaacattgttgttgatgacatcacagaacagaaaccagagcctcaggatgatgggaaaagtacggagtcagatgtaaaggccgatggagacagcaaaggcagcgaagaggtggattctcattgcaaaaaggccctgagtcataaagagctatatgaaagagcccgagaactgctggtatcatacgaagaggagcagtttacggtgctggagaaatttaggtatttacctaaggccattaaggcgtggaataacccgtccccacgtgtagaatgtgtcctggcagagctcaagggcgttacatgcgagaacagggaggctgtgctggatgcttttctggatgatggcttccttgtccccacatttgaacagttggcagctttgcagatagaatatgaagatggtcagactgaggtccagagaggggaaggtactgacccaaagtcacacaaaaacgtggacttgaatgacgtcctggtgccaaagccgttctctcagttctggcagcccctgctcaggggcctgcactcccagaacttcacgcaggccctattggagaggatgctctctgaactgccagccttggggatcagcgggatccggcctacctacatcctcagatggaccgttgaactgatcgtggccaacaccaagactggacggaatgctcgccgattttctgcaggccagtgggaagcaagaaggggctggaggctgttcaactgctccgcctcccttgactggccccggatggttgagtcctgcttgggctcaccttgctgggccagcccccaactccttcggatcatcttcaaagccatggggcagggcctgccagacgaggagcaggagaagctgctgcgcatctgttccatttatacccagagtggagaaaacagcctggtgcaggagggctctgaggcctcccccattgggaagtctccatatacactagacagcctgtattggagcgtcaagccagccagctccagcttcgggtctgaagcaaaggcccagcaacaggaggagcagggcagtgttaatgatgtcaaggaagaggagaaggaggagaaagaggtcttgccagaccaggtagaggaggaggaagaaaatgatgaccaagaggaggaagaggaggatgaagatgatgaagatgatgaagaggaagacagaatggaggtggggcctttctctacagggcaagagtcccccactgccgagaatgctaggcttctggcccagaaaagaggagctttgcagggctctgcatggcaggttagctcagaagacgtgcgatgggacacatttcccctaggccgaatgccaggtcagaccgaggacccagcagagctcatgctggagaattatgacaccatgtatcttttggaccagcctgtgctagagcagcggctggaaccctcaacatgcaagactgacaccttgggcctgagctgtggtgtcggcagtggcaactgcagcaacagcagcagcagcaacttcgagggccttctctggagccaggggcagctgcatgggctcaaaactggcctgcagctcttctgatggccatccctggtgcaagtgttcatccagccgtgccagggcaacagcccaccccctagtacaactgatgctccctgagacaacctgggagacagcctggatcagccacatcaactcagttgtccaccacaggggaattttgaatgtcttttgtttttgttttgttttgaaaaataataaacaggcacccaaaaaaaaaaaaaaaaaaaaaaaaaaaaaa

SEQ ID NO: 26002 - DNA, 3508 bp, Homo Sapiens
gttccctcggcggctgccggcgtagtgagcccgccgccgtggagtgtagcggagagggctcgccgtcctcctccgtttctcgctgcttcgggacgcgctctctgcggctctgtgagcgcccctgagcgccggcagcggccgcggtgggttcttcaggttatcttatgatgaggctttgtatggtaatgatcccttggaaggcttccatgaagtaaaccttgcttcacctacttctccggaccttcttggtgtgtatgaatcaggaactcaagagcagactacctcaccaagtgtcatctaccggccacacccttcagctttatcctctgtacctatccaggcaaatgcattagatgtttctgaacttcctacacaacccgtgtattcatcccccagacgtttaaattgtgcggaaatatctagtatcagctttcatgttacagacccagccccttgctctacctctggagtcacagctggattaactaaattaactacaagaaaggacaactataatgcagagagagagtttttacagggtgctactataacagaggcttgcgatggcagtgatgatatttttgggttgagtactgatagtctgtctcgtttacgaagcccatctgttttggaagttagagaaaagggctatgaacgattaaaagaagaactcgcaaaagctcagagggaactgaagttaaaagatgaagaatgtgagaggctttcaaaagtgcgagatcaacttggacaggaattggaagaactcacagctagtctatttgaggaagctcataaaatggtgagagaagcaaatatcaagcaggcaacagcagaaaaacagctaaaagaagcacaaggaaaaattgatgtacttcaagctgaagtagctgcattgaagacacttgtattgtccagttctccaacatcacctacgcaggagcctttgccaggtggaaagacaccttttaaaaaggggcatacaagaaataaaagcacaagcagtgctatgagtggcagtcatcaggacctcagtgtgatacagccaattgtaaaagactgcaaagaggctgacttatccttgtataatgaattccgattgtggaaggatgagcccacaatggacaggacgtgtcctttcttagacaaaatctaccaggaagatatctttccatgtttaacattctcaaaaagtgagttggcttcagctgttctggaggctgtggaaaacaatactctaagcattgaaccagtgggattacaacctatccggtttgtgaaagcttctgcagttgaatgcggaggaccaaaaaaatgtgctctcactggccagagtaagtcctgtaaacacagaattaaattaggggactcaagcaactattattatatttctcctttttgcagatacaggatcacttctgtatgtaacttttttacatacattcgatacattcagcagggactcgtgaaacagcaggatgttgatcagatgttttgggaggttatgcagttgagaaaagagatgtcattggcaaagctgggttatttcaaagaggaactctgatgctctgcgtgggaccatgcctgaactccccgaataactgaaaaatggctgaatatttttatggttacttgatatttatttccaaggagtgagcctaagacttttttccccttttgcaaattgctctaagaagtaccatgatttcttttaaactgatctatgctgtgtttgcttattctttagttgaacacactatgaagaattccaggtgtactagtgaatgtaatttatagttgccaaaaaaaaaaaaacctgaaataaataaatgttagattgaatgtgtgtacattttctcttctagctctgacatggcatttagggttagcagaatgtattaaatagtaattttcaaactacacagtagcttccttccttgtgagaggcaagaaagaagtctgagtggatagtactcactttccaaggcccccacctctagaatggctttatttttatctgttttctatattgggtttcaaaaaagattttatttgaagaaatacttctgctgctacaaagtttgaaagttactattttaattattctgctctctgtaactgaaagaatccctttattttggttattcattaaaatataatagaaggcagtcagattttatcccagagatgtattcctgagtgtcttgatatagtgtattcatgttttatatgtgttgaccactatattgtcattggagggacatagatgtaaatgagtttgacgtgtgtcaaaggggtttaaaggggtgtggattgaatgaatggtacgtgcgaagtatatgctgattatagaaccacttgatctctgcattccaaattgtaaaactgactcaactggagaaattataacaaagaggtttgtggtagaaatgtaataagtatagaaaagcaaaaagaaaagagaaactgctttagtttctgtttagagaaagctgctgttaatatttttggatagtagcctttcagctttcagatattttctacttacatatgcatatttttgaaacaaaaagtaggctttttttttgctttttaaacctaaacattaaatatattttcccttgggtaaacctacacatcctaatccctgtttatagaattttaacataatttaattgtgtttggagatgaggtggttttcagtttatttttcatattataatgctgtgacgagtatccttatctgtacacttctgaacattgtggagttctttcatgtggatgcctggagataaaattgtgtcgagatatatatgtatttttaaatgtttgatctgcattgctagattgccatccagaaaagttaatcaatttgtattcacagcagcagtgtacaagagggctggttttctgaagataacatttttttcagtcctgttcagaggtttggtcaatcttacctgtagatgacttcagccaccaggctggatgggagcccacagacaaaaggacattggtgtatgttatggtgaaaaccatcagtaccatgcctagctcaagaatgtgaaattgaacctgaaaaaaactttgaacctacaattttatgttctgaaaatagttattctaatgtgagggcattaataagaatatgtaccatcaaagcttcagaagattttccatacaaactaaaatcacttttggagaaagtacctaaataaaaagagaaacaaatccaggagatactgtatggtttgaaagaaaggtaatcaaatactcagaaaaagtttgttgatgacttaaaaaggataaataaaaagtaagactaaagaaaatcagtatacccattaataataaatctttagtaatctataaggggaagaatgcttttcaaccttatacactagaagcatgctctttaaaattaatgcaacaggatgacgacttgatgtagaaactatatgtggaattatagattaaaatgtgattgaaacataaaaaaaaaaaaaaaaaa

SEQ ID NO: 26003 - DNA, 2529 bp, Homo Sapiens
cttctgattggctccttgcccttctagcactgtgggtcagcgtttctcccagcgggatgcccgccttcaccttgtgtacttcccatcccagagctgcagtcagcccctccttcaggactccagacctacgtctaccagtggccctggacgctcctgctcctggctgtcagcggcttctgtaactttgcccagaatgttatcgccttcagcatcctcaacctcgttagcccgctgagctactcggtcgccaatgccaccaaaagaatcatggtcatcacggtgtccctgatcatgctgcgcaacccagtcaccagcaccaacgtcctgggcatgatgaccgccatcctgggggtcttcctctataacaagaccaagtacgatgcaaaccagcaagccaggaagcacctcctccccgtcaccacagcagacctgagcagcaaggagcgtcaccggagcccactggagaagccccacaacggctcctcttcccccagcacggggactatcagtacggcgcaacaacatcttaacagaccacttccaatacagccggcagagctacccaaactcgtacagtttgaaccgctatgatgtgtagagtccaaaggacaggaccagactgttggtgactccttccccggcccccacagcagtatcagaaacttctgacaatcagtgaatgtacaacccagccgaggggacggtgcataactctccatcagaagccctggggttcctggccccccgtgagccgcaggaggatgcgttgcctgcagtgcagacggccgtgagctctgggcaaacctaaacagagaccagtgtctcatgctctttcttcctggagtctgtcatctgagggccgtgtccctgcggagatcttggccacgttgtacctttccatgtggaattattccccaagcagtgtagctcagagcacttgtgtctgcattccagataacattcaggacctgtgtgaaaagctggggtcactgtggctgtagaccatgaactggcagtgggggtgtccagggcggtgcttgagaacgtcagactggctagtttaattccctggcgcagatacgcataggaccaacagggtcaccaagcagacagggagcccgcgagaatcattcaaaacatccccagccacagagatggatccagtttcctggtcatccccttagcagttcacaagttcctggcaaatgttccaaagcaaaaagcgattgcaattagcatccagttcctgcagcctggtgctctgccctgcacgtcagggttggcatccacccagatccagatggaagggaaacttctctcttctcctttgcctcctcttccctcaccagagcagggcgcttctcttggggtggtgagaaggatcttcgagaaatcgtgttcagtatttcaagctctatttctgtggcacatgtcttttgagaggcatcttcacctcttctgtgatgacttggtatgttgtttggtagagagatcttgattttcggaggatcttgcatttttctagggaatattttgtagttgtgtgtgtgtgtttttgccttggtccccattatgggatgcattaggactggcctatgcatcgaaaatctttttgtttgtaaacgtttaaaaacaaagttccccggccaggcacggtggctcacacctgtaatcccagcactttgggaggccaagatgggcggatcacgaggtcaggagttcgagaccagcctggccaacatggtgaaaccccatctctactaaaaatacagaaattagccgggcatggtgtcgcgtgcctgtagtcccagctcctcaggctgctgaggcaggcgaattgcttgagcctgggaggcagaagttgtggtgagccgagattgtgcactccagcctgggtaacagagcgagactccatctcaaaaaaaaaaacaaaacaaaaccaagttcccactggtgatgcctgtctgacacgttttggtatttagtaggaaatgaagtgtttcgaagcttcgagagaagcttcaaaattgtcacaattgctgaaaacagaatgaatcgtgaacattatctcaatattttgtataatagacaagaccacagtgttttggttccctgacctgtttttgtgtttatgttaggatctgaatcatgttctgggtaaggggacgaggagcgaacactgcactaagatttggtttgccaaatcagattctttggtcaagagtcagtttggggccaggcgtggtggctcatgcctgtaatctcagcactttgggaggctgaggtgggtggatcactggagtttgagaccaccctggccaacatggtgaaaccccatctctactaaaacaaaaattagccaggcatggtggcacctgcctgtaatcccagctacttgggaggctgaggcaggagaatcacttgagcccaggaggtggaggtttcagcgagctgagatcacaccactgcactccagccttggtgacagagtgagactctgtctcaaaaaaaaaaaaaaaaaaaaaaaaa

SEQ ID NO: 26004 - DNA, 1354 bp, Homo Sapiens
ggggggactccaggaaaacccatggccatgaggttgatcctgttttttggtgccctttttgggcatatctactgtctagaaacatttgtgggagaccaagttcttgagattgtaccaagcaatgaagaacaaattaaaaatctgctacaattggaggctcaagaacatctccagcttgatttttggaaatcacccaccaccccaggggagacagcccacgtccgagttcccttcgtcaacgtccaggcagtcaaagtgttcttggagtcccagggaattgcctattccatcatgattgaagacgtgcaggtcctgttggacaaagagaatgaagaaatgctttttaataggagaagagaacggagtggtaacttcaattttggggcctaccataccctggaagagatttcccaagaaatggataacctcgtggctgagcaccctggtctagtgagcaaagtgaatattggctcttcttttgagaaccggcctatgaacgtgctcaagttcagcaccggaggagacaagccagctatctggctggatgctgggatccatgctcgagagtgggttacacaagctacggcactttggacagcaaataagattgtttctgattatggaaaggacccatccatcacttccattctggacgccctggatatcttcctcctgccagtcacaaaccctgatggatacgtgttctctcaaaccaaaaatcgtatgtggcggaagacccggtccaaggtatctggaagcctctgtgttggtgtggatcctaaccggaactgggatgcaggttttggaggacctggagccagcagcaacccttgctctgattcataccacggacccagtgccaactctgaagttgaagtgaaatccatagtggacttcatcaagagtcatggaaaagtcaaggccttcattaccctccacagctattcccagctgctgatgttcccctatgggtacaaatgtaccaagttagatgactttgatgagctgagtgaagtggcccaaaaggctgcccaatctctgagaagcctgcatggcaccaagtacaaagtgggaccaatctgctctgtcatctaccaagccagtggaggaagcattgactggtcctatgattatggcatcaagtactcatttgcctttgaactgagagacacagggcgctacggcttcctcttgccagcccgtcagatcctgcccacagccgaggagacctggcttggcttgaaggcaatcatggagcatgtgcgagaccacccctattagggccctggggaagaaacaagagccattaaaatctctttggtttgaaaaaaaaaaaaaaaaaaaaaaaaaaaaa

SEQ ID NO: 26005 - DNA, 1292 bp, Homo Sapiens
agaaacgcccggcctgccgcggcggcgcgaggggcgggctttcaggctcccggcggctgcttgcgccccagcgcgcgcccaggcgccttggaatccccgtccttgggcccccgcaaggtccccggccgtgcgcgaggcagcatgatgaggcgcaccctggaaaaccggaacgctcaaacgaaacaactgcaaacagctgtctcaaatgtggagaagcattttggagaactgtgccaaatcttcgctgcctatgtgcggaaaactgccaggctgagagacaaagcagacctcctggtgaatgaaattaacgcgtatgctgctacagagaccccgcatttaaagctgggcctgatgaactttgcagatgagtttgccaaacttcaggattatcgacaagcagaggttgaaagacttgaagccaaagtagttgaacccttgaaaacttatgggaccattgtgaaaatgaaacgggatgacctcaaagcaacactcacagcaaggaatcgagaagctaagcaattaactcagttagaaagaacacgtcagcgaaacccatctgatcgacatgttatttcacaggcagaaacggaattacagagagctgcaatggatgctagccgaacaagtcgtcatctggaggaaactattaacaactttgaaaggcagaaaatgaaggatataaagactatattttctgaatttatcacaatcgaaatgttatttcacggcaaagctttagaggtctacactgctgcctaccagaatatacaaaacattgatgaagatgaagatttagaggttttccgaaattctctgtatgcaccagattattcatctcgtttagatattgtaagagcaaattcaaagtcacctcttcagagatcactgtcagctaagtgtgtatctggaacaggacaggaggctggctgggccgcaacttgccaaaccctgatctagagagctatgcccttttcatatctagccttcagaatataaaattcaacaaacttattttcaagatacaacttttaggtatccacttgtcgactaagaaaggatcaacaagcagaagatgatgaggatgacgagttagatgttacagaagaagaaaattttcttaagtaaactacacatttccattttcatcataaatgacttgaaatccacaatgactaaattgtagaactttatactcactttgctatgttaagcctcaaagtgaagtccaactggaaacagaaaaataattaaaggaaacttatgctgaccaaaaatgaaaaaaaaaaaaaaaa

SEQ ID NO: 26006 - DNA, 1054 bp, Homo Sapiens
gtgcgcgtccgtagtggcggctggcgctagggaactgcagggtctagggtgttgttggagtggcagttggtccgaatttctcccgaagcccgcggaggagcgggtaagagccccgcgaatccggccccaacctcgggaacgggatgggaggcggccctggccgcaagccccgcgctgctagcgggtccaccgcgtcgtagccgacagccgccgttcttcctcgcagcgcgccgcgattcaccagcctggtcccttctgcggagagcgatgccgcttcccgacaccatgttctgcgctcagcagatccacattcccccggagctgccggacatcctgaagcaattcaccaaggctgccatccgcacccagccggccgacgtgctgcggtggtccgcgggctatttttcagctctgtcgagaggagatccacttcctgtaaaggacagaatggaaatgcccacggcaacccagaaaacagacacaggcctgactcaaggactcctgaaagttttgcacaagcagtgtcaccacaagcggtatgtggaattaacagatcttgagcagaagtggaagaacttgtgcctgccgaaggaaaaattcaaagcgctcttacaactggatccttgtgaaaacaaaatcaagtggataaactttttagcgcttggatgcagcatgcttggtgggtccttgaacactgcgctgaagcacctgtgcgagatcctcacggacgatcgggagggcgggcccgctcgcatccccttcaagacgttttcctacgtttaccgctacttggccagattagactcagatgtgtctcccttggagacggaatcctaccttgcctctctaaaggaaaatatagacgccaggaagaacggcatgataggtctttcagatttcttctttccaaagaggaaacttttagaaagcattgaaaactctgaagatgtaggccattaatacagagaagaatacattttaatgtcaaaatagtgctctttaaaattctggcaccaaatacaacttaccctgaatcacaaaaaaaaaaaaaaaa

SEQ ID NO: 26007 - DNA, 3415 bp, Homo Sapiens; identical to SEQ ID NO: 23215

SEQ ID NO: 26008 - DNA, 2130 bp, Homo Sapiens
gtgagacgctgatgggaggatggacgtactggtgtctgagtgctccgcgcggctgctgcagcaggaagaagagattaaatctctgactgctgaaattgaccggttgaaaaactgtggctgtttaggagcttctccaaatttggagcagttacaagaagaaaatttaaaattaaagtatcgactgaatattcttcgaaagagtcttcaggcagaaaggaacaaaccaactaaaaatatgattaacattattagccgcctacaagaggtctttggtcatgcaattaaggctgcatatccagatttggaaaatcctcctctgctagtgacaccaagtcagcaggccaagtttggggactatcagtgtaatagtgctatgggtatttctcagatgctcaaaaccaaggaacagaaagttaatccaagagaaattgctgaaaacattaccaaacacctcccagacaatgaatgtattgaaaaagttgaaattgctggtcctggttttattaatgtccacttaagaaaggattttgtatcagaacaattgaccagtcttctagtgaatggagttcaactacctgctctgggagagaataaaaaggttatagttgacttttcctcccctaatatagctaaagagatgcatgtaggccacctgaggtcaactatcataggagagagtataagccgcctctttgaatttgcagggtatgacgtgctcaggttaaatcatgtaggagactgggggacccagtttggcatgctcatcgctcacctgcaagacaaatttccagattatctaacagtttcacctcctattggggatcttcaggtcttttataaggaatctaagaagaggtttgatactgaggaggaatttaagaagcgagcatatcagtgtgtagttctgctccagggtaaaaacccagatattacaaaagcttggaagcttatctgtgatgtctcccgccaagagttaaataaaatctatgatgcattggacgtctctttaatagagagaggggaatccttctatcaagataggatgaatgatattgtaaaggaatttgaagatagaggatttgtgcaggtggatgatggcagaaagattgtatttgtcccagggtgttccataccattaaccatagtaaaatcagatggaggttatacctatgatacatctgacctggctgctattaaacaaagactatttgaggaaaaagcagatatgattatctatgttgtggacaatggacaatctgtgcacttccagacaatatttgctgctgctcaaatgattggttggtatgaccctaaagtaactcgagtcttccatgctggatttggtgtggtgctaggggaagacaagaaaaagtttaaaacacgttcgggtgaaacagtgcgcctcatggatcttctgggagaaggactaaaacgatccatggacaagttgaaggaaaaagaaagagacaaggtcttaactgcagaggaattgaatgctgctcagacatccgttgcatatggctgcatcaaatatgctgacctttcccataaccggttgaatgactacatcttctcctttgacaaaatgctagatgacagaggaaatacagctgcttacttgttgtatgccttcactagaatcaggtctattgcacgtctggccaatattgatgaagaaatgctccaaaaagctgctcgagaaaccaagattcttttggatcatgagaaggaatggaaactaggccggtgcattttacggttccctgagattctgcaaaagattttagatgacttatttctccacactctctgtgattatatatatgagctggcaactgctttcacagagttctatgatagctgctactgtgtggagaaagatagacagactggaaaaatattgaaggtgaacatgtggcgtatgctgctatgtgaagcagtagctgctgtcatggccaaggggtttgatatcctgggaataaaacctgtccaaaggatgtaatccttcataggtttgaacactgtgtgtttttaccaaagtggccattggcactgtttgcttttttacaatcatgtggacacaagcataagtaaagaaaatttgtcaaccaaaaaaaaaaaaaaaaaaaa

SEQ ID NO: 26009 - DNA, 1600 bp, Homo Sapiens
gtctggttcaccctgacgtcaagtggggcccggggaagtcgcagatgactcgagccgagtggcaggtggcggaggccacagcgctggtgcacacgctggacggctggtccgtggtgcagacaatggtcgtgtccaccaaaacgccggacaggaagctcatctttggcaaagggaactttgagcacctgacagaaaagatccgagggtctccagacgtcacgtgcgtcttcctgaacgtggagaggatggctgccccgaccaagaaagaactggaagccgcctggggcgtggaggtgtttgaccgcttcacggtcgtcctgcacatcttccgctgtaacgcccgcacgaaggaggcccggcttcaggtggccctggcggagatgccgctgcacaggtcgaacttgaaaagggacgtcgcccacctgtaccgaggagtcggctcgcgctacatcatggggtcaggagaatccttcatgcagctgcagcagcgtctcctgagagagaaggaggccaagatcaggaaggccttggacaggcttcgcaagaagaggcacctgctccgccggcagcggacgaggcgggagttccccgtgatctccgtggtggggtacaccaactgcggaaagaccacgctgatcaaggcactgacgggcgatgccgccatccagccacgggaccagctgtttgccacgctggacgtcacggcccacgcgggcacgctgccctcacgcatgaccgtcctgtacgtggacaccatcggcttcctctcccagctgccgcacggcctcatcgagtccttctccgccaccctggaagacgtggcccactcggatctcatcttgcacgtgagggacgtcagccaccccgaggcggagctccagaaatgcagcgttctgtccacgctgcgtggcctgcagctgcccgccccgctcctggactccatggtggaggttcacaacaaggtggacctcgtgcccgggtacagccccacggaaccgaacgtcgtgcccgtgtctgccctgcggggccacgggctccaggagctgaaagctgagctcgatgcggcggttttgaaggcgacggggagacagatcctcactctccgtgtgaggctcgcaggggcgcagctcagctggctgtataaggaggccacagttcaggaggtggacgtgatccctgaggacggggcggccgacgtgagggtcatcatcagcaactcagcctacggcaaattccggaagctctttccaggatgaacggacgcccacagaggcctgcggggtgggggcattgctgcctggggagctgaggcgttaccgctgtgttgggggcagcttggtgtcaggtgcagcagggtcctccttgtctggttctgcacccgtctcgctcccagccatttgctgggatgaccgtgcaggccggtgacacggccgcacctgccccaaagcgggccgcccgagcgtccactccaagcctgagcatccacacaattccagtgggccctcggtgcctgctgtgaactgctttccctcggaatgtttccgtaacaggacattaaacctttgattttaaaaaaaaaaaaaaaaaaaaaaaaaaaaaa

SEQ ID NO: 26010 - DNA, 2158 bp, Homo Sapiens
gaaggaagccttccgcctgcagccctataacggcgttgccctgcggccctgggacggcaactctgatgaccgggtcttgttggatctgtctgccttcctcaagaccattgcactgaatggtgtggaggacgtgcgaaccgtgctggagcactatgccctggaggatgacccgctggcggctttcaaacagcggcaaagccggctagagcaggaggagcagcagcgcctggccgagctctccaagtccaacaagcagaacctcttccttggctccctcaccagccgcttgtggcctcgctccaaacagccctgaactctgggcctcctcaaactcagtgcctgggtccagggccccagtgcttccagaccaagacttgggccaccacttgtccaataaagtacatcccagacgccacacctgctgtgtcccgagagtctccagatgggggcatcagggtgaggtccgggactcttgggtcatcgtcccacagtggctgatcggctgccaagcacagtgggggtgctttgttggatcagagcagatttttcaccctggtctcggaatctaaaaaccctcgctgtgtcttcctgtgtgttgcgtgatctgtgaaaaatacatctccctctgaccacagactcctcatctgtggagaagggaagagaggatggcacttggctttaaagacaggtagctgccaggctactgtggagagaatgtgttatgggcctagtgggcctctggtggaccagagattacccctctcaacaggccagctgctggttggctccagccagtgtggccctggggtaaagggggcctggagttgcttgacacgccagttgttcaaaagaagcaagaacttgggaatattttttttttttttttgagacagggtctcactgttgcccaggctggagcacagtggtgtaactatagctcactgcagtgttgaacttctgggctcagacaatcttcctgccttggcctccccaaatgctgagattataggagtgagccactctgcccaactacttttaattaaatagccacatgtgtctcctgtattgacagtaccactgtgtattaagagtatgagtcccagattgtgtaagttcaaatccaagctctaccacttctcggctggcttgtgatcctgtgcaagttactttacctctcagtgcctcggtttctacatttataaaataataactgggcaggcacagtggctcatggctgtcatcccaacacttcaggaggccgaggtgggaggatcgcctgaggccaggagttggagagcagcctgggcaacatgggaagagcctgtctcttgcggggggggggagaagaaagttcttgtctcaggctagctttggggaccaaatgaagcactcccatgtaggcactcaaatggaactatgtaaaccttaggcaaggcacctctgcctcagtttcctcatctctaaaatggggtgatggtagtatgttagcagagtggttgtgaggagtgaacgggacagtccgtatgtgggttatatgtatatattcccaggtgcttgctgttaccaggccatatgggttattcacagattgaaatatcttagctgggcacggtggctcacccctataatcccagcactttgggagaccgaggcgggtggatcacctgaggtcaggagttcgagaccagcctggccaacatggtgaaaccctgtctctactaaaaaaatacaaataaattagctgggattacaggcgtgtgccactgtcaggcctctgagcccaagccaagccatcgcatcccctgtgccttgcacatatacacccagatggcctgaagtaactgaagaatcacaaaagaagtgaaaaggccctgccccgccttaactgatgacattccaccattgtgatttgttcctgccccaccttaactgagtgattaaccctgcaaattttcttctcctggctcagaagcacccccactgagcaccttgcgaccccccactcctgcccgccctttgactgtaattttccattaccttcccaaatactataaaacagccccacccctatctcccttcgctgactcttttcggactcagcccacctgcacccaggtgaaataaacagctttattgctcacacaaaaaaaaaaaaaaa

SEQ ID NO: 26011 - DNA, 2514 bp, Homo Sapiens
cggaagggcagaatgggactccaagcctgcctcctagggctctttgccctcatcctctctggcaaatgcagttacagcccggagcccgaccagcggaggacgctgcccccaggctgggtgtccctgggccgtgcggaccctgaggaagagctgagtctcacctttgccctgagacagcagaatgtggaaagactctcggagctggtgcaggctgtgtcggatcccagctctcctcaatacggaaaatacctgaccctagagaatgtggctgatctggtgaggccatccccactgaccctccacacggtgcaaaaatggctcttggcagccggagcccagaagtgccattctgtgatcacacaggactttctgacttgctggctgagcatccgacaagcagagctgctgctccctggggctgagtttcatcactatgtgggaggacctacggaaacccatgttgtaaggtccccacatccctaccagcttccacaggccttggccccccatgtggactttgtggggggactgcaccgttttcccccaacatcatccctgaggcaacgtcctgagccgcaggtgacagggactgtaggcctgcatctgggggtaaccccctctgtgatccgtaagcgatacaacttgacctcacaagacgtgggctctggcaccagcaataacagccaagcctgtgcccagttcctggagcagtatttccatgactcagacctggctcagttcatgcgcctcttcggtggcaactttgcacatcaggcatcagtagcccgtgtggttggacaacagggccggggccgggccgggattgaggccagtctagatgtgcagtacctgatgagtgctggtgccaacatctccacctgggtctacagtagccctggccggcatgagggacaggagcccttcctgcagtggctcatgctgctcagtaatgagtcagccctgccacatgtgcatactgtgagctatggagatgatgaggactccctcagcagcgcctacatccagcgggtcaacactgagctcatgaaggctgccgctcggggtctcaccctgctcttcgcctcaggtgacagtggggccgggtgttggtctgtctctggaagacacgagttccgccctaccttccctgcctccagcccctatgtcaccacagtgggaggcacatccttccaggaacctttcctcatcacaaatgaaattgttgactatatcagtggtggtggcttcagcaatgtgttcccacggccttcataccaggaggaagctgtaacgaagttcctgagctctagcccccacctgccaccatccagttacttcaatgccagtggccgtgcctacccagatgtggctgcactttctgatggctactgggtggtcagcaacagagtgcccattccatgggtgtccggaacctcggcctctactccagtgtttggggggatcctatccttgatcaatgagcacaggatccttagtggccgcccccctcttggctttctcaacccaaggctctaccagcagcatggggcaggactctttgatgtaacccgtggctgccatgagtcctgtctggatgaagaggtagagggccagggtttctgctctggtcctggctgggatcctgtaacaggctggggaacacccaacttcccagctttgctgaagactctactcaacccctgaccctttcctatcaggagagatggcttgtcccctgccctgaagctggcagttcagtcccttattctgccctgttggaagccctgctgaaccctcaactattgactgctgcagacagcttatctccctaaccctgaaatgctgtgagcttgacttgactcccaaccctaccatgctccatcatactcaggtctccctactcctgccttagattcctcaataagatgctgtaactagcattttttgaatgcctctccctccgcatctcatctttctcttttcaatcaggcttttccaaagggttgtatacagactctgtgcactatttcacttgatattcattccccaattcactgcaaggagacctctactgtcaccgtttactctttcctaccctgacatccagaaacaatggcctccagtgcatacttctcaatctttgctttatggcctttccatcatagttgcccactccctctccttacttagcttccaggtcttaacttctctgactactcttgtcttcctctctcatcaatttctgcttcttcatggaatgctgaccttcattgctccatttgtagatttttgctcttctcagtttactcattgtcccctggaacaaatcactgacatctacaaccattaccatctcactaaataagactttctatccaataatgattgatacctcaaatgtaagatgcgtgatactcaacatttcatcgtccaccttcccaaccccaaacaattccatctcgtttcttcttggtaaatgatgctatgctttttccaaccaaaaaaaaaaaaaaa

SEQ ID NO: 26012 - DNA, 3042 bp, Homo Sapiens
cggcgatgtgcggatatgggataagaggaaacccagtacagcagtggaatatctagccgcccacctctccaaaatccatggcctggactggcacccagacagcgagcacattcttgctacctccagtcaagacaattctgtgaagttctgggattaccgccagcctcggaaatacctcaatattcttccttgccaggtgcctgtctggaaggccagatacacacctttcagcaatggattggtgactgtgatggttccccagctgcggagggaaaacagccttctcctgtggaatgtctttgacttgaacaccccagtccacaccttcgtggggcatgatgatgtggtcctggagttccagtggaggaagcagaaggaagggtccaaggactatcaactggtgacgtggtcccgggatcagaccttgagaatgtggcgggtggattcccagatgcagaggctttgtgcaaatgacatattagatggtgttgatgagttcattgagagtatttcccttctgccggaacctgagaagaccctgcacactgaagatacagatcaccagcacactgcaagccatggggaggaagaagccctaaaagaagatccccctagaaatctcctggaagagaggaaatcagatcaactggggctgcctcagaccttgcagcaggaattctccctgatcaatgtgcaaatccggaatgtcaatgtggagatggatgcggcagacaggagctgcacagtgtctgtgcactgcagcaaccatcgtgtcaagatgctggtgaagttccctgcacagtacccaaacaacgccgccccttccttccagtttattaaccccacaaccatcacatccaccatgaaagctaagctgctgaagatcctgaaggacacagccctgcagaaagtgaagcgtggccagagctgcctggagccctgcctgcgccagctcgtctcctgccttgagtcctttgtgaaccaggaagacagcgcttccagcaacccgtttgcactccccaactctgtcactccccccttaccgacgtttgcgcgggtgaccacggcttacgggtcgtaccaggacgccaacattccctttcctaggacttctggggccaggttctgcggagcaggttacctggtatatttcacaaggcccatgacaatgcatcgggcggtgtctcccacagagcctactccgagatctctctcagccttgtctgcttatcacactggcttgatcgcgcccatgaagatccgcacagaggcccctgggaaccttcgtttatacagtgggagccccactcgcagcgagaaagagcaggtctccatcagctccttctactacaaggagcggaaatcaagacgatggaaaagtaagcgtgagggatcagactctggcaatcgacagatcaaggctgctgggaaagtcatcatccaggatattgcttgcctcctgcctgttcacaaatcgctgggagagctgtacatattgaatgtgaatgatattcaggaaacatgtcagaagaatgccgcctctgccttgctcgttggaagaaaggatcttgtccaggtttggtcgctggctacggtagctacagatctttgccttggtccgaaatctgacccagatttggaaacaccctgggctcgacatccatttgggcggcagctgctggagtccctgttggctcactattgccggctccgggatgttcagacactggcgatgctctgtagcgtgtttgaagcccagtctcggcctcaggggctaccaaacccctttgggccttttcctaaccgttcttctaatcttgtggtgtcccatagtcgatatcctagctttacctcttctggttcctgctccagtatgtcagacccagggctcaacactggcggctggaacatagcgggaagagaggcagagcacttgtcctccccttggggagaatcctcaccagaagagctccgctttgggagtctgacctacagtgatccccgtgagcgagaacgcgaccagcatgataaaaataaaaggctcctggaccccgccaatacccagcaatttgatgactttaagaaatgctatggggaaatcctctaccgttggggtctgagagagaagcgagctgaagtgttgaagtttgtctcctgtcctcctgaccctcacaaagggatcgagttcggcgtgtactgcagccactgccggagtgaggtccgtggcacgcagtgtgccatctgcaaaggcttcacgttccagtgtgccatctgtcacgtggctgtgcggggatcgtccaatttctgcctgacctgtgggcacggtggccacaccagccacatgatggagtggtttcggacccaggaggtgtgtcccaccgggtgtgggtgccactgcctgcttgaaagcactttctgaacctacagaagttgggtattgtctgaaatcccagaggacccataagtgccggtgacaagctgtctgtcaggggagaggctccagaacctgggttcgtccccagtgagaccggaggatgatcccccaaggactgcgcagcatcagctcttggtgggcctctgccttctcttctgtttggccacctggtgtggatgtcactgtgtgaagataaggacagaagtgcagagctgcgctttgtgtgttgtctatgtcggctgagctaccaaggtggaagttttcatggagaaaagcacctggctccagggccagtgttacagtgttaccctgtaaggtgttagccttaaaccaccgagcagcgttctcttgatgccagtgcagagaccagagtcagatgcccgaggacagtgggtaggaatttcatcaacaaatggacctatggcatcatggctttagaagctggtacatttactgagctgatggacagtggccttctaaaatatgacacttaaattgtaaatatgcactgtacttaaggattcttaagatgtatttttttgttatttctcctccagctgctatcccttggctaataaaattctagtaatttgaaaaaaaaaaaaaaa

SEQ ID NO: 26013 - DNA, 2577 bp, Homo Sapiens
gtggaaaattttgtgcgtttggcgggtttcgctctcttcataagtattgatcattccgcagccctgcggaccggacacgtgaggaggtagtgacgccgacactgccagaacacactgctacaaggtcccagatggccacgtctctggattttaaaacttatgtagatcaggcatgtagagctgctgaggagtttgtcaatatttactatgagacaatggataaaagaagacgggcactaaccaggctgtatctggacaaggccaccttaatatggaatggaaatgctgtttcagggctggatgccctaaataatttttttgacacattgccttctagtgagttccaggtcaatatgttagattgccaaccagttcatgagcaagcaactcagtcccaaactacagttcttgttgtgaccagtggaactgtgaagtttgatggaaacaaacaacatttcttcaaccagaacttcctgctgactgctcagtccactcccaacaatactgtgtggaagattgcaagtgattgcttccgttttcaagattggtctagtagttaaaggggcaaaagtccattctcatttggtccattagttccagcaattgaaatttatgtgaattattttgattgtagaagcactataatatgtgctgaaactaaatttctttaatattttctattcctgtcagcaccttttctagcagctgccagtttggagcattgccctctaagagctttaaaactatttttttacatgccttatatacattccactaatgacattcttataataatattaaacacatgatcttggtactaacatactcactgtgaacccagcctattgcaaaaataaaatctttttataatattatctatgggatgtcagcacaatataacactctgggaagaagtggagttttttggttattaggttaattttctagtaaaacacgttgcctgttttcagttaacactggtaatgccattttaatatatggctttttcaaatcagttcagtgaaaatagtacagatttaggtttacataactactctgacatactggaattgcatatagagatgttcagtggtcgtttttcattttaagtaatttttgttttggcatttttttgtgtgaagtaaattaatcaactagagaggtgcaaaacgttctcagttgatatctgagtattgggtgcatttggtggcttaaaagcaaagcttcctaaaaagatttttcttggcagctccaggtctatacatttaggtaatgaatggtagtagaactaatagctttaacaggagaatagggaatgagaaatagaaatccaaggctgaagccaaaagtaaggagggtggccaaatggtaaactattggtacttgttttctacctcctaaaaatgtagcttatttttaggatttaaatcactaagtaaataagtatccttgccaagtgatcatgagtgtcatttttgttctaagactaatatttttagatctttttacttcacctcatacttatcaccaatgtatatctccatttattcaataacttactggggtaaaataacagcaataaacctaaccttttaacagggtctaacatgagagttggagtcaaagccattgttatcttttggtgacacccttaaattttaagtcttccagtcttccatgtgaactttaggcccaaagtttcttatgtatcacacatcccccaaataagtgattttttcccagtgctttgtactgtcaactgcattatctttaattatttaaaggtagaattatttaattttgtgatttgttcttccatatgacattgagcaaatagatctgtttcaaaatatgttcccgctatgtggataactcttctttttaaaaagaaaatagagaatagcaaatcttcatgataatcctcaaaagaacaaaatgcttaactttatctcttaatttctaaaggtaaataacctaggttcagcttttgcttaaacattaaatatcttttccattttttaatgtttgtaagctagatatgccagctttgtttctacattgcaaccaaaaactgtttcttttcacttaattataaaaccagtaattcatttactcttgcccaaaactatacactgtatttctgttatagtaacaaaatagagttatgtagaattgtatggaactcaaatttaaaccatgctttcttgtagtactgattgaaacttacacgttttattctactcatagtgagcttattcttattttggattgattttccaaaaccacagcttcagcagcaacaatcagaatgtccaaatgctgtcctttcccttacagagaagaacaatggtaactaaaagctgcatataactagcaataactacattgaacggtgtgcattgttcatgattgttgtgttttaagacttgtatataaactgctttttccaaactctgtataacttttaaatggctggaactactcgtataaggactagactgtatttttgacatgctcctatttttgtaacttgaaaaaataaaattttgccttgtgacagataaaaaaaaaaaaaaa

SEQ ID NO: 26014 - DNA, 2140 bp, Homo Sapiens
acaggcctgagaatcagagaagccttctctggggctgcaaggacctgagctcagcttccgccccagccagggaagcggcaggggaaagcaccggctccaggccagcgtgggccgctctctcgctcggtgcccgccgccatgtgggccgtcctgaggttagccctgcggccgtgtgcccgcgcctctcccgccgggccgcgcgcctatcacggggactcggtggcctcgctgggcacccagccggacttgggctctgccctctaccaggagaactacaagcagatgaaagcactagtaaatcagctccatgaacgagtggagcatataaaactaggaggtggtgagaaagcccgagcacttcacatatcaagaggaaaactattgcccagagaaagaattgacaatctcatagacccagggtctccatttctggaattatcccagtttgcaggttaccagttatatgacaatgaggaggtgccaggaggtggcattattacaggcattggaagagtatcaggagtagaatgcatgattattgccaatgatgccaccgtcaaaggaggtgcctactacccagtgactgtgaaaaaacaattacgggcccaagaaattgccatgcaaaacaggctcccctgcatctacttagttgattcgggaggagcatacttacctcgacaagcagatgtgtttccagatcgagaccactttggccgtacattctataatcaggcaattatgtcttctaaaaatattgcacaggttaaagcggcaactggggaagaagtatctgctgaggatcttggaggtgctgatcttcattgcagaaagtctggagtaagtgaccactgggctttggatgatcatcatgcccttcacttaactaggaaggttgtgaggaatctaaattatcagaagaaattggatgtcaccattgaaccttctgaagagcctttatttcctgctgatgaattgtatggaatagttggtgctaaccttaagaggagctttgatgtccgagaggtcattgctagaatcgtggatggaagcagattcactgagttcaaagccttttatggagacacattagttacaggtataaagcccttggaaaagcacaagacataaatcttctttgaactttcttttgaggatttgctcgaatatttgggtacccagtaggtatcgttggaaacaacggagttctcttttctgaatctgcaaaaaagggtactcactttgtccagttatgctgccaaagaaatattcctctgctgttccttcaaaacattactggatttatggttggtagagagtatgaagctgaaggaattgccaaggatggtgccaagatggtggccgctgtggcctgtgcccaagtgcctaagataaccctcatcattgggggctcctatggagccggaaactatgggatgtgtggcagagcgtatagcccaagatttctctacatttggccaaatgctcgtatctcagtgatgggaggagagcaggcagccaatgtgttggccacgataacaaaggaccaaagagcccgggaaggaaagcagttctccagtgctgatgaagcggctttaaaagagcccatcattaagaagtttgaagaggaaggaaacccttactattccagcgcaagggtatgggatgatgggatcattgatccagcagacaccagactggtcttgggtctcagttttagtgcagccctcaacgcaccaatagagaagactgacttcggtatcttcaggatgtaactggaataaaggatgttttctgttggacatgtactgaaaattaacacatgtagtagccttaaaattttagacttctcgaacatgaggctgttacagtaatttttttaacactgtgcattgtacttttctaccttaaaaaaatcagtgaggatatttatttaatgaacatcaattccttttaaattttcttagagaaatttctctgtggctcagttttaccacccataaagcggagacagtaatttatggttatcctttctgacccacaaagtatgaaaagttctgtaatctgtaaactcagttctgtaatctgtattattgagatgattaatataaagttgtattttcactgaaaaaaaaaaaaaaaa

SEQ ID NO: 26015 - DNA, 3807 bp, Homo Sapiens
ggggggtccggaagtcaacaccatgtcaagtctgcacaagagccgaattgcagatttccaggatgtcctgaaggagccctcaattgcattggaaaagctgcgggaactcagctttagtggcatcccctgtgagggcggactgcggtgcctctgctggaagattctcttgaactaccttcccttggagagagcctcatggacctccatcctggccaagcagagggagctgtatgcccagttcctgagggaaatgatcatccagcctggcattgccaaggccaacatgggtgtgtccagggaggatgtgacttttgaggaccatccactcaaccccaaccctgacagccggtggaacacgtacttcaaggacaacgaggtgctgctgcagatcgacaaagatgtccggaggttgtgcccagacatttccttcttccagagggccactgactacccttgcctcctcatcctggacccccagaatgagtttgaaacccttcgtaagagagtggaacagacaacactgaaatctcagacggtggcccggaaccggagtggggtcacaaatatgagctccccacacaagaactctgcgccatcatccctaaatgagtatgaggtgctgcccaatggctgtgaggcccactgggaggtggtggagcggatcctgttcatctacgccaagctcaaccctggcatcgcttatgtgcaaggcatgaatgaaatcgtggggcccctctactacacctttgccaccgaccccaatagtgagtggaaagagcacgccgaggcagacacctttttctgcttcaccaacctcatggccgagatccgggacaactttatcaagagcctggatgactcgcagtgtggcatcacctacaagatggagaaggtttactccaccttgaaagataaggatgtggagctctacctgaaactgcaagagcagaacatcaagcctcagttctttgccttccgctggctgacactgctgctgtcccaggagttcttgctgcctgacgtcatccgcatctgggactccctcttcgccgatgacaaccgctttgacttcctcctcctcgtctgctgcgccatgctcatgctgatccgggagcagttgctggaaggggacttcactgtgaatatgcggctgctgcaggactaccccatcacagatgtctgccagatcctgcagaaagccaaggagctccaagactcaaagtagcccggcggcaagaggcccatgttcgggagagaagcctcccgaccctgtgccctggctcccgggacacatagaaacctgtaggaacccagcctgaggggaagccacaggatcggcccgagacccaggccatgcccactggggacacactgtgccgtgctccttcttctgccgccacgcccagctccccacctgccctgcactctgccctctttgcccaggatactgaggagggctggagctcgggaagttgtccttcctgggccagggccgtttctggcactgggaggctggcaggggcccctccctgcctcggctctgccgccccagcctcagttcctgcttctggtcttctcctgggctccactcaggggaggtgcttggccaatgggccagaaaccgcttctgagcggggcacttcggctgctccacagggaaggcgacactgaaagctgagtcctgccgtctgtctcacccacagatgtctgtagtcggtcggtgtgaatgtgggcccaagtccccaggcatcttctccgtgtgtgtgtgtgtgtgtgtgtgtgtgtgtgtgtgtgtgtgtgtgtgtgtgtgtgtgtgttagggagtgagggtctctcaggcctccaggtctcccagcccctccttctctgtctctacctctctgcctgtctccttccacctccttcccagagtgggactgtgtcttgcttcatgattcctctctccattactctccctgcccttctctgttggggtgccttatcctgagccacctcctctccccgcttgcctctgctcccctgaacctgggagacagatgaggagactggctcagcaaggcccctggaggtcaagcttggcctttgcctcctgttcccatcccccagccctggctcctaggtcctcccaactgggagggagtcctccgtgcctcacttagagggttctgaacccgttccctacacagaaatcttggaaaccaaatgctgctgagtaaggatgaagctttgagcctcctgcccctgctttctgcccagggagggagaaggaagagggggagctggtttttctggaggttcccccagaggccctcctgtccgaaaagaaaaggaccttgattctgagcccagggtcggaacccattgcttcagaagagttgtcattccctcggcttccaggtcccaacccagggttgggttgagtgagtcccacaaagggcaagtggggcccgaggaagcctctctggggccaggggtagctgagcttaaaggccctgggtcctgccagttccaggagggccatgtctgtgcctctgtgtacccctccacccgctgcgggctgagggaggtgcagggccttctctgacccctgcctgagctgttcccagggctggagcaggtgtaccctgagcaggggcagctggccactcccagttctcaccaagtcacctccctccttgtacaaggtttgcgtccggaagccgggtgccatagtgaggaccctcgtcctccagactggctggcaggagtcaggccccagcagccctcctgcccccaaagctttccgagtctggtgggcaggacttctcgctgcccttccaagcccggctttgggccaggaaaggcttccccaggtggctcttctaccaggcttttcctttgatgccgcctggatttccgcacctgcctgtctcctctcccagagcacagtatttgggagactttgactatttattcagactcctggctatgtattgcacattggcaagtgctctggggatgaggcatgggtataggaagggagaaaggagttggagacaagatcctcttcattttccaagatcaaagtcagcctcttctccccatgcttctaggaactgcctggttttcgagcaggtcctggctgagcgggctctgagttctgtactggaattgagtgtaaagatgggaagagaactgggctgactccaggacctccaggatgaggcagaggcatgatgcttcctgctcacctgggccaccctctctccaggacttgtcagctggtggttcagccccttctccaaccccttcataagcttgggccactgcctgggacccagcagacactgcccaggactctagtgcactcactcttgtctgccccctaccttccctcctggaaccacactacttgaatcaccattactttgcctcgctggcagagttgggtcaagtgccctctccttgaccttgagatgaaggtcaagagcacagggaccaggccttggttaggctgagctcccagcaggacaccgcctgcagaaaggacctgccctgataatgtcccttccccagattctcaagcagatgcccaagggaggtccccacagagccagagtgcctgaggcttcctgcttgagaacctgccccctggatcttggacacttacagattgagctgtatgaattcagcgggtctcactccagagggtcagaacgtttgctttagttttttcatctgttttgttccttgagtcagtgctgttgatgacgagttgtcttgaataaatcatgtgttctttgcaatgggcaaaaaaaaaaaaaaaaa

SEQ ID NO: 26016 - DNA, 1384 bp, Homo Sapiens
gctggtagcgcgccgctctcggtcgcgcggagtgatcgtgtggaatcgcgggtcgcggacgctcgccgccggccatagctcagcctagcgccgccaaggccgacggccctcagcctctgccatggacttcgaggacgattacacacactccgcctgcaggaatacttatcagggctttaatggaatggatcgtgattatggccctggatcttatggagggatggatcgtgactatggccatggatcctatgggggtcagagatccatggattcctacctaaaccagtcatatggcatggacaatcacagtggtggtggtgggggtagcagtttttcttcaccccatatgaagcctgcacctgtaggctctcgggggagaggaacgcctgcttatcctgaaagtacgtttggaagcagaaactatgatgcttttggaggaccatcaacaggcagaggccgaggccgaggacatatgggtgattttggaagcattcatagacccggaattgttgttgactatcaaaacaaatccaccaatgtgacagttgctgctgcaagaggaataaagagaaaaatgatgcagccatttaataagcccagtggaacctttatcaagaaacccaaactagcaaaacctatggagaagataagcctcagcaaatcacccacaaaaactgatcctaaaaatgaagaggaagaaaagcggcgaattgaggctcggcgagagaaacaaaggcgcagaagagaaaaaaacagtgagaaatacggagatggatacagaatggcatttacatgttcattttgtaaatttcgaacatttgaagaaaaagatattgaactgcatctggaaagttcttcacatcaggaaacattagatcatatacagaaacaaactaaatttgataaagtagttatggagtttttgcatgagtgtatggtgaataaattcaagaaaacatctattcgtaagcaacagacaaataatcaaacagaagtagttaaaataattgaaaaagatgttatggaaggtgttactgtagatgatcacatgatgaaggtagagacagttcattgcagcgcttgcagtgtgtatatccctgctttacatagttcagttcagcagcacttaaaatctcctgatcatatcaaagggaagcaggcttataaggaacaaataaaaagagagagtgtcttgactgctacaagcattttaaataatccaatagtgaaggcgcgatatgaacgttttgttaagggtgagaatccttttgaaattcaagaccattctcaggatcagcaaatagaaggagatgaggaggatgaagagaagattgatgaacctattgaagaagaggaggatgaagatgaaaaaaaaaaaaaaaaa

SEQ ID NO: 26017 - DNA, 3914 bp, Homo Sapiens
cacagcgctcggccgtcgagcggggtcgctaacccgcactctcttcggacctacgacatcgcggcttctctggcgttggccagtcagccacagggaactagtaaaaaaagaaaaagaaaaaataaagtgaaagaggcgtgttgtctagtttcaaaggagaggagagaagagactgagtcgccctgtgttgcccaggctggtcttgaactcctaggctcaagagatcctcctgcctcagcctcccaaagtgctgggattacaggcaactctggtagctctccttgtctggttgttttgaagaaagaagagtagaagaaaaagttgagtaaatcatgtcggagttactggacctttcttttctgtctgaggaggaaaaggatttgattctcagtgttctacagcgagatgaagaggtccggaaagcagatgagaaaaggattaggcgactaaagaatgagttactggagataaaaaggaaaggggccaagaggggcagccaacactacagtgatcggacctgtgcccggtgccaggagagcctgggccgtttgagtcccaaaaccaatacttgtcggggttgtaatcacctggtgtgtcgggactgccgcatacaggaaagcaatggtacctggaggtgcaaggtgtgcgccaaggaaatagagttgaagaaagcaactggggactggttttatgaccagaaagtgaatcgctttgcttaccgcacaggtagtgagataatcaggatgtccctgcgccacaaacctgcagtgagtaaaagagagacagtgggacagtccctccttcatcagacacagatgggtgacatctggccaggaagaaagatcattcaggagcggcagaaggagcccagtgtgctatttgaagtgccaaagctgaaaagtggaaagagtgcattggaagctgagagtgagagtctggatagcttcacagctgactcggatagcacctccaggagagactctctggataaatctggcctctttccagaatggaagaagatgtctgctcccaaatctcaagtagaaaaggaaactcagcctggaggtcaaaatgtggtatttgtggatgagggtgagatgatatttaagaagaacaccagaaaaatcctcaggccttcagagtacactaaatctgtgatagatcttcgcccagaagatgtggtacatgaaagtggctccttgggagacagaagcaaatccgtcccaggcctcaatgtggatatggaagaggaagaagaagaagaagacattgaccacctagtgaagttacatcgccagaagctagccagaagcagcatgcaaagtggctcctccatgagtacgatcggcagcatgatgagcatctacagtgaagctggtgatttcgggaacatctttgtgactggcaggattgccttttccctgaagtatgagcagcaaacccagagtctggttgtccatgtgaaggagtgccatcagctggcctatgctgatgaagccaagaagcgctctaacccatatgtgaagacttaccttctgcctgacaagtcccgccaaggaaaaagaaaaaccagcatcaagcgggacactgttaatccactatatgatgagacgctgaggtatgagatcccagaatctctcctggcccagaggaccctgcagttctcagtttggcatcatggtcgttttggcagaaacactttccttggagaggcagagatccagatggattcctggaagcttgataagaaactggatcattgcctccctttacatggaaagatcagtgctgagtccccgactggcttgccatcacacaaaggcgagttggtggtttcattgaaatacatcccagcctccaaaacccctgttggaggtgaccggaaaaagagtaaaggtggggaagggggagagctccaggtgtggatcaaagaagccaagaacttgacggctgccaaagcaggagggacttcagacagctttgtcaagggatacctccttcccatgaggaacaaggccagtaaacgtaaaactcctgtgatgaagaagaccctgaatcctcactacaaccatacatttgtctacaatggtgtgaggctggaagatctacagcatatgtgcctggaactgactgtgtgggaccgggagcccctggccagcaatgacttcctgggaggggtcaggctgggtgttggcactgggatcagtaatggggaagtggtggactggatggactcgactggggaagaagtgagcctgtggcagaagatgcgacagtacccagggtcttgggcagaagggactctgcagctccgttcctcaatggccaagcagaagctgggtttatgagtccctgtcctcttctgcaggtccagccctggcgagggcaggtcagaggaagtgaagaaatcaagagcaaagatttataatttaatgtgtatgtgtgtatgtgtgtatgtgtgtgtgtgtgtgtgtgtgtgtgtgtgtgtacaaacatgtattttctgcaaatctcattatgctggctagagtgatgcagacttgttcttctttttaaagcagtctcaagaataagcatttctttaaaatgtttctgtgtataatctagtttattttcagagtccattttttcttatgtctttataaggttcacttaacttaaaaacagcttttaaaacaactttttatcttctgtcttgctatcattgttcctacttccctaggaagccctggctacctttcgcattaggaccagtctgggttttaaggctctgggaagcagggttggttagtaaagacaggaatgttggggagaggtgagtagttccttcctctttctcctctccaatttatgcttttaacttattttctacctggataaacttctggaacttggcttttaaatttaacttttctagtttttaagcagtttccaccttgctttggtctaatgcttttctttgaaatgctaacagaattcccaagctttttccagttctagatatctttactagacctttgggggactcttataatggagctgcttttgaaaagcactttaattagataatgtattttgactaaatcacgaggatgcccagtgagagcttctagctgatctcagaggaccagagtgactgagggtaaagtgtctcacagcccatgctgaattttctgcattttaaactgatactgcagtcattggagagagagctcctcatttctcgaatgaaagatgagatatattcatcctcatgtaccacatctgtcttagtgtttgcgtctggggtgtgttatcaaacagagcatggtctacatcccactgtgtcaaccagaagagccaagtgttatctcaattggcccagtgtttctccaggctggggactgttaagggctctaagggaatgtagacagagtctccctgttattctgacttcctgcttgatgagctttcagttcctgtttttgctattgtttcctaaatttgacctacatattacatgggtgtagtgtgttgaggcttttcaaagaagggtctagtgagctaagtttcatcttctggtactcattgatcaaactgacctttctattctcataagcgtttctacccaaagttgtgtgtggaaggagtgtatagcagagaggaaatccctttcaacagagtcagctgctaactgatttcctataagcacactggattaagggcagccacagtggtttctactgtatgtatgaaccgaatggaggaatgttttcaaagattgatttggtgtggattgcaattgtaatggaaggcataacttgggatcccgggctgtaacttgctcttttgtttcccacccccctgacatgtatgtgtgctttaataaagctttctcacttgtcaaaaaaaaaaaaaaaaaaaaaaaaaaaaaa

SEQ ID NO: 26018 - DNA, 3249 bp, Homo Sapiens
gctttttcttactaatgtggtagatctacacgaacattctaggctgttctgctcagagcgaggaaccactgctcctcaatggggagggaacataccacccagccaggcttagcgttgggttttatcctttaataaaagttttataatgattcctgttcaccttaaagtgtgattatggagatgattggctccatatttcaccacgtcattccttcaactcaccagacacctttctttagttgaaataaaccagcatgacctggagatcatggtgactgtaagctaagtctgttttcatgccagatttcagccccacccagagtgtgctctagatgttgttgatttgaatggttttcccagttcccactccacatggggaagttgaatgaatgcacacctgctgctcacttcttgtgaggctgccttttgtgatcaaataacaggaagttctgctttagaggagggcacgatgaccatgtggcagtctgcaagtggaattttgggatggcagcccgaggaacatccagagttactgtgtgacttggtcctgccattgttagctttgaaatcacaggcattgggctctgttttgacaccattcattggactgcgggacagtcattctttacgttctctcttgagctggtgagagaggaggaagagggaagtcaagagcaacctccaaggcctatgtcagcctcttctccttgggtcttggggtgggttagaactgggttccagtctggccagatgggttgctggctgcactgagggtgattcttctcagaagatgggctgcctgtggtcaggacagggcataccagtctggactccaccttcccagacacctactttaaggacctgtggaaactgggtgatccaattatagggctggggcaaccctgctttggccaccctcatttacaaacttaggttgggagcttgggtttcctgtctcacttccaaaagccttcaagatggcagcagatggacacaccctctcatttcttgtgtcttgtctgtcagatggcaggaggcctgtatcagtaaatttgaggaaaatgttctctcctgggccagcctcacagcttgcgttgggtgtgttggaattgttctcttcggccttgttctgccttgtgatcttttcaattcagtgaataaaccaggtatccattttttcaccaacccaccctgtagattgtcagctttttgtttgagagatgcctggtctcacagttacatgtatcagagtgtgtgtaagttgtctgtgttagaaaggttggggtgggggctttgttgcaggggattagactgttctttcttcatcataatttgagatacatcctgagtatgactgtctaaccctttctgtgtggcagaaaaatatgttttccaggtagtttttactactacagagagtctgtaaataagtgctttaaaaaaataacaaaccaataagatatttgtctcctatataaacattctgtgtatttagcacttgaaaatcaacaaatccagaatttaaaaaaatgccacagacttttcaaagcccaactgtacttttttgagaatttgtccgtacctactaatatgccttattcttcttcacctagtgttttaaaagtcctgggtagaaagagttttagaaatgtaatcagttgttcagcttcaataatatagagatctaacatagtcagtcctcaggccccctaaagaaacaagcaagaaagtgagggccatcactagggttggctttggggaggggaaaactaaggactgcttttgccaaatgatatttttgataatgtaaggaaacacagggaccacaaaaccttttttttttttaagtgtgaaagattagtgccttttggcatacttttgattttagaggatatagtatcggcattgacaaatcacgtagaaacaaagaatgctatagatgacaacagtattaaatgttactcctgattctgcagaacagcttttgaagatactggggggtatcttcaagcctcagagcagcttgtttcagatagaaattctctatgggttgaaatgccaaaaacagaaaacatgatgttgactcatgtaatttagtccattttagcagagcctttagtgttaacaccagtggcgaggagcattgcatattctctgtcagcagcagcactcccacaccaggtggttctgggctctctgtaggctggtcctagtaggtgacacccagcaacacccctgttggacaggattgattgttcgcagtcttagaccaacacttcagtcagaaatgttactgggaggaggaaaggaaaatcactttttttcctccatgtggaaatgaggagagaggaaagtggattgcaaaccaaaatgtgagtcagtgtgatgaagcagtggctctgtcatctcggcctttatccaataacaaaccagcatctcttaaaggcgcttttggcctagacacccctgaagtttggatgaagtctggtggattccctgtccgttgtatttctgtgtgcctgttcccttcattgctgtgagttgggagtgcattgagagatgatgtccatctgatatattcctgtgaaataaactgccagcaaactttctaacttgtattttaactgttaaagaagagattaaaaacttcggctttggacatgtccacattatggactgtcatcttatttttaaaagtcattctttacgtttaaaattttaaaataaaaaccttctgaggtattgatgtagtccaccgtgtaaatgttaccttctctccatgctgccattatgccaaaacaaaagctgtgataaaaaaagtgcttgagagagtgtgttgataagaaagtgatttatttacagatggaagtctttgtttcatgaagctaccaaactttaaaaagaatgtcacccttttttttgtttgttatggaaaccagagattgtaaaatggaaaaagaatcgttttttttgttgactttttgatgctggcacgaggtttttgtccacttttttcatatatctgtgtataaaaaaattgttgtttactatggaattagtattacattttgaggtaaacaaaagaatttgtattgcttgataaatattagcttgtaaatttaaagtttctttacttcaattaacttaaaggaccaataaacccataaaagatgctttctttaaaaaaaaaaaaaaaaaaaaaaaaaaaaaaaaaaaaaaaaaaaaaaaaaaaaaaaaaaaaaaaaaaaa

SEQ ID NO: 26019 - DNA, 2670 bp, Homo Sapiens
ctagggttgtctctccatgagtgctctccttccctactcttcctgttccaggtgtagcgtcggaccatgtggaagtttctgaggctggggagccggataatggggggtggggcccgttggggggtaaaggggcaatagcgtcctttcacaggctaacctcggctcttcccagtcctctggactaaaatggggaacacattgggcctggcaccaatggggactttgccccgccggagcccccgccgagaggaacccctgcccaaccctgggagcttcgatgagctgcaccgtctatgcaaagatgtattcccagcacagatggagggagtgaagctcgttgtcaacaaggttctgagcagccatttccaggtggcgcacactatacacatgagtgccctgggcttgccgggatatcacctccatgcggcctatgcaggggattggcagctcagtcccactgaggtgttccccactgtggtaggggatatggacagcagtggcagcctgaacgcccaggtcttgctcctcttggcagagcggctccgagctaaggctgtcttccagacgcagcaggccaagttcctgacatggcagtttgatggcgagtatcggggagatgactacacagccactctgaccctaggaaatcctgacctgattggggagtcggtgatcatggttgctcacttcctgcagagcctcactcatcggctggtgctgggaggagagctagtttatcaccggcggccaggcgaagagggggccatcttgacactggctgggaagtactcggctgtacactgggtagctacattgaatgtgggatcaggcggggcccatgcaagttactaccacagggcaaatgaacaggttcaggttggagtggagtttgaggcaaacacaaggctacaagacacaacattctcctttggttaccacctgactctgccccaggccaacatggtatttagaggcttggtggatagtaactggtgtgtaggtgctgtgctggagaagaagatgccccctctgcctgtcaccctagcccttggagccttcctcaatcactggcgcaacagattccattgtggcttcagcatcactgtgggctgaggttgtccagagccagcccccacagcagctggaacctctgagtcaggtgccctagggccaaagactaggcccctcttcagagcccaccttgctgggtgatctctaggacccaggagcagagtggtggacaggaccatgccctcctcagaactggagctgccacaggggcagttgatgaggcagaggtttgaggatcccccctctgctaccagccccagtatcaccttccccatgctcttgtggctgtggactaagggagaaggattaaggggtatggctgaattcccccggcaccccttgccctcaggcttccttcttcctttccctttggttaatcctgcatgggattagctgaccatcctgttttccatcccagagcctcccaaggctgggaaagtagggctgaagggctagatgtttggtctcaggaagtggggcccacccattcccagaaggagcttctttacctcttagccctgaggtttcctccttcccatcttctgtgcttccagagaacaactttgttcctatggtcacccccactaaccccatgaccgcatgaagaggcagttattgctttagtctttcattgcaaccactgggctccctttgaacccggcccaatctttggtcccagcattttcccactccagtgtatccagggtgttccaggtgagctggggaaggaagtgagcatggcctcagctgcagatctcctggagcagcggcatcatggcagacaggccctggatgtgctggatttggtacccgtaggcctcattaatgctccggagctcagccagcaggcctagcaacttcgcatacagaaacctttggaggaagtagtggggttgccaggaaaacaggagggaaataaggcagttgggagtcttgtctctaggccctgatcccctgaactattcctcagtgaagccaggtctgaacattagagaaaatcatgctctggtatgacagactatcagaggttccaaaggtcctccagggggcctcggtctgacactgtcttctctcaccatgctcagttttttctgaacccagagctctgagagccgagtgtgaagaaagctccagacttggccagaactccaaccatgtggaatctgagggcctggccttctagagcaggttctagaaggtggatgtgttctatggtataaagcatcccctttctggccaaactagctcttggaggaacgagcaaaacagaagcggtgcatacctcagagcctggataaatcacagactattgaacctggaactggctttgaccatgaaactgtgaatggccctaacttcaagggaaatgagaaatcgaaggaattggcccaatggcgaggagaggaaaggccaagggaagagaaaagtctgcgttagtctggagaagttggactagtgaggtaatggatgtcatcaatctcaggaatgctattacccagagcctctgagctactactttgcatctgtactgaataaaaaaaaaatctggaaaaagtgagatgaaaaaaaaaaaaaaaaaaaaaaaaaaaaaaaaaaaaa

SEQ ID NO: 26020 - DNA, 1639 bp, Homo Sapiens
cagcctgctcccctccaggcttgctcctcccccacccagctctcgtttccaatgcacgtacagcccgtacacaccgtgtgctgggacaccccacagtcagccgcatggctcccctgtgccccagcccctggctccctctgttgatcccggcccctgctccaggcctcactgtgcaactgctgctgtcactgctgcttctgatgcctgtccatccccagaggttgccccggatgcaggaggattcccccttgggaggaggctcttctggggaagatgacccactgggcgaggaggatctgcccagtgaagaggattcacccagagaggaggatccacccggagaggaggatctacctggagaggaggatctacctggagaggaggatctacctgaagttaagcctaaatcagaagaagagggctccctgaagttagaggatctacctactgttgaggctcctggagatcctcaagaaccccagaataatgcccacagggacaaagaaggggatgaccagagtcattggcgctatggaggcgacccgccctggccccgggtgtccccagcctgcgcgggccgcttccagtccccggtggatatccgcccccagctcgccgccttctgcccggccctgcgccccctggaactcctgggcttccagctcccgccgctcccagaactgcgcctgcgcaacaatggccacagtgtgcaactgaccctgcctcctgggctagagatggctctgggtcccgggcgggagtaccgggctctgcagctgcatctgcactggggggctgcaggtcgtccgggctcggagcacactgtggaaggccaccgtttccctgccgagatccacgtggttcacctcagcaccgcctttgccagagttgacgaggccttggggcgcccgggaggcctggccgtgttggccgcctttctggaggagggcccggaagaaaacagtgcctatgagcagttgctgtctcgcttggaagaaatcgctgaggaaggctcagagactcaggtcccaggactggacatatctgcactcctgccctctgacttcagccgctacttccaatatgaggggtctctgactacaccgccctgtgcccagggtgtcatctggactgtgtttaaccagacagtgatgctgagtgctaagcagctccacaccctctctgacaccctgtggggacctggtgactctcggctacagctgaacttccgagcgacgcagcctttgaatgggcgagtgattgaggcctccttccctgctggagtggacagcagtcctcgggctgctgagccagtccagctgaattcctgcctggctgctggtgacatcctagccctggtttttggcctcctttttgctgtcaccagcgtcgcgttccttgtgcagatgagaaggcagcacagaaggggaaccaaagggggtgtgagctaccgcccagcagaggtagccgagactggagcctagaggctggatcttggagaatgtgagaagccagccagaggcatctgagggggagccggtaactgtcctgtcctgctcattatgccacttccttttaactgcaaagaaattttttaaaataaatatttataataaaaaaaaaaaaaaaaaaaaaaaaa

SEQ ID NO: 26021 - DNA, 2466 bp, Homo Sapiens
ataagtttataccatggatagcacaaaggagaagtgtgacagttacaaagatgatcttctgcttaggatgggacttaatgataataaagcaggaatggaaggattagataaagagaaaattaacaaaattataatggaagccacgaaggggtccagattttatggaaatgagctcaagaaagaaaagcaagtcaaccaacgaattgaaaatatgatgcaacaaaaagctcaaatcaccagccaacagctaagaaaagcacaattacaggttgacagatttgcaatggaattagaacaaagccgaaatttgagcaataccatagtgcacattgacatggatgctttctatgcagctgtagaaatgagggacaatccagaattgaaggataaacccattgctgtaggatcaatgagtatgctgtctacttcaaattaccatgcaaggagatttggtgttcgtgcagccatgccaggatttattgctaagaggctgtgcccacaacttataatagtgccccccaactttgacaaataccgagctgtgagtaaagaggttaaggaaatacttgctgattatgatcccaattttatggccatgagtcttgatgaagcctacttgaatataacaaagcacttagaagaaagacaaaattggcctgaggataaaagaaggtatttcatcaaaatgggaagctctgtagaaaatgataatccaggaaaggaagttaataaactgagtgagcatgaacgatccatctctccactactttttgaagagagtccttctgatgtgcagcccccaggagatcctttccaagtgaactttgaagaacaaaacaatcctcaaatactccaaaactcagttgtttttggaacatcagcccaggaagtggtaaaggaaattcgtttcagaattgagcagaaaacaacactgacagccagtgcaggtatttaaaagagtattgatggccactgtagttataattttcagactggctaatttaagtgtaatattagtagtttctcattataaagtatatagtaacattttacttacttagtctttcattcaacttctaacaactttacctattcagaatagctgtgaacctagtaagtaaattggaattaagcagactatgagcctgaaggaaaaaaaagattatacgtttctttctttttttttttttttgagatggagtcttgctctgttgcccaggttggagtgcagtggggcgatctcattcagcttactgcaacctctgcctcctgggttcaagcgattctcctgcctcggcctcccaagtaggtgggactacaggcgcatgccgccatgcccagctaattttttgtgttttcagtagtgacggtgtttcaccatgttggccaggatggtctccatatcctgacctcatgatccgcccaccttggcctcccaaagtgctgggattacaggcctgagccaccgcgcccgacccataaatttcatatagctatctttttctagcacaaaatatatttttattggttttgcatgtaataacttgagtattagtttttccttgggagacttcaatcctgtccaagattacattgcaggagagaacccagacggccacaaggtaagagacaaaagaaatactaactagcaacatagcaatccagaacaatctggtaaaaggaaaaacaaatttacatatgttgataacccatgaggccatcactgtctcttaacataataactgttattcatcatgaggaccctgaactatcttgtaaaagccatattgtgattaggtaaatcttttctttctacaccaaagcatgagaatgaataatgcattttaggaagatctatataacaattaaaatgaactgtttaatgaatatatttgaatatagctatttcaaattatcttaattaggactcctagaaattgtgaaacatctttttgaaaaatagtaatttgttttgtgaataacataaaaaggatacaccatctaattatcattattttaaatatactgtaaccagaatctttgattttttgctttatgtggataatctacgcaaaagacattttcaaagagtaaacatccaccctaaattatattctgtatcttttcttagagatagatatagaaccactataaaaacaatctgggctgggcatgatggctcacgcctgtaatcccagcactttgggaggccgaagctcgtggactacctgaggtcaggagttcgagaccggcctgaccaatatggtgaaacccccatctctgctaaaaatacaaaaattagccaggcatggtgttgcgtgcctctaatcccagctactcgggaggctgagacaggagaatcgcttgaacccaggaggcggaggttgcagtgagccaagatcacgccattgcactccagcctgggcgacagagcaagactccatctgaaaaaaaaaaaaaaaaaaa

SEQ ID NO: 26022 - DNA, 2940 bp, Homo Sapiens
agcggaccccctgtgccgtggaaactggcggtggccgcggccgccgagtcggtctgcgcagcctcctgcgttttctcgcttggatcttggcactgagaggcggtggccggcgggatggagaaaagtaggatgaacctgcccaaggggccggacacgctctgcttcgacaaggacgagttcatgaaggaagatttcgatgtcgatcattttgtgtctgactgtaggaagcgggtccagctggaagaactgagagatgacctggagctctactataaacttcttaaaacagccatggtcgaactcatcaacaaggattatgcagattttgtcaatctttcaacaaacttggttggcatggacaaagccctcaaccagctttctgtgcctttgggacaattacgagaagaggttctgagccttagatcgtctgtcagtgaaggaattcgggcagttgatgaacgaatgtctaaacaagaggacattaggaaaaaaaagatgtgtgtattgaggcttatacaagttattcggtcagttgagaaaattgaaaaaatcttaaactctcaaagttctaaagaaacctctgcactagaagcaagcagcccccttttgactggacaaattttggagagaattgccacagaatttaatcagttacagtttcatgctgttcaaagcaaaggcatgcctcttttggacaaagtaagaccgcgtatagctggcattacagccatgttacagcagtcactggaaggtctcctattagaaggccttcagacgtctgacgtcgatataatacggcactgcttgcggacttacgccacgattgacaagacacgggacgcggaggccttagttggccaagtactagtgaaaccatacatagacgaggtgattatagagcagtttgttgaatctcatcccaatggccttcaggtcatgtataataaactcctggagtttgttcctcaccattgccgccttcttcgagaagtcacaggaggtgccatctccagtgaaaaaggcaatactgttcctggatatgactttttggtgaattctgtttggccacaaatagtacaaggattagaagaaaagttaccctcgctttttaatcctgggaatcccgatgcatttcatgagaaatataccataagtatggattttgtcagaagattggaacggcagtgtggatcacaggctagtgtaaagagattaagagcccatcctgcctatcacagcttcaataagaagtggaacttgcctgtttattttcaaataagatttagagaaatagcgggatccttagaagcagcacttacagatgtcctggaagatgccccagctgaaagtccgtattgccttttggcttctcatagaacttggagcagccttaggaggtgttggtcagatgagatgttcttgccattactggtgcatcgcctgtggagactcactctgcagattttggcacgatactctgtgtttgtcaatgagctttcactcaggcccatttctaatgaaagtcccaaggagatcaagaaacctttggtaactggtagcaaagaaccttccatcacccaaggaaacactgaagaccaaggaagtggtccttcggaaacaaagcctgtggtttccatttcccgcactcagctcgtgtatgtggttgcagacctggacaagcttcaggagcagcttccagaactcttggaaataatcaagccaaaacttgaaatgattggctttaagaatttttcttctatctcagcagccctggaggactcccagagctctttttcagcctgtgtgccctccttgagtagcaagatcatccaggatttaagtgactcttgcttcggtttcctaaaaagcgccctggaggttcccaggctttaccgaagaaccaataaggaggtcccaaccacagcttcctcctatgtggacagtgctctgaagcccttattccagcttcagagcggacacaaggataagctcaaacaagcaataattcagcagtggctagaaggcactctcagtgaaagcactcataagtactatgaaaccgtgtcagatgtattaaactctgtgaagaagatggaagagagcctgaaaaggctgaaacaagccagaaaaaccactcccgccaaccccgtcggtcccagtggtggcatgagcgacgacgacaaaatcaggctgcagttggccctagatgttgagtacttgggagagcagatacaaaagttgggactacaagcaagtgacataaaaagcttctcagctctcgcagagcttgttgctgctgccaaggaccaggcaacagcagagcagccttaagcatcttggaagatcccgaggttagattcttaagcaagagaagagttggacttccaggctgaaggggagaaagtgactctgttctcttagcaaccgtctgtagcaaagaagtgcttccagcatcactccagcaacacgcccatgcgtcttctctcagcgtatttgggtcttctttgcccaaaagaacacaaaagcctttttccattgtatggaagatagtttttaagacatttgaaactttctactatagtttacagaacaaattattttatttttattgtaaatcttagtgtggaagagctgatttctaaaatatgattaaagtaaatatatacctatgaatatcaagagtcgtctccctgagcctgtagttggaagtgacgactgtaatggaatgatgtcttgtatagaaatgcccttctctgaaataaagagaactcctgggctttctaaagaggctgcgggaagccatcctccactcccactgtgtgtgagagcagtgcttctgatcctgctgtcaccccgacctctggcaggagccggcgccagtaggaaagacctccttcctaaataaaagaagtgtctcccaaaaaaaaaaaaaaaaaaaaa

SEQ ID NO: 26023 - DNA, 3337 bp, Homo Sapiens
cccaggcccgcgcccgccgcggccctgagaggccccggcaggtcccggcccggcggcggcagccatggccggggggccgggcccgggggagcccgcagcccccggcgcccagcacttcttgtacgaggtgccgccctgggtcatgtgccgcttctacaaagtgatggacgccctggagcccgccgactggtgccagttcgccgccctgatcgtgcgcgaccagaccgagctgcggctgtgcgagcgctccgggcagcgcacggccagcgtcctgtggccctggatcaaccgcaacgcccgtgtggccgacctcgtgcacatcctcacgcacctgcagctgctccgtgcgcgggacatcatcacagcctggcaccctcccgccccgcttccgtccccaggcaccactgccccgaggcccagcagcatccctgcacccgccgaggccgaggcctggagcccccggaagttgccatcctcagcctccaccttcctctccccagcttttccaggctcccagacccattcagggcctgagctcggcctggttccaagccctgcttccctgtggcctccaccgccatctccagccccttcttctaccaagccaggcccagagagctcagtgtccctcctgcagggagcccgcccctctccgttttgctggcccctctgtgagatttcccggggcacccacaacttctcggaggagctcaagatcggggagggtggctttgggtgcgtgtaccgggcggtgatgaggaacacggtgtatgctgtgaagaggctgaaggagaacgctgacctggagtggactgcagtgaagcagagcttcctgaccgaggtggagcagctgtccaggtttcgtcacccaaacattgtggactttgctggctactgtgctcagaacggcttctactgcctggtgtacggcttcctgcccaacggctccctggaggaccgtctccactgccagacccaggcctgcccacctctctcctggcctcagcgactggacatccttctgggtacagcccgggcaattcagtttctacatcaggacagccccagcctcatccatggagacatcaagagttccaacgtccttctggatgagaggctgacacccaagctgggagactttggcctggcccggttcagccgctttgccgggtccagccccagccagagcagcatggtggcccggacacagacagtgcggggcaccctggcctacctgcccgaggagtacatcaagacgggaaggctggctgtggacacggacaccttcagctttggggtggtagtgctagagaccttggctggtcagagggctgtgaagacgcacggtgccaggaccaagtatctggtgtacgagaggctagagaagctgcaggcagtggtggcgggggtgcccgggcatttggaggccgccagctgcatccccccttccccgcaggagaactcctacgtgtccagcactggcagagcccacagtggggctgctccatggcagcccctggcagcgccatcaggagccagtgcccaggcagcagagcagctgcagagaggccccaaccagcccgtggagagtgacgagagcctaggcggcctctctgctgccctgcgctcctggcacttgactccaagctgccctctggacccagcacccctcagggaggccggctgtcctcagggggacacggcaggagaatcgagctgggggagtggcccaggatcccggcccacagccgtggaaggactggcccttggcagctctgcatcatcgtcgtcagagccaccgcagattatcatcaaccctgcccgacagaagatggtccagaagctggccctgtacgaggatggggccctggacagcctgcagctgctgtcgtccagctccctcccaggcttgggcctggaacaggacaggcaggggcccgaagaaagtgatgaatttcagagctgatgtgttcacctgggcagatcccccaaatccggaagtcaaagttctcatggtcagaagttctcatggtgcacgagtcctcagcactctgccggcagtgggggtgggggcccatgcccgcgggggagagaaggaggtggccctgctgttctaggctctgtgggcataggcaggcagagtggaaccctgcctccatgccagcatctgggggcaaggaaggctggcatcatccagtgaggaggctggcgcatgttgggaggctgctggctgcacagacccgtgaggggaggagaggggctgctgtgcaggggtgtggagtagggagctggctcccctgagagccatgcagggcgtctgcagcccaggcctctggcagcagctctttgcccatctctttggacagtggccaccctgcacaatggggccgacgaggcctagggccctcctacctgcttacaatttggaaaagtgtggccgggtgcggtggctcacgcctgtaatcccagcactttgggaggccaaggcaggaggatcgctggagcccagtaggtcaagaccagccagggcaacatgatgagaccctgtctctgccaaaaaattttttaaactattagcctggcgtggtagcgcacgcctgtggtcccagctgctggggaggctgaagtaggaggatcatttatgcttgggaggtcgaggctgcagtgagtcatgattgtatgactgcactccagcctgggtgacagagcaagaccctgtttcaaaaagaaaaaccctgggaaaagtgaagtatggctgtaagtctcatggttcagtcctagcaagaagcgagaattctgagatcctccagaaagtcgagcagcacccacctccaacctcgggccagtgtcttcaggctttactggggacctgcgagctggcctaatgtggtggcctgcaagccaggccatccctgggcgccacagacgagctccgagccaggtcaggcttcggaggccacaagctcagcctcaggcccaggcactgattgtggcagaggggccactacccaaggtctagctaggcccaagacctagttacccagacagtgagaagcccctggaaggcagaaaagttgggagcatggcagacagggaagggaaacattttcagggaaaagacatgtatcacatgtcttcagaagcaagtcaggtttcatgtaaccgagtgtcctcttgcgtgtccaaaagtagcccagggctgtagcacaggcttcacagtgattttgtgttcagccgtgagtcacactacatgcccccgtgaagctgggcattggtgacgtccaggttgtccttgagtaataaaaacgtatgttgcaataaaaaaaaaaaaaaaaaa

SEQ ID NO: 26024 - DNA, 1578 bp, Homo Sapiens
ggcgcgctccggctcggccatggagctgccagctgttggcgagcacgtcttcgcggtggagagcatcgagaagaagcggatccgcaagggcagagtggagtatctggtgaaatggagaggctggtcgcccaaatataacacgtgggaaccggaggagaacatcctggaccccaggctgctgatcgccttccagaacagggaacggcaggagcagctgatgggatatcggaagagagggccgaagcccaaaccgctagtggtgcaggtgcctacctttgcccgtcgttccaatgtcctgaccggcctccaggactcctccactgacaaccgtgccaagctggatttgggcgcgcaggggaagggccaggggcatcagtacgagctcaacagcaagaagcaccaccaccacgccgtcggcctgaatctctcccacgtgcgcaagcgctgcctctccgagacccacggcgagcgcgagccctgcaagaagcggctgactgcgcgcagcatcagcacccccacctgcctggggggcagcccagccgctgagcgcccggccgacctgccaccagccgccgccctcccgcagcccgaggtcatcctgctagactcagacctggatgaacccatagacttgcgctgcgtcaagacgcgcagcgaggccggggagccgcccagctccctccaggtgaagcccgagacaccggcgtcggcggcggtggcggtggcggcggcagcggcacccaccacgacggcggagaagcctccagccgaggcccaggacgaacctgcagagtcgctgagcgagttcaagcccttctttgggaatataattatcaccgacgtcaccgcgaactgcctcaccgttactttcaaggagtacgtgacggtgtagccggagggcgtcggaaggggaagcgccattcccgcgggggggcggggagctgagcacctggggcctcggggcgggctcccctctcgccaacccgccaaccgcgagagacccaggctggcccccagggtgaggacgcccggagcggaggtaaccatgttccccctgcggcggctgtcagacctgggcggaggccccttccacgcggtgccggcggggctcgccctctcctgcccttccccgctggagatggacccccggaacggacagggcagctctgcgcccggcctcagagttctagtattatattttaaccgtgctaacttgtcaagtgctgactctactcccgtttgtacgtggtgttattattgaaatgtattgtttgagctcaaaaggcccgaccaccccccttcgggctgctatatatatatttatttgtaggtatttatatattgaaatataaaaacctagatttatggagtttcctctagatcatgttatattctatatcagacaaactattttcttttgacctttcttcccctccatccagtatttcggttgatttcattttctcccctctcttccccttccacgaactgcaataccagtaaccttggtatatattttttgatactgtacacatggatgtcttgtttctatgtgcaaaaaaaaaaaaaaaaaaaaaa

SEQ ID NO: 26025 - DNA, 2135 bp, Homo Sapiens
gccccaggagcccggcgggtccgggactcccgtccgtgccggtgcgggcgccggcatgtggctgtgggaggaccagggcggcctcctgggccctttctccttcctgctgctagtgctgctgctggtgacgcggagcccggtcaatgcctgcctcctcaccggcagcctcttcgttctactgcgcgtcttcagctttgagccggtgccctcttgcagggccctgcaggtgctcaagccccgggaccgcatttctgccatcgcccaccgtggcggcagccacgacgcgcccgagaacacgctggcggccattcggcaggcagctaagaatggagcaacaggcgtggagttggacattgagtttacttctgacgggattcctgtcttaatgcacgataacacagtagataggacgactgatgggactgggcgattgtgtgatttgacatttgaacaaattaggaagctgaatcctgcagcaaaccacagactcaggaatgatttccctgatgaaaagatccctaccctaagggaagctgttgcagagtgcctaaaccataacctcacaatcttctttgatgtcaaaggccatgcacacaaggctactgaggctctaaagaaaatgtatatggaatttcctcaactgtataataatagtgtggtctgttctttcttgccagaagttatctacaagatgagacaaacagatcgggatgtaataacagcattaactcacagaccttggagcctaagccatacaggagatgggaaaccacgctatgatactttctggaaacattttatatttgttatgatggacattttgctcgattggagcatgcataatatcttgtggtacctgtgtggaatttcagctttcctcatgcaaaaggattttgtatccccggcctacttgaagaagtggtcagctaaaggaatccaggttgttggttggactgttaatacctttgatgaaaagagttactacgaatcccatcttggttccagctatatcactgacagcatggtagaagactgcgaacctcacttctagactttcacggtgggacgaaacgggttcagaaactgccaggggcctcatacagggatatcaaaataccctttgtgctagcccaggccctggggaatcaggtgactcacacaaatgcaatagttggtcactgcatttttacctgaaccaaagctaaacccggtgttgccaccatgcaccatggcatgccagagttcaacactgttgctcttgaaaatctgggtctgaaaaaacgcacaagagcccctgccctgccctagctgaggcacacagggagacccagtgaggataagcacagattgaattgtacaatttgcagatgcagatgtaaatgcatgggacatgcatgataactcagagttgacattttaaaacttgccacacttatttcaaatatttgtactcagctatgttaacatgtactgtagacatcaaacttgtggccatactaataaaattattaaaaggagcactaaaggaaaactgtgtgccaagcatcatatcctaaggcatacggaatttggggaagccaccatgcaatccagtgaggcttcagtgtacagcaaccaaaatggtagggaggtcttgaagccaatgagggatttatagcatcttgaatagagagctgcaaaccaccagggggcagagttgcacttttccaggctttttaggaagctctgcaacagatgtgatctgatcataggcaattagaactggaagaaacttccaaaaatatctaggtttgtcctcattttacaaatgaggaaactaaactctgtggaagggaaggggttgcctcaaaagtcacagcttagctgggcacagtggctcatgccgataatcccagcaattcagaaagctgaggcaggaggattacttgaggccagactgggcaatatagcaagaccccatctctaaaaaattaggcatggtggtgcatgcctgtattcccagctactcaggaggttgaggtgggaggatcacttgagcccagaagttcaaggctgcaatgagccatgattacaccacggcactacaaccttggtggcacagtgagaacctgactcttaaaaaaaaaaaaaaaaaa

SEQ ID NO: 26026 - DNA, 2682 bp, Homo Sapiens
gctccgctcccccgagaatcgggcctcgccctgctgggcggctggacctgggcaaagcctgggcgcgctcccgcgcagcggcgccatgaagcgctcggggactctgcggctgctctcggacctgagcgccttcggcggcgcggcgcggctccgggagctggtggccggggactcagcggtccgagtccgtggcagtccggacggccgccacttgctgctcctgcgaccccctggggcggtagccccacagctgctagtcgcgtcgcgagggcccggcgcggagctagagcgggcctggccggccggccagccctccccgctggacgccttcttcctgccgtggccagcgcggccggcgctggtgctggtgtgggagagtggcctggccgaggtgtggggcgcgggcgtggggcctggctggcggccgctgcagagcaccgagctgtgtccgggcgggggagcccgcgttgtggcagtggcggcgctccgaggccgcctggtgtggtgcgaggagcggcaggcccgggccgagggcccgtcagggtcgccagcagccgctttcagccactgtgtgtgcgtccggactctggagcccagcggggaagctagcaccagcctgggccgcacacacgtcctgctgcaccactgccctgccttcgggctgctggcctcctgcagacaactcttcctggtgcccactgccaccacctggcctggcgtggcccacgttctactcatctggagcccaggcaagggcaaagtgatggtggctgccccacggcttggtctctcctacagtaagagtctgaatcctggacgaggggacacatgggacttccggaccctgctccgaggccttcctgggttgctgtcccccagggagccactggctgtacacacctgggccccaactccccagggcctgctgttgcttgacttcgggggcactgtgagcctattgcagtcccacggtggtacgcgggctgtgggcaccctgcaggaggcacctgtaggcccgtgggggtctgcagccctaggcacatttcagggcactctggcctgtgtgctgggctccacattggaactgctggacatgggcagtgggcagctgctggagaggaaggtcctaagtacagacagggtacatctgctagaaccgccagcccccggcatggaggatgaggaagagctggagacccgagggaatcttcgtctgctttcagccttgggtctgttttgtgtgggctgggaagccccacagggtgttgagttgccttcagccaaggatctggtgtttgaggaggcctgcgggtactaccagcggcggagcctgcggggtgcccagctcactccagaagaactgagacacagcagcacattccgggcacctcaggctctggcctccatcctccagggccacctgcccccatctgcactgctgaccatgttgaggaccgagcttcgggattaccgaggcttagaacagctgaaggcccagctggtggctggggatgatgaggaggctggttggactgagctggcggagcaggaagtggcacgcctgctgaggactgagttgataggagaccagctagcccagctcaacaccgttttccaagcccttcctacagcagcctggggtgccaccctcagggccctgcagctccagctagatgggaatggcaagctgaggtcccaagcaccccctgatgtgtggaagaaagtgttagggggaataaccgctggaaaggaaccccccaatggaatactgcccccctttgaactcctgtgccagtgtctgtgccagctggagcctcgatggctgccaccctttgtggagctggcacaacagcagggcgggccgggctggggggcagggggcccaggactgcccctgtatcgccgagctctggcagtgctaggtgaggaggggaccaggcctgaggctctggagctagagctgctcttgagcagtgggcggcctaaagctgtgctccaagctgtcgggcagctggtgcaaaaggaacaatgggatcgggctctggatgctggcctggccctcggcccctccagtcccctgcttcgaagtgaaatcttcaaactgctgctggccgagtttgcccagcaccgccggcttgatgctcacctccccctcctttgccgcctgtgcccaccagaactggctccagctgagctcctgcttctactgaggacatacctcccagatgaggtggggcccccaaccccattccctgagcctggagcagagccccctctcactgtgggcttgctcaaagccctgctggagcagactggggctcaaggatggctgtcgggcccagttctaagcccatatgaggacatcctatgggaccccagcactccacccccgactccacctcgggacctatgactacccttcaggcatcagaacactcagggcctggaggcttgcttgggactggaggcttgcttggacagttcctctgtgtcactgacacaggaaatcatttctaggacacagtgatcagggaagggtgcctgggacttggagggtcccatgtatggacctgtgtatgcaatactgttcggtcatctggagctatttttaagatgtgtgtgttaaatatatacatagtttaatatataaaaaaaaaaaaaaaaaaaaaaaaaaaaaaaaaa

SEQ ID NO: 26027 - DNA, 2413 bp, Homo Sapiens
aagcagaagtcaattgtccggtcccacttacaactcatcaaagctgtgagccagttaatagccgatgctgggattggaggctctcggtttcaacattcgcttgcaattaccaataatttcgccaatggagataagcaaatgaaaaacagcaatttcccagcagaggtgaaggacctgactaagcgtataaggactgttttgatggccacagctcagatgaaggagcacgagaaggaccccgagatgctggtggatctccagtacagcctggcaaactcctacgcaagcactcctgaactacgcaggacctggctggaaagtatggccaagattcatgccagaaacggagatttatctgaggctgccatgtgttacatccatattgctgctctcattgcagagtatctgaaaagaaagggttactggaaagtggaaaagatttgcacagcatccctgctctcggaggatacccacccctgtgatagcaactcattactaacaactcccagtggaggaagcatgttctctatgggatggccagcttttttgagcattacaccaaacattaaggaagaaggagcgatgaaagaggattctggaatgcaagatacaccatacaatgagaatatcctggtggagcagctatacatgtgtgtggagtttctctggaagtctgagcgatatgaactcattgctgatgtcaacaagcccatcattgctgtctttgagaaacaacgagacttcaaaaaattgtcagatctctactacgacattcatcggtcatatctgaaagtggcagaggtggtgaattcggagaagcggctgtttggtcgctactatcgtgtggcattttatgggcagggcttttttgaagaagaagaaggtaaagagtatatttataaagagcctaagctgacaggtctgtccgagatttcccaaagattactcaagctctatgcagataaatttggagcagacaatgtgaagataatccaggattccaacaaggtaaaccccaaggatttggaccccaaatatgcctacatccaggtgacctatgtgacgccgttctttgaggaaaaggaaatcgaagaccggaagacagatttcgaaatgcaccacaacatcaaccgctttgtcttcgagacacccttcacgctgtcgggcaagaagcacggtggggtggcggagcagtgcaagcggcggacgatcctgacaacgagtcacctgttcccctacgtgaagaagagaatacaagtaattagccaatcgagcacagaactgaatccaattgaagtggcaattgacgagatgtccaagaaggtttctgagcttaatcagctttgcacaatggaagaagtggacatgatcagactgcagctcaaactgcaaggaagtgtcagcgtgaaggttaatgctgggccaatggcctatgcacgagcttttcttgaagaaaccaatgcaaagaagtaccctgacaaccaagtaaagcttttgaaggagatcttcaggcaatttgcagatgcatgtgggcaggcccttgacgtgaatgagcgcctcatcaaagaggaccagctggagtaccaggaagaactgaggtcccactacaaggacatgctcagcgaactctccacagtcatgaatgagcagattacgggcagggacgacctgtcaaagcgcggagtggaccaaacctgcactcgagtaattagcaaagcaactccggccctacccacggtctccatctcatctagtgctgaagtctgagggctctgcagcatcagacccacctctaagagaactttctgaatttgcagctaatctcggggaagagaaagataggtttaatttatttgaagttttcatggtgttaatatttttgtttacctcgctagcttcagaattttgccaacctctgaatttgcacattttgtataatttttttttctttgagcagtgttgatcaagccaggttgaatatttgccatgaaattccagtgaatgtgtagctcaaatgcaaaccctaagtttgctgtcagttattgtatggtcagtaccccagtcctagtacacatattttaaaggttaaagtgaatgtttttgtaacatttaagcatatttcagatgtaaataaaagattgtaaaatatacggtttttaccaaatttaaaagatcctttttagttaatactatgacagtactaaaaatatatgaataacatttcagataccattatattaaaatatttgtgtatgtgtacaaaagcgttgataaatactaatctttaaagtttgtggagttcctttatttgtaatatatgtgctcttaaaagcaatgggatgtgaaattatgaaagtattttattgttcatagaaataaaaaacacagttactttgcaaaaaaaaaaaaaaaa

SEQ ID NO: 26028 - DNA, 3427 bp, Homo Sapiens
cggaggctccccggtagggacggcctgaggccgagggcaccctgagggcggaagaggcaaagcgcctcgcccgccggggcctcggaggtgactaactcctagaggctgcggcggaggggagaagcctggtggtacattccatggcccagtgcctcggccactggaaaatcccacaggggtatatcgagtaggggaccgcgggctccgcggcagaaatgaccgcccttccaagatggcggctcccgtagagacactcccaaggagacagccatgttccttgcctgagagtcactgaaggaaattggaaagcccgcctctccttcgacgcacacgcgcacgcgcacgcgcgcgcacgcacgcaccggcgcggtcatccagcacagtgagcggcccctgggcaccaccagaaaacatttgtgagtgaacgtggagtgatgaccatgtggacactgtctttccagggtttcttggagcctctgcagagtctgggggccaggcttcttagtggaaactgcaggatcttccttctgacccctgcttgcctcgccccagcagctccggttgagtccacagatgccagctcagcttccagcttggggaagagtggggttgtcagcaggagagcctgagggctgaggcccagcgtgaacatggcagctaatggggactctcccccatggtccccggccctggctgcagagggacgtggcagctcatgtgaggcttcagtgtcatttgaggacgtgactgtggacttcagcaaggaggagtggcagcacttggaccctgcccagagacgcctgtactgggatgtgacactagagaactacagccacctgctctcagtggggtaccaaattcccaagtcagaggctgccttcaagttggagcaaggagaggggccatggatgctggagggggaagccccacatcagagctgttcaggtgaggctattgggaaaatgcagcaacagggaattcctggaggaattttcttccactgtgagagatttgatcaacccataggagaagattcattatgttctattttagaagaactgtggcaagataatgaccagctagagcaacgtcaggaaaaccagaataaccttttaagtcatgtgaaagtattgattaaggagaggggctatgaacataaaaacattgaaaaaataattcatgtgactaccaagcttgttccttcaattaaaagactccataactgtgacacaattttgaagcatactttaaactcacataatcataatagaaacagtgcaacaaagaaccttggcaagatttttggaaatggtaacaatttcccccatagcccttcctctactaagaatgagaatgctaaaacaggagcaaattcctgtgaacatgaccactatgaaaaacatctcagccacaaacaagctcccacccaccatcagaaaattcatcctgaggagaagctttatgtgtgtactgaatgtgtaatgggcttcactcagaagtcacatctgtttgagcatcagagaattcatgctggagaaaagtcccgtgaatgtgacaaaagcaacaaagtcttcccccagaaaccccaggttgatgtacatccaagtgtttatacaggagaaaaaccctatctgtgtactcaatgtgggaaagtctttaccctcaaatcaaacctcattacacatcaaaaaattcataccgggcagaaaccctacaaatgcagtgaatgtggaaaagcctttttccagagatcagacctctttagacatctgagaattcatacaggagaaaaaccttatgaatgcagtgaatgtggaaaaggcttctcccagaactcagacctcagtatacatcagaaaactcataccggagagaaacactatgaatgcaatgaatgtgggaaggctttcacaagaaaatcagcactcaggatgcatcagagaatccacacgggagagaaaccttatgtatgcgctgactgtgggaaggccttcatccagaaatcacatttcaacacacatcagagaattcatactggagaaaagccgtatgaatgcagtgactgtgggaaatccttcactaagaagtcacaactccatgtgcatcaaagaattcacaccggagagaaaccctatatatgtacagaatgtggaaaggtcttcactcacaggacaaacctcaccacacatcagaaaactcatactggggaaaaaccctatatgtgtgctgaatgtggaaaggcttttactgaccagtcaaatctcattaaacaccagaaaactcacactggagagaaaccctataagtgcaatggctgtggaaaagccttcatatggaagtcgcgcctcaaaatacatcagaaatctcatattggagagagacactatgaatgcaaggactgcgggaaagccttcatccagaaatcaacactaagcgtgcatcagagaatccatacaggagagaaaccgtacgtttgtcctgaatgcgggaaggcctttatccagaaatcgcacttcattgcgcatcatagaatccatactggagagaagccttatgaatgcagcgactgtgggaaatgcttcactaagaagtcacaactccgtgtgcatcagaaaatccacacaggtgagaagcccaatatatgtgctgaatgtggaaaggccttcactgaccgatcaaatctcataacacatcagaaaatccacactagggagaaaccctatgaatgtggtgactgcgggaaaaccttcacctggaagtcacgcctcaatatacatcagaagtctcatactggagaaagacactatgaatgtagtaaatgtgggaaagctttcatccagaaagccacactaagtatgcatcagataattcatacaggaaagaaaccttatgcttgtacagaatgtcagaaggcctttactgacagatcgaatctcattaaacaccagaaaatgcatagtggagaaaaacgctataaagccagtgactgagaaagtcttcacctggaaatcacaactgggtatgcatcaggtatctaatagcagggaggaggaaggcctgttgctgcaatcattgtacagggggaaatgggtatgagagactgaggcttgagtgaactgaaggcaaacagagccaagtatccttcagtccactggaaagacaagttcctgcatcaccacagtgtatatgcaattctatgcataggaagagcctttagagaaagcatttgagcgaaagtcatgtttggtgacatgattcatacagacctcttgagctcctggaaatagtagaattaagacctgaggagatgactcgtcatctcttatgcttcactttttggataaagaactttttaaattcagtactgattggttcagcatatcctgggacataaaaatactcactactgggaaaaaaaaaaaaaaaa

SEQ ID NO: 26029 - DNA, 1924 bp, Homo Sapiens
ctctgtggcgactctggcgactgagcccggggaggacgcctttcggaaacttttccgcttctaccgtcagagccggcccgggaccgcagacctggaaggggtcatcgacttctcggcggcccacgcagcccgtggcaagggtcctggtgcccaaaaggtgatcaaatctcagctaaatgtgtcttctgtcagtgagcagaatgcatatagagcaggtcttcagcccgtcagcaagtggcaagcctatggactcaaaggctatcctgggtttatttttatcccaaaccccttcctcccaggttaccagtggcactgggtgaaacagtgccttaagttatattcccagaaacctaatgtatgtaacctggacaaacacatgtctaaagaagagacccaagatctgtgggaacagagcaaagagttcctgaggtataaagaagcgactaaacggagaccccgaagtttactggagaaactgcgttgggtgaccgtaggctaccattataactgggacagtaagaaatactcagcagatcattacacacctttcccttctgacctgggtttcctctcagagcaagtagccgctgcctgtggatttgaggatttccgagctgaagcagggatcctgaattactaccgcctggactccacactgggaatccacgtagacagatctgagctagatcactccaaacccttgctgtcattcagctttggacagtccgccatctttctcctgggtggtcttcaaagggatgaggcccccacggccatgtttatgcacagtggtgacatcatgataatgtcgggtttcagccgcctcttgaaccacgcagtccctcgtgtccttccaaatccagaaggggaaggcctgcctcactgcctagaggcacctctccctgctgtcctcccgagagattcaatggtagagccttgttctttggaggactggcaggtgtgtgccagttacttgaagaccgctcgtgttaacatgactgtccgacaggtcctggccacagaccagaatttccctctagaacccatcgaggatgaaaaaagagacatcagtacagaaggtttctgccatctggatgaccagaatagcgaagtaaaacgggccaggataaaccctgacagctgagacttggagatcccatcctttttactcaggcacctgcttaccgtaaatgatcatgttattgtgtattgccgtggacttcagcacccagacaagccaaaaacagagacagggaagaactcattgttgatcacactgttgccttggaacccacgcagaagtaaactcagccactttgctcagagaagtgtttgacatggtctgttcctagttacatgttggctgtaatgtatgttgagaagtcagtccaaggaggtatgttcttccacaacagccttctcagcctctgctatttcctttgaggaaggtagaagtgagtttccatgtttgcagagtatttaaatacctcagattttattaatgagaaatacagtacccctccctccactccatctggtaatttatggtaaaattgtggttctgtgaaccagctattagtctcatcttcttaactccctcaggcatcatcaaattctttgatcttctcttccacctctctggctctcatggaagaatcctttacacatgaaaacaatggaactggaaaatcttgtcttttagaaaagaaattaatcacaactatctctcttgcctaaaagataaatataggtaaacccaaggaaaggggaatttagtttctctacatgtcatttcggtctccaaactccctgttggctttttaatgcaattttaattgttggaataaaaaagtcccaagggtgttttgttactgttttctccatgaataaactcacttgattttaaattaaaaaaaaaaaaaaa

SEQ ID NO: 26030 - DNA, 3207 bp, Homo Sapiens
cccacgcgtccgcccacgcgtccgcttacattttatgtgtttttttaaattctgcactttgacagtggtagcaaaataaaagtaatccaaaagttatttttctattgagaagagagaagaggtgggttttatttttttccttttgattccaatcttttctcccagtgacaaagcataaatcatggacaccagagaataaggtggacctcaggaatccggaaaagactgagaagcttacattcttcctctagagggaagagtggggtgtttatagccatctctggaacctaaaacaaaaaacatgagttgtgtgccatggaaaggagacaaggccaaatctgaatcattggagctgccccaggcagcacccccacaaatctaccatgagaaacagcgcagggagctttgtgccctccacgccctcaataacgtcttccaggacagcaatgccttcacccgggatacgctgcaagagattttccagaggttgtctccaaacaccatggtgacacctcacaagaagagcatgctgggaaatggcaactacgatgtgaatgtcattatggcagcacttcagaccaaaggctatgaagctgtttggtgggacaagcgcagggatgtcggtgtcattgccctcactaacgtcatgggcttcatcatgaatctgccctccagcctatgctggggtccactgaaactgcccctcaaaaggcagcactggatctgtgttcgagaggtgggaggggcctactacaacctcgactccaaactcaagatgcccgagtggattggaggcgagagcgagctcaggaagtttctaaaacatcatttgcgaggaaagaactgtgaactcctgctggtggtaccagaagaggtagaggctcatcagagttggaggaccgatgtgtaacagttctgcccaacctccctctcgcctcagccccttcagtcctctgtgacgtgctgtggcctctacagtgggtctgcccttgccacttccccaaacatctcatcaagtttttccccttcagatctgacagtgcaataggacagacgtgtggactgttataagaactactcagtgttttgttcctgggcaaggaaggtaggagttctgtgcacttaaggccagtggtcacaaacccttgttttatttaagagacagaggagaaagtggagcggggagggaatcctagcttattttcccttttctatgaggacttgacacaggttctgctgagttgtcactgctgctccagactcacctagagatgctgcctccactttccatcctgtctgggtctgaaaacagtgggtctgcagatagtgcccacaaaccccatgtgactggtttgaaggacccagagcataaaggtctctcaggaaaccatgtccaaaaccctagcagcggtacagcatgctgtctccaacccttatccccaggtttaagggtggtttatggccatacgtggaggttttttgttgttgtttttgagactgagtttcactcttgttgcccaggctggagtgcaatggcaccatctcggctcactgcaacctccacctcctggttcaagcgattctcaggcctcagcttcccaagtagttgggattacaggcgcctgccaccacacctggctaattttgtatttttagtagagatggggtttctccatgttggtcaggctggtctcaaactcccgacctcaagtgatctgcccgccttggcctcccaaagtgctgggattacaggcgtgagccaccgcacccggcagagttttataatgaaaaattaactaatattctagtatgaagtgaggaggatactgaacaggatgtggctaaagccaacctgggacagccatggggtggcttggtttcttcactccagtgttgtccctaccatttcgcagcattgatttaggaggctctgggacaaaagagaagccaaagagcagttttcccagttcactcactctggcaaaatcaggaaaaaaaagtctgcttttgacatcaaattccactaatttggggcagcgttgggtgaggaaagtattgtgaagacaggcttcttggagtaggggcagccacaattcagtagacactctaggctcggaggctgccactgtagttgccaagctcaggttgggtggttctgtgctgtatggatggaataggacctgggctggtcatcttcatgtcgtttcctctctgtatcaatggaagttcaacccgcccctacctcttcagatagttgtaggccacttttctcttgtaactttggaaaacaaaagaggagaaataagtatcataccatatgcgtgtctccaaagtggatgtggttgcctcaaggcaggtggcaggcaggggtgacctgctggccctcagatcaatggtcgtggcaggtctgagagctgtcccactggccagacttctctccagcagcaaagccagcctggggcttgcatgttgatcctgagcaagcttaacggggtgaagctgggctttctcccccctgtgactggagtgcatgttgacaccagcactttttctgcacatgtatcttcaatccaacaaggccgtttttttaatgctgagtaacaggccaccaagcggctactgcgttatatcttctcagcaactggccgcagtctcttctgcaccattttctacaccagacctgcttggcaccacagggagctcttttcctgccctgcacaatgacattccaaccaccaccagccagacattacagccaaccttgctgattgtcacaagcaggaccttggggccactggcactgtcagatagtaagccatttcttgggtagaggaggaaactcctctccacaaatccacttgggcctgtgcaaatggcacttgaaagagtccccatgcacttggagtccatgagccaatgggatatgcaaagacgcttaaacatttcagggctggtttctctgttcatatccaattctggtgcttaggaacagggacccatgctgatgcccaagggcaaaaagccccacttcctttaaggaagtgaacaggcctgaccctgatgcccaataacgggcaaccctaggctttttgtttttcttgcttttattcctttttgttgttggccttgtgctgcgtttgtttacaaaagatgtattttgtttaaccaaatattaaaaatggaaaactccaaaaaaaaaaaaaaaaa

SEQ ID NO: 26031 - DNA, 3475 bp, Homo Sapiens
ctcggccggggcgtgggctccggctgcagctccggtctgctctcttggctcgggaacccccgcgggcgctggctccgtctgccagggatgacggcgacccctgagagcctcttccccactggggacgaactggactccagccagctccagatggagtccgatgaggtggacaccctgaaggagggagaggacccagccgaccggatgcacccgtttctggccatctatgagcttcagtctctgaaagtgcaccccttggtgttcgcacctggggtccctgtcacagcccaggtggtgggcaccgaaagatataccagcggatccaaggtgggaacctgcactctgtattctgtccgcttgactcacggcgacttttcctggacaaccaagaagaaataccgtcattttcaggagctgcatcgggacctcctgagacacaaagtcttgatgagtctgctccctctggctcgatttgccgttgcctattctccagcccgagatgcaggcaacagagagatgccctctctaccccgggcaggtcctgagggctccaccagacatgcagccagcaaacagaaatacctggagaattacctcaactgtctcttgaccatgtctttctatcgcaactaccatgccatgacagagttcctggaagtcagtcagctgtcctttatcccggacttgggccgcaaaggactggaggggatgatccggaagcgctcaggtggccaccgtgttcctggcctcacctgctgtggccgagaccaagtttgttatcgctggtccaagaggtggctggtggtgaaggactccttcctgctgtacatgtgcctcgagacaggtgccatctcatttgttcagctctttgaccctggctttgaggtgcaagtggggaaaaggagcacggaggcacggcacggcgtgcggatcgatacctcccacaggtccttgattctcaagtgcagcagctaccggcaggcacggtggtgggcccaagagatcactgagctggcacagggcccaggcagagacttcctacagctgcaccggcatgacagctacgccccaccccggcctgggaccttggcccggtggtttgtgaatggggcaggttactttgctgctgtggcagatgccatccttcgagctcaagaggagattttcatcacagactggtggttgagtcctgaggtttacctgaagcgtccggcccattcagatgactggagactggacattatgctcaagaggaaggcggaggaaggtgtccgtgtgtctattctgctgtttaaagaagtggaattggccttgggcatcaacagtggctatagcaagagggcgctgatgctgctgcaccccaacataaaggtgatgcgtcacccagaccaagtgacgttgtgggcccatcatgagaagctcctggtggtggaccaagtggtagcattcctggggggactggaccttgcctatggccgctgggatgacctgcactaccgactgactgaccttggagactcctctgaatcagctgcctcccagcctcccaccccgcgcccagactcaccagccaccccagacctctctcacaaccaattcttctggctgggcaaggactacagcaatcttatcaccaaggactgggtgcagctggaccggcctttcgaagatttcattgacagggagacgacccctcggatgccatggcgggacgttggggtggtcgtccatggcctaccggcccgggaccttgcccggcacttcatccagcgctggaacttcaccaagaccaccaaggccaagtacaagactcccatatacccctacctgcttcccaagtctaccagcacggccaatcagctccccttcacacttccaggagggcagtgcaccaccgtacaggtcttgcgatcagtggaccgctggtcagcagggactctggagaactccatcctcaatgcctacctgcacaccatcagggagagccagcacttcctctacattgagaatcagttcttcattagctgctcagatgggcggacggttctgaacaaggtgggcgatgagattgtggacagaatcctgaaggcccacaaacaggggtggtgttaccgagtctacgtgcttttgcccttactccctggcttcgagggtgacatctccacgggcggtggcaactccatccaggccattctgcactttacttacaggaccctgtgtcgtggggagtattcaatcctgcatcgccttaaagcagccatggggacagcatggcgggactatatttccatctgcgggcttcgtacacacggagagctgggcgggcaccccgtctcggagctcatctacatccacagcaaggtgctcatcgcagatgaccggacagtcatcattggttctgcaaacatcaatgaccggagcttgctggggaagcgggacagtgagctggccgtgctgatcgaggacacagagacggaaccatccctcatgaatggggcagagtatcaggcgggcaggtttgccttgagtctgcggaagcactgcttcggtgtgattcttggagcaaatacccggccagacttggatctccgagaccccatctgtgatgacttcttccagttgtggcaagacatggctgagagcaacgccaatatctatgagcagatcttccgctgcctgccatccaatgccacgcgttccctgcggactctccgggagtacgtggccgtggagcccttggccacggtcagtccccccttggctcggtctgagctcacccaggtccagggccacctggtccacttccccctcaagttcctagaggatgagtctttgctgcccccgctgggtagcaaggagggcatgatccccctagaagtgtggacatagttgaggcccccgtcagggagaggtcaccagctgctgtgccccaccacgtctggctccctgccccttaaccccaaggactgagggcagtgccctttgagatctggggaggcaggcattcctgaagggaactagaggtgttacagaggacccttacgtgagaaatagctgaaaagggcactcccaaccctgggctggggaggaggagagagtcccagagctcatcccccctgctgcccagtgcaaaccacttctccatgctgcaaaggagaagcacagctcctgccagggtgagcagggtcaagcctcttattccaggagaagggggctctgccccaggccctactacccattgttcccttcctcttcctgcccttgaaccccctccctgtcccagggccctcccagcccattgctgccaaggtggagggaaggataaagccacttctggcttcagcccccaccaggggaaggaaggagggcacattaactccctccaccagcctgctgacagacactaactttgtatccgttcaataagcatttcataaataaaggtgtagaaaaggttaaaaaaaaaaaaaaaaaa

SEQ ID NO: 26032 - DNA, 2359 bp, Homo Sapiens
gcggcgcgggtggcggcacgtccctccagacagtaccacaggcacctggagtaccggcatcggtcgctgtggcccccgagtgtccgtcagagcctaggggagcctgccctcccgcgcctcgtcggggcccggccaggcaccttggccgccggcgcacggacgcgggcacgagcactagatcacggctgctggacctcggcacgttgacaagatttctctggggtaccgcggaggattactttgaatttcggtggtcgcctgtggtctggcatatttagaacttaagtctattatttcgggcaccatgactttgaggcttttagaagactggtgcagggggatggacatgaaccctcggaaagcgctattgattgccggcatctcccagagctgcagtgtggcagaaatcgaggaggctctgcaggctggtttagctcccttgggggagtacagactgcttggaaggatgttcaggagggatgagaacaggaaagtagccttagtagggcttactgcggagactagtcacgccctggtccctaaggagataccgggaaaagggggtatctggagagtgatctttaagccccctgacccagataatacatttttaagcagattaaatgaatttttagcgggagagggcatgacagtgggtgagttgagcagagctcttggacatgaaaatggctccttagacccagagcagggcatgatcccggaaatgtgggcccctatgttggcacaggcattagaggctcttcagcctgccctgcaatgcttgaagtataaaaagctgagagtgttctcgggcagggagtctccagaaccaggagaagaagaatttggacgctggatgtttcatactactcagatgataaaggcgtggcaggtgccagatgtagagaagagaaggcgattgctagagagccttcgaggcccagcacttgatgttattcgtgtcctcaagataaacaatcctttaattactgtcgatgaatgtctgcaggctcttgaggaggtatttggggttacagataatcctagggagttgcaggtcaaatatctaaccacttaccagaaggatgaggaaaagttgtcggcttatgtactaaggctggagcctttgttacagaagctggtacagagaggagcaattgagagagatgctgtgaatcaggcccgcctagaccaagtcattgctggggcagtccacaaaacaattcgcagagagcttaatctgccagaggatggcccagcccctggtttcttgcagttattggtactaataaaggattatgaggcagctgaggaggaggaggcccttctccaggcaatattggaaggtaatttcacctgagtctcagggaaccacgaagggatatggcaatgagtagagcatgaaggtagaacagtctatatactcttgtgacacatacaatccctaccttgtgctgccaagtaactcatttttgtgcaattctcagtataagccctttgtcgtttctgtgcctatttaaagtctcctaaaggtgtaattgactaggaaggatgtagttctacactgccatttacctatttaaattcatccttgtgaatatctttgttgttgttgttgagacagagtctcgctctgtcacccaggctggagtgcagtggcgtgatcttggctcactgcatcctccgccttccaggtttaagctattctcctgcctcagttgcccgagtagctgggactacaggcatgtgccaccacgcccagctaagttttgcattatcagtagagacggggtttcaccatgttggccaggctagtttcgaactcctgacctcaagtgatccacctgcttcggcctctgaaagtgctgggattacaggcgtgagacactgcgcccagcctcatccctgtgaatttcttattgtacacaagttctttcactatctgtgtgcagtgctctgaggggacagacaaggcttgggtgtatatgccaaccagatctcattgaagtatcagcttgtttggtactaggtgcaagtgtagcatgtcacatgtgaccatgttggatcattgacaatttttaggtatgtactgacctacatttatgatgaagatcctgagcggaggttaagatattaagttattttccatatgaatcagaattatattgattctgtgcaatcaaaacaaaaggcagaatagaatgctgagattggttaagtttgcaatgaccatcttgaaccacagatttctgctatgtgtcatcaaaacatctagttctgagtaacattttcacgattgttataaaattataggtgtgaacttctaaaataaaggaatgctaataaaaaaaaaaaaaaa

SEQ ID NO: 26033 - DNA, 3507 bp, Homo Sapiens
ccggggccgagccgctgttcggctgacagttgaggatggccggagccgagggcgccgctgggcggcagtcggagctggagcccgtggtatcgttggtcgacgtccttgaggaggacgaggagctggagaatgaggcgtgcgctgtcctgggcggcagcgactccgagaagtgctcctactctcagggctcagtaaagagacaagcactatatgcctgtagtacctgcaccccagagggagaagaaccagcaggaatttgtttagcttgcagttatgaatgtcatggaagtcacaaactatttgagctatacacaaaaagaaattttcgttgtgattgtggaaacagcaagtttaaaaatttggaatgcaaattacttcctgacaaagcaaaggtaaattctggcaataagtacaatgacaacttttttggattgtactgcatttgcaagagaccttatcctgatcctgaagacgagattccagatgagatgatccagtgcgtagtctgtgaagactggttccatggaaggcatcttggtgccattccccctgagagtggggattttcaggagatggtatgccaggcctgcatgaaacgttgttcttttttgtgggcttatgctgcacaattggcagtaaccaaaatatccactgaggatgatggattggtgcggaacattgatggaataggtgatcaggaagttatcaaacctgaaaatggagagcatcaagatagtaccctcaaagaggatgttccagaacagggaaaggatgatgtccgggaggttaaagtagagcagaacagtgaaccatgtgccggctctagttctgaatctgatctccagacagtgtttaagaatgaaagcctcaacgcagaatcaaaatctggctgcaaacttcaggagcttaaagctaagcagcttataaagaaagacactgccacctattggcccctgaactggcgtagcaagttgtgtacctgccaagactgtatgaaaatgtatggagatctagatgtcttattcctgacagatgaatacgacacagttctggcttatgaaaacaaagggaagattgcccaggccactgacaggagcgatcccctaatggatacccttagcagcatgaatagagtccagcaagtggaactcatttgtgaatacaatgatttgaagactgaacttaaagactatctcaagagatttgctgatgaaggcacggttgttaagagagaggacattcagcagttctttgaagagtttcagtcaaaaaagagaagaagagtggatgggatgcagtattactgcagctagagtggagtatgaagctttctcattcaagccaatgaaaatgtgcttcccattcttggaataaaagaggtgtggttcacatttggccccctttccgtcctcctctgtttggagaggcctcgcgctcccttcattctctttagctgcagtagccaccgtgtggatgctgacttcacagccagcgtcctctgtgactcagctgatgcagctcattccacagacttcgccagtgtactcctactccagtgcacccagggttatttgcatagtttttaagtttgattttgttttgagaaagcaaattggtgtcttgtttaatgatctgttatttcactcccagatgtgtgtgttttgccacagagctgttgccttccagaacctcctccgcaggcatcacggaaggctctcttcccgtcacctagaacctctacaggtcccctcgcccctatgattgtggtgccttgggtcaaagcttcctcaagcctggtctgctccttctttcacgtccctgttttctgaggtttggtcatagcttagaaaggatcttggggcttgttttctctaggcccaacctccagagtagccaggactgatggttttctggtctggatgtctgtcacaggcggagagattaacagatgacagggttgaggaagcaagcctttgttatgaattttactaatacagttcaagtgaaattttcgttcatgattctattggcactagaattagaatttcagtactgtagtgctcacagggcttcctggagaacatttgcccgtatactagtcccttctctgctgcctagaaaacagaccgggtctcacccctgtgaaatcttggtggtttacgaagtcctctggatttcttgatattatcagggatattcataagcatatatcaaaaatggacctattttgatattctgttatgaaaatgttattagaaccccaataaattattatttttcccccttgaatctgctaaagaaaacagatcctgacttagcttacttgaaataagcagggcagggagccctgttttggaagagacagactgtggaagagattacaaacaaggcccgaggctgcacgaatgatgagttttgtgtatataatgttaatgtccaccgccacttccctaacgactatgagatcttttttttgaagatcctcatggaaggttgtacagagccccacatttgaggggaagtcctttcagttgatatgagatctctttaacacccctcagtctatgtaggaaatgccttgtgatacatagagaaccctcagcttctctctgcctctggaggaccaaggtctttcctgacagtcggagacacaccttgatgtatgttaataaaagcatttcaggctgtggggccaccatgtatattaatactccttatgtgtccagcatctgtgtattcattcgagtgcccaatccctggatgagatgaactaggccttataaaaagtcaaagcctcaaagaaatggcacaaccatgttcttcggcactcaggctcctaattgcagatcctcacgaagggtggtatgtggagctggaaggtcttgtggccacaggacatgctggtgagccctgagctggccttgtgcagagggctccgttcaaaggctcggggtgtctttgaggttgtttatcaagctggggaactcttccaagtctgacaatgtttcgaaccctttttgcaaggttgcactattagtataccatcatgtccggaaaacttttaatcttctcaaatatctgatgtaactaccagaaagtcccttacttcctatgaccaatcaggaccaagtcttggaggtgatgtgttacattacgtgcagcacaatagtaccgatcagttaactcagcgctgaagggcttgttttatgaaaggtactattccttctttcacattaactggaaacctctttttttacctgttgttcacaactagttttcttattgactgtattggactgtctcttcttgtagagactgattttggccaacatattaatgcatgttttatgcaaaacacaaatatgatattagttgcttttaaggagttctggcattgtatgtgcatttttgtagaaattgttactggacttataattacatacttaactctgatcaggtttctgtaaaatttaaataaaaccaatacaaaataaaaaaaaaaaaaaa

SEQ ID NO: 26034 - DNA, 1308 bp, Homo Sapiens
ggggggctgggctgggctccgcggctggagccgggctctacccagagcaagaccctgatggctgcggtgtttctggtaacgctttatgaatactcgccgcttttctacatcgcggtggtctttacctgcttcatcgtgaccaccggcctggtattgggatggtttggttgggatgttccagtaattctgagaaattcagaagagacccagttcagcacaagagttttcaaaaagcaaatgagacaagtcaagaatccttttggcttagagatcactaatccatcttcagcttcaattacaactggcataaccttgacaacagattgccttgaagatagcctccttacatgctactgggggtgcaatgttcaaaaattatatgaagctctgcagaagcatgtttattgcttcagaataagcactccccaagcattagaagatgctctgtatagtgaatatctctatcaggaacagtattttattaaaaaggatagcaaagaagaaatatattgccagttaccaagagatactaaaattgaagactttggtacagtacccagatctcgctatccattggtagcgctattgaccttagctgatgaggatgaccgggaaatttatgatattatttccatggtgtcagtgattcatattcctgataggacttataaactatcctgcagaatattgtatcaatatttactcttggctcaaggtcaatttcatgatcttaagcaacttttcatgtctgcaaataataatttcactccctccaacaattcctcttcagaagaaaaaaacacagacagaagtttgttggaaaaggtgggactctctgaaagtgaagttgagccatcggaagagaacagcaaggactgtgttgtttgccagaatgggactgtgaactgggtactcttaccatgcagacacacatgcctgtgtgatggctgtgtgaagtattttcagcagtgcccaatgtgcaggcagtttgttcaggaatcttttgcactttgcagtcaaaaagagcaagataaagacaaaccgaagactctttgaagacatcgtaacactgaaaagtacactttctactaaagatgcagaaattgatgatcttggaattcatcataacatggaatctacagtactgaccatcaatgaaaattatattttaacttcatatttgtatggtacttggatgataaaaattaattattcctttctgcttagtgaatgaatactggaatccatctgtgttgatacataaaaattcattcaactccaaaaaaaaaaaaaaaaaaaaaaaaaaaa

SEQ ID NO: 26035 - DNA, 1270 bp, Homo Sapiens
ctctgcctgtgcgaccgccgcccacccgagcctatctgggctgcgtcttctcgccgctgctcttcgtggcccaacgccccaatccttgcgtgtgcttgcagtcccaccccacactcagccttgtgtccctcgatccagtctccgacttccatttcccaccctaaaccgcctacccggtgtctgttccccgcccggttgtcctcgccctgctgcgctgagtgtcccctgttagcctcgaccccatggcgctgcagacgctgcagagctcgtgggtgaccttccgcaagatcctgtctcacttccccgaggagctgagtctggctttcgtctacggctccggggtgtaccgccaggcagggccgagttcagaccagaagaatgctatgctggactttgtgttcacagtagatgaccctgtcgcatggcattcaaagaacctgaagaaaaattggagtcactactctttcctaaaagttttagggcccaagattatcacgtccatccagaataactatggcgctggagtttactacaattcattgatcatgtgtaatggtaggcttatcaaatatggagttattagcactaacgttctgattgaagatctcctcaactggaataacttatacattgctggacgactccaaaaaccggtgaaaattatctcagtgaacgaggatgtcactcttagatcagccctcgatagaaatctgaagagtgctgtgaccgctgctttcctcatgctccccgaaagcttttctgaagaagacctcttcatagagattgccggtctctcctattcaggtgactttcggatggtggttggagaagataaaacaaaagtgttgaatattgtgaagcccaatatagcccactttcgagagctctatggcagcatactacaggaaaatcctcaagtggtgtataaaagccagcaaggctggctggagatagataaaagcccagaaggacagttcactcagctgatgacattgcccaaaaccttacagcaacagataaatcatattatggaccctcctggaaaaaacagagatgtggaagaaactttattccaagtggctcatgatcccgactgtggagatgtggtgcgactaggcctgaagaagtcagtgatttatagttcactaaaactgcacaaaatgtggaaagggtggctgaggaaaacatcctgattttgcttgcttttatatatgttatgtgtagatgaataaagtgtttgatcctttttgacaaaaaaaaaaaaaaaaaa

SEQ ID NO: 26036 - DNA, 2346 bp, Homo Sapiens
gccagccgagcggccagccagtgcggggctggccatgtaaggcccacaggcggtcctgcccgcccggtgccctgcggagagcctcgtgcagccctgggcaccgcccctgccctgccctgaccccttggccttgaaatgctgtcatcggaggagccgtcccgctcgggacaaggccagcatggacaaagctagagctggggcaagcaaggagccttcctgtcctcgaggccgtgggaagagaagcacgcccagggggccactcctgagagcctctctgtccaccaggcctctgcagaggggtcaccatggctctggcccgaggcagccggcagctgggggccctggtgtggggcgcctgcctgtgcgtgctggtgcacgggcagcaggcgcagcccgggcagggctcggaccccgcccgctggcggcagctgatccagtgggagaacaacgggcaggtgtacagcttgctcaactcgggctcagagtacgtgccggccggacctcagcgctccgagagtagctcccgggtgctgctggccggcgcgccccaggcccagcagcggcgcagccacgggagcccccggcgtcggcaggcgccgtccctgcccctgccggggcgcgtgggctcggacaccgtgcgcggccaggcgcggcacccattcggctttggccaggtgcccgacaactggcgcgaggtggccgtcggggacagcacgggcatggcccgggcccgcacctccgtctcccagcaacggcacgggggctccgcctcctcggtctcggcttcggccttcgccagcacctaccgccagcagccctcctacccgcagcagttcccctacccgcaggcgcccttcgtcagccagtacgagaactacgaccccgcgtcgcggacctacgaccagggtttcgtgtactaccggcccgcgggcggcggcgtgggcgcgggggcggcggccgtggcctcggcgggggtcatctacccctaccagccccgggcgcgctacgaggagtacggcggcggcgaagagctgcccgagtacccgcctcagggcttctacccggcccccgagaggccctacgtgccgccgccgccgccgccccccgacggcctggaccgccgctactcgcacagtctgtacagcgagggcacccccggcttcgagcaggcctaccctgaccccggtcccgaggcggcgcaggcccatggcggagacccacgcctgggctggtacccgccctacgccaacccgccgcccgaggcgtacgggccgccgcgcgcgctggagccgccctacctgccggtgcgcagctccgacacgcccccgccgggtggggagcggaacggcgcgcagcagggccgcctcagcgtgggcagcgtgtaccggcccaaccagaacggccgcggtctccctgacttggtcccagaccccaactatgtgcaagcatccacttatgtgcagagagcccacctgtactccctgcgctgtgctgcggaggagaagtgtctggccagcacagcctatgcccctgaggccaccgactacgatgtgcgggtgctactgcgcttcccccagcgcgtgaagaaccagggcacagcagacttcctccccaaccggccacggcacacctgggagtggcacagctgccaccagcattaccacagcatggacgagttcagccactacgacctactggatgcagccacaggcaagaaggtggccgagggccacaaggccagtttctgcctggaggacagcacctgtgacttcggcaacctcaagcgctatgcatgcacctctcatacccagggcctgagcccaggctgctatgacacctacaatgcggacatcgactgccagtggatcgacataaccgacgtgcagcctgggaactacatcctcaaggtgcacgtgaacccaaagtatattgttttggagtctgacttcaccaacaacgtggtgagatgcaacattcactacacaggtcgctacgtttctgcaacaaactgcaaaattgtccaatcctgatctccgggagggacagatggccaatctctccccttccaaagcaggccctgctccccgggcagcctcccgccgaggggcccagcccccaacccacaggcagggaggggcatccctccctgccggcctcagggagcgaacgtggatgaaaaccacagggattccggacgccagaccccattttatacttcacttttctctacagtgttgttttgttgttgttggtttttattttttatactttggccataccacagagctagattgcccaggtctgggctgaataaaacaaggtttttctaaaaaaaaaaaaaaaaaa

SEQ ID NO: 26037 - DNA, 1825 bp, Homo Sapiens
ggggagctctgcgaggggccggagcgcggcggagccatgcagtacccgcaccccgggccggcggcgggcgccgtgggggtgccgctgtacgcgcccacgccgctgctgcaacccgcacacccgacgcccttttacatcgaggacatcctgggccgcgggcccgccgcgcccacgcccgcccccacgctgccgtcccccaactcctccttcaccagcctcgtgtccccctaccggaccccggtgtacgagcccacgccgatccatccagccttctcgcaccactccgccgccgcgctggccgctgcctacggacccggcggcttcgggggccctctgtaccccttcccgcggacggtgaacgactacacgcacgccctgctccgccacgaccccctgggcaaacctctactctggagccccttcttgcagaggcctctgcataaaaggaaaggcggccaggtgagattctccaacgaccagaccatcgagctggagaagaaattcgagacgcagaaatatctctctccgcccgagaggaagcgtctggccaagatgctgcagctcagcgagagacaggtcaaaacctggtttcagaatcgacgcgctaaatggaggagactaaaacaggagaaccctcaaagcaataaaaaagaagaactggaaagtttggacagttcctgtgatcagaggcaagatttgcccagtgaacagaataaaggtgcttctttggatagctctcaatgttcgccctcccctgcctcccaggaagaccttgaatcagagatttcagaggattctgatcaggaagtggacattgagggcgataaaagctattttaatgctggatgatgaccactggcattggcatgttcagaaaactggatttaggaataatgttttgctacagaaaatcttcatagaagaactggaaggctatataagaaagggaatcaattctctggtattctggaaacctaaaaatatttggtgcactgctcaattaacaaacctacatggagaccttaattttgacttaacaaatagtttatgtactgctcttaggttgttttgataaagtgacattatagtgattaaattcttccccctttaaaaaaacagttagtggttttcactatttataaaaaattaattttgaactttttgttaaatttttaagttatagctttaaaggttttaataggaccttcttgaacgacttttctgtaatctgtttatctcccacttaatggaaaggcaaaggggtaccccaaatccagaggtgcctacatttcaggcagccttggagtattttaaaaggaaaacattctttacttttatatgacattcttatactgctgtctcaaatccaaaaacatttcagagctcttgtctcagagatgtgtgttctttttgtcagagatatggttgatgagaatcttaaatgcttgttttgcactatcacttagtacctgtttgaccaaggtgttaaggggatagtacctcccaattcaagcagagaaactgacctgactaaagttaatcgcagatgaactagaagtcacaggttaattaaatgtaagtagattgtagatactgttttatatcaaacaatgtttataatgtgtatatagaattgttcactgtaaaaaaaatggccaaaatgtgttttttttttaataagtaacttgactataaaataaagccgtccgtgggacgactgacctcgtaaaaaaaaaaaaaaaaaaaaaaaaaaaaaaaaaaaaaaaaaaaaaaaaaaaaaaaaaaaaaaaaaaaaaaaaaaaaaaaaaaaaaaaaaaaaaaaaaa

SEQ ID NO: 26038 - DNA, 2179 bp, Homo Sapiens
ggggacagccagggttagatgttctgaggaggcgggagcaaccgagagagcacgtgagcatctgtcctttctacccgttcctctttatctttagtgttcagtagcagcggggatagcccggggcccggtgtatggccacggagttacagtgtccggactccatgccctgtcacaaccagcaagtaaactctgcctcaaccccaagtcccgagcagctgcgacctggcgatctgatcctggaccacgcagggggaaacagagcctccagggccaaggtgattctcctcacggggtacgcccattctagcctgccggccgagctggactctggggcctgcggcggctccagcctcaactcagagggcaacagtggtagtggtgacagtagcagctatgacgcaccagctggcaactccttcctagaggactgcgaactctcccggcagatcggggcgcagcttaagctgctgcctatgaatgatcagatacgggagctacagaccatcatccgggacaagacagccagtagaggtgacttcatgttttctgcggatcgtttgatcagacttgttgtggaagagggattgaatcagctgccatataaagaatgcatggtgaccactccaacagggtacaagtatgaaggagtgaaatttgagaagggaaattgtggggtcagcataatgagaagcggtgaggcaatggaacaaggtttacgagactgctgtcgatccatacgaattggaaagatcctgattcagagtgatgaggagacacaaagagccaaagtatattatgccaaattccccccagacatttaccggagaaaagtccttctgatgtatccaattctcagcactggaaatactgtaattgaagctgtaaaggttcttatagaacatggagttcaacccagtgttatcatcctactcagtctgttctccactcctcatggtgccaaatcaatcattcaggagtttccagagatcacaattttaactactgaagttcatcctgttgcacctacacattttggacagaaatactttggaacagactaagttatttaagtaaaataattgtcttatgtaatattacaatcatgttttgattttctatttgttttactgattcacttgagggtggcagagaaaaatgtgttaaaatgctttttagttttggaagtgggtatatttgaggttatatctcatttagttatttgtttactgttggcaccgaattcaacaatgaagtatatgcaactcttacaaaacataaattttaataatattctaatgcaaattactgaaccctcagtgcattaaaattatttcctaatttatgagcctcttagtttggaggttgcttgaagccacaaataaaactcaaatgagagtcagttctttgtcccactgtagtttgcattttgtttagtttggttttagctctactaaggtttcacatatgtggctattgccacattcctctactgttttctttctgatactggacatgctagtaacttggagaggagaataaaagaatgtctcctggaattttacattcccattaatgtcctcattcaattggcagacctaggatgtatggttaactctcaggccattatgtttttcatggcccatttcccaaactgcattgttggtaggtgccttgctaagctgtaatgcagtgaagaagatggtggggcatttttagtaattggaactgtaacattaatctacaagattgaaccggggatgtctggatgctgacaagggagagccaagtactgttaatgccatcaatcctctaggaaggaattggtggtttttctgaagtgtgggggaaagggtggtttcttgctggatttcatggccagtaagtaaatttaaatgcttcatttttaatttggatgtttctgctagagacctttgatttggaaattagttattttgcatgtttgtcaactgtatatgtatgaaaatagaaaaaaaacatgctttttgtaaaaacccctaagatttgtatatgttcatctttaggcttctgaaagggagagaaatcatattggaaatcagtgttggtgttctgaaatctgcttgtaaaactctcatctcattttacattgatattaaaacattttaacactaaaaaaaaaaaaaaaaaaaaaaaaaaaaaa

SEQ ID NO: 26039 - DNA, 1625 bp, Homo Sapiens
gctgaagaagaggaggaggaggaggattccgaggtgcagggggagcagcccaagccggccagccctgctgaggaagacaaaatgccgccctacgacgagcagacgcaggccttcatcgatgctgcccaggaggcccgcaacaagttcgaggaggccgagcggtcgctgaaggacatggaggagtccatcaggaacctggagcaagagatttcttttgactttggccccaacggggagtttgcttacctgtacagccagtgctacgagctcaccaccaacgaatacgtctaccgcctctgccccttcaagcttgtctcgcagaaacccaaactcgggggctctcccaccagccttggcacctggggctcatggattggccccgaccacgacaagttcagtgccatgaagtatgagcaaggcacgggctgctggcagggccccaaccgctccaccaccgtgcgcctcctgtgcgggaaagagaccatggtgaccagcaccacagagcccagtcgctgcgagtacctcatggagctgatgacgccagccgcctgcccggagccaccgcctgaagcacccaccgaagacgaccatgacgagctctagctggatgggcgcagaggtgggcggggaggtggagtctcgtcggcctgccccagcaaggggaggcggcgggccctgaggaagatggacccacatggccactctatcaacctgtgtccccatgttccctgcttttttgttttgtttttttgaggtggagtctcactctttggcccaggctggagtgcagtgatgcgacctcggctggctgcaacctctacctcccgggttcaaacaattgtcttgtctcagcctcccaagtagctgggattacaggtgtgcaccaccatgcctggctaatttttagtagagatggggtttcaccatgttggcctggatggtctcgaactcctgacctcagatgatccacctgccttggcctcccaaagtgctgggattacaggcatgagccaccacacccggccatctcctgcctttttttttttggatggagtttcactcttgttgccgagatcatgctactgcactctccagcctgggctacagagtgagactctcaaaaaaaaataataataataataagagaaaatagacaaggtctccaggctggtcaactcctggcctcaaatgatcctcccacctcagcctcccgagcggccgggactacaggcaaacatcaccatgtccagctgtccccagctttctaatctggtctttctcttgccccagaacctcaagaaggcatgaagccagcccctgcagtgccgtccacccgcccctctgggcctgcctgtggctctgttgccctcctctgtggcggcaggacctttgtggggcttcgtgccctgctctggggcccaggcggggctggtccacattcccaggccccaacagccttcaaagatgggtaaaggagcttgccctccctgggccccccaccttggtgactcgccccaccacccccagccctgtccctgccacccctcctagtggggactagtgaatgacttgacctgtgacctcaatacaataaatgtgatcccccacccaaaaaaaaaaaaaaa

SEQ ID NO: 26040 - DNA, 1360 bp, Homo Sapiens
gttccgtcgtttccgttgccggctgtttgcagtggggaaaccgaggcagctcctgctccccctagttcttccgctcctgtgaggaaaaaaaaatgtttatttctttgtgggagttcttctatgggcacttttttcgattttggatgaaatggctattacgacagatgactgggaagtgtgaattgcagcgaatatttgatacctatgtaggtgcacaaaggacacacaggatagaaaattccttgacatactccaagaataaggttttacagaaggcgacacatgttgttcagagtgaagtggacaaatatgtagatgatattatgaaggaaaagaatattaaccctgagaaggatgccagttttaaaatatgcatgaagatgtgcttactgcagataactggttataaacagctgtatttggatgtagaaagtgtgaggaaaaggccatatgattctgataacctacagcatgaagagctactcatgaagctttggaatcttctaatgcccacgaagaagttaaacgctagaatctccaagcagtgggctgaaattggttttcagggtgatgatcccaagacagacttcagaggcatgggcatacttgggttaatcaatcttgtgtatttcagtgaaaattacactagtgaagctcatcagattctttcccgttcaaatcatccaaaattagggtattcttatgcaatagttggaatcaatcttacagagatggcttatagcttactgaagagtgaagctttgaagtttcatctctataaccttgttcctggtataccaacaatggaacactttcatcagttttactgttatcttgtctatgaatttgacaagttttggtttgaagaagaaccagaaagcattatgtatttcaatttgtatagagagaagtttcatgaaaagattaaaggacttttactggattgtaatgtagcacttactttaaaagtataaatcatccactgtatcttctatttctaccacattttgcacattcaacagaatttatatgttgtaataggaattatctgatcaattacactcttatatataatttcctacaaaaatatttcagaaattctatttaagaaagctagtggacaatcagtgtatgtttacaattgtttatacactgttctccaaaggtaccttatccttccaaagatcccctctgtagagtcatgcgaactacagtttggaacttgggacttagcccgttggtgtaaaagtataaatcaggtatttgtattaaattgattaaaatgtgtaaaaaaaaaaaaaaaaaaaaaaaaaaaaaaaaaaaaaaaaaaaaaaaaaaaaaaaaaaaaaaaaaaaaaaaa

SEQ ID NO: 26041 - DNA, 1685 bp, Homo Sapiens
ggcgtgcaagtatccgctgcggtgttctggtgctagagtggagaggctggcaaagaagaaggcacacgcatggtgagaatccggcctgagccgaagcggagtttgctatggacagcaaccatcaaagtaattacaaactcagtaaaactgagaagaagttcttaaggaaacagattaaagccaagcatactttgctgagacatgaaggcattgagacagtatcctatgccactcagagcctggttgttgccaatggtggtttgggtaatggtgtgagtcggaaccagctgctcccggttttagagaaatgtggactggtggatgctctcttaatgccacctaacaagccgtactcatttgcaagatacagaactacagaagaatctaagagagcctatgttaccctcaatggaaaagaagtagtggatgatttaggacaaaagatcactctgtatttgaattttgtggaaaaagtgcagtggaaggagttgaggcctcaagccttaccaccaggactcatggtagtagaagaaataatttcttctgaggaggagaaaatgcttttggaaagtgttgattggacagaagatacagacaatcaaaactctcaaaaatccttaaaacacagaagagtaaagcattttggttatgagttccactatgagaacaacaatgtagataaagataagccattatctgggggtcttcctgacatttgtgaaagctttttggagaaatggttgaggaaaggttacattaaacataaacctgatcaaatgaccataaatcagtatgaacctgggcaagattgtcatggattttaagcacccagatggcattgcagtgccagttatgttgcctcgtcggagtttgctggtgatgacaggagaatctagatacctttggacccatggaatcacgtgcagaaaatttgatactgttcaagcatctgagagtcttaaaagtggaattatcaccagtgatgttggagacttaactttaagcaagaggggactacgaacatcatttacatttaggaaagtgaggcaaacaccttgtaactgtagagcgtagagtggcagctctccaagaaattgttcgactcctgagaccaggtgggaaggcactcatttatgtctgggcaatggaacaagaatataataagcagaagtccaagtatcttagaggaaacagaaatagccaaggaaagaaagaggagatgaacagtgatacctcagtgcagaggtcacttgtggagcaaatgcgtgacatgggcagtcgagactcggcatcttctgtcccccgcattaatgactctcaggaaggaggatgtaattcaaggcaagtttctaattccaagctgcctgttcatgttaacaggacttctttttattctcaagatgtactggttccctggcaccttaagggaaatcctgataaaggcaaacctgttgagccatttggtcccataggatcccaggacccaagtcctgtgtttcatcgttactaccatgtgttccgtgagggagaactggaaggtgcctgcaggactgtgagtgatgtcagaattctgcaaagctactacgatcaaggaaactggtgtgtgattcttcaaaaggcctgattatttacctgaacacatcatatataaagaagaaatgctcacttaaaaaaaaaaaaaaaaa

SEQ ID NO: 26042 - DNA, 2030 bp, Homo Sapiens
tgtgacttcctggtgaaggtgggcacggtcacaatggggcccagtgcccggggcatctctgtggaggtggagtatggcccctgtgtggtagctagtgactgctggagtctgctgctcgagttcctacagagttttctaggcagccacacaccaggggctcccgcagtgtttgggaacagacatgatgcggtctacggcccagcagataccatggtccagtacatggaactcttcaacaagatccgcaagcagcagcaggtgccggtggctgggattcgttagtgatgagcagctgccagctgagctctgtcaccaggggtactccacaggaggagcaggtgctgactttcaggtccctggaccccagaaacccagggtagacatggactctactctccttctctggttctcagctgtggcttttgttctggggctgagtcccctccccaaccccctgactctcacacatagccccccatcagctgttttactccgtgccttactggatttggcctgtcctcaagaatggtaattatgaagagtggagaagtttggaccttgcctcctttaggggaaaggtaggacaggaatgtccctgcctggtactggtgggggaaatagtccgtatccccaactattaaggatttgtcccaggccaatggtgaacatgctgcattttatgtttggattgtgctgtaataagagcctcttccttccctcagaggatgtggctgggcttctatcctagagatggagtagaaggcacaactggtttgatagttactattttctgacctgtttgctgaagtgatttgcgaattgactttcctagggtgttgcctgagtcctttgaaatctccttctgacatctttcccttctgttgtgaaatatgttaagccacaggccaaactgctataagatcgaagtttgtttttttctcacctaataatagagaggtaatcagatggtctagggcagatttaactctacaaggttatcaggaactttgtttccttctgtcttattcagccattcccagtatgttttcttacccataagatcaaagcagactcatcagctccatatctgcattccactggggaaagagagagagaaaagagcagatttttaaaaaaagatatgactgagcattgctcagatcactgtggccacactttgctgaaagagatgctgggacatagaacctcttatctgggcagtcatgtgctgagttaaaactcagggattctgtgactacaagatgaaagacaatttggttgctgagatgcagttaatggcttctgttacatggagctcaatggacgtgcccaggaatgcttttggctgttattttgcagttaatacctcctgtaactaaagcatttgtttatgagttgacttgagagaagggctgatctcagagccgctttgagctaagttggattagtcacactaggaagttaattccacacctttcgtctaagtctcagtattgaggcctctccagttctcatgcaccctgatcttagggttagaatacttgaccctgatacctgcaccatgcttcatggttcctgagctctttctcctgtttcatttgagcctccaaactacatatttggtcatattgcctgcctaccccatgcctgctgcagaaatattcatccaggttaaccttgatatacacagagatggtcttggagaattgtgaatgtatgtactgtattgtcatcaaggatactgtcccttatttgaaggcatctaaagagaaactgttttcagatccaagtgctcagatctaaagcctctgcaacaagtcaggtggtggtcatgtttcccttctagttttggctgacaggaagctcagttcagtaccataactacagaacctgtcatctgtattttttgttctcaccccgtttttgttattttgtttctggttttttatattgaggtatgttttagatatagtttacaaaaataaaacgcacagatcttagaaaaaaaaaaaaaaaaaaaaaaaaaaaaa

SEQ ID NO: 26043 - DNA, 1341 bp, Homo Sapiens
cccggctggatgcggtgactggtgccagtgctcaggcgcccgctgcccttgacctcccgccccgcgagccctaactcagcgcaggaggaccggctgccgccgccgccgccgccaggtagaccaggcctggctgggttaggccagaagggtgtccctggcgcaggtctcccgcggagggcagaactagaaccaggttcccggccgtttccgaccacacggatggggcggacccatgtgagccctcactaattgcaggggacgaagctgggcatatggggaaactgggggtttccaggcgagtggacggtgggatgggatccgacgtgcacacccacgtttcaggctactgtttccacctcacgtcgccgcccctttgcttatggactcttgcagagttggattgagctcggactgtgtgacatagtggttgttgcagaagccccagggccactttctgactagtaccttgggcacctgacgtcatccctttgagtctcagtgtcctcttctgtaaagtgagggcgctttacctgaggggattgctgtaaggttggaatgaacctgcatgtgtgagtcatgtgggaagggaacagtcaatggggcctggggttctcttggagagctggtaaccagcctcgtccctgaggcaacagccagagggcgcctgtagtttccccacgcatggctgttagcagggcctctgcaggatctcctgtgggaggtccctacttctcactacaatctttagggcctttggaggatttcctatggaaggtccccacttctcaccacaacattctgggttaaaatgtccttggtaggaagatggggctgaagctagattttcttgcttgcattacaagcttctgaaccaaggacttcaatgtcacctggacttggattcacatcccagctccttcccttcctagctttaagactgtgtaaccttgggcaaatcccttaaccgctttaagccttaactgtttcatctgtaaaatgggactaacagtacctaccttccacaagcgtcaagaattaaatcaggcctggcgcggtggctcacgcctgtaataccaacaatttgggaggccgaggcaggcggatcacaaggtcgggagatcgagaccgtcctggctaacacggtgaaacaccgtctctactaaaaatgcaaaaattagctgggcgtggcggcgtgcgcctgtggtctcagctgctggggaggctgaggcaggagaatggcgtgaacccgggaggcggagcttgcagtgagccaagatcgtgccactgcattccagcctgggcgacagagcgagactccatctcaaaaaaaaaaaaaaaaaa

SEQ ID NO: 26044 - DNA, 1142 bp, Homo Sapiens
ttttaaggaacttcagagcagtatatattctgtctaaactcactgaatattttaagttgtaaatcaggtgtccaccaacctttatttttgcattgcaggagatgtgactgtaaagtagggagtttttttttttgagacagagtttcacccttgttgcccaggctagagtgtaatggtgcaatctccgctcactgcaacctctgcctcccaggttcaagcgattctcctgcctcagcctccctagtagctgggattacaggcatgcaccaccacacccggctaatttttttatatttttagtagagacaaggtttctccatgttggtcaggctggtctcgaactcccgacctcaggtgatctgcccgcctcagcctcccaaagtgctgggattacaggcgtgagccactgcgcccggccaaattatttttgtgggtagattcattctctttacctaatagtcataatttagtcagtgaagggacaacatctggggtaagagctatggaggaggtgctcagctttgtgagttttgtgccaggcatctttgctgaaaatggagatggcagcaagtgtgaatctgggggaatataagggaagacagaaaagccttaagagtagacggaggaagaagggtaccagaatagtccctgtggaggcaggcagatcagagctcagggtttgaaagtgggcctgagtaagggtcctgctagagaaactgcagatggaagctgagcagttaccaactgctaatgtgccaagtataccaagcacagcatgtgtcctgtagaggagcattattttaaacaatgttctactatcatctaccaaaataattgtggtaaaagtgtagtattttattttttccttttatgtcagcaatattttaaaatattgatctgtttatcttatatttttatggataaatgtagtatttgcctcatgattgtgagccactgagagtgcactgaacctattcacatgtctttaagatgttttgctgtgttaaaattttaggagagaaaaatacaagtgaataattatttaataggcatttattactttattttggagttgaattctgtcatttgaaaaagttcagtaatgtaataaatacaaagtgatctgcaaaaaaaaaaaaaaa

SEQ ID NO: 26045 - DNA, 1437 bp, Homo Sapiens
ggtactgagtgggggcgccgcgcctgcgcaaagcggacccgcggacggtggcgttaagggaacgctgaggtcccgcgctccccgaccgaggtatatctccatgaataacctaaatgatcccccaaattggaatatccggcctaattccagggcggatggtggtgatggaagcaggtggaattatgccctgttggttccaatgctgggattggctgcttttcgttggatttggtctagggagtcccagaaagaagtagaaaaagagagagaagcctaccgtcggagaactgctgcttttcaacaggatctggaagccaagtaccacgccatgatctcagaaaatcggcgtgctgtcgctcagttgtccttggaactcgaaaaggaacaaaacagaactgctagttaccgagaagcccttatctctcagggacgcaagttggtagaagaaaagaagcttctggaacaggaacgggcccaggtgatgcaagaaaaaagacaggtgcagcctttgagaagtgcgtatttgagctgcctgcaaagggaagaaaactggcaaaggagagccaggcttttgctgaaagaatttgaagctgttctcacagaaagacagaatatctactgcagtctgtttcttcctcgcagcaagcggctggagatagagaagagcttactggtgcgagcgtccgtcgaccccgtcgccgctgacctagagatggcagccggtctcaccgacatatttcagcatgatacatactgtggtgatgtctggaacaccaacaaacgccagaatggcagactcatgtggctctatctcaaatactgggaactcgttgtcgaactgaagaagtttaagagagtagaggaagccatactagaaaagtaagacaagagtgaaatcaaactgcttttagtgactcgaggccaggcagtcatgcgccttctgggtctccggcgtcttccgttcccgtgctgcccgtgtcatggccacaccgtcacccttcagcagcgacctccactcccgccaccgtctgagcagaagtgcaccgaagcctcagagacagagggtctcctcccgatgctctgccgctgttggggatatggtttcttgaagcatttttaggctgccagtattgtattaagcagaacagtataacctcgtattttagctccagggtaaaaatggttttttaaaaagtcaaatacaatactggtccttaccacaagtaattttctgtctgtttcatcactccctaaatactttctcctcaaattatttttctctgtcaccagattacattaagaatttgtcagataatgtgtagaactgcataacaggtaataggaagtagtaatattatattatcaagggtttatattttaaagatctctctcactccataaaggggaaataccaagtgttaaaaaaaaaaaaaaaaa

SEQ ID NO: 26046 - DNA, 1387 bp, Homo Sapiens
gtggcgggaaaagcgaccttttctgagcgcgtttgcctgttgagtggtagcctttcccctcaaccagcaatggaggagcagccccagatgcaagacgccgacgagcccgcggactccggaggggaaggccgggcaggcgggccaccgcaggtcgccggcgcccaggcggcgtgcagcgaggaccgcatgaccctgctcctcaggctgagagcacagacaaaacaacaactcttagaatataaatcaatggttgatgcaagtgaagaaaaaactccagaacaaattatgcaagaaaagcaaatcgaagctaaaattgaagacctggaaaatgaaattgaagaggtaaaagttgcttttgagataaaaaagcttgcattagacaggatgagactttcaactgcacttaaaaaaaacctggagaaaattagcagacagtctagtgtgctcatggataacatgaaacacctattagagctaaataaattaataatgaaatcacagcaggaatcttgggatttagaggaaaaactgcttgatattagaaagaagagattgcaattaaaacaagcttcagaaagtaagcttttagaaatacagactgaaaagaacaaacagaagattgatttggacagtatggaaaactcagagaggataaagatcatacgacaaaacctacagatggagataaaaattactactgttattcaacatgtgttccagaaccttattttggggagtaaagtcaattgggcagaggatcctgcccttaaggaaattgttctgcagcttgagaagaatgttgacatgatgtaataagaattcatttctgacatattttacatttctggcaatctcaactcttatttggaatacttctgtgcatttgtctgtccaccgtaattttagaaaagcatatccataacgtttacagttgtagtacagttgtggttagttatttgtagtgggattgaaagtaatttttttctttttatatttctatatttagtttgtttttttgttgttgttgttttttgagatggagtctcgctttgttgcccagactggagggcagtggcgcgatctcggctcactgcaacctctgcctcccgggttcaagcagttctgcctcagcctcccaagtagctgtgactaaaggtgcacgccgccatgcccagctaattttttgtattttagtagagacggggtttcaccgtgttgcccaggctgctctcagaactcctgagctcaggcagtccaccgcctcggcctaccgaagtgctaggattacagacgtaagccaccgagcctggtctagtttgcattttttttctatcagttttataagttaagaaataaaaggaattaatgttaaaaaaaaaaaaaaaaa

SEQ ID NO: 26047 - DNA, 1848 bp, Homo Sapiens
tgcatacttctccaaagtgatatatgaagactcttttctttgcataaaaagcattaggcgtataaatgtataaatatattttatcatgtacagtacaaaaatggaaccttatgcatgggccttaggaatacaggctagtatttcagcacagacttccctgcttgagttcttgctgatgcttgcaccgtgacagtgggcaccaacacagacgtgccacccaaccccctgcacacaccaccggccaccaggggcccccttgtgcgccttggctttataactcctctgggggtgatattggtggtgatcacagctcctagcataatgagagttccatttggtattgtcacacgtctcctgcctcgcttgggttgccatgtttgagcgatggccctgttgatttcaccctgccttttactgaatctgtaaattgttgtgcaattgtggttatagtagactgtagcacattgccttttctaaactgctacatgtttataatcttcatttttaaagtatgtataattttttaaagtatgtattctattcatatggtctgcttgtcagtgagccagacttgcttactatattcctttataataatgctagccacttcctggattctttagtaatgtgctgtatgcaagaactttccagtagcagtgaaggagggttgcctctccaagcttcctaagggatgctgccctgggtggggatgcattgcagaggcagtagtagcatgggggctagagtggggagcgagatggaaaagggtggggggataggagaattctagagtgcttccagcatgagggtcctgagaacttctgtcctgagttcagagaaacatgcaaagtaactaacaaaatcgctacttgcctttgcagttttacagacccagggagctgctttgggagtgagaaaggcaaccctccaatgtgtttcaactttaaaatgttgaattcttttcagacatgtggtatctcatttattctccttttctagcgtttgttgaatttcaggcagaatgtcttacagaatgtcctagaaccagattatcatttaatccgaaacagctgaggaagggacagagaaggtacaagggcaaggcagcataaaacagatcaggagaatgaagagggaatgctttggttttttgttctgttttgttttttctttttcaagtaactaaaacagcatctacatgtagagtgtcgtggagagctgagaccagggtaaagtcaagtgcagcatcagtactgcgagacccaccagcccctggagagggtcagctgagaatctggtagtgaagcctgtgtagggtcccggcaccctcaccctcagccacctgcagagaggccagggccccagagactagcccggttctgaagtgggcaggggtgctgccagagccctccgccccttatattgagaccctgctttcaggacaggccagccgttggccaccatgtcacattctgagtgagtgtcacgggtccctaacaataattttctgatctggagcatatcagcagaatgcttagcctcaaggggcctggcagctgtaatgtttgatttatgatgagaactatccgaggccacacttggcctctaaataagctgctctagggagccgcctactttttggtgagaaattagaagagtacctaatgttgaaaacatgacatgcgctcttgggatctgctgttctctccagggctccagaacctgatacctgttaccaaagctaggaaagagctttatcacaagccttcactgtcctggcatgagaactggctgccaggctcagtgtaccccattaaatgtgaatgaatctgaaaaaaaaaaaaaaaa

SEQ ID NO: 26048 - DNA, 1473 bp, Homo Sapiens
cttcaacactgtggaagctttgttctttcgctcttttgcaataaatcttgctactgctcactctttgggtccacactgcctttatgagctgtaacactcaccgcgaaaggtctgcagcttcactcctgaagccagcgagcccacgagcccacagggaggaatgaacaactccagatgcaccgccttaagagctgtaacactcacggcgaaggtctgcagcttcactcctgagccagcgagaccaggaacccaccagaaggaagaaactccgaacacatccgaacatcagaaggaacaaactccagacggcgccaccttaagagctgtaacactcaccgccagggtccagggcttcgttcttgaagtcagtgagaccaagaacccaccaattccggacgcagtaccatgatcaacaggatgttactagcaacttccttggagcgatgtggttgatatcaataacttttctctccattggttatggtgacatggtacctaacacatactgtggaaaaggagtctgcttacttactggaattatgggtgctggttgcacagccctggtggtagctgtagtggcaaggaagctagaacttaccaaagcagaaaaacacgtgcacaatttcatgatggatactcagctgactaaaagagtaaaaaatgcagctgccaatgtactcagggaaacatggctaatttacaaaaatacaaagctagtgaaaaagatagatcatgcaaaagtaagaaaacatcaacgaaaattcctgcaagctattcatcaattaagaagtgtaaaaatggagcagaggaaactgaatgaccaagcaaacactttggtggacttggcaaagacccagaacatcatgtatgatatgatttctgacttaaacgaaaggagtgaagacttcgagaagaggattgttaccctggaaacaaaactagagactttgattggtagcatccacgccctccctgggctcataagccagaccatcaggcagcagcagagagatttcattgaggctcagatggagagctacgacaagcacgtcacttacaatgctgagcggtcccggtcctcgtccaggaggcggcggtcctcttccacagcaccaccaacttcatcagagagtagctagaagagaataagttaaccacaaaataagactttttgccatcatatggtcaatattttagcttttattgtaaagcccctatggttctaatcagcgttatccgggttctgatgtcagaatcctgggaacctgaacactaagttttaggccaaaatgagtgaaaactctttttttttctttcagatgcacagggaatgcacctattattgctatatagattgttcctcctgtaatttcactaactttttattcatgcacttcaaacaaactttactactacattatatgatatataataaaaaaagttaatttctgcacataaaaaaaaaaaaaaaaa

SEQ ID NO: 26049 - DNA, 1289 bp, Homo Sapiens
gcagttcctccgcgtctactgcgagtcaggccgtgatggcggacgcctgggaagagattaggcggttggcggccgacttccagcgggcgcagttcgccgaggccacgcagaggttgtccgagcggaactgcattgagattgttaataaattgattgctcagaaacagctagaagtagttcatacactcgatggaaaggaatatattactccagcccaaattagtaaagaaatgagagatgagctacatgtccgaggtggtcgagtaaacattgttgatctacaacaggtaattaatgtggacctgattcatattgaaaatagaattggtgacattattaaatcagaaaagcatgttcagttagtgttgggacaactgatagatgagaattatttggatcggttggcagaagaggtcaatgataaattgcaagaaagtggtcaggtcaccatatcagaactgtgtaaaacttatgatcttcctgggaactttctgacacaggcactaactcagcgacttggtagaattatcagtggacatattgatcttgataatagaggagtaatttttacggaagcttttgtagctcgacataaagcacgtatccgtggactattcagtgctattacccggcctacagctgtgaattctttgatttcaaaatatggatttcaggagcagcttctttactctgtgcttgaggaacttgttaatagcggacgcttacgaggcactgtggttggtgggagacaggataaagctgtgtttgtccctgacatctactccaggacacagagtacttgggtggattcctttttcaggcagaatggctatctagaatttgatgctttgtccagacttggaatcccagatgctgtaagctacataaagaaaagatataagactacacaactcttgtttttgaaagcagcttgtgttggtcaaggacttgtggatcaagtggaagcatcagtagaagaagccatcagctctggaacatgggttgatattgcacctctgctacccacttctttatcagttgaagatgctgccatattgcttcagcaggtgatgagggcattcagcaaacaggcctcaactgtagtctttagcgacactgttgtagtcagtgaaaaatttataaatgactgtacagaactgttccgtgagctgatgcaccagaaagctgaaaaggaaatgaaaaataatcctgtgcatttaatcactgaagaagatctgaaacaaatctccactttagaaagcgttagtacaagtaaaaaaaaaaaaaaa

SEQ ID NO: 26050 - DNA, 2110 bp, Homo Sapiens
aacatggcggcggaaagtggtagcgattttcagcagagacgtagaaggcgccgggacccggaggaaccggaaaaaacagaactcagcgaaagagagctggcagtagcagtggcggtgtcccaggagaacgatgaggagaacgaagagcgctgggttggacctttacctgtggaggcaacactggccaagaagaggaaagtcttagagtttgaaagagtctatcttgataatctccccagtgcatccatgtatgagcgcagttacatgcatagagatgttatcacccatgtggtatgcaccaaaacagattttattattactgccagtcatgatggacatgtcaagttctggaaaaaaatagaagagggaattgaatttgttaaacattttcgtagtcacctgggagttattgagagtattgcagttagctctgagggagcattgttctgttctgtgggtgatgataaagcaatgaaggtgtttgatgtagtgaactttgacatgatcaacatgctgaaacttggctattttcctggacagtgtgagtggatctattgcccaggggatgcaatttcttcagttgctgcttccgaaaagagtacaggaaaaattttcatttatgatggccgaggagataaccagccacttcatatttttgacaaactccatacatcacctcttactcagatacggctaaacccagtttacaaagcagtagtgtcttctgacaaatctgggatgattgaatactggactgggcctcctcatgaatataaattccccaaaaatgtgaactgggaatataaaactgacactgatttatatgaatttgccaagtgtaaggcttatccaaccagcgtatgtttttcaccagatgggaagaaaatagctactattggttctgatagaaaagttagaattttcagatttgtaactggaaaactcatgagagtctttgatgaatcactaagcatgtttactgaactgcaacagatgaggcaacagttaccagacatggaatttggccgacgaatggctgtagaacgtgagttggagaaggttgatgctgtaagattaattaatatagtttttgatgaaactggacacttcgtgctgtatggaacaatgctgggcattaaagttataaatgtagagacaaaccggtgtgtgcggattttaggcaaacaagaaaatattagagtgatgcaattggctttgttccaggggatagccaaaaagcatcgtgctgcaactactatagaaatgaaagcttctgaaaatcctgttcttcagaatattcaagctgacccaacaatagtctgtacatcattcaaaaagaatagattttatatgtttaccaaacgagaaccagaagatacgaaaagtgcagattctgatcgagatgtttttaatgagaaaccttctaaagaagaagtcatggcagctactcaagctgaaggacctaaacgagtttcggacagtgccattatccacaccagcatgggagacattcacaccaaactttttcctgttgagtgccctaagacagtggaaaacttctgtgttcacagcagaaatggttattataatgggcatacatttcaccgtataattaagggctttatgattcagactggagatccaacaggtactggtatgggaggagaaagcatatggggaggagaatttgaagatgaatttcattcaacattacgacatgacaggccgtacacactcagcatggctaacgcgggatcaaatactaatggatcccagtttttcataacggtagtaccaacgccttggcttgataataagcatacagtatttggacgagtgactaaaggaatggaagttgtacagaggatctccaacgtcaaagtcaatcccaaaacagataagccctatgaggatgtcagcatcataaatattactgtcaagtaaaataagatttgttttaatgtacttgcaaataaaaatacaatattaaacagattattttacattaggaagcttaggacttgctgaatatacagatcatgtttcaaagatacagtatttttgtattttttattaaaggctattttttaaaaaaaaaaaaaaaaaaaaa

SEQ ID NO: 26051 - DNA, 1504 bp, Homo Sapiens
gccactgcctggcaccccgacgggaggggctccggatcgttcggagccggctgaaccccttcggccgcgagcgaccgcatgagtcgggggactatgccccagcccgaagcgtggccaggcgcgagctgcgccgagacgccggcgcgggaggcggcggccacggcgcgggacggcgggaaggcggcggccagcgggcagccgcggcccgagatgcagtgcccggccgagcatgaggaggacatgtaccgtgctgcagatgaaatagaaaaggagaaagaattgcttatacatgaaagaggggcatcagaaccgagattaagcgtagctcctgaaatggatatcatggactactgcaaaaaagaatggagaggaaatacacagaaagcaacgtgtatgaaaatgggctatgaagaggtttctcagaagttcacctccatacggcgagtccgtggtgataattactgtgcactgagggccacgctgttccaggccatgagccaggctgtggggctgccgccctggctgcaggacccggagctcatgctgttaccagaaaaactcataagcaaatacaactggatcaagcaatggaaacttggactgaaatttgatgggaagaatgaggacctggttgataaaattaaagagtcccttactctgctgaggaagaagtgggcaggcttggctgaaatgagaactgctgaagcaagacagatagcttgtgatgaactattcacaaatgaggcggaggaatatagcctctatgaagctgtaaaatttctaatgctaaacagagccattgaactatataatgataaagagaaaggaaaggaagtaccatttttctctgtgcttctgtttgctcgggacacatcaaatgacccaggacagcttctgaggaaccacctcaaccaggtgggacacactggtggtcttgaacaggttgaaatgttccttcttgcctatgctgtgcgccacaccatccaggtgtaccggctctccaagtacaacacggaagaattcatcacagtctaccccaccgacccacccaaggactggccagtggtaacgctcattgctgaggacgatcggcactataacatccccgtcagagtgtgtgaggagaccagtctatgagagacgcatgctcctgacagcctggcgacgtggcgaagatgcacaggtggctcctgggcttgggctgcaggtttgggggtctctaagaacaatctctgagaagaacccttgggcccctgggagccaagttggacaggatgtcctgaagactagcttttgataagagaaattaaccaagtctttcccctcatctatgatgcaatatatttcagtgggggccttcagagcacacctgttggacggtgcaaaccatatcttctccagaaggcaaatacttttgtatcagaggaaactcagttttggagaggaatatgttctttatatctcaaatcaaaactctctctaatggtaaaaaaaaaaaaaaaaa

SEQ ID NO: 26052 - DNA, 2110 bp, Homo Sapiens
cgcggagcaatggcgacctttgtgagcgagctggaggcggccaagaagaacttaagcgaggccctgggggacaacgtgaaacaatactgggctaacctaaagctgtggttcaagcagaagatcagcaaagaggagtttgaccttgaagctcatagacttctcacacaggataatgtccattctcacaatgatttcctcctggccattctcacgcgttgtcagattttggtttctacaccagatggtgctggatctttgccttggccagggggttccgcagcaaaacctggaaaacccaagggaaagaaaaagctttcttctgttcgtcagaaatttgatcatagattccagcctcaaaatcctctctcaggagcccagcaatttgtggcaaaggatccccaagatgatgacgacttgaaactttgttcccacacaatgatgcttcccactcgaggccagcttgaagggagaatgatagtgactgcttatgagcatgggctggacaatgtcaccgaggaggctgtttcagctgttgtctatgctgtggagaatcaccttaaagatatactgacgtcagttgtgtcaagaaggaaagcttatcggttacgagatggtcattttaaatatgcctttggcagtaacgtgaccccgcagccatacctgaagaatagtgtagtagcttacaacaacttaatagaaagccctccagcttttactgctccctgtgctggtcagaatccagcttctcacccaccccctgatgatgctgagcagcaggctgcactcctgctggcatgctccggagacactctacctgcatctttgcctccggtgaacatgtacgatctttttgaagctttgcaggtgcacagggaagtcatccctacacatactgtctatgctcttaacattgaaaggatcatcacgaaactctggcatccaaatcatgaagagctgcagcaagacaaagttcaccgccagcgcttggcagccaaggaggggcttttgctgtgctaaattaggatttgagggtgtgggaccctcaccgaattcattgattactgaaaattgaatgttttttgggtccacatttcaaggctgaagtgtatagtgtatatataacctttcctatggaaatgtgacattgagtacattttgtgttgctgttgtgaagccattaatataaatctttggtaatgacccatatctctatatgtatgtgttcccagttgtgggagcaggcactaatgaaatcctgtgcctggaatggagatatttaggtacctgaggcttagtgtcctgtggtctgcatgtaagatagatgacatcctagaacaaagaagctgttttaacttaatccccctgatcagcaggatatctgtgtgttcagtgacatcatacattctgtatctagaagtctaaaatttctgcctttctcctaaagaatgtgttcttgcattttggttgaaataacctacacagtgttaaaaatcagatacctcctttagtgaccagttcaaattttaatagcgataggtagcccctgagaaatttatcactataactccacaggaaatatgacttggaagtgctctgtgtactaaacaaaataaagcccctctttgcatttaaaaccaaagtcaaaacaaaactcttgtaatgcaattaattaactttatgtcttcccatgactcaagttttgttaaatatgcccaaaaactttgattggcagtttcttcggttaattattcctatagaatgtattttaagaaatctatacaaattggatatatgcttggtaattctccagtttctaggaggtacctatttctaccgtttcaagtgatgaagtgaaaataatttacattcgatagtgttactgataacaaacctacttaagagatatgttgctttttacttaagggatagtgttgatagataaattagaatgtatagataggtttgtgaaagtctaaataatggttgtatagatatgtatatatggttcacatatctggatctgctggatctgtgtatttgattttgtactttaaatgtgacaaataaaccttttgggagaaaaaaaaaaaaaaaaaaaaaaaaaaaaaaa

SEQ ID NO: 26053 - DNA, 576 bp, Homo Sapiens
ggcttttttttttttttttttaaataaacagatgctctcacctgggaagaggagacagggaggggaaccaattgaagaaagaggagaaaagtcttagagtgtggaaaaggcaaccaggttggccgtaaggtgcctgctggaatgcgtgtgcctccacacgggtctgggcatccggactgataaccagccggccagactgagggatggaaggcactgagatgggggcccgtccaggcggacacccgcagaaatggagctttctgtggtctcttgcactctggctgcctcttgccctctctgtgtctctctttcttggtctctccctctctcctcctcagcctggtctttctctttggtgcacacttagttattgttgtgagcaatggaagttcaaaggaactccctctccagctcttctgaatcttgggacacagcctaaaaaggacaaaaagttagaagacagcatagcaactcagctcagggagctaccagagaaaaatagcaactgatgtgggtgctttttttttttttttttaatttgaataaaaagaattagaagtgaaaaaaaaaaaaaaa

SEQ ID NO: 26054 - DNA, 986 bp, Homo Sapiens
attcaagatgatgttagagagatgacagagtctaggttagggagggcctgagtccttgtagactctgagtacggtgctgagcagggaagagacaggctctggcttagggtttagaaggaacacaggctactgcgatgaggattgtctgaaggggaacaaaggccaagatgttgtttgaagccgtgagactgagtgagatcatggaggaagtgaatgtaaatagaaaagggaagaagtctgaagacggagccctgagacactccattgtaaactggaagatgaggaagagccagcaaaggagactgagaaggggcagccagtgaagatggagccagggctagagtaagagccccttctgggatgctgtgacccccaagtttgaagactgctgataaccccaatctacgaagactagctatggaacttcctacactgagacaactccagtggaactctgataattatcctaaaataaggaggcttcttcagtagccctcgaaatatgttcaaatacatgattacatttatgtccttaatattgctattagtttctgatgttaatgtaaaagttggggaaaaagtggaaaagttaaagcagtgcaggttaattcaatgccagagtaacttctcagagggtgtatattcagtgtgaacaattttcaacagagaaatgtcaacttctggccacaacggcaaccagtaaaatgactatttttactgtcttatctattaatgaagaggagattgcataatatagatgaaggagcatagtatttgcaggtggaacgcctagcagggcttgagtctcaactctgctgcttttactctaattgaccgagacaagtcatttaaactaatagagcttcaattttctcatatctaatgtaacataacaattcacagccttttactttgtagttatcgtgaagatctaatcgcagtgaaatatatttatatatctgtctgccgataaaaaaaaaaaaaaa

SEQ ID NO: 26055 - DNA, 990 bp, Homo Sapiens
tttattgttatccagctggaggactcctaggggcagcagcaggaggaataccagggccacggaggggccaggagtctcacagtggagggcagactctaacagatgccagctgaacgctcgctggccctggatgtcatacgagttggggaccagaaatctgggctcagagaacccgtccagggagatttgaagccatgggttatcttctagagttgatactgataatatattttaatttttattgatgtttaataccttctgaaacaggagggtaagatcagatgggaagcccctctgttgaaggatcttgggaaccttggtggtttttttttttttttggttttttttttttgatcgagctgtggacatccttcttaattcgattctgaggatttgtttaactaaaaagttcccaaacacagaaagggcctccccacctgctttggggagctgtctgtgctgggagtgccaggcatcccatgggacccatcactgccagtgtctgtgcctcccagaggtcagccgtgtctgccctggctctgtctcctctgtgacagggcagagcatttctggtcagtttctccatggtgcctcccacccctttgtaaagtggatggacatgatggaattcagttgtctcaccctgatagcctgggtgttgatattcactttacccgcactcagacacaggcgaccttgaagcagttctcggtgtgtagagtccacgtgacagtccccacagcctccccagatagctgtgtgcctgtgcgctactgctgtgccattttcccaacttggcgtttcactaaatgcagctgatctctctctctgtgcactcgtgatccatgttgaacaatacatgtaggttctttttccacgcaatgtaagaacatgatatactgtacgttggaaagcatttaccttatttatatacctgaatgttcctactacacaaataaacatatattaaattctaaaaaaaaaaaaaaa

SEQ ID NO: 26056 - DNA, 787 bp, Homo Sapiens
gattgcttgagcccaggagttggatgttgcagtgagccaagatcgcaccattgccctccactctgggccacggagcaataccctgtctcagaaaacaaacaacaaaaagcagaaacgctgaaggtgtcggtttacgggaaaaccgcctgtcagaacacttggctactcctaccccagatcagtggacctgggaatgagggttggtcccgggaggcttttctccaagctgttgccaccagacccgccatgggaaccctggccacagaagcctcccggggagtgagccagagcctggaccgctgtgctgatgtgtctggggtggagggagggtggggagtgtgcaagggtgtgtgtgtgcccggggggtgttcatgggcaagcatgtgcgtgcctgtgtgtgtgcgtgcccctcccctgcagccgtcggtggtatctccctccagccccttcgccaccttctgagcattgtctgtccacgtgagactgcccagagacagcagagctccacgtggttttaaggggagacctttccctggacctgggggtctcgccgtatctcatgaccaggtgctaaatgacccgacatgcatcacctgcctttcgatgaccaacctccctgtccccgtcccgctgacctgcccccgtggcgtctcacggtgatgcctgctcctgacattggtgttcactgtagcaaactacattctggatgggaattttcatgtacatgtgtggcatgtggaaaatttcaaataaaatggacttgatttagaaaaaaaaaaaaaaaaaa

SEQ ID NO: 26057 - DNA, 2344 bp, Homo Sapiens
gttggttctgtgcgcctcagagttggagcacacagctgtattaaaaaggcaaatcgaaggccgggcgcggtgactcacgcctgtcatcctagcactttgggaggccgaggcggctgaatcacttgaggttaggagtttgagatcagcccgggcaacatggtgaaaccccgtctctacaaaaatagaaaaattagccgagcgtgatggtggatgcctgtaatcctagctcctcgggaggctaaggagtataatgtctcaggaaggcgattatgggaggtggaccatatctagtagtgatgaaagtgaggaagaaaagccaaaaccagacaagccatctacctcttctcttctctgtgccaggcaaggagcagcaaatgagcccaggtacacctgttccgaggcccagaaagctgcacacaagaggaaaatatcacctgtgaaattcagcaatacagattcagttttacctcccaaaaggcagaaaagcggttcccaggaggacctcggctggtgtctgtccagcagtgatgatgagctgcaaccagaaatgccgcagaagcaggctgagaaagtggtgatcaaaaaggagaaagacatctctgctcccaatgacggcactgcccaaagaactgaaaatcatggcgctcccgcctgccacaggctcaaagaggaggaagacgagtatgagacatcaggggagggccaggacatttgggacatgctggataaagggaaccccttccagttttacctcactagagtctctggagttaagccaaagtataactctggagccctccacatcaaggatattttatctcctttatttgggacgcttgtttcttcagctcagtttaactactgctttgacgtggactggctcgtaaaacagtatccaccagagttcaggaagaagccaatcctgcttgtgcatggtgataagcgagaggctaaggctcacctccatgcccaggccaagccttacgagaacatctctctctgccaggcaaagttggatattgcgtttggaacacaccacacgaaaatgatgctgctgctctatgaagaaggcctccgggttgtcatacacacctccaacctcatccatgctgactggcaccagaaaactcaaggaatatggttgagccccttatacccacgaattgctgatggaacccacaaatctggagagtcgccaacacattttaaagctgatctcatcagttacttgatggcttataatgccccttctctcaaggagtggatagatgtcattcacaagcacgatctctctgaaacaaatgtttatcttattggttcaaccccaggacgctttcaaggaagtcaaaaagataattggggacattttagacttaagaagcttctgaaagaccatgcctcatccatgcctaacgcagagtcctggcctgtcgtaggtcagttttcaagcgttggctccttgggagccgatgaatcaaagtggttatgttctgagtttaaagagagcatgctgacactggggaaggaaagcaagactccaggaaaaagctctgttcctctttacttgatctatccttctgtggaaaatgtgcggaccagtttagaaggatatcctgctgggggctctcttccctatagcatccagacagctgaaaaacagaattggctgcattcctattttcacaaatggtcagctgagacttctggccgcagcaatgccatgccacatattaagacatatatgaggccttctccagacttcagtaaaattgcttggttccttgtcacaagcgcaaatctgtccaaggctgcctggggagcattggagaagaatggcacccagctgatgatccgctcctacgagctcggggtccttttcctcccttcagcatttggtctagacagtttcaaagtgaaacagaagttcttcgctggcagccaggagccaatggccacctttcctgtgccatatgatttgcctccagaactgtatggaagtaaagatcggccatggatatggaacattccttatgtcaaagcaccggatacgcatgggaacatgtgggtgccctcctgagaatcttgaggcactgtgaaatttaagtgtaagacattgagccacaaacatggaatctcttctttgtactggatgtccacttcccttaaagtcttatttgcacccttacaaaatctttccaaaggtcactcttatgaatggatgttggttatacttttaatggacattaacattcctaataaagtattagtttcttaaaaaaaaaaaaaaaaaaaaaaaaaaaaaaaaaaaaaaaaaaaaaaaaaaaaaaaaaaaaaaaaaaaaaaa

SEQ ID NO: 26058 - DNA, 1446 bp, Homo Sapiens
agatgatttccctaatgaattggaaaaactgatcagtcaaatacagccagaggtggaccgagaaagagctgttgtggaagtgaatatccctgtagaatctgaagttaatctgaagctgcagaatataatgatgctacttcgtaaatgttgtaatcatccatatttgattgaatatcctatagaccctgttacacaagaatttaagatcgatgaagaattggtaacaaattctgggaagttcttgattttggatcgaatgctgccagaactaaaaaaaagaggtcacaaggtgctgcttttttcacaaatgacaagcatgttggacattttgatggattactgccatctcagagatttcaacttcagcaggcttgatgggtccatgtcttactcagagagagaaaaaaacatgcacagcttcaacacggatccagaggtgtttatcttcttagtgagtacacgagctggtggcctgggcattaatctgactgcagcagatacagttatcatttatgatagtgattggaacccccagtcggatcttcaggcccaggatagatgtcatagaattggtcagacaaagccagttgttgtttatcgccttgttacagcaaatactatcgatcagaaaattgtggaaagagcagctgctaaaaggaaactggaaaagttgatcatccataaaaatcatttcaaaggtggtcagtctggattaaatctgtctaagaatttcttagatcctaaggaattaatggaattattaaaatctagagattatgaaagggaaataaaaggatcaagagagaaggtcattagtgataaagatctagagttgttgttagatcgaagtgatcttattgatcaaatgaatgcttcaggaccaattaaagagaagatggggatattcaagatattagaaaattctgaagattccagtcctgaatgtttgttttaaagtggagctcaagaatagcttttaaaagttcttatttacatctagtgatttccctgtattgggtttgaaatactgattgtccacttcaccttttttattatatcagttgacatgtaactagtaccatgcgtacttaaatagatggtaattttctgagccttaccaagaacaaagaagtatccatattaagtttagattttcagttaatttttgagactgagtagtattcttggatacaggctgatgtgtacttaaccacttccagatttatacagtcttcctgtggaagtttagtaaatgtctttttccctcctttcttctagtaatgcagttcatgggctttaggtacttcagttatgaagtaggcttttcatggggagagattgggattatgctctctgttgtttaagaaactgtttgattttagagtctatttctatgagatagtttaccaaataaatgttccttataagatgaaaaaaaaaaaaaaa

SEQ ID NO: 26059 - DNA, 3578 bp, Homo Sapiens
cgccggcggcggcggagactccggggctgcggcgccgcccgccccgcccgcagagtccggctgccgcgcatcgtccgcagacgccgccaccgccatgggctcctgaggctagcttgtcactttctgcaaaggtttccctcagggagcctcctgctgccaggcaccatgacagtgaggggggatgtgctggccccggatccagcgtcgcccacgaccgcagcagcctcgcccagcgtctccgtgatccccgagggcagccccactgccatggagcagcctgtgttcctgatgacaactgccgctcaggccatctctggcttcttcgtgtggacggccctgctcatcacatgccaccagatctacatgcacctgcgctgctacagctgccccaacgagcagcgctacatcgtgcgcatcctcttcatcgtgcccatctacgcctttgactcctggctcagcctcctcttcttcaccaacgaccagtactacgtgtacttcggcaccgtccgcgactgctatgaggccttggtcatctataatttcctgagcctgtgctatgagtacctaggaggagaaagttccatcatgtcggagatcagaggaaaacccattgagtccagctgtatgtatggcacctgctgcctctggggaaagacttattccatcggatttctgaggttctgcaaacaggccaccctgcagttctgtgtggtgaagccactcatggcggtcagcactgtggtcctccaggccttcggcaagtaccgggatggggactttgacgtcaccagtggctacctctacgtgaccatcatctacaacatctccgtcagcctggccctctacgccctcttcctcttctacttcgccacccgggagctgctcagcccctacagccccgtcctcaagttcttcatggtcaagtccgtcatctttctttccttctggcaaggcatgctcctggccatcctggagaagtgtggggccatccccaaaatccactcggcccgcgtgtcggtgggcgagggcaccgtggctgccggctaccaggacttcatcatctgtgtggagatgttctttgcagccctggccctgcggcacgccttcacctacaaggtctatgctgacaagaggctggacgcacaaggccgctgtgcccccatgaagagcatctccagcagcctcaaggagaccatgaacccgcacgacatcgtgcaggacgccatccacaacttctcacctgcctaccagcagtacacgcagcagtccaccctggagcctgggcccacctggcgtggtggcgcccacggcctctcccgctcccacagcctcagtggcgcccgcgacaacgagaagactctcctgctcagctctgatgatgaattctaggtgcgggctgcagtggcggaagtgctggcgccatagccacggtcaggctgtgccccacctccagcctcaccaccaggccaggaggcagctggcacagtgctcacgccgcctttatttattggaccagaaacactcacatgtcacttccagaggaacgggggacagccaggctcgcccatgggccttcaggaatatttatacatggcccagcctgcactgcccgggcgagggcagaggacactgggagcaaggcttatgcccctgctgcccgtcctgtgctgggggcatgctgggaccagccgcacccaggccccaatgcttgtgtgtggaccagcggctgcagccttctagcccctcctccccgcgagactctcaggctgaggtcggcaagccgtggctcccccacacaccgtgcaataccctgtctgacctgggctcttcccgcctgcatccctcccctgtccacctttgtccagtgctagattcacctcaccccgggcaggagtggggatgtgggcgctctgtggtcctcccctcctgacccaggcctctgtggcatgctgcaaggatcagagccagacaccaggagtcacaggccccacccaggaagggcattcagggcccctgggcaccgcttctgttgaagcaggggcttctgggcccctgggtatccccacctgtcgtggccacacctctgcctgcctcatgccccttccccctggcctaccaaggacagcccacagcccgcactgccggctcacttgggtccttcctcgatagctttgggcagagcccttgcttcctggctgcttcagggctcaggggctcccagccctccttcccaggctgatgctgggtcctctctctctttggggcttctccctcccgtttcaggggaaaggtctgagtctccacgtttcagaccagcttctgggggaaggcagtccggcagggagaccgggaggggtggccacacagtggggagctgggaggtggggggaatggtcccagactcctctcggggcccctatccacacagggcctggtgttctaccccatctggcccctggcccatctcttctgtgccttagtcacatatgaaagcgcccctccctggctccccatctgtcccacacgctccctggggctcttagttcagctgctggcactcgcaggatcctgcagtgctgggcccagagcccttggacaggcctcaggagtggtcaggaccaccaagcccctcctctccccctccacacctctagacctggggcctccggaacccccagcaggctgggcttatactagctcctgacttaggaagagcctcgtgtcacaacacgtgtccctacaggcaaagtgtcctggcatttaaaacccagattatccctgggtttgggctgcagtcacctggagaagctggtagggtaagggagagggaccctgccggtgttcactggggattctttcttttggtccttcctggaatgaacaggttccctccctgccacctgtgaggagagttggggcccagccgtcttcctggcctccttcctttcctcgtggcagaggcctgcatgtgggtgccagaggccagctctccccctccatcttgggggggcggagcagttgggcccaagctgcccgggagggtgggtgcagacacaggctgaggaccagccctggccctgccccgccatctgctttcaccaagctgtctctccaccgtggcttcccttctccctccaggccaaagtgctgctgattcccactcccttggttttcgcctgcccagcgttgctgtttgcgtggagggtggggggagctcagtggcagggaatcagcggtccgtggggtcgtggggacgggaacatgtgcccgaccgctccatcccctcctcctccttaggatgcataacctaccttgtctttttttttttaaattttctttccaggtagagtagctctttgtacataaagaatacttgaaaaattaattgtatgatgtatgagaagacagagtctcctagttttgtatcttgttgtatgactgccatgagttccaccagaaagccactctattttggtccctgtgacattttaaatgcgtgacagaagtgagcaaataaagtgaggaagaaatctatatatgagataatatagattgtattgaaaaaaaaaaaaaaaaaa

SEQ ID NO: 26060 - DNA, 792 bp, Homo Sapiens
cccggtgtccctgaggacgtgcgggccaggtacggccccgaaagtaggaagcggagggggagcaggtttgcggggccaagtgttgcggcgacgcacctcacgtcgagaatcgggaggaggagactgcaaggataggcccaggagtaatggagtccaaagaggaacgagcgttaaacaatctcatcgtggaaaatgtcaaccaggaaaatgatgaaaaagatgaaaaggagcaagttgctaataaaggggagcccttggccctacctttgaatgttagtgaatactgtgtgcctagaggaaaccgtaggcggttccgcgttaggcagcccatcctgcagtatagatgggacataatgcataggcttggagagccacaggcaaggatgagagaggagaatatggaaaggattggggaggaggtgagacagctgatggaaaagctgagggaaaagcagttgagtcatagtttgcgggcagtcagcactgatccccctcaccatgaccatcacgatgagttttgccttatgccctgaatcctgatggtttccctgaagttaatagggagacccctgcttcctaaacttacacatttgtggtgtacctttgtcgtaaacgttttgatgttacctatttcttgtgggtctcctattaccagcttctaaatgaatgttgtttttgacccagtttgtaagtttctgtcagcaggagagttttacctattgcatggaaagatgctcattatatattgtgaagttaataaaacagttttaaaaagcaaaaaaaaaaaaaaaa

SEQ ID NO: 26061 - DNA, 1222 bp, Homo Sapiens
agaaagcctgaaaagctatcatggcagcaaggcccaagctccactatcccaacggaagaggccggatggagtccgtgagatgggttttagctgccgccggagtcgagtttgatgaagaatttctggaaacaaaagaacagttgtacaagttgcaggatggtaaccacctgctgttccaacaagtgcccatggttgaaattgacgggatgaagttggtacagacccgaagcattctccactacatagcagacaagcacaatctctttggcaagaacctcaaggagagaaccctgattgacatgtacgtggaggggacactggatctgctggaactgcttatcatgcatcctttcttaaaaccagatgatcagcaaaaggaagtggttaacatggcccagaaggctataattagatactttcctgtgtttgaaaagattttaaggggtcacggacaaagctttcttgttggtaatcagctgagccttgcagatgtgattttactccaaaccattttagctctagaagagaaaattcctaatatcctgtctgcatttcctttcctccaggaatacacagtgaaactaagtaatatccctacaattaagagattccttgaacctggcagcaagaagaagcctccccctgatgaaatttatgtgagaaccgtctacaacatctttaggccataaaacaacacatccatgtgtgagtgacagtgtgttcctagagatggtattgtctacagtcatgtcttaatggatcccagctctgtcatggtgctatctatgtattaagttgggtcctaagttgggtcttttgtgtcaaagagatcatctcttctagaaatatcaaccttttttgtccagtaaataattgttaggggatctttattggaaaacttttttggagaggctggtatttaagttagatctgattgggctactcatgtcctgtagccagttcatcctcataataagaatgggcaggatctcttgttctctcctgagtgtctttctactctcctgagcgtctttctgctctccttatcctgttctcttatccttatcccctccagtctctgcctaatttttagtgtttaataacaaccgaatgtctagtaaatgactctcctctgagctgtaataaataaaatggtagtaatgaatgcaatcagtgttagccaaaataaagaatttatgagtcattgaaaaaaaaaaaaaaa

SEQ ID NO: 26062 - DNA, 1331 bp, Homo Sapiens
ggctaagtgctgaccgtcgccgttccctctgtgcccgagagttccgcaaactgggcttttctaacagcaacccagcacaggacctggagcgcgtgccccccggtctgctggccctggacaacatgttgtacttctccagaaacgcgcccagcgcgtacagccggtttgtgttggagaacagcagccgcgaggacaagcacgagtgcccctttgcccggggcagcatccagctgacggtgctgctgtgtgagctgctccgtgttggggagccctgctctgagacagcccaggacttctcacccatgttcttcggccaagaccagagcttccacgagctcttctgtgtgggcatccagctgttgaataagacctggaaggagatgcgggctacacaggaggacttcgacaaggtcatgcaggtggtgcgggagcagctggcccgcactctggccctgaagcccacttccctggagctcttccgaaccaaggtgaatgcgctcacttatggggaggtgctgcggctgcggcagactgaacggctgcaccaggagggcacactggctccccctatactggagctgcgggagaagctgaagccagagctcatgggcctgatccgccagcagcgcttgctccgcctctgtgaggggacgctcttccgcaagatcagcagccggcggcgccaggataagctgtggttctgctgcctgtcccccaaccacaagctgctgcagtacggagacatggaggagggcgccagcccgcctaccctggagagtctgcccgagcaactccctgtggccgacatgagggcactcctgacaggcaaggactgcccccatgtccgggagaagggctccgggaagcagaacaaggacctctatgagttggccttctcaatcagctatgaccgtggggaggaggaagcgtacctcaacttcattgccccctccaagcgggagttctacctgtggacagatgggctcagtgccttgctgggcagtcccatgggcagcgagcagacacggctggacctggagcagctgctgaccatggagaccaagctgcgtctgctggagctggagaacgtgcccatccccgagcggccaccccctgtgcccccaccccccaccaacttcaacttctgctatgactgcagcatcgctgaaccttgacagtgtggctggccatgggccacagctgcggccactgcagcagccatgaagggcagtgggtagaggagtgcaggcaccctgaccagcagagattgctgcagaaataaagtctgcttggctcttgggaaaaaaaaaaaaaaaaaaaaaaaaaaaaaa

SEQ ID NO: 26063 - DNA, 708 bp, Homo Sapiens
aaacttcatgatatggaaatggaacgagatatggatagaaaaaagattgaagaattaatggaagaaaatatgactttggaaatggcacagaaacaaagtatggatgaatcattacatcttggctgggaactggaacagatatccagaactagtgaactttccgaagcaccccagaaatccctgggccatgaggtgaatgagttgacatcaagtagattattgaagctagagatggaaaatcaaagtttgacaaaaaccgtagaagagcttcggactactgtggattctgtagaaggcaatgcttccaaaatcctgaaaatggaaaaagaaaatcaaaggctcagtaaaaaggttgagattcttgaaaatgagattgttcaagaaaagcaaagtcttcagaattgtcagaatttaagcaaggatctaatgaaggagaaagctcagcttgaaaaaacaatagaaacactgagagaaaattcagagagacagattaagatactggaacaggaaaatgaacatctgaatcaaacagtgtcttccttaaggcagcggtcccagataagtgcagaagcaagagtgaaagacattgaaaaagaaaacaaaattcttcatgaatctatcaaagaaacaagtagcaagctaagcaagattgaatttgaaaaaagacaaattaaaaaagaattggaacattataaaaaaaaaaaaaaa

SEQ ID NO: 26064 - DNA, 1634 bp, Homo Sapiens
ccctgacaaactcaaaaggatgagcaagtctgttccagcatttctccaagatgagagtgatgacagagaaacagatacagcatcagaaagcagttaccagctcagcagacacaagaagagcccgagctctttaaccaatcttagcagctcctctggcatgacgtccttgtcttctgtgagtggcagtgtgatgagtgtttatagtggagactttggcaatctggaagttaaaggaaatattcagtttgcaattgaatatgtggagtcactgaaggagttgcatgtttttgtggcccagtgtaaggacttagcagcagcggatgtaaaaaaacagcgttcagacccatatgtaaaggcctatttgctaccagacaaaggcaaaatgggcaagaagaaaacactcgtagtgaagaaaaccttgaatcctgtgtataacgaaatactgcggtataaaattgaaaaacaaatcttaaagacacagaaattgaacctgtccatttggcatcgggatacatttaagcgcaatagtttcctaggggaggtggaacttgatttggaaacatgggactgggataacaaacagaataaacaattgagatggtaccctctgaagcggaagacagcaccagttgcccttgaagcagaaaacagaggtgaaatgaaactagctctccagtatgtcccagagccagtccctggtaaaaagcttcctacaactggagaagtgcacatctgggtgaaggaatgccttgatctaccactgctaaggggaagtcatctaaattcttttgttaaatgtaccatccttccagatacaagtaggaaaagtcgccagaagacaagagctgtagggaaaaccaccaaccctatcttcaaccacactatggtgtatgatgggttcaggcctgaagatctgatggaagcctgtgtagagcttactgtctgggaccattacaaattaaccaaccaatttttgggaggtcttcgtattggctttggaacaggtaaaagttatgggactgaagtggactggatggactctacttcagaggaagttgctctctgggagaagatggtaaactcccccaatacttggattgaagcaacactgcctctcagaatgcttttgattgccaagatttccaaatgagcccaaattccactggctcctccactgaaaactactaaaccggtggaatctgatcttgaaaatctgagtaggtggacaaatatcctcactttctatctattgcacctaaggaatactacacagcatgtaaaagtcaatctgcatgtgcttctttgattacaaggcccaagggatttaaatataacaaaatgtgtaatttgtgactctaatattaaataagatatttgaacaagctaggaaaattgaatttctgctgctgcttcaaagaaaaagctgccccagagcattaaacatggggtattgttaagaagcaaaatgttcttgtttgccatcatgtgtttcacaccacaattctgtgccacagttaagagggtctggtacccttgcaggacctttgtaggttgtgggaaaaagtcgcagaaagatactcaaagtggagcagggaatggagacagacatcagtgatgataaaaaaaaaaaaaaa

SEQ ID NO: 26065 - DNA, 1501 bp, Homo Sapiens
ctggaggctttgtcaacattttgggctttcctgtaccgaacagatttgcttgttgggtcgaacttgtggctattcatttattctcaccagggacttccttcgctgggcatctggctgggattcttgttggactaatgtacactcaagggcctctgaagaaaatcatggaagcatgtgcaggcggtttttcctccagtgttggttacccaggacggcaatactactttaatagttcaggcagctctggatatcaggattattatccgcatggcaggccagatcactatgaagaagcacccaggaactatgacacgtacacagcaggactgagtgaagaagaacagctcgagagagcattacaagccagcctctgggaccgaggaaataccagaaatagcccaccaccctacgggtttcatctctcaccagaagaaatgaggagacagcggcttcacagattcgatagccagtgaggtggcatcttgggaagacatggcctattcgtgtaattattgcccatttggctcattccccaagcccctaattcattttaattcattttaaacaaaagcagagtacaccggtattgctccagatcgctcacatcacctgggacagtcccatggcccctatgagtcaactcacagcttgcggggagtgggccttctcctggccttgttcttgctcataaacaggtcacttcctccatgaagagaccagtttccacgctcccatctctcactgctgactcagcgatgcctctgcctcggtctgcttttgaagactgtgaccttcaccaggaggttttacttacaccagtcgggaagattagtccctcattctgcctggagtgccccgtgtttgacttggcagcgggtgtggagccatccccgcgtcctcctggcgcattgccactgtggctgtccaggaacaggatgtggctgccttggccgaatgttgtcctactctccccaaccccggcgcctcagctcctcagctcctcgggcccctgcgtctggctggtgtttgcagggctttcgctctgctctggtattgctctgcctttatagaaagtcttattgaagaagtgtaagaaagacctaaggtggggaagactcctacacacaccattagtatcagtgacaccagcaatgtaggttcccagccccttcccagtggcagcttgtgtgtccaggagataggacatcatttaacgcatcagcaaagtagcagcagatgccacatacagagtagagcgaaggcatttggtggatcggtcactagagatctatcttgcagaaagtatgtttttcctcataaaagtgcctcttaattggccattgtaccagccacttgtcctagccaaatgtccaaaacacgcccttgggccccgccacgttacaatccacagattgtctgtctgagtcgtttaaggcatttcctggtgcttgtgttccatgaataaaaggacaaagtcagaagatcaaaaaaaaaaaaaaaa

SEQ ID NO: 26066 - DNA, 1739 bp, Homo Sapiens
gggagcagggttgagcaactggtgcagacagcctagctggactttgggtgaggcggttcagccatgaggctggctgtgcttttctcgggggccctgctggggctactggcagcccaggggacagggaatgactgtcctcacaaaaaatcagctactttgctgccatccttcacggtgacacccacggttacagagagcactggaacaaccagccacaggactaccaagagccacaaaaccaccactcacaggacaaccaccacaggcaccaccagccacggacccacgactgccactcacaaccccaccaccaccagccatggaaacgtcacagttcatccaacaagcaatagcactgccaccagccagggaccctcaactgccactcacagtcctgccaccactagtcatggaaatgccacggttcatccaacaagcaacagcactgccaccagcccaggattcaccagttctgcccacccagaaccacctccaccctctccgagtcctagcccaacctccaaggagaccattggagactacacgtggaccaatggttcccagccctgtgtccacctccaagcccagattcagattcgagtcatgtacacaacccagggtggaggagaggcctggggcatctctgtactgaaccccaacaaaaccaaggtccagggaagctgtgagggtgcccatccccacctgcttctctcattcccctatggacacctcagctttggattcatgcaggacctccagcagaaggttgtctacctgagctacatggcggtggagtacaatgtgtccttcccccacgcagcacagtggacattctcggctcagaatgcatcccttcgagatctccaagcacccctggggcagagcttcagttgcagcaactcgagcatcattctttcaccagctgtccacctcgacctgctctccctgaggctccaggctgctcagctgccccacacaggggtctttgggcaaagtttctcctgccccagtgaccggtccatcttgctgcctctcatcatcggcctgatccttcttggcctcctcgccctggtgcttattgctttctgcatcatccggagacgcccatccgcctaccaggccctctgagcatttgcttcaaaccccagggcactgagggggttggggtgtggtgggggggtacccttatttcctcgacacgcaactggctcaaagacaatgttattttccttccctttcttgaagaacaaaaagaaagccgggcatgacggctcatgcctgtaatcccagcactttgggaggctgaggcaggtggatcactggaggtcaggagtttgagaccagcctggccaacatggtgaaaccctgtctctactaaaaatacaattagccaggtgtggcggcgtaatcccagctggcctgtaatcccagctacttgggaggctgaggcagaactgcttgaacccaggaggtggaggttgcagtgagccgtcatcgcgccactaagccaagatcgcgccactgcactccagcctgggcgacagagccagactgtctcaaataaataaatatgagataatgcagtcgggagaagggagggagagaattttattaaatgtgacgaactgcccccccccccccagcaggagagcagcaaaatttatgcaaatctttgacggggttttccttgtcctgccaggattaaaagccatgagtttcttaaaaaaaaaaaaaaaaaa

SEQ ID NO: 26067 - DNA, 1955 bp, Homo Sapiens
catggaggcgctgctgctgggcgcggggttgctgctgggcgcttacgtgcttgtctactacaacctggtgaaggccccgccgtgcggcggcatgggcaacctgcggggccgcacggccgtggtcacgggtgagtgcggaggcgggtgagtgcgagctggcggggcgcgcggagaggaggccgggccggcggtagcagcggcccgccgggctcagctcagctcggctcccgcccgcggtccgcaggcgccaacagcggcatcggaaagatgacggcgctggagctggcgcgccggggagcgcgcgtggtgctggcctgccgcagccaggagcgcggggaggcggctgccttcgacctccgccaggagagtgggaacaatgaggtcatcttcatggccttggacttggccagtctggcctcggtgcgggcctttgccactgcctttctgagctctgagccacggttggacatcctcatccacaatgccggtatcagttcctgtggccggacccgtgaggcgtttaacctgctgcttcgggtgaaccatatcggtccctttctgctgacacatctgctgctgccttgcctgaaggcatgtgcccctagccgcgtggtggtggtagcctcagctgcccactgtcggggacgtcttgacttcaaacgcctggaccgcccagtggtgggctggcggcaggagctgcgggcatatgctgacactaagctggctaatgtactgtttgcccgggagctcgccaaccagcttgaggccactggcgtcacctgctatgcagcccacccagggcctgtgaactcggagctgttcctgcgccatgttcctggatggctgcgcccacttttgcgcccattggcttggctggtgctccgggcaccaagagggggtgcccagacacccctgtattgtgctctacaagagggcatcgagcccctcagtgggagatattttgccaactgccatgtggaagaggtgcctccagctgcccgagacgaccgggcagcccatcggctatgggaggccagcaagaggctggcagggcttgggcctggggaggatgctgaacccgatgaagacccccagtctgaggactcagaggccccatcttctctaagcaccccccaccctgaggagcccacagtttctcaaccttaccccagccctcagagctcaccagatttgtctaagatgacgcaccgaattcaggctaaagttgagcctgagatccagctctcctaaccctcaggccaggatgcttgccatggcacttcatggtccttgaaaacctcggatgtgtgcgaggccatgccctggacactgacgggtttgtgatcttgacctccgtggttactttctggggccccaagctgtgccctggacatctcttttcctggttgaaggaataatgggtgattatttcttcctgagagtgacagtaaccccagatggagagataggggtatgctagacactgtgcttctcggaaatttggatgtagtattttcaggccccacccttattgattctgatcagctctggagcagaggcagggagtttgcaatgtgatgcactgccaacattgagaattagtgaactgatccctttgcaaccgtctagctaggtagttaaattacccccatgttaatgaagcggaattaggctcccgagctaagggactcgcctagggtctcacagtgagtaggaggagggcctgggatctgaacccaagggtctgaggccagggccgactgccgtaagatgggtgctgagaagtgagtcagggcagggcagctggtatcgaggtgccccatgggagtaaggggacgccttccgggcggatgcagggctggggtcatctgtatctgaagcccctcggaataaagcgcgttgaccgccaaaaaaaaaaaaaaaaaaaaaaaaaaaaaaaaaaaaaaaaaaaaaaa

SEQ ID NO: 26068 - DNA, 1721 bp, Homo Sapiens
ggaagagcagtgtcgggccatggccagggcccgcaggctggagctggccgaggccctggcgctggggccaggctagaggcatgcctgctatgcgctcctgcacgcgccggaccctggaattctctctggccgcctccctctgcgctacgccatactggtgaggagggcgcgcgcccggccactctccgctctggccttgcaccttccttgcggcgctactctcgggtgtccctgccaatcccagcttcctcctctctcagatgcagatgcgctttgatgggcgcctgggcttccctggcggattcgtggactcgcaagacagcagcctggaggacgggctgaaccgtggtctgctggaactgctgggcgaggcggcggccgccttccgcgtggagcgccctgactaccgcagctctcacgccggatcaaggccacgtgttgtggcccacttctatgccaaatctctgacgctcgagcagctgttggctgtggaggccagcgcaacaggggccaaggaccacgggctggaggtgctgggcctggtgtgagtgcccctgtaccctgcatgatggtgtgggaggcctgcccatctttctggagaattgctttattggtgctgcctgggagcagttactggataccctccaggacttgggagtggtggaagctggtgctttctcaggacttcagatcccagttcgtctgaggcaaccctctgtggactcagggaacctgagctgaggactttggtacaaggaagggaatgttttctcttccggacctaaagacgataccaaattaaaagaagacatgtatatcatatgttttgagcagaggaccctccaattcatgggatcaggggcaaaaatccacagctcatcccaggggccctggcaggttctcagagcctacctcttccttgtatatttgcatacagcctggtaacccccaggcatgcatatgtacaatgtgaccacacacagcctgacatctttcacctgtcaagtccaatttaaccaggaattggcatttgttaccataccctgcctcttgctttgcagagagcttctacagcaaggctgagtccttcccacagtcctccatgcctgctctttagggtctaccccagcccatgttttttgggaaggatagagaagcagaggaccctctttgctttcctgaaagtagccatgcccttgctggagggttcaccacagcaattggtgggaaagggtcttaaccaatctccaacacttttcttctcctgaaactgagaaggggtaaggaagtagctaggtccccttggacggagcatggacatgagacctgtgagtactggtgtctctccttcagagctttcatctttggttcgctgtagactctgggactatcagaagagaactgacccatacctgtctagccctgcccttccaaaaaaagagcctcccattaaagaggagttagagctgggccttgaggctcttcacttctttcaacagatatttaatatgtacctactaaatgccaggtactataaaaggtatagagagccatccttgctctccaagactccagggaagggatgggcaaacattttcttaaaagccagatagcaaatactttaagctttgtaaactacatagttttttaaaaaatattttctaacattgactaataaaaattgcctatgtttactgtgtacaaaaaaaaaaaaaaaaaaa

SEQ ID NO: 26069 - DNA, 1822 bp, Homo Sapiens
ttaccgctgctgcccctgctgtcgctcctggtcggcgcgtggctcaagctaggaaatggacaggctactagcatggtccaactgcagggtgggagattcctgatgggaacaaattctccagacagcagagatggtgaagggcctgtgcgggaggcgacagtgaaaccctttgccatcgacatatttcctgtcaccaacaaagatttcagggattttgtcagggagaaaaagtatcggacagaagctgagatgtttggatggagctttgtctttgaggactttgtctctgatgagctgagaaacaaagccacccagccaatgaagtctgtactctggtggcttccagtggaaaaggcattttggaggcagcctgcaggtcctggctctggcatccgagagagactggagcacccagtgttacacgtgagctggaatgacgcccgtgcctactgtgcttggcggggaaaacgactgcccacggaggaagagtgggagtttgccgcccgagggggcttgaagggtcaagtttacccatgggggaactggttccagccaaaccgcaccaacctgtggcagggaaagttccccaagggagacaaagctgaggatggcttccatggagtctccccagtgaatgctttccccgcccagaacaactacggatgggcaacactccagattcagcctcagacaacctcggtttccgctgtgctgcagacgcaggccggccgccaggggagctgtaagcagccgggtggtgacaaggagaaaagccttctagggtcactgtcattccctggccatgttgcaaacagcgcaattccaagctcgagagcttcagcctcaggaaagaacttccccttccctgtctcccatccctctgtggcaggcgcctctcaccagggcaggagaggactcagcctcctgtgttttggagaaggggcccaatgtgtgttgacgatggctgggggccaggtgtttctgttagaggccaagtattattgacacaggattgcaaacacacaaacaattggaacagagcactctgaaaggccattttttaagcattttaaaatctattctctccccctttctccctggatgattcaggaagctgacattgtttcctcaaggcagaattttcctggttctgttttctcagccagttgctgtggaaggagaatgctttctttgtggcctcatctgtggtttcgtgtccctctgaaggaaactagtttccactgtgtaacaggcagacatgtaactatttaaagcacagttcagtcctaaaagggtctgggagaaccagatgatgtactaggtgaagcattgcattgtgggaatcacaaagcaaatagtactccagaaagacaaatatcagaagcttcctattcttttttttttttttttttttttgagacagggtctttctctgttgcccaggctagagtgcactggtgatcacggctcactctagccttgaattcctgggcccaagcaattctcccacctcagcctcctgagtagctgggactacaagtgtgcaccaccatgcctggctaattttttgaatttttgtagtgatgggatctcgctctgttgcccagggtggtctcgaactcctggcctcaagcgatcctcccacctcgacctcccaaagtgctgggattacaggtgtgagccacctcgcctgggcccccttctccatatgcctccaaaaacatgtccctggagagtagcctgctcccacactgtcactggatgtcatggggccaataaaatctcctgcaattgtgtatctcaaaaaaaaaaaaaaaaaaaa

SEQ ID NO: 26070 - DNA, 2582 bp, Homo Sapiens
gcagagctttcagagagtgacatggtaccaggaactattttggtgacagaagaagaacttagtagatgcattgaggatgtgtttaaggtgtacgtggttgggaatgaacctttaacagttttgatggattccctgcttccagtcctgggagtgctttttcttctctactgttttactaagcagagtgtgtctcacataaggtcactttgccaagaaatcttattatggattctggggaagctggaaaggaagaaggcaattgccagcctgaaaggatttgcagggttggacaaagctgtgccctctctccattctctgtgtcagtttagagttgccactcaaggtggcattatgattaccatcaaagaggccattagtgatgaagatgaagatgaagccctgtaccagaaggtatcctctgagcagggccgggtggagcatctcggggacttgctgtcccactgccaggaatgcggtttggcaggagacttcttcatcttctgtttgaaagagttgactcatgtggcctcggaaaatgaaacagagttaaaaactgagcccttctccagcaagagcctcttggaattagagcaacatcagactcttcttgtggaaggccaagagcggaagctgcttgtcctgcagctgatggctgttctgtgcgagagaatgtctgagcagatattcacaaacgtcactcaggtggtggactttgtagcagcaacattgcagagagcctgtgcaagcctggcccatcaggcagagagcaccgtggaatcacagacgctgagcatgtccatggggctggtggctgtcatgctaggaggagctgttcagttgaagtcaagtgattttgctgttctgaagcagttgttgcctctgttggagaaggtatccaacacataccctgatccggtcatccaagaactcgctgttgatctccgcatcaccatctctacccatggagcctttgccactgaggccgtcagcatggctgcccaaagtacactgaacagaaaagatctggaagggaaaatagaagagcagcaacaaaccagtcatgaaagacccactgatgtagctcatagccaccttgaacaacagcagagccatgagacagccccccagacaggcctgcagtcaaatgctccaatcattcctcaaggagtcaatgagcccagcactactacaagtcagaaatctggaagcgtaaccacagaacagctccaagaggttcttttgtcagcttatgaccctcaaattccaacacgggctgctgccctgcgtactctttcccactggatagagcagagagaagcaaaagcccttgagatgcaagagaagcttctcaagatattcttggaaaacttggaacatgaagacacttttgtatatctatctgcaattcagggggttgccctgctgtcagacgtctatcctgagaaaatcttgccggacttgttggctcaatatgacagcagcaaagacaagcacacaccagagaccagaatgaaagtcggggaagtccttatgcgaatcgtcagggcattaggagacatggtctcaaagtaccgagaacctttgatccataccttcctgaggggagtgagagatcctgatggtgctcacagggccagcagcttggccaaccttggggagctgtgccagaggctggactttctgctgggctccgtggtccatgaggtaacagcttgcctgattgctgtggccaaaacagatggtgaagttcaagtacgcagagctgccatacatgtggttgtgctgctgcttcggggactcagccagaaagctactgaggtgctgagcgccgtcctcaaggatctctaccacctgctgaagcacgtagtgtgtctggagcccgatgacgtggccaagctccatgcccagttggccctagaagagctggatgacatcatgaaaaacttcctgttccctccacagaagctggagaagaagatcatggtcctgccgtagacctggctccaaggacgtggaggaggcaggcagggccaggcacccagagccgtgcccaggtcttccagcaggtggccctgctgcctcttgagtgctggcagcatggctgaccctcggggtggttttatggtgcaggtcacttgggtcttcagggtcccttccgagggcatgtgttcagcactcccgcgttcagcctgaggggtgtacagttaagagaagacagttacagatctcattaatctacatttttcactgtcctctagcattgaaagaaggatgtctacctggtgaaagtatattttaacatgactgatggaatttcactaattgcccactctcttggaacttgaggagaagcggttggccacccatatgtcacctagctctatattctttcaggctgagattcttcttcaggaaaatgaggagcagaactggccacccttggctgctcaagaggcatttcagagtaggagatgcagttggaggtggggaggggaaggaaatagttatcaaataatgcaaaatggaataaagttatcttggatggaaaaaaaaaaaaaaaaaaaaaaaaaaaaaaaaaaaaa

SEQ ID NO: 26071 - DNA, 1697 bp, Homo Sapiens
ggaacccggcggatcggatcccgcagatcggagacggggcctggagggtggcagcacgcaaagggtgtccctgtccctcaaggggtcatggcctccatgttgctcgcccagcgcctggcctgcagcttccagcacagctaccgcctgctggtgcctggatccagacacattagtcaagctgcagccaaagtcgacgttgaatttgattatgatgggcctctgatgaagacggaagtcccagggcctagatctcaggagttaatgaaacagctgaatataattcagaatgcagaggctgtgcattttttctgcaattacgaagagagccgaggcaattacctggttgatgtggacggcaaccgaatgctggatctttattcccagatctcctctgtccccataggttacagccaccccgccctgctgaaactcatccaacagcctcaaaatgcgagcatgtttgtcaacagacccgccctcggaatcctgcctccggagaactttgtggagaagctccggcagtccttgctctcggtggctcccaaagggatgtcccagctcatcaccatggcctgcggctcctgctccaatgaaaacgccttaaagaccatcttcatgtggtaccggagcaaggaaagagggcagaggggcttctcccaggaggagctggagacgtgcatgattaaccaggcccctggctgccccgactacagcatcctctccttcatgggcgcgttccatgggaggaccatgggttgcttagcgaccacgcactctaaagccattcacaagatcgacatcccttcctttgactggcccatcgcaccgttcccacggctgaaataccctctggaagagtttgtgaaagagaaccaacaggaggaggcccgctgtctggaagaggtggaggatctgattgtgaaatatcggaaaaagaagaagacggtggccgggatcatcgtggagcccatccagtccgagggtggagacaaccacgcatccgatgacttctttcggaagctgagagacatcgccaggaagcatggctgcgccttcttggtggacgaggtccagaccggaggaggctgcacgggcaagttctgggcccatgagcactggggcctggatgacccagcagacgtgatgaccttcagcaagaagatgatgactgggggcttcttccacaaggaggagttcaggcctaatgctccctaccggatcttcaacacctggctgggggacccgtccaagaacctgttgctggctgaggtcatcaacatcatcaagcgggaggacctgctaaataatgcagcccatgccgggaaggccctgctcacaggactgctggacctccaggcccggtacccccagttcatcagcagggtgagaggacgaggcaccttttgctccttcgatactcccgatgattccatacggaataagctcattttaattgccagaaacaaaggtgtggtgttgggtggctgtggtgacaaatccattcgtttccgtcccacgctggtcttcagggatcaccacgctcacctgttcctcaatattttcagtgacatcttagcagacttcaagtaaagaagccatttccactacagtgagaaagcccggatcccaacagttgtcaaattgattagtttgcctaattcatgttttcacttaaaagtaaaaaaaaaaaaaaaaaa

SEQ ID NO: 26072 - DNA, 2984 bp, Homo Sapiens
ggaaaagggagcgatgttgatctcaggaagcacaaagggaccttcctagctctgactgaaccacggagctcaccctggacagtatcactccgtggaggaagactgtgagactgtggctggaagccagattgtagccacacatccgcccctgccctaccccagagccctggagcagcaactggctgcagatcacagacacagtgaggatatgagtgtaggggtgagcacctcagcccctctttccccaacctcgggcacaagcgtgggcatgtctaccttctccatcatggactatgtggtgttcgtcctgctgctggttctctctcttgccattgggctctaccatgcttgtcgtggctggggccggcatactgttggtgagctgctgatggcggaccgcaaaatgggctgccttccggtggcactgtccctgctggccaccttccagtcagccgtggccatcctgggtgtgccgtcagagatctaccgatttgggacccaatattggttcctgggctgctgctactttctggggctgctgatacctgcacacatcttcatccccgttttctaccgcctgcatctcaccagtgcctatgagtacctggagcttcgattcaataaaactgtgcgagtgtgtggaactgtgaccttcatctttcagatggtgatctacatgggagttgtgctctatgctccgtcattggctctcaatgcagtgactggctttgatctgtggctgtccgtgctggccctgggcattgtctgtaccgtctatacagctctgggtgggctgaaggccgtcatctggacagatgtgttccagacactggtcatgttcctcgggcagctggcagttatcatcgtggggtcagccaaggtgggcggcttggggcgtgtgtgggccgtggcttcccagcacggccgcatctctgggtttgagctggatccagacccctttgtgcggcacaccttctggaccttggccttcgggggtgtcttcatgatgctctccttatacggggtgaaccaggctcaggtgcagcggtacctcagttcccgcacggagaaggctgctgtgctctcctgttatgcagtgttccccttccagcaggtgtccctctgcgtgggctgcctcattggcctggtcatgttcgcgtattaccaggagtatcccatgagcattcagcaggctcaggcagccccagaccagttcgtcctgtactttgtgatggatctcctgaagggcctgccaggcctgccagggctcttcattgcctgcctcttcagcggctctctcagcactatatcctctgcttttaattcattggcaactgttacgatggaagacctgattcgaccttggttccctgagttctctgaagcccgggccatcatgctttccagaggccttgcctttggctatgggctgctttgtctaggaatggcctatatttcctcccagatgggacctgtgctgcaggcagcaatcagcatctttggcatggttgggggaccgctgctgggactcttctgccttggaatgttctttccatgtgctaaccctcctggtgctgttgtgggcctgttggctgggctcgtcatggccttctggattggcatcgggagcatcgtgaccagcatgggctccagcatgccaccctctccctctaatgggtccagcttctccctgcccaccaatctaaccgttgccactgtgaccacactgatgcccttgactaccttctccaagcccacagggctgcagcggttctattccttgtcttacttatggtacagtgctcacaactccaccacagtgattgtggtgggcctgattgtcagtctactcactgggagaatgcgaggccggtccctgaaccctgcaaccatttacccagtgttgccaaagctcctgtccctccttccgttgtcctgtcagaagcggctccactgcaggagctacggccaggaccacctcgacactggcctgtttcctgagaagccgaggaatggtgtgctgggggacagcagagacaaggaggccatggccctggatggcacagcctatcaggggagcagctccacctgcatcctccaggagacctccctgtgatgttgactcaggaccccgcctctgtcctcactgtgccaggccatagccagaggccaccctgtagtacagggatgagtcttggtgtgttctgcagggacaggcctggatgatctagctcataccaaaggaccttgttctgagaggttcttgcctgcaggagaagctgtcacatctcaagcatgtgaggcaccgtttttctcgtcgcttgccaatctgttttttaaaggatcaggctcgtagggagcaggatcatgccagaaatagggatggaagtgcatcctctgggaaaaagataatggcttctgattcaacatagccatagtcctttgaagtaagtggctagaaacagcactctggttataattgccccagggcctgattcaggactgactctccaccataaaactggaagctgcttcccctgtagtccccatttcagtaccagttctgccagccacagtgagcccctattattactttcagattgtctgtgacactcaagcccctctcatttttatctgtctacctccattctgaagagggaggttttggtgtccctggtcctctgggaatagaagatccatttgtctttgtgtagagcaagcacgttttccacctcactgtctccatcctccacctttgagatggacacttaagagacggggcaaatgtggatccaagaaaccagggccatgaccaggtccactgtggagcagccatctatttacctgactcctgagccaggctgccgtggtgtcatttctgtcatccgtgctctgtttccttttggagtttcttctccacattatctttgttcctggggaataaaaactaccattggacctagaaaaaaaaaaaaaaaaaaaaa

SEQ ID NO: 26073 - DNA, 2319 bp, Homo Sapiens
gcagagcgcaggccaggatcagcgcgggctgtgagtccaggtcagccgtcgggacctcgggctccgggttcgaagagcggctcccggctgcgggtgctttgccaggagagcccttccggacagaggagccggggtctggaaggagcggccgacgcgacgctcgcctgccacggggctctgggagtaagcctgtctgcctggcgggccttcaggtgcggcgtgagagatggatgccaattcaaaagacaagccccctgaaaccaaggagtctgcaatgaataatgctggaaatgcctctttcattttgggaactgggaagattgtgactcctcagaagcatgccgaattacctcctaatccttgcacaccagatatttttaaatcacctttgaacttttccacagtaaccgtagagcaattgggaattacacctgaaagctttgttaggaactctgcaggaaagtcatcatcctaccttaaaaaatgtagacgacgttctgcagtcggtgctcggggctctcctgaaacaaaccatctgattcgtttcattgctcggcagcaaaatataaagaatgctaggaaatctcctttggcacaagattctccttcccagggcagccctgcactgtatcgaaatgttaacactttaagagaacgaatatcagccttccagtcagcttttcactccataaaggaaaacgagaaaatgaccggctgtctggaattctcagaggcaggaaaagagtccgagatgacagacttgaccagaaaggaaggtctcagcgcttgccagcagtctgggttccctgcagtgttgtcctccaaacgtcggagaatatcctatcagagagactctgatgaaaatctgacggatgctgaaggaaaagtaattggtctccagatattcaatattgatacagacagagcatgtgcagttgaaacttctgtagatctttctgagatatcatctaaacttggttcaacacagtctggatttttagttgaagagtctcttcccctttcagagctcacagagacttcaaatgcactaaaggttgctgactgtgtagtgggcaaaggatcaagtgatgccgtttcgcctgacacgttcacagcagaagtgagctcagacgcagtccctgatgtcaggtcaccagctactccagcctgcaggagggaccttcccacccccaagacctttgtacttcgttctgtactgaagaaaccctctgttaagatgtgtctagagagcttacaggaacactgtaacaacctctatgatgatgatgggactcatccgagcttaatctcaaatctcccaaactgttgcaaagagaaagaagcagaagatgaagaaaattttgaagcacctgcctttctaaatatgaggaagaggaagagagttacttttggagaggacttaagcccggaagtgtttgatgaatctttgccagcaaatactccattgcgtaaaggaggaacacctgtttgtaaaaaagacttcagtggtctcagttccctgctgcttgagcagtcacctgttcctgagccattacctcaaccagattttgatgacaagggggagaatcttgaaaacatagaaccacttcaagtatcatttgccgttctcagttctcctaataaatcatcaatctctgagaccctttcaggcactgatacctttagttcttcaaataaccatgagaaaatatcctctcctaaagttggtagaataacaaggacttctaacagaagaaatcaattggtcagtgttgtagaagagagtgtttgcaacttattgaatacagaagttcagccttgtaaagaaaagaaaattaataggaggaagtctcaagaaacaaagtgtacaaagagagcacttcctaagaagagtcaggttttaaaaagttgcagaaagaagaaaggaaagggaaagaaaagtgttcagaaatctttatatggggaaagagacattgcttctaagaagcccctcctcagtcctattcccgagctgcctgaagtccctgagatgacaccttccattccgagcatccgaagactgggttcaggttatttcagttcaaatggcaaactggaagaagtgaagactcctaaaaatccagtgaaaagaaaggatcttttgcgtcatgacccagatttgcatatgcatcaaggctatgataaatatgatgtctctgaattctgctcttatataaaaagttcctcatcgcttggcaatgctacttctgatgaagatccaaatacaaatataatgaacattaatgaaaataaaaatattccaaaaaaaaaaaaaaaaaa

SEQ ID NO: 26074 - DNA, 3942 bp, Homo Sapiens
cgagcggttggtattgcaggcgcttgctctccggggccgcccggcgggtagctggcggggggaggaggcaggaaccgcgatggcgcctcagaagcacggcggtgggggagggggcggctcggggcccagcgcggggtccgggggaggcggcttcgggggttcggcggcggtggcggcggcgacggcttcgggcggcaaatccggcggcgggagctgtggagggggtggcagttactcggcctcctcctcctcctccgcggcggcagcggcgggggctgcggtgttaccggtgaagaagccgaaaatggagcacgtccaggctgaccacgagcttttcctccaggcctttgagaagccaacacagatctatagatttcttcgaactcggaatctcatagcaccaatatttttgcacagaactcttacttacatgtctcatcgaaactccagaacaaacatcaaaaggaaaacatttaaagttgatgatatgttatcaaaagtagagaaaatgaaaggagagcaagaatctcatagcttgtcagctcatttgcagcttacgtttactggtttcttccacaaaaatgataagccatcaccaaactcagaaaatgaacaaaattctgttaccctggaagtcctgcttgtgaaagtttgccacaaaaaaagaaaggatgtaagttgtccaataaggcaagttcccacaggtaaaaagcaggtgcctttgaatcctgacctcaatcaaacaaaacccggaaatttcccgtcccttgcagtttccagtaatgaatttgaacctagtaacagccatatggtgaagtcttactcgttgctatttagagtgactcgtccaggaagaagagagtttaatggaatgattaatggagaaaccaatgaaaatattgatgtcaatgaagagcttccagccagaagaaaacgaaatcgtgaggatggggaaaagacatttgttgcacaaatgacagtatttgataaaaacaggcgcttacagcttttagatggggaatatgaagtagccatgcaggaaatggaagaatgtccaataagcaagaaaagagcaacatgggagactattcttgatgggaagaggctgcctccattcgaaacattttctcagggacctacgttgcagttcactcttcgttggacaggagagaccaatgataaatctacggctcctattgccaaacctcttgccactagaaattcagagagtctccatcaggaaaacaagcctggttcagttaaacctactcaaactattgctgttaaagaatcattgactacagatctacaaacaagaaaagaaaaggatactccaaatgaaaaccgacaaaaattaagaatattttatcagtttctctataacaacaatacaaggcaacaaactgaagcaagagatgacctgcattgcccttggtgtactctgaactgccgcaaactttatagtttactcaagcatcttaaactctgccatagcagatttatcttcaactatgtttatcatccaaaaggtgctaggatagatgtttctatcaatgagtgttatgatggctcctatgcaggaaatcctcaggatattcatcgccaacctggatttgcttttagtcgcaacggaccagttaagagaacacctatcacacatattcttgtgtgcaggccaaaacgaacaaaagcaagcatgtctgaatttcttgaatctgaagatggggaagtagaacagcaaagaacatatagtagtggccacaatcgtctgtatttccatagtgatacctgcttacctctccgtccacaagaaatggaagtagatagtgaagatgaaaaggatcctgaatggctaagagaaaaaaccattacacaaattgaagagttttctgatgttaatgaaggagagaaagaagtgatgaaactctggaatctccatgtcatgaagcatgggtttattgctgacaatcaaatgaatcatgcctgtatgctgtttgtagaaaattatggacagaaaataattaagaagaatttatgtcgaaacttcatgcttcatctagtcagcatgcatgactttaatcttattagcataatgtcaatagataaagctgttaccaagctccgtgaaatgcagcaaaaattagaaaagggggaatctgcttcccctgcaaacgaagaaataactgaagaacaaaatgggacagcaaatggatttagtgaaattaactcaaaagagaaagctttggaaacagatagtgtctcaggggtttcaaaacagagcaaaaaacaaaaactctgaaaagctctaaccccatgttatggacaaacactgaaattacattttagggaattcatcctctaagaattatgtttttgtttttaatcatatgttccaaacaggcactgttagatgaagtaaatgatttcaacaaggatatttgtatcagggttctacttcacttcattatgcagcattacatgtatatcacttttattgatgtcattaaaacattctgtactttaagcatgaaaagcaatatttcaaagtatttttaaactcaacaaatgtcatcaaatatgttgaattgatctagaaattatttcatatataaatcagaatttttttgcatttatgaccggctgtttttctactttgtaattgtgagacattttcttggggagggaaaattggaatggttcccttttttagaaattgaagtggtcttcatatgtcaactacagaaaaggaaaaaaatagaaattgaaggatttttatgaaattatattgcattactatttgcagtcaaactttgatccttgtttttgaaatcatttgtcaattcggaatgaaaaattataatgtaattttacattacataagttccttttacaattaaaaaatagcacttcttcatcttatgcctgtttgagaagatattaaattttcacattgttgacagtgaaatgctatgttggtttataagattacagaccatttgttttcatgtggataattttagtgcattgctcacccggtatgtttttttttttaacttgaacattttgcttgttttgtttttcttttttaattagataatcacatggaaaattaagctgttcatatctttaaattaggattgcaaaccaaggaaagaacgcatttgagattttaagatgtcacttataaggggagaagtgttcttaaaaagtcaaccagaaaactgttatgccttttatttgtttgcaaggatgtctttgtaatgtgtttcatgaatagaatatccaatacagataagctgacttgaatcattttgagcaattttgccctgtgttatatgtgtttcacgcacatatttgcagttggattttctccaacagaaagtggattcactactggcacattaacaagcaccaataggtttttattccaactccgagcactgtggttgagtaacatcacctcaattttttattatccttaaagatattgcattttcatattctttatttataaaggatcaatgctgctgtaaatacaggtatttttaattttaaaatttcattccaccaccatcagatgcagttccctattttgtttaatgaagggatatataagctttctaatggtgtcttcagaaatttataaaatgtaaatactgatttgactggtctttaagatgtgtttaactgtgaggctatttaacgaatagtgtggatgtgatttgtcatccagtattaagttcttagtcattgatttttgtgtttaaaaaaaaataggaaagagggaaactgcagctttcattacagattccttgattggtaagctctccaaatgatgagttctagtaaactctgatttttgcctctggatagtagatctcgagcgtttatctcgggctttaatttgctaaagctgtgcacatatgtaaaaaaaaaaaaaaa

SEQ ID NO: 26075 - DNA, 2511 bp, Homo Sapiens
cggaagcatggatgtgcgcctgcgctgcgctagggcgcggcgggcggtttgaattttgcttacagagtcccgtctcaccatcctgggcttccaacggagactgcggtatccgcggctggagacccagcggcgagtagccttttgctcccggacggacttgagaggcttaaaggatggcctcgtcagatctggaacaattatgctctcatgttaatgaaaagattggcaatattaagaaaaccttatcattaagaaactgtggccaggaacctaccttgaaaactgtattaaataaaataggagatgagatcattgtaataaatgaacttctaaataaattggaattggaaattcagtatcaagaacaaaccaacaattcactcaaggaactctgtgaatctcttgaagaagattacaaagacatagaacatcttaaagaaaacgttccttcccatttgcctcaagtaacagtaacccagagctgtgttaagggatcagatcttgatcctgaagaaccaatcaaagttgaagaacctgaacccgtaaagaagcctcccaaagagcaaagaagtattaaggaaatgccatttataacttgtgatgagttcaatggtgttccttcgtacatgaaatcccgcttaacctataatcaaattaatgatgttattaaagaaatcaacaaggcagtaattagtaaatataaaatcctacatcagccaaaaaagtctatgaattctgtgaccagaaatctctatcacagatttattgatgaagaaacgaaggataccaaaggtcgttattttatagtggaagctgacataaaggagttcacaactttgaaagctgacaagaagtttcacgtgttactgaatattttacgacactgccggaggctatcagaggtccgagggggaggacttactcgttatgttataacctgagtcccttgtgaacttttgaacataccaacagggtatagagtatagaggctatttctataattttcttatatataatttttttaacttttaatcttttttgtttcctttttttttttttgagacaggatcttgctttgtcacccaggggcttgctttgtcacgcaggctagagtgcagtggcgcaaacatggctcactgcagcctcaacctcccaggctcaagtgatcctcccacctcagccccctgaatggctgggactacaagcgtgcgccaccatgcctggctaatttttgtattttttggagagatggggtttcaccatgttgcctaggctggtcttgagctcctgagctcaaacaatccaccctcctcagcctcccaaagtgctgggattacaggcttgagccaccacacctgacctattcttgtttcttataaaaataaaacttttttggataaagcttatttcttgtttttttctttttctttttttttttttgagacagtctcgctctttcacccaggccggactgcagcggcgctatctcggctcgctgcaaactctgcctcccaggttcacgccatcctcctgcctcagctactcaggagaattgcttgaacctgggaggtggaggttgcagtgagccgagatcgtgccactgcactccagtctgggcaacagagcgagactccatctcagaaaaaaagaaaaaaagactgggtacagatgtgatattggaagaaaaagatcaagctgatgaggttaggatacccaggccctttggacttaaagatcactagtgtctaaattccatcgatggcatttcagtctataggtaaacttcctggaagctggatttggagacagtttatcatctgattattgggctttcgtataggtccttagggagcagcttacctgaaatgcatttagtgtacaccagtctgtaaacttcaacctgtaatgaaagtgtaataaatgtacattgagttgatgtgataatgtgatataataagaaatatatatttgatcttcctatctagttccttgttcagagctcctaaaacccttgtaatttccaaagtgatggagtacatcttttgttctagtatttggtctttgaccccagttcctgacacaaagctcctaaattcctttaaatttcccagtgataggagaattttttgttctaatgaggtcactcttgatgggcacctggataactcaggatgggggctgctcacaaagaccacatcatgattggaagtttcaaactttcagtctcccacctccagagaggggagaggggctggagatttgtgtcaataatccatcaggcctatgtcaacaagacataatccgttaactatggagttcagggagcttcagggttggcaaacattttgatgtgccaggaaggtgacgcactccagctttatgaagtcagcaagtcctgtgctcaggatgcttctggaccttgccccaggtaccccttcatgtggctgttgttcatctgtatcctttgtagtagccttaaaataaactgttaaacacaaaaaaaaaaaaaaa

SEQ ID NO: 26076 - DNA, 2831 bp, Homo Sapiens
ctaccatcttaacacactaatatctaaaaagtgcgagaggcccagagcagcagcagaagcagcagcagcagctccagcttcttccctccctcctcctcctgcttctcctgctcagagttcctgcctccagctgccaggggggacagccagccagcagcaggaggggggctagagagctgaaggagagccagtttccccaaaattgctgcagtgagaagaggagtttgttactttaaacagaggctgaagaaactatagaattagcagagaaagtggagaaggtagaggatggagttgcagactctacaggaggctcttaaagtggaaattcaggttcaccagaaactggttgctcaaatgaagcaggatccacagaatgctgacttaaagaaacagcttcatgaactccaagccaaaatcacagctttgagtgagaaacagaaaagagtagttgaacagctacggaagaacctgatagtaaagcaagaacaaccggacaagttccaaatacagccattgccacaatctgaaaacaaactacaaacagcacagcagcaaccactacagcaactacaacaacagcagcagtaccaccaccaccacgcccagcagtcagctgcagcctctcccaacctgactgcttcacagaagactgtaactacagcttctatgattaccacaaagacactacctctcgtcttgaaagcagcaactgcgaccatgcctgcctctgtggtgggccagagacctaccattgctatggtgaccgccatcaacagtcagaaggctgtgctcagcactgatgtgcagaacacaccagtcaacctccagacgtctagtaaggtcactgggcctggggcagaggctgtccaaattgtggcaaaaaacacagtcactctggttcaggcaacacctcctcagcccatcaaagtaccacagtttatcccccctcctagactcactccacgtccaaactttcttccacaggttcgacccaagcctgtggcccagaataacattcctattgccccagcaccacctcccatgctcgcagctcctcagcttatccagaggcccgtcatgctgaccaagttcacccccacaacccttcccacatcccagaattccatccaccccgtccgtgtcgtcaatgggcagactgcaaccatagccaaaacgttccccatggcccagctcaccagcattgtgatagctactccagggaccagactcgctggacctcaaactgtacagcttagcaagccaagtcttgaaaaacagacagttaaatctcacacagaaacagatgagaaacaaacagagagccgcaccatcaccccacctgctgcacccaaaccaaaacgggaggagaaccctcagaaacttgccttcatggtgtctctagggttggtaacacatgaccatctagaagaaatccaaagcaagaggcaagagcgaaaaagaagaacaacagcaaatccggtctacagtggagcagtctttgagccagagcgtaagaagagtgcagtgacatacctaaacagcacaatgcaccctgggacccggaagagaggtcgtcctccaaaatacaatgcagtgctggggtttggagcccttaccccaacatccccccaatccagtcatcctgactcccctgaaaatgaaaagacagagaccacattcactttccctgcacctgttcagcctgtgtccctgcccagccccacctccacagacggtgatattcatgaggatttttgcagcgtttgcagaaaaagtggccagttactgatgtgcgacacatgttcccgtgtatatcatttggactgcttagacccccctctgaaaacaattcccaagggcatgtggatctgtcccagatgtcaggaccagatgctgaagaaggaagaagcaattccatggcctggaactttagcaattgttcattcctatattgcctacaaagcagcaaaagaagaagagaaacagaagttacttaaatggagttcagatttaaaacaagaacgagaacaactagagcaaaaggtgaaacagctcagcaattccataagtaaatgcatggaaatgaagaacaccatcctggcccggcagaaggagatgcacagctccctggagaaggtaaaacagctgattcgcctcatccacggcatcgacctctccaaacctgtagactctgaggccactgtgggggccatctccaatggcccggactgcaccccccctgccaatgccgccacctccacgccggccccttccccctcctcccagagctgcacagcgaactgtaaccagggggaagagactaaataacagagcccctctaggagaagccacgggatcccggcggcaaggagaacagaacactgaagactctagaaaagcaaagccggatttctggaaagtgcagaattcttttggttctttggttccagagagagagaagatgcttgtgccaggtggcaccagagtttgccaattgatccttcttattctgtgtgtacatgcaaagattggaccatgttacatgaaatagtgccagctggaggttctttgccagcaccatgccaagtgaaataatatatttactctctctattatacaccagtgtgtgcctgcagcagcctccacagccacgatgggtttgtttctgttttcttgggtggggagcagggacgggcggagggaggagagcaggtttcagatccttacttgccgagccgtttgtttaggtagagaagacaagtccaaagagtgtgtgggctttcctgtttctaaactttcgctactataaaaccaaaaaaaaaaaaaaa

SEQ ID NO: 26077 - DNA, 2563 bp, Homo Sapiens
ggcgctgccgggtctcggttcgggttcgttgccccggtgccgggaccgggccggtctctccggccgccccagccgggcgcagcagccggaggtgtcgggaccctctggacccaccctagcgggccccgccggcggtcggcctccggtccgggctcccagtcgcgccgtcctcgccgccccatggagtcccagtgcgactactcgatgtacttcccggccgtgccgctgccgccgcgcgcggagctggcaggggatccgggccggtaccgggcgctgccccggcgcaaccatctgtacttgggggagactgtccgttttctgctggtgttgcgctgccggggcggtgcggggtccggcaccgggggcggcccgggcttgggctccagaggagcctgggcagaactggcaaccgccctggccgccctggcctcggtcagcgccggaggcgggatgccggggggcggcggcgccggcgaccaggattcggagcccccagggggaggggatcctgggggtgggggtttgttccgaggctgcagcccccttctcacccacggcccgggccctgctacctcagggggagcgaccacgctgcctgtggaggaaccgattgtgtccacagatgaggtcatcttcccactcaccgtttcactggatagactgcccccagggacacctaaggccaagattgtagtgactgtgtggaagcgggagattgaggcaccagaggtcagagatcaaggctacctgcgattgctgcagacccgatctcctggggagacattccggggcgagcagagcgctttcaaggcccaagtgagcacgctgctgactctgctgccccctccggttctgagatgccggcagttcactgtggctggaaaacacttgaccgtgctcaaggtgctgaacagctcctctcaggaggaaatctccatctgggatatccgaatcctccccaacttcaacgccagttatctacctgtcatgcccgatggctctgtgctgctggtggacaatgtctgtcaccagtctggggaagtctccatgggctccttctgccgcctacccgggacctctggctgcttcccctgcccgctgaatgccctggaggaacacaacttcctgtttcagctgagagggggtgagcagccccctccaggggccaaggagggcctggaagttcccctgattgctgtggttcagtggtctaccccaaagctgcccttcactcagagcatctacacccactaccgcctgcccagtgtccgcttggaccgcccgtgttttgtgatgaccgcttcttgtaagtcccctgttcggacctacgagcgtttcactgtcacctacacgctgcttaacaatctccaagacttccttgctgtgaggctcgtgtggaccccagagcatgcacaggctggaaagcagctgtgtgaggaggagcgccgggccatgcaggctgccctggactccgtcgtctgccacacgcccctcaacaaccttggcttttcccggaagggcagcgcgctcaccttcagtgtggccttccaggctctgaggacggggctcttcgagctaagccagcacatgaaactgaagctgcagttcaccgccagcgtgtcccaccctccacccgaggcccggcccctctcccgcaagagcagccccagcagccctgctgtccgggacttggtggagaggcatcaggctagcctgggccgctcccagtccttctcccaccagcagccttcccgaagccacctcatgaggtcgggcagtgtgatggagcgcagagccatcacgccccctgtggcctctcctgttggccgccccctctacctgcccccggacaaggctgtgttgtctctggacaagattgccaagcgcgagtgcaaggtcctggtggtggaacccgtcaagtagcaccgtgccagctctgttccctcttacactccagagacccaacgcccccagaggggatccctgctcctgggctgtgcctcccctgggatgcctcccagacgggggtgaagaggcctggcagagctgcctgtcttgtgtctgctgatgagggatgggggaagaagctgtgaagtgggcgggcatggctgggactaagccaccagtattccccgagttcctgtggggggggctggccccacccctaggccagggcaagggttcccagagctcccttgtccccggccctttaccctggttctgagtttacaaagtctcttcctcattcccgttgagttctttcccacctctgacattccctccctccctcccgcagggctgagattagagggtggtgatggctaagggcccctgacagtgaccttcctgtctcaggggttggggacagggccaggtagcctcctgccccttatgtttacgtttgcagcctgaagcactttaatttttttttttttggtctgttcctgtaacttattttccaactattgcttccaactgaaataagactattaaatgcctgttcaggagggagaaaaaaaaaaaaaaaaaaaaaaaaaaaaaaaaaaaaaaaaaaaaaaaaaaa

SEQ ID NO: 26078 - DNA, 2477 bp, Homo Sapiens
ctgccttctagtttttagtctcagaccagaccaccgggcgcaccccgatgccgagcccgcagcttctggtgctcttcggcagccagacaggcacggctcaggatgtgtcggagagactgggtcgcgaggcccggcgccggcggcttggctgccgggtgcaggccctggactcctacccggtggtgaatctgattaacgagcccctggtgatatttgtttgtgcaactacaggccaaggagacccccctgacaacatgaagaacttctggaggtttatattccggaagaacctgccctccactgccctctgtcagatggactttgccgtcctgggcctcggggactcctcatacgccaagttcaacttcgtggccaagaagctgcaccgacggctactgcagcttgggggcagcgccctcctgcccgtgtgcctgggcgatgaccagcatgagctggggcccgacgctgctgtggacccctggctgcgagacttgtgggacagggttctggggctgtacccgccgcctccgggcctcactgagatccctcccggagtccccctgccctccaagttcaccctgctgttcctccaagaggcacccagcacgggctctgaggggcagcgggtagctcaccccggctctcaggagcccccgtcagagtcgaagcccttcctagcacccatgatctccaaccagagagtcaccggcccctcccacttccaggacgttcggctgattgagtttgacatcttgggctctggcatcagctttgctgctggtgatgtggtgctgattcagccctccaactcggctgcccatgtccagcggttctgccaggtgctgggcctggaccctgaccagctcttcatgctgcagccgcgggagccagatgtctcctcccccacgaggctgccccagccctgctccatgcggcacctcgtgtcccactacctggacatcgccagcgtgcctcgccgctccttcttcgaactcctggcctgtctatccctccatgagctggagcgggagaagctgctggagttcagttctgcccaaggccaggaggagctctttgaatactgcaaccggccccgcaggaccatcctggaggtgctctgtgacttcccgcacacagctgccgccatccctcccgactacctgttggacctcatccccgttatccggccgagggccttctccatcgcctcctcgctgctgactcacccctcacggctgcagatcctcgtggctgtagtgcagttccagactcgcctcaaggagccccgccggggcctctgctcctcctggctggcatccctggaccctgggcaaggacctgtccgggtgcccctctgggtgcggcctgggagtctggccttcccagagacaccagacacacctgtgatcatggtggggcctggcactggggtagcccccttccgagcagccatccaggagcgtgtggcccagggccagactggaaacttcttgttttttggctgccgctggcgggaccaagacttctactgggaggctgagtggcaggagctggagaagcgggactgtctgaccctcatccctgccttctcccgggaacaggagcagaaaatatatgtgcagcaccggctccgggagctggggtcgcttgtgtgggaactgctggaccgccagggtgcatacttctacctggcaggcaacgccaagtccatgccagcggacgtctcggaagccctgatgtccatcttccaggaggagggtggactctgcagcccggacgcagccgcgtatctagccaggctccagcagacacggcgcttccagacagagacgtgggcctgaggcccgcggctgcccgtgccccctctgacagccatcctcctgggagcccaggaaggcatccacgagggagctcctggccagcagccgtcatcctctcggaccagccagctggtcctctgggaacagccagctcccgagcacagccgcactcctgttgaccctggatcccaccctttgagcctgaccccactgcagcctctgcccagccagccctgcgctcccccaccctgacagtgagctgtgtcctcgtccccccacccccttcccagtcaaggtggtggcctgggccgctccacctcaccggtgcagtgacccaggacggcatcagcagcccagtgagcaccaggggtggcatagggcacccatgaggctgcgctgcactcctctgccctggggccacctcggctgctgcagcctgcccagcagcacattccagtcactgcccccgcactcccacagggctcaggctgggctcagaggccactgagatgccagctccttgagagcagtgggggtgtcccaggccagagcagcctcttcctctcctggtcccagaaaaacccttgcagtaaatggtggcctctgggtggttaaaaaaaaaaaaaaaaaaaaaaaaaaaaaaaaaaaaaaaaaaaa

SEQ ID NO: 26079 - DNA, 2290 bp, Homo Sapiens
tctaggagacaggggccacggggagagcacagccactcggcgcgaagagccctctgtaccccgcttcctcttgaggccctcggaccgtccaggaaatgtctgggagcccgcctgcggagggcatagcgccgaccctcgctccccgcccaggacccgaatgaacctggagagcggatgccagcagtggccgaggcgctaggacaggaaggaccgccagacctctcaagatcagccttcctcgccaccgttctcacctctttgtccgctgccttctcctcaatgcctagcagcgcgtacaggtccatctgtaagagctccttggtcactgccatggttccggcctgacggattcgtactacaactcccaagagtctaagcgcgcgtgaggactgcaggctccgagcggcgcctagccctctgggaattgtgttctgggtcaggcttgactgactctgagggaggccggcagtcgtgaatgaactacgactcccagcagcccccgttgccgccgctgccgtacgctggctgcaggagagcgtccggattccctgctctaggtcgcggcgggacagtgccagtgggcgtgtggggcggggcggggcagggcagggaagggaagggcggagctggggtgagggtccaaggggcccaggacttggccggcgtgatctcagctctgcagaccctgcggtgctgggagccaccatggagagtaggtgctacggctgcgctgtcaagttcaccctcttcaagaaggagtacggctgtaagaattgtggcagggccttctgttcaggctgcctaagcttcagtgcagcagtgcctcggactgggaacacccaacagaaagtctgcaagcaatgccatgaggtcctgaccagagggtcttctgccaatgcctccaagtggtcaccacctcagaactataagaagcgtgtggcagccttggaagccaagcaaaagcccagcacttcccagagccagggactgacacgacaagaccagatgattgctgagcgcctagcacgactccgccaggagaacaagcccaagttagtcccctcacaggcagagatagaggcacggctggctgccctaaaggatgaacgtcagggttccatcccttccacccaggaaatggaggcacgacttgcagcgttgcagggcagagttctaccttctcaaaccccccagccggcacatcacacaccggacaccaggacccaagcccagcagacacaggatctgctaacgcagctggcagctgaggtggctatcgatgaaagctggaaaggaggaggcccagctgcctctctccagaatgatctcaaccagggtggcccagggagcactaattccaagaggcaggccaactggtccttggaggaggagaagagcagactgctggctgaggcagcacttgagttgcgggaggagaacacgaggcaggaacggattctggccctggccaagcgactagccatgctgcggggacaggaccccgagagagtgaccctccaggactatcgcctcccagacagtgatgacgacgaggatgaggagacagccatccaaagagtcctgcagcagctcactgaagaagctgccctggatgaggcaagtggctttaacatccctgcagagcaggcttctcgaccctggacgcaaccccgcggggcagagcctgaggcccaggatgtggaccccaggcctgaggctgaggaagaggagctcccctggtgctgcatctgcaatgaggatgccaccctacgctgcgctggctgcgatggggacctcttctgtgcccgctgcttccgagagggccatgatgcctttgagcttaaagagcaccagacatctgcctactctcctccacgtgcaggccaagagcactgaagacaccctggtcctcccggaagggcagtcccacaggcagcggcacccatttctgggcccagccacaggacgtccgatgggagagcttgtctggctctactgatgatggataggccccttcctgagccttggtgtccctggaatgaggaaagattctccattcgagagaatgactgggagggaagaagtcggggccctcctattagaagcccagactggaagtgagaggcatgatggggagagaccagactgaatctacgggtgagccctgtaacctggctctagggcacaggcccctcccctggcacttagtgggtctaataaagtatgttgattcattgggaaaaaaaaaaaaaaaaaaaaaaaaaaaaaaaaaaaaaaaaaaaaaaaaaaa

SEQ ID NO: 26080 - DNA, 2231 bp, Homo Sapiens
ataaatctcgctcgaaactcactggaccgctcctagaaaggcgaaaagatattcaggagcccttccattttccttccagtaggcaccgaacccagcattttcggcaaccgctgctggcagttttgccaggtgtttgttaccttgaaaaatggctactggacaggatcgagtggttgctctcgtggacatggactgtttttttgttcaagtggagcagcggcaaaatcctcatttgaggaataaaccttgtgcagttgtacagtacaaatcatggaagggtggtggaataattgcagtgagttatgaagctcgtgcatttggagtcactagaagtatgtgggcagatgatgctaagaagttatgtccagatcttctactggcacaagttcgtgagtcccgtgggaaagctaacctcaccaagtaccgggaagccagtgttgaagtgatggagataatgtctcgttttgctgtgattgaacgtgccagcattgatgaggcttacgtagatctgaccagtgctgtacaagagagactacaaaagctacaaggtcagcctatctcggcagacttgttgccaagcacttacattgaagggttgccccaaggccctacaacggcagaagagactgttcagaaagaggggatgcgaaaacaaggcttatttcaatggctcgattctcttcagattgataacctcacctctccagacctgcagctcaccgtgggagcagtgattgtggaggaaatgagagcagccatagagagggagactggttttcagtgttcagctggaatttcacacaataaggtcctggcaaaactggcctgtggactaaacaagcccaaccgccaaaccctggtttcacatgggtcagtcccacagctcttcagccaaatgcccattcgcaaaatccgtagtcttggaggaaagctaggggcctctgtcattgagatcctagggatagaatacatgggtgaactgacccagttcactgaatcccagctccagagtcattttggggagaagaatgggtcttggctatatgccatgtgccgagggattgaacatgatccagttaaacccaggcaactacccaaaaccattggctgtagtaagaacttcccaggaaaaacagctcttgctactcgggaacaggtacaatggtggctgttgcaattagcccaggaactagaggagagactgactaaagaccgaaatgataatgacagggtagccacccagctggttgtgagcattcgtgtacaaggagacaaacgcctcagcagcctgcgccgctgctgtgcccttacccgctatgatgctcacaagatgagccatgatgcatttactgtcatcaagaactgtaatacttctggaatccagacagaatgacatcaccagcttcttgagcagtgacccaagttctctgccaaaggtgccagttaccagctcagaagctaagacccagggaagtggcccagcggtgacagccactaagaaagcaaccacgtctctggaatcattcttccaaaaagctgcagaaaggcagaaagttaaagaagcttcgctttcatctcttactgctcccactcaggctcccatgagcaattcaccatccaagccctcattaccttttcaaaccagtcaaagtacaggaactgagcccttctttaagcagaaaagtctgcttctaaagcagaaacagcttaataattcttcagtttcttccccccaacaaaacccatggtccaactgtaaagcattaccaaactctttaccaacagagtatccagggtgtgtccctgtttgtgaaggggtgtcgaagctagaagaatcctctaaagcaactcctgcagagatggatttggcccacaacagccaaagcatgcacgcctcttcagcttccaaatctgtgctggaggtgactcagaaagcaaccccaaatccaagtcttctagctgctgaggaccaagtgccctgtgagaagtgtggctccctggtaccggtatgggatatgccagaacacatggactatcattttgcattggagttgcagaaatcctttttgcagccccactcttcaaacccccaggttgtttctgccgtatctcatcaaggcaaaagaaatcccaagagccctttggcctgcactaataaacgccccaggcctgagggcatgcaaaaaaaaaaaaaaaaaaaaaaaaaaaaaaaaaaaaaaaaaaaaaaaaaa

SEQ ID NO: 26081 - DNA, 4602 bp, Homo Sapiens
gctgacacgtgtgcgcgcgcgcggctccactgccgggcgaccgcgggaaaattccaaaaaaactcaaaaagccaatacgaggcaaagccaaattttcaagccacagatcccgggcggtggcttcctttccgccactgcccaaactgctgaagcagctcccgcgaggaccacccgatttaatgtgtgccgaccatttccttcagtgctggacaggctgctgtgaagggacatcaccttttcgctttttccaagatggctcaagattcagtagatctttcttgtgattatcagttttggatgcagaagctttctgtatgggatcaggcttccactttggaaacccagcaagacacctgtcttcacgtggctcagttccaggagttcctaaggaagatgtatgaagccttgaaagagatggattctaatacagtcattgaaagattccccacaattggtcaactgttggcaaaagcttgttggaatccttttattttagcatatgatgaaagccaaaaaattctaatatggtgcttatgttgtctaattaacaaagaaccacagaattctggacaatcaaaacttaactcctggatacagggtgtattatctcatatactttcagcactcagatttgataaagaagttgctcttttcactcaaggtcttgggtatgcacctatagattactatcctggtttgcttaaaaatatggttttatcattagcgtctgaactcagagagaatcatcttaatggatttaacactcaaaggcgaatggctcccgagcgagtggcgtccctgtcacgagtttgtgtcccacttattaccctgacagatgttgaccccctggtggaggctctcctcatctgtcatggacgtgaacctcaggaaatcctccagccagagttctttgaggctgtaaacgaggccattttgctgaagaagatttctctccccatgtcagctgtagtctgcctctggcttcggcaccttcccagccttgaaaaagcaatgctgcatctttttgaaaagctaatctccagtgagagaaattgtctgagaaggatcgaatgctttataaaagattcatcgctgcctcaagcagcctgccaccctgccatattccgggttgttgatgagatgttcaggtgtgcactcctggaaaccgatggggccctggaaatcatagccactattcaggtgtttacgcagtgctttgtagaagctctggagaaagcaagcaagcagctgcggtttgcactcaagacctactttccttacacttctccatctcttgccatggtgctgctgcaagaccctcaagatatccctcggggacactggctccagacactgaagcatatttctgaactgctcagagaagcagttgaagaccagactcatgggtcctgcggaggtccctttgagagctggttcctgttcattcacttcggaggatgggctgagatggtggcagagcaattactgatgtcggcagccgaaccccccacggccctgctgtggctcttggccttctactacggcccccgtgatgggaggcagcagagagcacagactatggtccaggtgaaggccgtgctgggccacctcctggcaatgtccagaagcagcagcctctcagcccaggacctgcagacggtagcaggacagggcacagacacagacctcagagctcctgcacaacagctgatcaggcaccttctcctcaacttcctgctctgggctcctggaggccacacgatcgcctgggatgtcatcaccctgatggctcacactgctgagataactcacgagatcattggctttcttgaccagaccttgtacagatggaatcgtcttggcattgaaagccctagatcagaaaaactggcccgagagctccttaaagagctgcgaactcaagtctagaaggcacgcaggccgtgtgggtgcccggcgtgagggatcaggctcgccagggccacaggacaggtgatgacctgtggccacgcatttgtggagtaagtgccctcgctgggctgtgagaatgagctgtacacatcttgggacaatctgctagtatctattttacaaaatgcagagccaggtccctcagcccagactcagtcagacatgttcactaatgactcaagtgagccttcggtactcctggtgcccgcccggccagaccgtcagcttgataattactaaagcaaagacctgggtgggagaacaggtttctagtttttacccaagtcaagctgcacatctattatttaaaaattcaaagtcttagaaccaagaatttggtcatgaaccattaaagaatttagagagaacttagctctttttagactctttttaggagtcagggatctgggataaagccacactgtcttgctgtatggagaaattcttcaaggggagtcagggtccctcaggcttcccttgtgtctccctggacctgcctgacaggccacaggagcagacagcacacccaagcccgggcctccggcacactctttccactctgtatttgctaaatgatgctaactgctaccaaaaggcccttgggacatcagaggagccggcaggcgaaggtagaggatgtgttccagaaacattagaaggcaggattaattcagttagttagttctcttgttaaatggaaatgggaattggaaattcctgataaagaattggcctggctgggtgcagtggctcacacctgtgatcccagcactttgggaggccaaggcagggggattacttcagcccaggagttccagactgcctggctaacatggcaataccctatctctactaaaaatacaaaaattatcggggtgcaatggcatgcatctgtaatcccagctattcaagaggctgaggcatgaggatctcttgaacccgggaggtgggagttgtagtgagccgagatcatgacactgcactccagcctgggcaacagagcgagaccatctcttaaaaaaaggcattgttagtgtaatctcaaggttaacatttatttcatgtcagtacagggtgctttttcctttcagggacattctggaattgtattggttgtacattcttttgtgtctattctgtttgtcaagtgagtcaagacttgcttttgtccattttgatttgtgtgtattagtctgagtcttggctccgttttgaggtatgagcaaagttttgctggattagaagttaacctttagggaaattccttattttggtatgtggcaatgctaatagatccactgaagatctggaaaattccaggaacttttcacctgagcctttcttctgagaaatgctgcagtcagaagggtgtgctggtaaagtattttggtggcagctgccatcatggtcattgccttcatataacatgcttcgtgctcatggtcattgccttcatataacatgcttcgtgccatcatgatccttgccttcatataacaaacatgcttcgtcagaggtgttggggttgaaaaaggagctgcatgcttcactggagttgagggcctctctcctgttctgactttaagccagaacttgtggctgggccatggaagctgtgactcctctgtggacatggtggcagcagggaacccctagagagaggggccactgggaccaggcctcctgttgtggagggactcctgggacagtcctccaccctgtcctgtggtcctgtgtacagggttggcctcttcctcctcccctgccaggcctctgcccatgccccttccttccttctcctgggactggtgaagctaggcatctggaagacttcttcctagcctggaagccctgacctcggcccatctgcagaatctcccagttccttcacagctgccgagtcctctcacgggtgcggtggaggcggccttgccggtggtgctttctgggcagccaggggttcctgggtgggaggactgtccctctggggacgtggcactgaagtgcctgctggcttcatgtggccctttgccctttcccagcctgagagatgctcaaaggtggggagctgggggagccacccctcggccattccctccacctccaagacaggtggcggccgggcaggcactcttaagcccacctccccctcttgttgccttcgatttcggcaaagcctgggcaggtgccaccgggaaggaatggcatccgagatgctgggcggggacgcggcgtggccgagggggccttgacggcgttggcggggcctgggcacaggggcagccgcagggaggcagggatggcaaggcgtgaagccaccctggaaggaactggaccaaggtcttcagaggtgcgacagggtctggaatctgaccttactctagcaggagtttttgtagactctccctgatagtttagtttttgataaagcatgctggtaaaaccactaccctcagagagagccaaaaatacagaagaggcggagagcgcccctccaaccaggctgttattcccctggactccgtgacatctgtggaattttttagctctttaaaatctgtaatttgttgtctattttttcattctaaataaaacttcagtttgcacctaaaaaaaaaaaaaaaaaaaaaa

SEQ ID NO: 26082 - DNA, 1603 bp, Homo Sapiens
tatcaacccagataaagcgggacctcctctctggtagaggtgcagggggcagtactcaacatgatcacagagggagcgcaggcccctcgattgttgctgccgccgctgctcctgctgctcaccctgccagccacaggctcagaccccgtgctctgcttcacccagtatgaagaatcctccggcaagtgcaagggcctcctggggggtggtgtcagcgtggaagactgctgtctcaacactgcctttgcctaccagaaacgtagtggtgggctctgtcagccttgcaggtccccacgatggtccctttggtccacatgggccccctgttcggtgacgtgctctgagggctcccagctgcggtaccggcgctgtgtgggctggaatgggcagtgctctggaaaggtggcacctgggaccctggagtggcagctccaggcctgtgaggaccagcagtgctgtcctgagatgggcggctggtctggctgggggccctgggagccttgctctgtcacctgctccaaagggacccggacccgcaggcgagcctgtaatcaccctgctcccaagtgtgggggccactgcccaggacaggcacaggaatcagaggcctgtgacacccagcaggtctgccccacacacggggcctgggccacctggggcccctggaccccctgctcagcctcctgccacggtggaccccacgaacctaaggagacacgaagccgcaagtgttctgcacctgagccctcccagaaacctcctgggaagccctgcccggggctagcctacgagcagcggaggtgcaccggcctgccaccctgcccagtggctgggggctgggggccttggggccctgtgagcccctgccctgtgacctgtggcctgggccagaccatggaacaacggacgtgcaatcaccctgtgccccagcatgggggccccttctgtgctggcgatgccacccggacccacatctgcaacacagctgtgccctgccctgtggatggggagtgggactcgtggggggagtggagcccctgtatccgacggaacatgaagtccatcagctgtcaagaaatcccgggccagcagtcacgcgggaggacctgcaggggccgcaagtttgacggacatcgatgtgccgggcaacagcaggatatccggcactgctacagcatccagcactgccccttgaaaggatcatggtcagagtggagtacctgggggctgtgcatgcccccctgtggacctaatcctacccgtgcccgccagcgcctctgcacacccttgctccccaagtacccgcccaccgtttccatggtcgaaggtcagggcgagaagaacgtgaccttctgggggagaccgctgccacggtgtgaggagctacaagggcagaagctggtggtggaggagaaacgaccatgtctacacgtgcctgcttgcaaagaccctgaggaagaggaactctaacacttctctcctccactctgagccccctgaccttccaaacctcaataaactagcctcttcgaaaaaaaaaaaaaaaaaaaaaaaaaaaaaaaaaaaaaaaaaaaaaaaaaaaaaaaaaaaaaaaaaaaaaaaa

SEQ ID NO: 26083 - DNA, 3818 bp, Homo Sapiens
ggatgatggagacagagcgacttgtgctaccccctccagatcccctggacctaccccttcgggccgtggagctcggatgcacggggcactgggagctgctgaacttgcctggagctccagagagtagccttccccatggcctccctccttgtgccccagatctgcagcaagaagcagaacagttgtttctgtcatccccagcctggctgcctctgcatggtgtggagcactcagcccgaaaatggcagaggaagacggatccctggtctcttttggctgtgctgggagccccagtcccatccgacctacaggcccaaagacacccaaccacaggccagatactgggttacaaagaggtcttgctggagaacacaaatctctcggctacaacctccttgtctcttcgccggcctccagggccagcctcccagtccttatggggaaatccaactcggtatcccttctggccaggggggatggatgaacccaccataacagatctgaacacacgggaggaggctgaggaggagatagactttgagaaagatcttcttactattccacctggtttcaagaaaggcatggactttgcaccaaaagattgtccaactccagctcctggactactaagccttagctgtctgttggagcctctggatttgggtgggggtgacgaggatgagaatgaggcagtgggacagccaggaggtcccagaggggacactgtttcagcctctccctgcagtgctcccctggcccgagcaagcagcttggaagacctagtgttgaaggaagcgtccacagctgtatccaccccagaggccccagagcctccatctcaggagcagtgggccatccctgtggacgccacctcccctgttggtgatttctatcgcctcattccccagccagccttccagtgggcatttgagccagatgtgtttcagaaacaggccatcctgcacttggaacggcatgactctgtctttgtcgcagctcacacatctgcaggaaaaacagttgtggctgaatatgccattgccctggcccagaaacacatgacacgcaccatctacacttcgcccatcaaggccctgagcaaccagaagttccgggacttccgaaacacattcggggatgtggggctgctcaccggggatgtacagctgcatccggaggcctcctgcctcatcatgaccacagagatccttcgctccatgctgtacagtggctcagatgttattcgggacctggagtgggtcatctttgatgaggttcactatatcaacgatgtcgagcgtggggtcgtgtgggaggaggtgcttatcatgctacctgaccacgtttctatcatccttctgagtgccaccgtccccaacgcccttgagtttgctgactggattgggcggctgaagcgtcgtcagatctatgtgattagcactgtaacccgccccgtgcccctggagcactatcttttcacagggaacagctccaagacccagggggagctctttttgttgctggactcccgaggagccttccatacaaaagggtactatgcagctgtggaggccaagaaggagagaatgagcaaacacgcccagacctttggggccaagcagcccacacatcaggggggccctgcacaggaccgcggagtgtacctgtccctcctggcctccctccgcacacgtgcccagttgcccgtggtggtgttcaccttctcccggggccgctgtgatgagcaggcctcaggcctcacctcccttgacctcaccaccagttcggagaagagcgagatccacctcttcctgcagcgctgccttgctcgcctccgtggctctgaccgccagctgccccaggtcctgcacatgtcagagctcctgaatcgcggcctgggtgtgcaccatagcggcatcctgcccatcctcaaggagatcgtggagatgctcttcagccgtggcctggtcaaggtcttgtttgccacagagacctttgccatgggagtaaacatgcctgctcgtacagtagtgtttgactccatgcgcaaacacgatggctccaccttccgggacctgctccctggggagtatgtgcagatggcaggccgggcagggcggaggggcctggaccccacaggcaccgttatcctgctctgcaagggccgagtgcccgagatggcagacctgcaccgcatgatgatggggaagccgtcccagctgcagtcccagttccgcctcacgtacactatgatcctcaacttgctgcgagtggatgccctcagggtggaggacatgatgaagaggagcttctctgagtttccctcccgcaaagacagcaaggcccatgaacaggccctggctgaactgaccaagaggctgggagctttggaggagcctgacatgactggccaactggtcgacctgcctgaatattacagctggggggaggaactgacagagacccagcacatgatccagcgacgcatcatggagtctgtgaacgggctgaagtctctctcagcaggaagggtggtggttgtgaagaatcaggagcatcacaacgcattgggagtgatcctacaggtctcctcgaactccaccagcagagtattcacaaccctggtcttgtgtgataagcccttgtcccaggacccacaggacagggggccagccactgcagaggtgccctatccagatgacctcgtgggattcaagctgttcctgcctgaagggccttgtgaccacaccgtggtcaagctccagccaggagatatggctgccatcaccaccaaggtgctccgggtgaatggggagaagatcttggaggacttcagcaagaggcagcagccaaaattcaagaaggatcctccccttgcagccgtgaccactgctgtccaggaactgctgcgtctggctcaggcccacccagccggacctcccaccctcgaccctgtcaatgacctgcagctcaaagatatgtcagttgtagagggtgggctccgggcccggaagctggaggagctgatccagggggctcagtgtgtacacagcccccgttttcctgcccagtacctgaagctgcgggagcgaatgcagatacagaaggagatggagcggctgcgcttcctactgtcggatcagtcattgctgctgcttcctgagtaccatcagcgagtagaggtgctccgaaccctgggttacgtggacgaggtgggcactgtgaagctggcagggcgggtggcttgtgccatgagcagccatgagttgctcctcactgagctcatgtttgacaatgcactgagcaccctgcggcctgaggagattgctgccttgctctctggcctggtctgccagagccctggggacgctggggatcagctcccaaacaccctcaagcagggaatagaacgtgtccgggctgtggccaagcggattggtgaggtccaggtggcttgtggcctgaaccagacggtggaggaatttgtgggggagctgaattttgggctggttgaggttgtatatgagtgggcccggggcatgcccttctccgagttggcagggctctcagggacccctgagggcctggtggtccgctgcattcagcgcctggctgagatgtgtcgctcactgcggggggcagcccgcctggtaggagagcctgtgctgggtgccaagatggagacagcggctaccttgctacggcgggacatcgtatttgcggccagcctctacacccagtgaatgccccatgtaaaaacatgatgataaaacagcaaaaaaaaaaaaaaaaaaaaaaaaaaaaaaaaaaaaaaaaaa

SEQ ID NO: 26084 - DNA, 1144 bp, Homo Sapiens
agagcaggtgccggggagcccttcgcatgcggctgccgggccggaggtggtagcggcgccgggcgcgctccgcccgcccctcctccgggccgcactgaggctcgggcgcgcggggacatgtcggtggcgacgggcagcagcgaggcggccggcggggccagcggcggcggcgcacgggttttcttccaaagcccccggggtggcgccggtggcagccccggctccagcagcggctcaggctcctcccgggaggactcggcgcccgtggccacggcggccgctgcagggcaggttcagcagcaacagcagcggcgacaccagcagggaaaagtgacagtgaaatacgatcgtaaggagcttcggaagcggctggtgctggaggaatggatcgtggagcagctgggtcagctctacggctgcgaggaagaagaaatgccagaggtagaaattgacattgatgatcttcttgatgcagacagtgatgaagagagagcttcaaaattacaggaagctcttgtagactgctacaaaccaacagaggaatttatcaaagagctgctttctcggataagaggcatgaggaaactgagccctccgcagaagaagagtgtatgattctggaacagggtgaaactctcccagagacgaagaaagagtcctgggatttgtacttcatgaagacttttgtgaaagaataggtgtccttatgaacaacgttttttgtttttttttttctttttttggtgtgaaggtgggggggtctattagacatttattcaagagcgttctttttttggttttaaaggtttttgttaatgtaatattttaatagcaaagatatcatgactctagccacagcctaaccaaggattatcaaaggaggtggacactcaaggaagggccacgccaggctgcgtttcctgcaaggactcagatgttcagtaccttatgatacagggaagatagttttcttacaagtagtttggtaatattttttttcttaagttgtacatttgactcagctgtcaaatttctcacacttgtatatatctacacacaactaagttaaaatgttgatgtgagttttatttcacatggatggaaaaaaaaaaaaaaaaaaaaaaaaaaaaaaaaaaaaaaaaaa

SEQ ID NO: 26085 - DNA, 1760 bp, Homo Sapiens
atttccttggggtctttcagagggtgggggaacaaacccctatgcacttttctttttttttttttgagatggagtttctcttgtcaaccgggctggagtgcagtggtgcaatcttggctcactgcaacctccaccttcctggttcaagcgattctgcctcgacctctcaagtagctgggattacaagcaccagccaccatgcctggctaattttgtatttttagtagagacagggtttcaccatgttggccaggctggtctcgaatgtctgacctcaggtgatccacccgccttggcctcccaaagtgctgggattacaggcgcgagccaccgcgcccagcctacaccacttttagtaccaacactcttgggtgatttcatggaccctaaagcagacctgacactgatccagatttgcagtccatttttaaggacacctgtctttatttcctcaaagtcaagcagctttctctggaaaatgaatgctaattagtgtgaaccaaaagagtaagtaagagtctgaagtttttttaaaggagaaagcttattatggaaagtcactggtcctcccctccgcacaggaaaggtacccagtagataatgaaccaaattaagttccctccctccagccagaagttaaacatctgggatatgacgtcttcatgccaggggcactcatttcttagcagcctctctacatacatctctcaggtggtgccaagaggcacaccaggtagagcaaacttagcagctctgactaacaggctgcaaagtgcaagttcagattctgtggcagagatttggaaggcacccacctccagactgcttcccgtccaagttaccaggacagctcaaaaacatgctgacagaaaactcccatggctctaggaagaagtgacactaagccaacacctttctttatgtgggagcagaatcagctgatgaaggggtgggcagcagtgtggggcaggcaccccactggctgcagctagcccaccataggcacagcacatcccaccactctccttccagtcctgaccaggccccagccggcaacttctaccgagagccatggctcaacaccaaactggacagtagacatcatgatccctccagttagctctaattacagaccccaccagtacagcttgacagctcccggcaccatcccttccttcatctgacttattgaacttttacaaactaacagtcaccagcaccaaagaattaagtcaactaacctgccttgaattttagaccagcaatccatatggctttatctggtataaatcttctgcctttgatcatttctggaccgtaggaaaaaggaatagcaatcattaaaatcttgggccagagaacactatttttacataacagtttcttaacctaaagtcaaggccttggactcttccctgagggttgcctgagattccttcatgctttctattcaggactaagtcccttactgcaaatgtgttagctctaacatctcccacaagctagaggaacttgcgagtatattaacaaggacacatctgacatcctgtgtttggttagaatatacagcacattgtgataacataaagtggattcatcttgtatcattataggcagaaggtatttggcaaatttttatgtattgttttatgtactgtacaagtaacttattcttgaataatgcaaattttgctataatgtacaaattgctatatgtgaattaaaaagttttcagaatcttgaaaaaaaaaaaaaaaaaa

SEQ ID NO: 26086 - DNA, 1445 bp, Homo Sapiens
caggctgcgcttccctggtcaggcacggcacgtctggccggccgccaggatgcaggccccgcacaaggagcacctgtacaagttgctggtgattggcgacctgggcgtggggaagaccagtatcatcaagcgctacgtgcaccagaacttctcctcgcactaccgggccacaatcggcgtggacttcgcgctcaaggtgctccactgggacccggagactgtggtgcgcctgcagctctgggatatcgcaggtcaagaaagatttggaaacatgacgagggtctattaccgagaagctatgggtgcatttattgtcttcgatgtcaccaggccagccacatttgaagcagtggcaaagtggaaaaatgatttggactccaagttaagtctccctaatggcaaaccggtttcagtggttttgttggccaacaaatgtgaccaggggaaggatgtgctcatgaacaatggcctcaagatggaccagttctgcaaggagcacggtttcgtaggatggtttgaaacatcagcaaaggaaaatataaacattgatgaagcctccagatgcctggtgaaacacatacttgcaaatgagtgtgacctaatggagtctattgagccggacgtcgtgaagccccatctcacatcaaccaaggttgccagctgctctggctgtgccaaatcctagtaggcacctttgctggtgtctggtaggaatgacctcattgttccacaaattgtgcctctatttttaccattttgggtaaacgtcaggatagatataccacatgtggcaagccaaagatctatgcctctgttttttcaatgagagagaaatagcaaatgttctttctatgctttcctcaccatcatcacagtgtttacaaacttttgaaaatatttagtctgttacaaacttctgtcatgtagctgaccaaaatcctgcagggccacagtcggcactgttatttgcttcttttaatcagcaaaggcctcaagtcttaaaataaaaggggagaagaacaaactagctgtcaagtcaaggactggctttcaccttgccctggtgtctttttccagatttcaatatattctctgatggcctgacaggcctattaagtagatgtgatattttctcccaagatgacctccattctcggcagacctaagagttgcctctgagttagctctttggaatcgtgaacacaggtgtgctatattgtccttgtcctaactgtcacttgccatggcctgaatgttggcttaactgaatattgtatgaaaagacatgcctccatatgtgcctttctgttagctttctctgactcaagctgtggggctcctctatacatgctatacatgtaatatatattatatatatttttgcaagtgaacaataaaacattaaaagatgctgtttccctatttaaaaaaaaaaaaaaaaaaaa

SEQ ID NO: 26087 - DNA, 2139 bp, Homo Sapiens
gaattggctgcgcttccttgtttgtgagctagaattagaatggcgatcagtccacgaagcgatgcaactttctccagtcagaaatcaacaccttcagagagtcctcgaacaaagaaatttccactaactgaagaggaaatattttatatgaattgtagagctgcctacttaactgtcttcaaaagcagcttggaaaacattatttctaaagatcaactttacttagctcttcagcatgcaggaagaaatccatcccaaaagaccattaataagtattggactcctcaaactgccaaactgaattttgatgatttttgtataattttaaggaaggaaaaacctacttcaaaagcagaactactaaaatcttttaagcaattagatgtaaatgatgatggctgtattttacacactgacctttataaatttctaacaaagagaggtgagaagatgactcgagaagaagtaaatgccataataaatttggctgatgtaaatgctgatggcaaatttgactacatcaagttttgtaaattatatatgacaaccaacgagcaatgtctcaagactacactagaaaaactagaggttgacagtaaattgatgcgtcaccagtttggaaaccacatcgaagggtcccctgaaagggacccatcaccagtaccaaaaccatcacctaaaatcacaagaaaaactgatccagaaacattcttaaataaaggtgacaccaggagttctttactgtcagcaaccaggaagttcaaaacatctgtttccttcatagttaccatgggggctaatggtaaccgaaactcaaagttaacggagccaaatttaataaaggactggcaacacatgcaatcaaaaggttgcttcttcttagaagaagatggtgaaatcattagtcatcagtacaggatgcaaatagctcagaggtccatggtttatctaacaattaagccattaaacctgagtcaagttgaaggaaaaccatccccttggttatccgttgatactgccttgtatattctcaaggaaaatgagagtcaagcaaatctacagcttgtgtgttttaccgaactacgaaatagagaagtgtttggatggactggtgaactaggacctggaatttactggttaattccttccacaactggctgtaagctgaggaaaaaaataaaaccagtaacagatgaagcccaacttgtatatagagatgaaacaggggaattattccttacaaaggaatttaagtctactttatcagatatatttgaagtaattgatttagatggaaatggtcttcttagccttgaagaatataatttttttgaattgagaacaagtggtgagaaatgtgatgaagatgcttgggctgtctgcagagagaattttgatacaaagaggaatgaactaacaagacaaggatttatggatttgaatctaatggaagctaatgatcgagaaggagatccttgtgacctttgggtaactctacactctatgggctacaataaagctctggagttgacagaggcatgtccatttgtcattgatatctatgcagaaaaatgcaagccaaaaattaaagctgtccatatggaggcatgtagtggacaacttgagaaggccatttgtaaatctgttcttagcaacggtgatgccaaagtaatggatggctatgaaaatataatcgtgcatacttacagttgtgacacctggataacgtcagttattgaaaacaagtcagatgagaaagtgattattcacatcagcaatgagctaagtaaaaactgcataaacaacagaggactcaacatatttgcagtagaagtgggacccaaatctacaatggtttgtcaacatgtaatgcctttgaatgaacgacaagaatggatatattattgtatatattctcttatttcttaaataattatacttagaacttaccaaactaagaattatttcagatttagtctgttatttattaaacaactaaatgctacttaactgatgtacctaaataataatctattcaatttatatgcattttcattttatgtccatggtatgtactttattattaaaatataaataatgctttcaaaaaaaaaaaaaaaaaaaaaaaaaaaaaaaaaa

SEQ ID NO: 26088 - DNA, 4078 bp, Homo Sapiens
gagcgtaccagatgaggaaggacggcagtccccagccatgcggcctcgctcccggagcctcagtcccggacgatccccagtatcctttgacagtgaaataataatgatgaatcatgtttacaaagaaagattcccaaaggctcatgagcgctcagagagctcagaagtggcttttgtgatgcagctggtgaaaaagctgatgattatcattgcccgcccagcacgtctcctggaatgcctggagtttgaccctgaagagttctaccaccttttagaagcagctgagggccacgccaaagagggacaagggattaaatgtgacattccccgctacatcgttagccagctgggcctcacccgggatcccctagaagaaatggcccagttgagcagctgtgacagtcctgacactccagagacagatgattctattgagggccatggggcatctctgccatctaaaaagacaccctctgaagaggacttcgagaccattaagctcatcagcaatggcgcctatggggctgtatttctggtgcggcacaagtccacccggcagcgctttgccatgaagaagatcaacaagcagaacctgatcctacggaaccagatccagcaggccttcgtggagcgtgacatactgactttcgctgagaacccctttgtggtcagcatgttctgctcctttgataccaagcgccacttgtgcatggtgatggagtacgttgaagggggagactgtgccactctgctgaagaatattggggccctgcctgtggacatggtgcgtctatactttgcggaaactgtgctggccctggagtacttacacaactatggcatcgtgcaccgtgacctcaagcctgacaacctcctaattacatccatggggcacatcaagctcacggactttggactgtccaaaatgggcctcatgagtctgacaacgaacttgtatgagggtcatattgaaaaggatgcccgggaattcctggacaagcaggtatgcgggaccccagaatacattgcgcctgaggtgatcctgcgccagggctatgggaagccagtggactggtgggccatgggcattatcctgtatgagttcctggtgggctgcgtccctttttttggagatactccggaggagctctttgggcaggtgatcagtgatgagattgtgtggcctgagggtgatgaggcactgcccccagacgcccaggacctcacctccaaactgctccaccagaaccctctggagagacttggcacaggcagtgcctatgaggtgaagcagcacccattctttactggtctggactggacaggacttctccgccagaaggctgaatttattcctcagttggagtcagaggatgatactagctattttgacacccgctcagagcgataccaccacatggactcggaggatgaggaagaagtgagtgaggatggctgccttgagatccgccagttctcttcctgctctccaaggttcaacaaggtgtacagcagcatggagcggctctcactgctcgaggagcgccggacaccacccccgaccaagcgcagcctgagtgaggagaaggaggaccattcagatggcctggcagggctcaaaggccgagaccggagctgggtgattggctcccctgagatattacggaagcggctgtcggtgtctgagtcgtcccacacagagagtgactcaagccctccaatgacagtgcgacgccgctgctcaggcctcctggatgcgcctcggttcccggagggccctgaggaggccagcagcaccctcaggaggcaaccacaggagggtatatgggtcctgacacccccatctggagagggggtatctgggcctgtcactgaacactcaggggagcagcggccaaagctggatgaggaagctgttggccggagcagtggttccagtccagctatggagacccgaggccgtgggacctcacagctggctgagggagccacagccaaggccatcagtgacctggctgtgcgtagggcccgccaccggctgctctctggggactcaacagagaagcgcactgctcgccctgtcaacaaagtgatcaagtccgcctcagccacagccctctcactcctcattccttcggaacaccacacctgctccccgttggccagccccatgtccccacattctcagtcgtccaacccatcatcccgggactcttctccaagaagtatggcttcaccctgcgggccattcgcgtctacatgggtgactccgatgtctacaccgtgcaccatatggtgtggcacgtggaggatggaggtccggccagtgaggcagggcttcgtcaaggtgacctcatcacccatgtcaatggggaacctgtgcatggcctggtgcacacggaggtggtggagctgatcctgaagagtggaaacaaggtggccatttcaacaactcccctggagaacacatccattaaagtggggccagctcggaagggcagctacaaggccaagatggcccgaaggagcaagaggagccgcggcaaggatgggcaagaaagcagaaaaaggagctccctgttccgcaagatcaccaagcaagcatccctgctccacaccagccgcagcctttcttcccttaaccgctccttgtcatcaggggagagtgggccaggctctcccacacacagccacagcctttccccccgatctcccactcaaggctaccgggtgacccccgatgctgtgcattcaggcaactctcacggcccaagagtgcggagccaccccgttcaccactactcaagagggtgcagtcggctgagaaactggcagcagcacttgccgcctctgagaagaagctagccacttctcgcaagcacagccttgacctgccccactctgaactaaagaaggaactgccgcccagggaagtgagccctctggaggtagttggagccaggagtgtgctgtctggcaagggggccctgccagggaagggggtgctgcagcctgctccctcacgggccctaggcaccctccggcaggaccgagccgaacgacgggagtcgctgcagaagcaagaagccattcgtgaggtggactcctcagaggacgacaccgaggaagggcctgagaacagccagggtgcacaggagctgagcttggcacctcacccagaagtgagccagagtgtggcccctaaaggagcaggagagagtggggaagaggatcctttcccgtccagagaccctaggagcctgggcccaatggtcccaagcctattgacagggatcacactggggcctcccagaatggaaagtcccagtggtccccacaggaggctcgggagcccacaagccattgaggaggctgccagctcctcctcagcaggccccaacctaggtcagtctggagccacagaccccatccctcctgaaggttgctggaaggcccagcacctccacacccaggcactaacagcactttctcccagcacttcgggactcacccccaccagcagttgctctcctcccagctccacctctgggaagctgagcatgtggtcctggaaatcccttattgagggcccagacagggcatccccaagcagaaaggcaaccatggcaggtgggctagccaacctccaggatttggaaaacacaactccagcccagcctaagaacctgtctcccagggagcaggggaagacacagccacctagtgcccccagactggcccatccatcttatgaggatcccagccagggctggctatgggagtctgagtgtgcacaagcagtgaaagaggatccagccctgagcatcacccaagtgcctgatgcctcaggtgacagaaggcaggacgttccatgccgaggctgccccctcacccagaagtctgagcccagcctcaggaggggccaagaaccagggggccatcaaaagcatcgggatttggcattggttccagatgagcttttaaagcaaacatagcagttgtttgccatttcttgcactcagacctgtgtaatatatgctcctggaacccaaaaaaaaaaaaaaaaaaaaaaaaaaaa

SEQ ID NO: 26089 - DNA, 4436 bp, Homo Sapiens
gacctattgacatttcaacaaatcactacggtttcaaaggcaaagggagcatcactgtttacttgtgacctccagcacacagagaccggtgaggaggtgttacggatgtgtgtggcagtaaaaaagaagctgcagctctatttctggaaggacagggaatttcatgaattgcagggggactttagtgtgccagatgtgcccaagtccatggcgtggtgtgaaaattctatctgtgtgggtttcaagagagactactacctaataagggtggatggaaaggggtccatcaaagagctctttccaacaggaaaacagctggagcccttagttgcacctctggcagatggaaaagtggctgtgggccaggatgatctcaccgtggtactcaatgaggaagggatctgcacacagaaatgtgccctgaactggacggacataccagtggccatggagcaccagcctccctacatcattgcagtgttgcctcgatatgttgagatccgaacatttgaaccgaggcttctggtccaaagcattgaattgcaaaggccccgtttcattacctcaggaggatcaaacattatctatgtggccagcaatcattttgtttggagactcatccctgtccccatggcaacccaaatccaacaacttctccaggacaagcagtttgaattggctctgcagctcgcagaaatgaaagatgattctgacagtgaaaagcagcaacaaattcatcacatcaagaacttgtatgccttcaacctcttctgccagaagcgttttgatgagtccatgcaggtctttgctaaacttggcacagatcccacccatgtgatgggcctgtaccctgacctgctgcccacagactacagaaagcagttgcagtatcccaacccattgcctgtgctctccggggctgaattggagaaggctcacttagctctgattgactacctgacacagaaacgaagtcaattggtaaagaagctgaatgactctgatcaccagtcaagcacctcaccgctcatggaaggcactcccaccatcaaatccaagaagaagctgctacaaatcatcgacaccaccctgctcaagtgctatctccatacaaatgtggccctggtggcccccttgctacgcctggagaacaatcactgccacatcgaggagagcgagcacgtgctaaagaaggctcacaagtacagtgagcttatcatcctgtatgagaagaaggggctccacgagaaagctctgcaggtgctcgtggaccagtccaagaaagccaactcccctctgaaaggccacgagaggacagtgcagtatctgcagcatctgggcacagaaaacctgcatttgattttctcctactcagtgtgggtgctgagagacttcccagaagatggcctgaagatatttactgaagatctcccggaagtggagtctctgccacgtgatcgagtcctcggcttcttaatagagaattttaagggtctggctattccttatctggaacacatcatccatgtttgggaggagacaggctctcggttccacaactgcctgatccagctatactgtgagaaggtgcaaggtctgatgaaggagtatctcctgtccttccctgcaggcaaaaccccagtcccagctggagaggaagagggtgagctgggagaataccggcaaaagctcctcatgttcttggagatttccagctactatgatccaggccggctcatctgtgattttccctttgatggcctcttagaagaacgagctctcctgttggggcgcatggggaaacatgaacaagctcttttcatttatgtccacatcttgaaggatacaaggatggctgaggagtactgccacaaacactatgaccgaaacaaagatggcaacaaagatgtgtatctgtccctgcttcggatgtacctgtcgccccccagcattcactgcctggggccaatcaagctggaactactggagccaaaagccaacctccaggccgctctgcaggtcctcgagctacaccacagcaaactggacaccaccaaggccctcaaccttctgccagcaaacactcagatcaatgacatacgcatcttcctggaaaaggtcttggaagaaaatgcacaaaagaaacggttcaatcaagtgctcaagaaccttctccatgcagaattcctgagggtccaggaagagcggattttacaccagcaggtgaagtgcatcatcacagaggagaaggtgtgcatggtgtgtaagaagaagattgggaacagtgcatttgcaagataccccaatggagtggtcgtccattacttctgttccaaagaggtaaacccagctgacacttgagcccagcatcctggggatccagcggatggacagcttggctctcccagagaggtgaaggagcacctggccttaggaatcctggctgccaccaccacaaggctccccatttggacattactggctatcttgtgccctggaacaactctgaattaattagactcatggtctggcattgccagctttttaatgggaaaagagattagttataccttataccattatgttgtgggcaattccagagaattcagtacctgcttggtcaggaggatgtgcaccatcttgcctttgcacaccagtcacctgaacaaggaaacttgtcacaagtgtttgtaaccatggggttgttcatcaagggcttttctattaagtacatgacttcacaaggaccgctcagcatggctcactggagagttccatgagagaacagcactcaagcttctggccgcatggacccgatggctcgcattctgtgtagtgttttacgtctccatggtaactgtgccctgcacccctcggtagccgccctgttagttttcagtctccttttctttctcaccatttatcacttccctcactgccctacccaggctttctctcccacttccctgactctgggaataactaatatttaagcaaggtaagatgagaagcaaggggtctcagttctaggaatacagtgctagttgattgtcaggtatgttgtaaatagaccctctttggccatacactccatgcctagatgcctcggagagcatcattctctgcctaggcaaggccctgcatcccttgcctcaggccgggctgagtgtgactgcagctcctgaggatgggcctgccctgtctggggtatgcgtgatccctagatacatgttcccacagaggtgcctgctccgtcttcgctcaccagacactcaggcaggctggcttagtctttgtgcgtggcgattttgtgctctgggccctttctctttttccagccagtttccattcacttgccttacagcctgccctggccgtcactccccagctttgttcagcaatggtgtggttggagagttgtgctgggatagcgcaggaaggtgggtcccggcaacacgcaggggatgagtggacctggaactgacaatggcgtgctgccaagtgttcctgagaggtgtttaggcacagcagaggggacgcggggggcaagaacagcaggacgctggtttaaaaataactcaccgccaaacctgtggagcagtgtggggcatcctgccagaggtgcacaggctggagtttcaggcactgcaggctgatgacacacagggagagtggccctgcctcctgtcctccccggggtttttgcagactcgaagtctcactgcaccagtgtctttgatggtggtgagggtgggtgatggtgcccagcaccaacagttttagtggcctgtccttgacctgccgtggtcctttgtaaactatggctccatgctgtgtgacagatcaacgtgctgatggtaagtagactaggcttccccaggcatgccgtccgtgggggcctgaagagacagtgagtgccattggccccattcgcagatgtgggagactctgctcaggcctgtgaggctgggcagcccttcaccagagttcggaggagcagtgtgtggcgccacgtcccgactggccatacccacacagaagcagtgctgcccggggcctcatctgggccagcttggactctgcttcctccaggagcagcagggaagctctgggccacctccctggatagcaggaacttgacctgccatgtgtgccctgccttcctggccagctgtgcttgttatcttccattctcacaaactgtctttgaagcaatagaataaagaatgtgtgttttctttcctggtatacatacatgatcccatgctcccaagctccattcttccttccctcaactctctgccctccacagagctatggagaaggctggagatgaaagctttgtagtgaggactgataaagatctcatcactgctccttataataaacctaataaagcaagaaaaaaaaaaaaaaaaaaaaaaaaaaaaaaaaaa

SEQ ID NO: 26090 - DNA, 2120 bp, Homo Sapiens
ggggacctcgggcaagatggctatcaagagtatcgcttcccgcctccggggttcccgtcgttttctgagcggcttcgtggctggggctgtagtgggcgctgcgggagctgggctcgcggccctgcagttcttccggagtcagggcgctgagggagcgttgacagggaagcagccggatggatctgcagaaaaggctgtcttggaacaatttggattccctttaactggaacagaggcaaggtgttacactaatcacgctttgtcttatgatcaggcaaagcgggtgcctagatgggttcttgaacatatttccaaaagcaagataatgggtagattcttcaagtttacactcctagcatcattgtttcttctctctctcaaccttcacctatggctggtcttgaatttctgggttcaagtgaccctcctgcctcagcctcctgagtagctgggattacagggactacatggaaggttgtcttggcactgaacggagaaaggtcaaaaggaagataaaaagtttgttccagagaaggtgatgcagacagaaagcattgtaaatttaagcctgatcccaatatccctccaaccttcagtgccttcaatgaagattatgttggaagtgggtggtcacgaggacacatggctccagcaggaaataacaaattttcaagtaaagccatggctgaaaccttttacctttctaacattgtgcctcaggattttgataataattctggatattggaacagaatagaaatgtactgtcgagagctgacagaaaggtttgaagatgtttgggtggtatctgggcctttgaccttacctcagactagaggcgatggaaagaaaatagttagttaccaggtgattggcgaggacaacgtggcagtcccctcacacctttataaggtaatcctggcccgcagaagctcagtatctaccgaaccactggcgctaggggcctttgtggtacccaatgaagccatcggcttccagccccagttaactgaattccaagtgagcctccaggacctagagaagttgtcaggactggggtttttttcctcatttggatagaactagtgatatccggaatatctgctctgtggacacctgtaagctcctggatttccaggagttcaccttgtacttgagtacaagaaagattgaaggagcccgatcagtgctcagactggaaaagatcatggaaaacttgaagaatgcagagattgaaccagatgattactttatgagtcgctatgagaagaagctagaagaactcaaagctaaggagcagtcaggaacccagataagaaagccatcctagtttttatctcaagatgtgtcataccgtctgtaatgaagcaggcatgccctctttaggctaacatattttagtggctttgctttttgctttttaaaaagtttttctctttaagagatgtggtctcgccatgtcatccaggctggagagcagtggtggaatcatagctcactatggcctcaaacttctgggcttaagcaatcctcctgcctctgccccctgagcagctgggactacaggcacacaccatcaccctcagctactagtggctttgctttaaagaaacagtggaatcctaaatttatgactaaaaattcccccaaaagatgaaagatctacaatgtttttgtcagtattatatttgactcaggaactaattattaagggagctttgacacctgcagatggagggctgatcttgtgtcaagttaacaggaagactgcccacagatgacactgcatttgtatccctgtggatgtagagtattgggaaggcatttgtttagtttcatgcctccaaaccatgcattgtctgtgatgtatctgcccagccttctcagaactcaatgttgtacatttttccctctaggacctgaattggtcttggaggcagcttttagaaatcctctgtgtagttcctgtccacatgcactatatatttgtttcttttttctcctctcatgaatctgctcgtttctctacttctgtctacgtagaagcactcagcaactagtttctgctcattaaatgtgttctatatacggaaaaaaaaaaaaaaaaaaaaaaaaaaaaa

SEQ ID NO: 26091 - DNA, 2397 bp, Homo Sapiens
ggggagagccttcgtttgccaagtcgcctccagaccgcagacatgaaacttgtcttcctcgtcctgctgttcctcggggccctcggactgtgtctggctggcagtaggagaaggagtgttcagtggtgcgccgtatcccaacccgaggccacaaaatgcttccaatggcaaaggaatatgagaaaagtgcgtggccctcctgtcagctgcataaagagagactcccccatccagtgtatccaggccattgcggaaaacagggccgatgctgtgacccttgatggtggtttcatatacgaggcaggcctggccccctacaaactgcgacctgtagcggcggaagtctacgggaccgaaagacagccacgaactcactattatgccgtggctgtggtgaagaagggcggcagctttcagctgaacgaactgcaaggtctgaagtcctgccacacaggccttcgcaggaccgctggatggaatgtccctatagggacacttcgtccattcttgaattggacgggtccacctgagcccattgaggcagctgtggccaggttcttctcagccagctgtgttcccggtgcagataaaggacagttccccaacctgtgtcgcctgtgtgcggggacaggggaaaacaaatgtgccttctcctcccaggaaccgtacttcagctactctggtgccttcaagtgtctgagagacggggctggagacgtggcttttatcagagagagcacagtgtttgaggacctgtcagacgaggctgaaagggacgagtatgagttactctgcccagacaacactcggaagccagtggacaagttcaaagactgccatctggcccgggtcccttctcatgccgttgtggcacgaagtgtgaatggcaaggaggatgccatctggaatcttctccgccaggcacaggaaaagtttggaaaggacaagtcaccgaaattccagctctttggctcccctagtgggcagaaagatctgctgttcaaggactctgccattgggttttcgagggtgcccccgaggatagattctgggctgtaccttggctccggctacttcactgccatccagaacttgaggaaaagtgaggaggaagtggctgcccggcgtgcgcgggtcgtgtggtgtgcggtgggcgagcaggagctgcgcaagtgtaaccagtggagtggcttgagcgaaggcagcgtgacctgctcctcggcctccaccacagaggactgcatcgccctggtgctgaaaggagaagctgatgccatgagtttggatggaggatatgtgtacactgcaggcaaatgtggtttggtgcctgtcctggcagagaactacaaatcccaacaaagcagtgaccctgatcctaactgtgtggatagacctgtggaaggatatcttactgtggcggtggttaggagatcagacactagccttacctggaactctgtgaaaggcaagaagtcctgccacaccgccgtggacaggactgcaggctggaatatccccatgggcctgctcttcaaccagacgggctcctgcaaatttgatgaatatttcagtcaaagctgtgcccctgggtctgacccgagatctaatctctgtgctctgtgtattggcgacgagcagggtgagaataagtgcgagcccaacagcaacgagagatactacggctacactggggctttccggtgcctggctgagaatgctggagacgttgcatttgtgaaagatgtcactgtcttgcagaacactgatggaaataacaatgaggcatgggctaaggatttgaagctggcagactttgcgctgctgtgcctcgatggcaaacggaagcctgtgactgaggctagaagctgccatcttgccatggccccgaatcatgccgtggtgtctcggatggataaggtggaacgcctgaaacaggtgctgctccaccaacaggctaaatttgggagaaatggatctgactgcccggacaagttttgcttattccagtctgaaaccaaaaaccttctgttcaatgacaacactgagtgtctggccagactccatggcaaaacaacatatgaaaaatatttggggccacagtatgtcgcaggcattactaatctgaaaaagtgctcaacctcccccctcctggaagcctgtgaattcctcaggaagtaaaaccgaagaagatggcccagctccccaagaaagcctcagccattcactgcccccagctcttctccccaggtgtgttggggccttggcctcccctgctgaaggtggggattgcccatccatctgcttacaattccctgctgtcgtcttagcaagaagtaaaatgagaaattttgttgatattctctccttaaaaaaaaaaaaaaaaaaaaaaaaaaaaaa

SEQ ID NO: 26092 - DNA, 1255 bp, Homo Sapiens
gggggccatagctacagctgctctggtgggccaaaccaaaagcatcactgagtttgggcacttgaagtttcagacagctgggagtctccatagaaccggaagggaaaacacttccaaggatatgagcatgtcttgtccctgcctttgggccacccatgcacaccagctccacagcagctgaagcagagcagatccagaggaggctgtcggagggaccactgtccttcctgctgaattcatactgaccctctggattctccagattttctccaaagttcttccattctagcctggccaaacatttgggctcagcaaactgagacaagctccccacccatggcgacacttcctatgtccatagtgtgaatgtagtaatgggatatatgtcttggaacccccaagcatatgtcacgtgcaaaacaccgtgggaagcagtgggggtgtggtaaagagatgggctggaaaggctctttgtcctcaataagctggccatctgatggggagatagaggagtgaagcgagtccgaactaataggcatgtgtatttggaggcaacaaggaagagagaaccattctgactgggagctccctggaggaggtagcggacatttgactggggtttggcatattcaaaaaatgtggatgagcaaagaggacagagcagcagatattccaagcgagaaaacataacgagcatagcatcctcccatgtcctaccatttataagagaatgttaatgtgagaactgctcagtctcctgacagacccgggggctgcaggcacattttccctaggggtaggtctgttagcttttcaagatcatgaagtatttttaggtccaagttgtcaccagcattcaaagccaccgtgcatcctccagctgttcccagcgcataccgggctcttgcttgtcatagcttggatgtcccctggatcatcagatacagactgactcctgcacttgttttcccccgtaagcagatcacgtgtcagtgtgtaaaatgtatatcacgctggtcttcatgtaggtgttgcaagtttcgttcattttatacacatccattagcaccacacatgaatgccatcctcttcaagaagtaagcagatagggctgggcgcggtggctcatgcctgtaatcccagcacttcgggaggctgaggcgggcggatcatgaggtcaggagattgagaccattctggctaacacggtgaaaccccatctctacaaaaaaaaaaaaaaaaaaaaaaaaaaaaa

SEQ ID NO: 26093 - DNA, 733 bp, Homo Sapiens
gggctgttatctgtatgttgaaatctaaattggctgttctcagtgtttgccactgtctcttgaatctcttttatctctttctttgtttctttttgagttttaaaagttgttattgtaccacttttgttttgttttgttatttaaaataggaacagtgtctcactgtgttgcccgggctggtcttaaactcctggcctcaagcgatcctccttccttggcctcccaaagtgctgggattacaggtgtgagccaccaaagccggccccaccttgctttttaaaacagctctgttgaggtgtaactgacaggtaatgaactgcacatacgtgaagtgaccgatgcatttgcctgtgaagctgtcgccagaacatgtccatcaccaccaacagcagtttcacaccccggtctaaaccgtccctcgtgtcctccatgttcaggcaaccactggtctgctccctctcactaaaggttaatttatatattctagaattttatctgagtggaatcgcagagcaagtactgtggggggaggtgcttctactcagcataattattttggcattcacccattttgtgtacatcaataatccacattttgtattgcatggatataccacagtttatttatttacctgttgaccgatatttcgattatttccaatttctaaataaaaataaagcaaataaagctgccgtgaacatccaaaaaaaaaaaaaaaaaaaaaaaaaaaaa

SEQ ID NO: 26094 - DNA, 4640 bp, Homo Sapiens
cccgcggctcgggatggaggctggacacctgttctgctgttgtgtcctgccattctcctgaagaacagaggcacactgtaaaacccaacacttccccttgcattctataagattacagcaagatggaaataccaaatccccctacctccaaatgtatcacttactggaaaagaaaagtgaaatctgaatacatgcgacttcgacaacttaaacggcttcaggcaaatatgggtgcaaaggctttgtatgtggcaaattttgcaaaggttcaagaaaaaacccagatcctcaatgaagaatggaagaagcttcgtgtccaacctgttcagtcaatgaagcctgtgagtggacacccttttctcaaaaagtgtaccatagagagcattttcccgggatttgcaagccaacatatgttaatgaggtcactgaacacagttgcattggttcccatcatgtattcctggtcccctctccaacagaactttatggtagaagatgagacggttttgtgcaatattccctacatgggagatgaagtgaaagaagaagatgagacttttattgaggagctgatcaataactatgatgggaaagtccatggtgaagaagagatgatccctggatccgttctgattagtgatgctgtttttctggagttggtcgatgccctgaatcagtactcagatgaggaggaggaagggcacaatgacacctcagatggaaagcaggatgacagcaaagaagatctgccagtaacaagaaagagaaagcgacatgctattgaaggcaacaaaaagagttccaagaaacagttcccaaatgacatgatcttcagtgcaattgcctcaatgttccctgagaatggtgtcccagatgacatgaaggagaggtatcgagaactaacagagatgtcagaccccaatgcacttccccctcagtgcacacccaacatcgatggccccaatgccaagtctgtgcagcgggagcaatctctgcactccttccacacacttttttgccggcgctgctttaaatacgactgcttccttcacccttttcatgccacccctaatgtatataaacgcaagaataaagaaatcaagattgaaccagaaccatgtggcacagactgcttccttttgctggaaggagcaaaggagtatgccatgctccacaacccccgctccaagtgctctggtcgtcgccggagaaggcaccacatagtcagtgcttcctgctccaatgcctcagcctctgctgtggctgagactaaagaaggagacagtgacagggacacaggcaatgactgggcctccagttcttcagaggctaactctcgctgtcagactcccacaaaacagaaggctagtccagccccacctcaactctgcgtagtggaagcaccctcggagcctgtggaatggactggggctgaagaatctctttttcgagtcttccatggcacctacttcaacaacttctgttcaatagccaggcttctggggaccaagacgtgcaagcaggtctttcagtttgcagtcaaagaatcacttatcctgaagctgccaacagatgagctcatgaacccctcacagaagaagaaaagaaagcacagattgtgggctgcacactgcaggaagattcagctgaagaaagataactcttccacacaagtgtacaactaccaaccctgcgaccacccagaccgcccctgtgacagcacctgcccctgcatcatgactcagaatttctgtgagaagttctgccagtgcaacccagactgtcagaatcgtttccctggctgtcgctgtaagacccagtgcaataccaagcaatgtccttgctatctggcagtgcgagaatgtgaccctgacctgtgtctcacctgtggggcctcagagcactgggactgcaaggtggtttcctgtaaaaactgcagcatccagcgtggacttaagaagcacctgctgctggccccctctgatgtggccggatggggcaccttcataaaggagtctgtgcagaagaacgaattcatttctgaatactgtggtgagctcatctctcaggatgaggctgatcgacgcggaaaggtctatgacaaatacatgtccagcttcctcttcaacctcaataatgattttgtagtggatgctactcggaaaggaaacaaaattcgatttgcaaatcattcagtgaatcccaactgttatgccaaagtggtcatggtgaatggagaccatcggattgggatctttgccaagagggcaattcaagctggcgaagagctcttctttgattacaggtacagccaagctgatgctctcaagtacgtggggatcgagagggagaccgacgtcctttagccctcccaggccccaacggcagcacttatggtagcggcactgtcttggctttcgtgctcacaccactgctgctcgagtctcctgcactgtgtctcccacactgagaaaccccccaacccactccctctgtagtgaggcctctgccatgtccagagggcacaaaactgtctcaatgagaggggagacagaggcagctagggcttggtctcccaggacagagagttacagaaatgggagactgtttctctggcctcagaagaagcgagcacaggctggggtggatgacttatgcgtgatttcgtgtcggctccccaggctgtggcctcaggaatcaacttaggcagttcccaacaagcgctagcctgtaattgtagctttccacatcaagagtccttatgttattgggatgcaggcaaacctctgtggtcctaagacctggagaggacaggctaagtgaagtgtggtccctggagcctacaagtggtctgggttagaggcgagcctggcaggcagcacagactgaactcagaggtagacaggtcaccttactacctcctccctcgtggcagggctcaaactgaaagagtgtgggttctaagtacaggcattcaaggctgggggaaggaaagctacgccatccttccttagccagagagggagaaccagccagatgatagtagttaaactgctaagcttgggcccaggaggctttgagaaagccttctctgtgtactctggagatagatggagaagtgttttcagattcctgggaacagacaccagtgctccagctcctccaaagttctggcttagcagctgcaggcaagcattatgctgctattgaagaagcattaggggtatgcctggcaggtgtgagcatcctggctcgctggatttgtgggtgttttcaggccttccattccccatagaggcaaggcccaatggccagtgttgcttatcgcttcagggtaggtgggcacaggcttggactagagaggagaaagattggtgtaatctgctttcctgtctgtagtgcctgctgtttggaaagggtgagttagaatatgttccaaggttggtgaggggctaaattgcacgcgtttaggctggcaccccgtgtgcagggcacactggcagagggtatctgaagtgggagaagaagcaggtagaccacctgtcccaggctgtggtgccaccctctctggcattcatgcagagcaaagcactttaaccatttcttttaaaaggtctatagattggggtagagtttggcctaaggtctctagggtccctgcctaaatcccactcctgagggagggggaagaagagagggtgggagattctcctccagtcctgtctcatctcctgggagaggcagacgagtgagtttcacacagaagaatttcatgtgaatggggccagcaagagctgccctgtgtccatggtgggtgtgccgggctggctgggaacaaggagcagtatgttgagtagaaagggtgtgggcgggtatagattggcctgggagtgttacagtagggagcaggcttctcccttctttctgggactcagagccccgcttcttcccactccacttgttgtcccatgaaggaagaagtggggttcctcctgacccagctgcctcttacggtttggtatgggacatgcacacacactcacatgctctcactcaccacactggagggcacacatgtaccccgcacccagcaactcctgacagaaagctcctcccacccaaatgggccaggccccagcatgatcctgaaatctgcatccgccgtggtttgtattcattgtgcatatcagggataccctcaagctggactgtgggttccaaattactcatagaggagaaaaccagagaaagatgaagaggaggagttaggtctatttgaaatgccaggggctcgctgtgaggaataggtgaaaaaaaaacttttcaccagcctttgagagactagactgaccccacccttccttcagtgagcagaatcactgtggtcagtctcctgtcccagcttcagttcatgaatactcctgttcctccagtttcccatcctttgtccctgctgtcccccacttttaaagatgggtctcaacccctccccaccacgtcatgatggatggggcaaggtggtggggactaggggagcctggtatacatgcggcttcattgccaataaatttcatgcactttaaagtcctgtggcttgtgacctcttaataaagtgttagaatccaaaaaaaaaaaaaaaa

SEQ ID NO: 26095 - DNA, 3055 bp, Homo Sapiens
cgcccgcggccgaggtggacggagcctcccggctcgctgctcccgccggcggagcgaggctgccctttcttcgcagcgtgatttattttcttctcctttttttctgaactcttcttccagggagaggctagtggtaacaggccgagctggatggatgggtatggggagaggggcaggacgttcagccctgggattctggccgaccctcgccttccttctctgcagcttccccgcagccacctccccgtgcaagatcctcaagtgcaactctgagttctggagcgccacgtcgggcagccacgccccagcctcagacgacacccccgagttctgtgcagccttgcgcagctacgccctgtgcacgcggcggacggcccgcacctgccggggtgacctggcctaccactcggccgtccatggcatagaggacctcatgagccagcacaactgctccaaggatggccccacctcgcagccacgcctgcgcacgctcccaccggccggagacagccaggagcgctcggacagccccgagatctgccattacgagaagagctttcacaagcactcggccacccccaactacacgcactgtggcctcttcggggacccacacctcaggactttcaccgaccgcttccagacctgcaaggtgcagggcgcctggccgctcatcgacaataattacctgaacgtgcaggtcaccaacacgcctgtgctgcccggctcagcggccactgccaccagcaagctcaccatcatcttcaagaacttccaggagtgtgtggaccagaaggtgtaccaggctgagatggacgagctcccggccgccttcgtggatggctctaagaacggtggggacaagcacggggccaacagcctgaagatcactgagaaggtgtcaggccagcacgtggagatccaggccaagtacatcggcaccaccatcgtggtgcgccaggtgggccgctacctgacctttgccgtccgcatgccagaggaagtggtcaatgctgtggaggactgggacagccagggtctctacctctgcctgcggggctgccccctcaaccagcagatcgacttccaggccttccacaccaatgctgagggcaccggtgcccgcaggctggcagccgccagccctgcacccacagcccccgagaccttcccatacgagacagccgtggccaagtgcaaggagaagctgccggtggaggacctgtactaccaggcctgcgtcttcgacctcctcaccacgggcgacgtgaacttcacactggccgcctactacgcgttggaggatgtcaagatgctccactccaacaaagacaaactgcacctgtatgagaggactcgggacctgccaggcagggcggctgcggggctgcccctggccccccggcccctcctgggcgccctggtcccgctcctggccctgctccctgtgttctgctagacgcgtagatgtggagggaggcgcgggctccgtcctctcggcttccccatgtgtgggctgggaccgcccacggggtgcagatctcctggcgtgtccaccatggccccgcagaacgccagggaccgcctgctgccaagggctcaggcatggacccctccccttctagtgcacgtgacaaggttgtggtgactggtgccgtgatgtttgacagtagagctgtgtgagagggagagcagctcccctcgccccgcccctgcagtgtgaatgtgtgaaacatcccctcaggctgaagccccccacccccaccagagacacactgggaaccgtcagagtcagctccttccccctcgcaatgcactgaaaggcccggccgactgctgctcgctgatccgtggggccccctgtgcccgccacacgcacgcacacactcttacacgagagcacactcgatccccctaggccagcggggacaccccagccacacagggaggcatccttggggcttggccccaggcagggcaaccccggggcgctgcttggcaccttagcagactgctggaaccttttggccagtaggtcgtgcccgcctggtgccttctggcctgtggcctccctgcccatgttcacctggctgctgtgggtaccagtgcaggtcccggttttcaggcacctgctcagctgcccgtctctggcctgggcccctgccccttccaccctgtgcttagaaagtcgaagtgcttggttctaaatgtctaaacagagaagagatccttgacttctgttcctctccctcctgcagatgcaagagctcctgggcaggggtgcctgggccccagggtgtggcaggagacccagtggatggggccagctggcctgccctgatcctctgcttcctcctcacaaccccaagagcccccagcccggtccatccacgtctggagtctggggagaggagcagggtcttaggactctcagctctgagcatccctggcagggtcttcaacctctaatctcttcccttaagccctgtggccacacagccaggagagacttgccgctggctcccgcctcatttcagcccagggtgctcatccaggggcccagaacagtcccacctgtgctgctatgcccacagcacaaagccaggcttcactcccaaaagtgcagccaggccctggagggtgatcctgccagcagccctacagctccacaccctacccacccatcggcagcccctctgctgttccccagggacctctcatacactggccaggaggctgcagaacgtgtgtctccccctccctccaagaggtcctgctccctctgccagaaccgtgtgtgggcgggtgggagggcgctcggggcccggcccctccctctccctgctggttttagttggtccctatgttggaagtaaaaagtgaagcactttattttggttgtgtttgctcacgttctgcttggaagtggggacccctcactgcgtccacgtgtctgcgacctgtgtggagtgtcaccgcgtgtacatactgtaaattatttattaatggctaaatgcaagtaaagtttggtttttttgttaaaaaaaaaaaaaaa

SEQ ID NO: 26096 - DNA, 3053 bp, Homo Sapiens
gcgatggcggagagtccgactgaggaggcggcaacggcgggcgccggggcggcgggccccggggcgagcagcgttgctggtgttgttggcgttagcggcagcggcggcgggttcgggccgcctttcctgccggatgtgtgggcggcggcggcggcagcgggcggggccgggggcccggggagcggcctggctccgctgcccgggctcccgccctcagccgctgcccacggggccgcgctgcttagccactgggaccccacgctcagctccgactgggacggcgagcgcaccgcgccgcagtgtctactccggatcaagcgggatatcatgtccatttataaggagcctcctccaggaatgttcgttgtacctgatactgttgacatgactaagattcatgcattgatcacaggcccatttgacactccttatgaagggggtttcttcctgttcgtgtttcggtgtccgcccgactatcccatccacccacctcgggtcaaactgatgacaacgggcaataacacagtgaggtttaaccccaacttctaccgcaatgggaaagtctgcttgagtattctaggtacatggactggacctgcctggagcccagcccagagcatctcctcagtgctcatctctatccagtccctgatgactgagaacccctatcacaatgagcccggctttgaacaggagagacatccaggagacagcaaaaactataatgaatgtatccggcacgagaccatcagagttgcagtctgtgacatgatggaaggaaagtgtccctgtcctgaacccctacgaggggtgatggagaagtcctttctggagtattacgacttctatgaggtggcctgcaaagatcgcctgcaccttcaaggccaaactatgcaggacccttttggagagaagcggggccactttgactaccagtccctcttgatgcgcctgggactgatacgtcagaaagtgctggagaggctccataatgagaatgcagaaatggactctgatagcagttcatctgggacagagacagaccttcatgggagcctgagggtttagaccctgctcccatctccccttcccccactcaagagtcccagcagaatcccttccccccaccccagggatggagaggcactgtgtatctccctccagactcgaagtcatcctgcaagatggcaagaaccaagcaagctccgatcccagggtgtgggagtgggggcctgttcccggtctgacctccttggcactggagcatctggggcttcgttcatccattcatcccgtatcaggggccaaggtacctttacaggagcacctagagcgagggcctttggcaaaaacaaaacaaccaacacacctctccacagggccagctccttagggataagtggaagatggaaattgcaattccaagagggagtgtgcccaaatgatttatggggatacctggaagggagcttggggtgggggctgtctgtgacacttaagcagtctgggtggttgtctatttgtctgtcttcagtcttgaagcagggcttcccaatgcccttttcctccctgccttccttcccccattatttcccacaggccagcataattttgtttttcctaatttatagtcactgttctagacagaccaaagagaaggaacagtggtggagtctaggctgctgatcagtaagctttacctagcacctgagcacctttctcccctcccctctttcctcacccttttctagatgtaagacagaaggtaaatgtgactgggacttaaccaaggtcttggtaaagcctgcatggcaccgtaagaagctgaaaatactgtttgttcccgcaatcactgatttgaaaagttcccaacacaggcagctgctgtgtatatgggattagagccactacatagaatagtctcttacagattttcataaatactagtcacaataagggtatttttcttgggggtggagtaagggggagactgatgctagtccttgttgtattttgttgggctgtccttgtgtattttcaccccagcctgtagtcctcctcacttcaaccccagggatttgtggggagcaagggtagccaatggcagagggggttggggctgggactctggaggctcctccccttctttctcttccttctgcctcccccgtgcccccagctgctcttgtcactgtctctgatgggtatttgcctggctttgttgcttctctatctgtatttagctgcagtgatcctttagctggttggctcagaaaaaaaaaaatgtgctttaggtgccctgtaatcctgggcatcaagggaatccatccttcccctttttgatatgttctccccgtacttccagatttattgttatggctcccagtgggtattggcgattcttgtgatgcagggcctcagtcagtgtccagccatgcataagggagaggatagtgtgtacctgccctgccctctgctatgaaggtctctgccttgtggatcatgggactccccttggaggatctgtgcaaaggggggctgggcacaaaggagaatgtcctatttgggagggcaggaagcaaaggaactggacagggattggtgggcttggggaacggaagtttatcttggatacccttgaagaggctgggtctcttcacatgaagatcgaaaagggaccctgcttccaatttccctcttccattcctcgagctactccagggcttagaagaatgctcttggtctgtgggtccagtgttgtctgtcatccatttaagtgttcccactttcaagtgacaatcctctccttggccctgccatagggcagagcatgtctggcatagcagcctgacttttatgccctaatcttgagttgaggaaatatatgcacaggagtcaaagagatgtctttatatctgactgtatataaatgaagtttttttgttttttttgttttcctttttggtgcaataaagtttgttttggcagaaaaaaaaaaaaaaaaaaaaaaaaaaaaaaaaaaaaaaaaaaaaaaaaaaaaaaaaaaaaaaaaa

SEQ ID NO: 26097 - DNA, 3606 bp, Homo Sapiens
gccttctaaagcctctgaatgcaattacatgtatttcagaacattctaaagaagtaataaatcatcatccagatgtacaaacaaaagatgataagctcaaaaactcagttttggcccaaggtcctggtgctaccagttcagctgcaaatacctgtaaggtacagccacttactcttaaagagactgctgaaagttttggaagcccaccaaaagaagaaatgggaaatgaacacatcagtgtccaccctgaaaactcagactgtatccaagcagatgttaactctgatgattacaagggtgataaagtataccatccagaaacaggaaggaaaaacgagaaagagaaagttggaaggaagggcaagcatctgttgactgttgatcagaaacgtggagagcatgttgtctgtggcagcacacgtaataatgagtcagagagcactttggatttagaaggcttccaaaatcccacagctaaagagtgtgagggacttgccactttagataacaaggctgatcttgatggagaaagtacagaaggtactgaggaactagaagactctctaaaccactttacccactcagtacagggccagacatcagaaatgattccctctgatgaagaggaggaggacgacgaagaagaggaggaggaagaagaacctaggctcaccattaaccaaagggaagatgaagatggcatggctaatgaagatgagttagacaacacctacactgggtcaggggatgaggacgccctatctgaagaggatgatgagttaggcgaagctgctaagtatgaagacgtgaaagaatgtggaaaacatgtagaaagagctctcctagtggaacttaataaaataagtctcaaggaagaaaatgtatgtgaagaaaaaaattcacctgtggatcagtctgattttttttatgaattcagtaaacttatcttcaccaaaggcaagtctcctacggtagtgtgcagcttatgcaaacgagagggtcatctaaagaaggactgtcctgaagacttcaaaagaatccagctagaacctctgccaccattaacacccaagtttttaaatatcttagatcaagtctgtatccagtgttataaggatttttctccaacaattatagaagatcaggctcgtgaacatattcggcaaaacctagaaagtttcataagacaggactttccaggaactaaattgagcctgtttggctcctccaaaaatggatttgggttcaaacagagtgaccttgacgtctgtatgacaattaatggacttgaaactgctgagggattggactgtgtcagaactattgaagaattagcaagagtcctcagaaaacattcaggtctgagaaacatcttacctattacaacagcaaaggtgccaattgtgaagttcttccatttgagaagtggtctggaagtagatatcagtttgtataacacattggcccttcataacacaaggcttttatctgcttattccgccattgatcccagagtgaagtatttgtgctataccatgaaagtatttacaaagatgtgtgatattggtgatgcatctagaggcagcttatcatcgtatgcatatactcttatggtgctatattttctccagcagaggaatccaccagtcattcctgtccttcaagagatatacaaaggtgaaaagaaacctgaaatatttgttgatggctggaatatttatttttttgatcaaatagatgaactgcctacctattggtcagaatgtggaaaaaatacagaatctgttgggcagttatggttgggccttcttcgtttctacacagaggaatttgattttaaagaacatgttattagcatcaggagaaaaagtctgcttacaacttttaagaaacagtggacctcaaaatacattgttattgaagatccctttgatttgaatcataatcttggagctggattatcaaggaaaatgacaaattttataatgaaggcttttatcaatggtagaagagtatttggtattcctgtcaagggatttccaaaggactacccctcaaaaatggaatacttttttgatccagatgtgttaactgaaggagagctggccccaaatgatagatgttgtcgaatttgtggaaaaatcggacacttcatgaaggactgtcctatgaggagaaaagtaagacggcggcgagatcaggaagatgccctgaaccaaagataccctgagaacaaggaaaaaagaagcaaagaggacaaagaaattcacaacaagtacacagaaagggaggtgtcaacaaaagaagataagcccatacagtgcacacctcagaaagccaagccaatgcgggcagctgctgacctggggagggagaagatcctcaggccaccagtagaaaaatggaagagacaggatgacaaagacttaagagaaaaacgttgttttatttgtggaagagaagggcacattaaaaaggaatgcccacagtttaaaggctcttcaggtagcctttccagtaaatatatgactcagggaaaagcctcagcgaagaggacccagcaggaatcatgagggaaggaaaatgcagcactctaaatggccactcaggcgttcctattcactcggaaaattaggttcatttcacaggacacagcagtgtagatcaggcttcaacttaacatttaagggaaatgtcagatttttttttaatttaatgaaattgttaatgaggaaaaatttttaatatagtcttatctaccacacatccccatagatttaaggattttaatagaaagtcatgatgtatgtatttaagccacgttaaaagaaaaaatataactatggaccggtattcagtgaatacagtttcatggtttttaattctttcaaagcacattaaaaatggtgtgctgataaaccccaagtaaattaaccctttttccgtataaatccattttttgttttgaagaggggaaattatatttattgttgtttactgaatcctggtgtgaaagcatatcagatatgtatgaactgctactgctgtacttccgatttacggacatcattttattgctatttgtagacgtgataacatgaacatgagtacctatttatgtgggccttcagtggatgggcagtgccactcaggtctctggggtttccctctctaattttaagtaaattgacatataactactatgcttataaaaatgaagtaaggaaaacaagtagtcctgtttgccactaaaaacattttcaaaggaaaaataaaatgaaagtactttttactttttatgatactcagaaattaggatgaagaacttttaaaattgctgaagatcaaagaggttatctctgccagtcacaagtgtggctggtgtcattctgggtctgactggagccctcctggactgtttctttaatttcaaaagccctgcagacatagtacctggtcagaactatgcctcggtttatttatcattttgaaataaaatcaaaatttcaacctgtaaaaaaaaaaaaaaaaaaaaaaaaaaaaaaaaaaaaaaaaaaaaaaaaaaaaaaaaaaaaaaaaaaaaaaaaaaaaaaaaaaaaaaaaaaa

SEQ ID NO: 26098 - DNA, 3298 bp, Homo Sapiens
ctgagacgagcgggagcgcggagcagcagcctctgctgccctgactttttaagaaatctcaatgaactatttgtagagaatcactgatccggcctgcaagcattttgcacggcaaaaatatcgatcagtgttaagtgaagatcacattttatatgcgatcttgacttttttgtcttacattatatttttatagattttgttataaacatggtgctgggaaaggtgaagagtttgacaataagctttgactgtcttaatgacagcaatgtccctgtgtattctagtggggataccgtctcaggaagggtaaatttagaagttactggggaaatcagagtaaaatctcttaaaattcatgcaagaggacatgcgaaagtacgctggactgaatctagaaacgccggctccaatactgcctatacacagaattacactgaagaagtagagtatttcaaccataaagacatcttaattgggcacgaaagagatgatgataattccgaagaaggcttccacactattcattcaggaaggcatgaatatgcattcagcttcgagcttccacagacaccactcgctacctcattcgaaggccgacatggcagtgtgcgctattgggtgaaagccgaattgcacaggccttggctactaccagtaaaattaaagaaggaatttacagtctttgagcatatagatatcaacactccttcattactgtcaccccaagcaggcacaaaagaaaagacactctgttgctggttctgtacctcaggcccaatatccttaagtgccaaaattgaaaggaagggctataccccaggtgaatcaattcagatatttgctgagattgagaactgctcttcccgaatggtggtgccaaaggcagccatttaccaaacacaggccttctatgccaaagggaaaatgaaggaagtaaaacagcttgtggctaacttgcgtggggaatccttatcatctggaaagacagagacgtggaatggcaagttgctgaaaattccaccagtttctccctctatcctcgactgtagtataatccgcgtggaatattcactaatggtatatgtggatattcctggagctatggatttatttcttaatttgccacttgtcatcggtaccattcctctacatccatttggtagcagaacctcaagtgtaagcagtcagtgtagcatgaatatgaactggctcagtttatcacttcctgaaagacctgaagcaccacccagctatgcagaagtggtaacagaggaacaaaggcggaacaatcttgcaccagtgagtgcttgtgatgactttgagagagcccttcaaggaccactgtttgcatatatccaggagtttcgattcttgcctccacctctttattcagagattgatccaaatcctgatcagtcagcagatgatagaccatcctgcccctctcgttgaaggaacacttggttgaatcaagttgatgtgggttccgaactgtatctcttccggctgaggacagagaagtatcttggagacacgtttcagaggaagtggaattacttttgcccagaaaaatggcgaatacatgaaacaaccagtgatcatgctttagaagcctacagcaacattctgagactgctccaacatgcttgaagatctaagcttttctcttttaaaactggcacatactcagagcagtcttcttagcctatggtcgtacgtgtcaagacatcacgttgtaaagagggatgatttccttcttttgatttgaaaatttgcacatgctcaatgcttacattgtgcggttcgacgtcactacagcttcttttttttttttttttttctatttttgccagactcttgatactcttaaaacttgtttgtggtcagcacaacaaggaacaaaacaaagctttgaaaaaactttaacatgaaaaaacgcactgacatttttttttatttaatatagcctggactttacctgcgtatgcacatgctcagaattgtctactaggctgactatgtatcacctcttcagcttggatccaattgtggatttatttacaaacatcaaatgccttcaagccaatcctttttgctgtatgttttgcagcctactgtagtagatacgcaacagataatgtgggaaaaaaagagataagaggaggaagctaataagagactgtcaagattgtataccttcttggtttcttttaagaatttgttgcctttctactattacagcaaagcagcattttgttactgactgcctaaaatcacttaatctcaggtgaacgcatcacttgccaaactgttggaatgctatttgtgttttgttgcactgtttttttcgtttgtttgtttgtttatttggttggctttttggagagggaaatttggaaacgggacatacacaaaagttacacacccacattccctttttatcatgacatacaagaagaaactagcagagctaagaatggagtgaagaaaggcagtatggcaggcaccagcaaagagttgagggctgttgctcttaaaaattattttttttattattattttgaaagtatggaagttttccattcactggggaaaggagggaaaagtgcatttatttttatacagagttacttaattacctccaaaacacatatgttggaaatcgcttttgctggtgcaaagtatattaatgagcaggaatacatacattgaggttatgaatagagagctcaatttgtacctttgctgtcttgctcaagcttggtatggcatgaaaactcgactttattccaaaagtaacttcaaaatttaaaatactagaacgtttgctgcgataaatcttttggatttttgtgtttttctaatgagaatactgtttttcattacctaaagaacaatttgctaaacatgagaaatcactcactttgattatgtatagattacataggaagaacaatcacatcagtaagttatagtttatattaaaggtaattttctgttggctcataacaaatataccagcattcatgatagcatttcagcattttccaaggtaccaagtgtacttattttgttgttgttgttgttgttgtattttagaaggaattcagctctgatgtttttaaagaaaaccagcatctctgatgttgcaacatacgtgtaaaatgggtgttacatctatcctgccatttaaccccacagttaataaagtggctgaaaataaaaaaaaaaaaaaaaaaaaaaaaaaaaaaaaaaaaaaaaaaaaaaaaaaaaaaaaaaaaaaaaaaaaaaaaaaaaa

SEQ ID NO: 26099 - DNA, 2875 bp, Homo Sapiens
tgttcgggaagtggatccgccgctgccggagcagcccgaagggagctgcggatcgcgaggccagtaccgaccccgcccgcccgcgcgcaccgcccccgcccgccatggcccgggactacgaccacctcttcaagctgctcatcatcggcgacagcggtgtgggcaagagcagtttactgttgcgttttgcagacaacactttctcaggcagctacatcaccacgatcggagtggatttcaagatccggaccgtggagatcaacggggagaaggtgaagctgcagatctgggacacagcggggcaggagcgcttccgcaccatcacctccacgtattatcgggggacccacggggtcattgtggtttacgacgtcaccagtgccgagtcctttgtcaacgtcaagcggtggcttcacgaaatcaaccagaactgtgatgatgtgtgccgaatattagtgggtaataagaatgacgaccctgagcggaaggtggtggagacggaagatgcctacaaattcgccgggcagatgggcatccagttgttcgagaccagcgccaaggagaatgtcaacgtggaagagatgttcaactgcatcacggagctggtcctccgagcaaagaaagacaacctggcaaaacagcagcagcaacaacagaacgatgtggtgaagctcacgaagaacagtaaacgaaagaaacgctgctgctaatggcacccagtccactgcagagactgcactgcggtccctcccccagcccgaggcccacggaggttcctcgggggacagtctcagtttcgtgccgttatttaaagaattctctccatgtttttgtatcgggaggtgccatcggcacttcctcccccgccctcctcgagtgccaagaaggtgttggaccagcccgcccttccctactggtgccccctcctccccggccaaggcgcctggacctggcgaggacgctgcccgccgagcggactgattcgcagagtctgtacatagtgtatattgctctacccggccgcacaccacgtcctgctctggcttttgccttcttgatgccagcctgctgcaacagaccctccccgcgcccctccccagcccatcttactgcaagcagcgtcctgaggagacagcggcacgttctagctgcgtctgcggccagcccgtgccagtggagtgggctccgcgttgctcattctctccgacaggttgtcagcctctgtccccgctgcacagggtcttgccccttctccagggcctgtgccagctcccttccctccccgttgtcctgtccccacagccattctgggagctggggaacctggtctcaaggcaggccctgcagttccacagaggtggcaggtcttgccctttggccaacagatttcttgtcctgccttctagatgcctctgagctccaaacccagggcagccatggcttctcatttacaccaacaggtttcagttccaacagaaaggtcggggtaggttcgtgcagagatggggctggcaggggggctatgggaggattattttaacagatcaagaaaatgaagccaaatcaagtgaattaaattcctcacaattattttctttccctgaggtttgattggcacagcagcaaaagttgaggccaccccacttgtgtccactgtttttagaaaaaaatgaatggcttcctgccattgtggggctggactcttgggctttcttggtgggagcggagaaggggcctcccacccttgtccgagttgcctcccactggaggtcaggagtctacactgcagcctcaggcactgtggggagtgcatgcctggggcctctgggtggggaccatggacaggccctggtcactgtcctaacctttgtcaggacaaaggtagcaagaggatttcctggcgggtgggaaggaatggctggggcggccagttttgacacgccccagtgccctggagaacaaccagggtcatctgcacttgatgactgctccccgacccccagcccggacacctcattcccctcccactacagggatcaagtgacctgggaagaaccgagttcaacaccaggatgtgtttccttagatttcctttcctaggcgatttccagggagagccctgattggacaatcacatcacagatcacactgcagtttccatgttagcactgtggatgggtttttaatcaataaaaactgggggtttcttctcaccgactctccacttgcccaaactgccaaaagctggtgattctgggacaggccttcactttggagccacgggatggggtgggggagccccatgggcctgggaaggagggtgctgtggagggggctgcagggctgaccagcaggcagcctcatctggtcgggggcgggggcggcaggagcagaagcggggtctccgtccttgggactgtcctggttggccacgggccctgaggatgcacggtgcctggggctcctgtgccggtgggcggggggcatgctggcctctgagcgatcaggcgaggccagcgagggtgtgcttgcaaattcaagcaataagaggggggttcctgggggcttccagcccaggctagaagcccccatggcttctggcagctggacatcagccccaggtattggggtgattttggtcatgacagtgtgcctgtcccactgttacacgcatgaatgggggttatggggtgggggtggggactcagggctggaccgacgtcctagtggacctgatgtgaaattcctgtcaaacaaacaccacttttcaatggtttgctaggagtatttctgtattgaaagtttctaattatgctttttaaaaaaatactaaaaataaaggttcaagctgccaaattttaaaaaaaaaaaaaaa

SEQ ID NO: 26100 - DNA, 3881 bp, Homo Sapiens
cgcaggctccctgcgggtgcaggctgggctcagctccgctggacccgcgctggggaactctggcctcgctgcactcatggcttctcctagcaaggcagtgattgttcccgggaacggaggcggggatgtgaccacccacggctggtatggctgggtgaaaaaggagctggagaagatacctggtttccagtgtttggctaaaaacatgcccgacccaattacagcacgagagagcatctggctgcccttcatggagacagagctgcactgtgatgagaagactatcatcattggccacagttctggggccatcgcggccatgaggtatgcagaaacacatcgagtatatgctattgtattagtgtctgcgtacacatcagacttgggggatgaaaatgagcgtgcaagtggatacttcacccgcccctggcagtgggagaagatcaaggccaactgcccttacattgtgcagtttggctctactgacgacccgttccttccctggaaggaacaacaagaagtggccgataggttggaaaccaaattgcacaaattcactgactgtggccactttcagaacacagagtttcatgaactgattactgttgtaaagtctttgctgaaagtaccagcatagactgtatgatttctgctattttgcatcccaatataggagtagaataatatctactatcagctgattactagacacatagaacatccagttaagttccgtaagtgcctgaaaaacaaacaagtttcaacattcaatctaagttacaaatagcacttccattttccatagactctaaaactccccaaattgctatgaactaccacagtattttcctcatttgataagaaacataaggacagcttaactacccttctctatccgaagtgagtcagaaacagaacccaggtttcttgattcccactcctgagtaaaattaaataggttttatgtatgttgcaggtattgcacacttttcctctttgaaatcaaacttttctatttcactggggaaagaaaacatgactgaaagtccagagtgttagcttagagctcaaaatactagctgctgtttcaagctggccccagacattaaactcagactagggccttcacctctgacacttgcccctaagtccttcagacatgttgagagagactgagacaggagtcttccggagtcaggcaggaaggagaagcacagcaatatacattcataatatacgtacaactgactagatttgtttgagacaagagtggtgggatcagagccatgtggagagctcatggcctgtctaaattgttgccatgtggaaatggggcagagtgttgccaattttctgattttttgtgtggaaaaaaatctccaaattgtagtttttaaatttggggaatgcaaatatatatatatatatatacacacacacacacacacacacacacatacacatacaatccatatacacatggagtatgtaagttggcaataacagtatacatcaaaaaatttacaaacactgcaagacaaataaaatccaagccatccatttgtgaccacagtcataagcattcacttagccaggggcttttagataattgtctgtgaagtctgagaaaagactaagataaccaagatgaacataatgtcaaaggacgaaatcatggggacaatttggattttgttccaaaagacaagtgtttttaaaaagaacctttccatacttcgtgttctgttctatagagttaaaccttttaacttccatggccctttagatctctttcaagcacattccattttcttctgatcatacttcctcagaaaacctttttttggctgggtgtggtggctcatgcctgtaatcccagcactgtgggaggctgaggtggttgtattgcttgaggccaggtgtttgaggccagccagggcaacacagcaagaccccatctctacaaaatattaaaacattagctaggcatggtggtgcacacctgtagtcctagcttcttgggaggctgaggtaggattgcttgagcccaggagtttgagccttcagtgagctatgatcgcgccactgtactccatcctgggtgatggagcgaagaacctgtctcttaaaaaaaaaaatttttttttaattaaaaaaacccaccctttttcatttcccaacattttttggctattatgatcgctatgtgttacttcaaataatttccagtgaatccacacttgatgttgcaaagcctaagtttgctgcagaaatacaatttcctacacttcatacctaaaggagattcagagctatcgctcaaaaccaaaagtcttggtttttaaatgtgcttagacaaaaaaaatcaggaaaggtaccctaatcgttcaacagcaatcatctttggggaatgggcattttggtaggtaaagtgtggtggacgtccttattattatttttgagacagtgtcttgctctgtctcccaggctggaggtcagtggcacaaatctcagctcactctaacctgcacctcccgggttcaagtgattctcatctcagcctcccaagtagtgtgaactaaaggcatgtgccaccacgcctggctaatttttgtatttttagtagagacagggtttcaccatgttggccaggctggtctcgaactcctggcctcaagtgatccacccacctcagccgcccaaggtgttgggattacaggcatgagccaccatgcccggccccttattttactttatcctcctgattatttgaatttgttacactaagcatgtattttataatcaaaaataattaagatttaaaacaatgtatttgactactaaaaagcaaattatataaatcagttgaataataatgttgttaaagaggctgtttagcactaatttgaccaaatctatagtcaaagtttgattctacttgaattttttggaaatttgctgttgtattacttattctttgccttgttctctgtgaagtcctttcctaaaaaagaaacttatacaatttagttcacaaaactttgttgacctctttctctgtagaaatgaaaactaaatatatataattgagaaataattctgatactcttcattcctataaaagtaattaagatagacctataggattgttgaactttgctgccaaatatagtaaccagtaaccacagctagctgtaaaattgaaaattcagttcagtcaaactagccatatttcaagtgctcaacagccactggtggctattggttaccttactgaccagccaatataggctatttccgtcattatagaaagctctattggacaacattggtctaggacatatattttgtattttcccctcacccaccatccaataatgagtaatagcacaaagtaaaagtgacttaatttgaaattacttctgtttggctagtttgcttagctgatcaccaccaacatcataggtctataaatcacccaactaagatcaggggtgtttcatgggaaaatctacacaaactattcattaaaaaccatagagccatggactgtcatttctgatttctgtttgattctttgtggtcatcattgaatatacaggggcctctatacactctggggagtatctattctcaggtgagcaaaataccgaatactgaatggaaatcaactgtaagtattaggacttcatatgcaacttgaatttttggtgctgtccggagtctagagccccacaatctgttttggttacagtttatccctgtaggataaatgatccatttaactattcatcagaggtgctgtaattttaaattgtctcttgtctccttcagttaattttcagaattaaaaacataccatgggaaaaaaaaaaaaaaaa

SEQ ID NO: 26101 - DNA, 834 bp, Homo Sapiens
ggcgccgccgcgacagcagcagccatggaggacgagatgcccaagactctatacgtcggtaacctttccagagatgtgacagaagctctaattctgcaactctttagccagattggaccttgtaaaaactgcaaaatgattatggatacagctggaaatgatccctattgttttgtggagtttcatgagcatcgtcatgcagctgcagcattagctgctatgaatggacggaagataatgggtaaggaagtcaaagtgaattgggcaacaacccctagcagtcaaaagaaagatacaagcagtagtaccgttgtcagcacacagcgttcacaagatcatttccatgtctttgttggtgatctcagcccagaaattacaactgaagatataaaagctgcttttgcaccatttggaagaatatcagatgcccgagtggtaaaagacatggcaacaggaaagtctaagggatatggctttgtctcctttttcaacaaatgggatgctgaaaacgccattcaacagatgggtggccagtggcttggtggaagacaaatcagaactaactgggcaacccgaaagcctcccgctccaaagagtacatatgagtgtaggtgtattggagaagaaaaggaaatgtggaattttggagaaaaatacgctagattttaaatgttagagctgttcccggagacttattgcagaaatagatgagaagcaaatcaagactactattcaaaaatgtacttagttttcatttttgtaattataaataatattatttctaatgtcaagtctcctattaaatagaaaatactgggtaaaaaaaaaaaaaaa

SEQ ID NO: 26102 - DNA, 1472 bp, Homo Sapiens
gtcctggagctgctgctgctgctgcggctgctgcggcggctgcaccggcggcgccgaggccgagatcgaggccggggtgcgcgcttcgcaaacgtgccctatccgtgcggcttggctgcgccagcccttgcggccacccgggcgtctaggcgggtctgtgcgccgcccgggcgaggatgcggctgttccggtggctgctgaagcagccggtgcccaagcagatcgagcgctactcgcgcttttcgccgtcgccgctctccatcaaacaattcctggacttcgggagagataatgcatgtgagaaaacttcatatatgtttctacgaaaggaacttcctgtgcggctggctaacacaatgagagaagttaatcttctgccggataatttacttaaccgcccttcagtgggattggttcagagttggtatatgcagagttttcttgaacttttagaatatgaaaataagagccctgaggatccacaggtcttggataactttctacaagttctgattaaagtcagaaatagacacaatgatgtggttcctacaatggcacaaggagtgattgaatacaaggagaagtttgggtttgatcctttcattagcactaacatccaatattttctggatcggttttataccaaccgcatctctttccgcatgcttattaatcagcacacacttctgtttgggggtgacactaatcctgttcatcctaaacacataggaagtatcgatcccacctgtaacgtggcggatgtggtgaaagatgcatatgaaacagccaagatgctgtgtgaacagtattacctggtagctccagagctggaagttgaagaattcaatgccaaagcgccagacaaacctattcaggtggtttatgtgccctcacatctgtttcatatgctatttgagttgttcaagaactcaatgagagcgacagttgaactctatgaagacagaaaagagggctaccctgctgttaaaaccctcgttactttgggtaaagaagacttatccattaagatcagtgacctaggtggtggtgtcccacttcgaaaaatagatcgtctttttaactacatgtattctactgctcctagacccagcctggagcctaccagagctgcccctttggctggatttggttatggtttgccaatttcccgtctgtatgctagatattttcaaggagatctgaaactgtattccatggaaggagtgggtactgatgctgtcatttatttgaaggctctttcaagtgagtcatttgagagacttccagtttttaataagtccgcatggcgccattacaagaccacgcctgaagccgatgattggagcaatcccagcagtgaacccagggatgcttcaaaatacaaagcaaaacagtaatataccaccttgatttccattacaaagtatctgatttgtctgaataaaggtgtcccactcaaaaaaaaaaaaaaa

SEQ ID NO: 26103 - DNA, 895 bp, Homo Sapiens
ccggagcgggggccgccggcgccgcatccctctctacctgccaacatcctgtattagagaacttgtggccggaggtgtggctgtggagagctggccggggagggacgctgctcagctgctgctctgctcctgtctcctgtcccctcccccggtcatgacagagacccgtgagccagctgagactgggggctacgccagcttggaagaagatgatgaagacctttccccaggccccgagcattcctctgattcagaatacactctctcagagccggactccgaagaggaagaagatgaggaggaggaggaagaggagaccactgacgatcctgaatatgatcctggctacaaggtgaagcagcgccttggcgggggccgtggtggcccatcccgccgggccccccgtgcagcccagcccccggcccagccttgccagctctgtggccgctcaccccttggggaggccccaccgggaaccccaccctgccggctctgctgccctgctacagccccccaggaagcaccagcccctgaaggcagggccctcggggaggaagaggaggaaccacctcgggctggggagggccgaccagctgggcgggaggaggaggaggaagaggaggaggagggaacctaccactgtacggaatgtgaggattccttcgacaacctgggggagctgcacgggcacttcatgctgcatgcccggggtgaggtgtaggcagagcccccatacggggagcttggcagaaggggtggggtgggaggagggggctgaggaaattggggttgtgacagtggtcatgggggatggggtactgccggtctgtgttgtcttagaagtagatgtgtgatggccagaataaaagccaaaatctgtaaaaaaaaaaaaaaa

SEQ ID NO: 26104 - DNA, 795 bp, Homo Sapiens
ggggagcactgcctggctccacgtgcctcctggtctcagtatggcgctgtcctgggttcttacagtcctgagcctcctacctctgctggaagcccagatcccattgtgtgccaacctagtaccggtgcccatcaccaacgccaccctggaccggatcactggcaagtggttttatatcgcatcggcctttcgaaacgaggagtacaataagtcggttcaggagatccaagcaaccttcttttactttacccccaacaagacagaggacacgatctttctcagagagtaccagacccgccagaaccagtgcttctataactccagttacctgaatgtccagcgggagaatgggaccgtctccagatacgagggaggccgagaacatgttgctcacctgctgttccttagggacaccaagaccttgatgtttggttcctacctggacgatgagaagaactgggggctgtctttctatgctgacaagccagagacgaccaaggagcaactgggagagttctacgaagctctcgactgcttgtgcattcccaggtcagatgtcatgtacaccgactggaaaaaggataagtgtgagccactggagaagcagcacgagaaggagaggaaacaggaggagggggaatcctagcaggacacagccttggatcaggacagagacttgggggccatcctgcccctccaacccgacatgtgtacctcagctttttccctcacttgcatcaataaagcttctgtgtttggaacagtaaaaaaaaaaaaaaaaaaaaaaaaaaaaaa

SEQ ID NO: 26105 - DNA, 3024 bp, Homo Sapiens
ctataaaggatcacgcgccccagtcgacgctgagctcctctgctactcagagttgcaacctcagcctcgctatggctcccagcagcccccggcccgcgctgcccgcactcctggtcctgctcggggctctgttcccaggacctggcaatgcccagacatctgtgtccccctcaaaagtcatcctgccccggggaggctccgtgctggtgacatgcagcacctcctgtgaccagcccaagttgttgggcatagagaccccgttgcctaaaaaggagttgctcctgcctgggaacaaccggaaggtgtatgaactgagcaatgtgcaagaagatagccaaccaatgtgctattcaaactgccctgatgggcagtcaacagctaaaaccttcctcaccgtgtactggactccagaacgggtggaactggcacccctcccctcttggcagccagtgggcaagaaccttaccctacgctgccaggtggagggtggggcaccccgggccaacctcaccgtggtgctgctccgtggggagaaggagctgaaacgggagccagctgtgggggagcccgctgaggtcacgaccacggtgctggtgaggagagatcaccatggagccaatttctcgtgccgcactgaactggacctgcggccccaagggctggagctgtttgagaacacctcggccccctaccagctccagacctttgtcctgccagcgactcccccacaacttgtcagcccccgggtcctagaggtggacacgcaggggaccgtggtctgttccctggacgggctgttcccagtctcggaggcccaggtccacctggcactgggggaccagaggttgaaccccacagtcacctatggcaacgactccttctcggccaaggcctcagtcagtgtgaccgcagaggacgagggcacccagcggctgacgtgtgcagtaatactggggaaccagagccaggagacactgcagacagtgaccatctacagctttccggcgcccaacgtgattctgacgaagccagaggtctcagaagggaccgaggtgacagtgaagtgtgaggcccaccctagagccaaggtgacgctgaatggggttccagcccagccactgggcccgagggcccagctcctgctgaaggccaccccagaggacaacgggcgcagcttctcctgctctgcaaccctggaggtggccggccagcttatacacaagaaccagacccgggagcttcgtgtcctgtatggcccccgactggacgagagggattgtccgggaaactggacgtggccagaaaattcccagcagactccaatgtgccaggcttgggggaacccattgcccgagctcaagtgtctaaaggatggcactttcccactgcccatcggggaatcagtgactgtcactcgagatcttgagggcacctacctctgtcgggccaggagcactcaaggggaggtcacccgcaaggtgaccgtgaatgtgctctccccccggtatgagattgtcatcatcactgtggtagcagccgcagtcataatgggcactgcaggcctcagcacgtacctctataaccgccagcggaagatcaagaaatacagactacaacaggcccaaaaagggacccccatgaaaccgaacacacaagccacgcctccctgaacctatcccgggacagggcctcttcctcggccttcccatattggtggcagtggtgccacactgaacagagtggaagacatatgccatgcagctacacctaccggccctgggacgccggaggacagggcattgtcctcagtcagatacaacagcatttggggccatggtacctgcacacctaaaacactaggccacgcatctgatctgtagtcacatgactaagccaagaggaaggagcaagactcaagacatgattgatggatgttaaagtctagcctgatgagaggggaagtggtgggggagacatagccccaccatgaggacatacaactgggaaatactgaaacttgctgcctattgggtatgctgaggccccacagacttacagaagaagtggccctccatagacatgtgtagcatcaaaacacaaaggcccacacttcctgacggatgccagcttgggcactgctgtctactgaccccaacccttgatgatatgtatttattcatttgttattttaccagctatttattgagtgtcttttatgtaggctaaatgaacataggtctctggcctcacggagctcccagtcctaatcacattcaaggtcaccaggtacagttgtacaggttgtacactgcaggagagtgcctggcaaaaagatcaaatggggctgggacttctcattggccaacctgcctttccccagaaggagtgatttttctatcggcacaaaagcactatatggactggtaatggttacaggttcagagattacccagtgaggccttattcctcccttccccccaaaactgacacctttgttagccacctccccacccacatacatttctgccagtgttcacaatgacactcagcggtcatgtctggacatgagtgcccagggaatatgcccaagctatgccttgtcctcttgtcctgtttgcatttcactgggagcttgcactatgcagctccagtttcctgcagtgatcagggtcctgcaagcagtggggaagggggccaaggtattggaggactccctcccagctttggaagcctcatccgcgtgtgtgtgtgtgtgtatgtgtagacaagctctcgctctgtcacccaggctggagtgcagtggtgcaatcatggttcactgcagtcttgaccttttgagctcaagtgatcctcccacctcagcctcctgagtagctgggaccataggctcacaacaccacacctggcaaatttgattttttttttttttccagagacggggtcttgcaacattgcccagacttcctttgtgttagttaataaagctttctcaactgccaaaaaaaaaaaaaaaaaaaaaaaaaa

SEQ ID NO: 26106 - DNA, 867 bp, Homo Sapiens
ggggagtgcgcaaccgttcgctaactgaaatgatggcgactggaacgccagagtctcaagcgcggttcggtcagtccgtgaaggggcttctcacggagaaggtgaccacctgtggtactgacgtaatcgcgctcaccaagcaggtgctgaaaggctcccggagctccgagctgctaggtcaggcagctcgaaacatggtactccaggaagatgccatcttgcactcagaagatagtttaaggaagatggcaataataacaacacatcttcaataccagcaagaagctattcagaagaatgttgaacagtcatcggatctacaggaccagttgaatcatctgttgaaatagaatgacattaactcagaggagatacgtgttttatttgtgatagcaaattcctaaatgaacattaggcaagtggtatcattatcaggccagctgcagcctcttgccttgacctgcattcctagaatttctttgttgctgtaattcttgattaagtgaccttgactttcattttgtaattttgctaatcatcagcaaattcacttgcatgacgttactgccaaatatgaaggcagttgaattattatgagtgattgtggcagaggtttgtgccatggtgaaaactttgatgtttgtctgtgttcattggatccatctttttaaatgacattaccatgagtctgttgtcaaacctaaatatctttgtttgaatttaaaatgggactctatattgttgtagttcaggtcttcattgactaagagattgagagaaatctgacataagaaaatattgttttcactgcaggaataaagaggaagtaacagtgaatgcaaaaaaaaaaaaaaaaaaaaaaaaaaa

SEQ ID NO: 26107 - DNA, 1400 bp, Homo Sapiens
gggctgctgtgattttaaagttatgtagcattgtggttgtatgtcttcacagcagttcaagaatatgcttttaaaggaattgtagttctttgttgggaaaattttctattattttgcttcctcataagtgatgctcatcttttcaaagaaatacatatacatttttaagtgtatgtatgagtagtatgtgtatttctgtctacaaaattataaaatgatgaaaccattctgtcatacctagaatataaaagggaaaaaagtgtgaattctttaaatatttttctatgtcctaatcactggaagtcctatagttgtttcaaactgttctgtaaaatttgtcttgttgcttatgttcaaaatatatttccatgttttagtgaagaaaagtacaaagtggcttgacagaaagtgaaattaagactgctggtaatcctttgaagagacttagtaataggagttggcaaatatttaagagtggcattggagacaaatggcagattcaggataggctgtttctgtaggaagcatggttctggatgagtgctgctcataaagtcattgaaagttattccagatagtttaatagaagtgtttgtttagcaaagacaacagattttgctattttgactgcattgattgtattagttcagatttatgaaagaaagagcccggaatacagaaataagataacaatagaaaatttaagcatgtcaagaactctaatgctggaattgtcacagcaaccacaaaattactgggcatcaatagactcctaagaattaagagaaattgcagaatgtaagccataattgtcattttaggaacattatgctagagcacaagtttaggattgggcaaaagagttgatttttaagattgcattggtgttctctctctctctttttttttttttttttggagatggattcttgttccgtcacccaggctggagtgcagtggcacaagctcggctcactgcaacctccgcctcccaggatcaagcgattctcctgcctcagcctcctgagtagctgggattacaggcatgctccaccatgcccggctaatttttgtatttttagtagagacagggtttcaccatgttggccaggctggtctcaaactcctgaccttgtgatccacccgccttggcctcccagagtgctgtgattacagctgtgagcctccgtgcccaggccagtgttctctcttaaatgtgtttcaatatggtggacatttattgagcacttgtgttgggcgtttcaacaggaggcactggtacgaaaagtagcttgttctagttcatatatcatttgcactttgcttaacttgtataagtactttttactgtttaataaatattttattagaaaaaaaaaaaaaaaaaaaaaaaaaaaaaa

SEQ ID NO: 26108 - DNA, 4318 bp, Homo Sapiens
gcggaggggagcggagcccggagcgtcgtggaaagcattggacacatttccaccatgctaatggcattttaaatatatttggcaattttcccaattttttactgaagaaaactgtaagtttatacttgaggactgaagtgtgactctgccgattatcaggctttcaagatgaatctggaaaaactcagcaagcctgaactcctgacactatttagtattcttgaaggagagcttgaagcaagggaccttgttatagaagccttaaaggcccaacacagagatactttcattgaagaacgctatggaaaatataacatcagtgatcctttaatggctctacagagagattttgaaacactgaaggagaaaaatgatggcgaaaagcagccagtctgcacaaacccactctctattcttaaggttgtgatgaagcagtgcaagaacatgcaggagcgcatgctgtcccagctggctgctgctgagagcaggcaccgaaaggtgatcctagaccttgaggaagaaaggcagcggcatgcacaggatacggctgaaggagatgatgtcacctacatgctagagaaggaaagagagaggctgactcaacagttggaatttgaaaaatcccaagtgaaaaagtttgaaaaagaacagaagaagctctctagtcagctggaagaggagcgctcccgccacaagcagctctcatccatgctagtgcttgagtgcaagaaagccaccaacaaggcagccgaggaaggacagaaggcaggagagctgagcctgaaattggagaaggagaagagccgggtgagtaaactggaagaagagttggcagctgagagaaagagaggcttgcagactgaggcccaggtagagaagcagttatcagagtttgacatcgaaagggaacaactgagagcaaaactgaaccgagaagagaaccggaccaaaaccctgaaagaagaaatggaaagtttaaagaagatagtgaaggacctagaggcttcccaccagcacagtagccctaatgagcaattgaagaaaccagtaaccgtgtccaaaggcacagcaactgagcctctcatgctaatgtctgtgttttgccaaacagagagttttccagcagaaagaacccatgggagcaacatagccaagatgacaaacactgggctgcctggtcctgccactcctgcttactcatatgcaaaaaccaatggccattgtgacccagagatacaaactaccagggagctgactgcaggcaacaatgtagaaaaccaagtgcctccacgggaaaaatctgtggcattggcccaagagaaaccagtggagaatggtgggtgtcctgtggggattgagactccagtcccaatgcccagtcccctctcttccagtgggagctcactgtctcccagcagcactgcctcctcctctctaacatcctctccttgctcttcgccggtactcactaagcgtttattggggtcatcagctagcagccctggctaccagtcatcgtaccaagtagggatcaaccaacggttccatgcagctcgccacaaatttcagtcccaagcagatcaggaccaacaagccagtggcctacagagccctccatccagggatttatcccccaccctcatagacaactctgccgccaagcagctggcccgaaacacagtcactcaggtgctctccagattcactagccaacaagggccaatcaagccagtctctcccaacagctctccctttggcacagactatcgaaatctagccaacactgccaatccaagaggtgacacaagccattcacctactccagggaaagtgtccagtcccctgagccccctgtctccaggaatcaagtccccaaccatccccagagctgagagaggaaaccctccacccatcccacccaagaaacctggcctcaccccttctccatctgctaccactccattgaccaaaactcattcccaggcagcctctttgaccactgcagaagaccttgccagcagctgctcttccaatactgttgtagcaaatggtaaggatgttgagttacttttgcctaccagcagctagtccctaggagggagtctccacgtttgacattccatcagatttcgtccaaaagctcagtcagacttctgagtcagattatgttatttattttgatagtagctgaaaccatctgtataatacatttagtatatttcaccattttgtatttttttaagtagaaactgagtagtttggatttttatggctcacatctttttactgaagccagaaaggcacctcaaagatgtctcaagctcagcagtcaccgtcatgttgtgatgaagaaagcgaatcaccaggtggtgatttgctatctatttgagaactagaatcactcaacactcattttgaattatgcagaagtggttcatgcagatttttattccagatgaacatgttttaaaagtgcctgaaatatgactgccatatgaatgtgattctgcagcaaaaaacacaaaatagatcatttaattacagaaaatgagatcctctgtgaattctgaatgttaaaaaccaacactgcttttaatcctcttttaatgttttaatacaagctttgtgttctgaaacaaggctgcataagtagaatgggaatccttctaaaggtgggtgtgaactcaccacaagctgagctttatagagcccttgagaaaccctcctgagcactaagcagttggggtgctgattttcttgtacttttgaaaaattaagtcactcccagtttcctgcataagttcttgaacagaatgaaatcacatctccattcaaaaaatgtctcaagcatctactgttgtgtaaggaacttctgattctgattgctgttacttgaataggaaatggttactcattctgtataaaagttttgcaagagaatgaattttttattctgtaatcaaaaagcaataacttgaaattcactctgtaatattataggtcagaattatacaagttttaccaaattgttacacttattctccaagctgccagaacctggtatctgtatctgtaaaaccaaattaacttttgcttaaatgggaagtatacatatatctgtatagatacattacccctttacatgtttaacatacacacacttaaacacataaatactagtgtgattatatctttggagtttgcaatatagcataaaggacaagtagaactgcacattaagattacctaccgaagcaactagatgtggctgggacacaatcaaaggaggaattttgtccacaggaaggtgaggaaattccaaatgaagcctagatcttcagtatcataaaaaggcagagctggccaggcacagtggctcatgcctgtaatcttatcactttgggaggctgagatgggaggatctcttgagaccaggtgttcaagaccagcctcatcaacatagtgagaccccatctctattaaaaaaataaataggcagagctaaactaaccccagtgtcacaaaactcaactggtcatataaatgagtgaaacaggcctctcacacaagcgatgtaaaacagctgggagcagtgggagctgtggcaaactaaagtgcccaagccgcatttaaaaagggcatctgttcagctccatctgcttgctgcggtgcaagaatgctaaaccaggattaccagttcttcacattttttgaaatccaaattttcatgagaaacattctcatttttaaatatcaagaagtgattttaaaatgtttaaatggtgctggttaaacaaacacgtctgcagctggatttagcttgcaagctgccaagttgcaacctctttcattctagaaacttctgtcattttcatcatagcaagtctatgcggacaaaagcctccaaactttccaactgtgtaggccagtacagctggcaaggttcatagaatataatggctatccccctctgccaaataagactatccacaacccagctcagacacagtggttatatgattttgtgtccatacaggagaggccttggtgtcttcacatacattctctgagccaacatctatccagcagccctgacctcctgctataatttaagtctatttccttttaatctaataagagttgatagtaaaaaggcaggtgatggaaatcagtgtataatcacaatggagtatattggcaactccacagcttatagtttgataaaggcaaatacatgaaaaataataatgctactaatgccccaaaaaaaaaaaaaaaaaaaaaaaaaaaaaaaaaaaaaaaaaaaaaaaaaaaaaaa

SEQ ID NO: 26109 - DNA, 3433 bp, Homo Sapiens
ctgcagcagcagcagcggcgtggtcagagcgagcttcggagaagcagtggtgggttccatgtgatggtggagtaggaggcaggtctccgcggtcatttaccatgctgtcctccaggttcaacagtatggctccaaatgatgaaatttcattctgattttctggctgaagactattctctttgtgtatgtccaccacagttactttatcccttcatctgtggatgggcagtctcgctgttttgcccaggctggagtgcagtggcatgatctcagctcacagcaagctctgcttcctgggttcacgccattctcctgcctcagcctcctgagtagctgggattacaggcacccgccaccatgcccaggaaagaaaaaagaagaaaacaaacctccatacgagaatgggtctaaaggaacttcccaaacctccatgattttgcaggaaacaagataaagctggttggtggagaatttgaactggagatgaactttattatccaggatgctgagagtataatacgcatgacagagcttttagagcactgtgatgtaacatgtcaagcagaaatagggagcatgtttacagccattctatgaaaaagtgtttggagtgtacagactagcacagaagttgggctaattaaacaagtattgctgaaaatgagtgctgtagatgacatgagagcaggtatggggttgtctgttaggaaagtataacttaaaagtttataaagtttcacatacttctctttatattctataggtaatgtagatttgttgacactactttgatttaaaataaatggaaatgtatggaaattttactttttatattaatggaaaacctgaagagtgaaagaagaaaaatatacttactatagtagacaaatatagttactaatgttgttttctaaattttagaaaatctcagtaccacggagtgctatgaaatctatcagaaaaataaacagtatctttttatgtagtatttcattaagcttttacataattaaaatgccacactaggtattacagttctgtataatgagcattttatcaaattcccctagttctgtgcccctcaatctggcatatatgcaactatgacaggaggtactaaaagccttagataagcatggtgtatctttttttttcccacatatatatatatatttttttctgttatatgtcctggttcttccataacttataaacttgatttataccgaggaggtgggaaagtgggcgcggcagggtggactgacccgggatggggaagctcctctcgctgccccctcggggcgggcctaggccctttggaggatggggacgccaggacactcctccctgaggttgtctggccgcctctgcccctagtgctcagaatcctgtgtgcccctcaattccggaatccctcctgggaccccatgcccactgggcacactgcccctggtactcagaatcccgaagcaccattcggttccagaatcccctcctcagctgctggggtggcggggtccctcctttccgatgtcccccccaacccctgaggggggagggaagggaggggggtcaggtctcccctctgtggcagggggaggtggaggtggaggtggaatcggaagggtgtggaaggcgggggccaggagggctcagccgatggtgagtccaaagccacactggaacttgttcttgcggtgattcaggaaggccccaagggccagcgtcaggggcaggagctggagcttcttctccagcgtggcacccacgatccagttgctatccacagagcctttgaagaggaggttggccttgggcaggtccagctggtacccgaaggagacgctggtatcctgcatccttgtgctggcctgaaaatccacacccacctgcaactggtcactggctttgtggtagtatgttgcgtgcatgcccgcctggctcaacgttaccgttgccaaccagttgttcaatgtgtatttcccagctagagacgtgacagtgccctcgtccccaggccgccggttgtagaccagctctccgcccagggccaggcaaggcctgatgctctggaggtagtgggcttcgagaattcttgaacccacgaggacgtctgggttccccagggtgacggctgctgtgagtcagagccccgatactccccgtccacctgccagttcacaaacttcgactgctgggtctggatggccatcttggacctgagaccggggcccagctggtgaatgacctgagcgtggagactgccgctgttgtccatgtcacctaccagtacagggaacgcctctgtgggactcagctgctttgtccccacatacgtgaccccgaagtggtagttggactccccgattgcgctgagggctactgtgtggttcacctggaaacggttactcaaccctttgttgactgtgagcttgacaccctccatctgaatgggaaacagctccttacacctccggtggcactcctggaatgtgcccgggttgggcaggcagccgcaggccccatcctcggcggcccctgaggcgctggcggttgcagccccgggggtccgttccgaacctcgactcctaggggtgccggcgcccaggccgcctctcagcggcggcagcgtgaagcccggcggcgagggcggaggtggcggccctgcgggcggcgagctggcggccaacatgttccccatggtcgctggcggtggcgcctgctcccggcctggtctccgctcccacccggtgcgccacgcgcaaccgaactcgctgccgccgccgccacccccgtcgccagcatggtgtatcttttggacatgtccattttggaagaaacttttgtgttaaaataaactaatatattatgggctagaacataaaattcaccaagaatttcaagataaaaatactaatgttttgcttgtttgggttatttcaaacaataactttgaaatctataattttttcaccaccgaccctctacctccttgcatgctcattctcctgtgtggctagatgcatttcggaaaagtgttttgaatattatttcagagcaagtgtcattccagaaaataagtttaaagtttgaaatgtttattttttgtaacccatgaatcttcagcttaagtatcttctgacataaaagcattttcataattataaaagtgctgatattactctccacagtattatatctgatcctgcaaagtagttcagataccagagaatactcttaaacattttgactcacgcatttaattatgtttaaaatttatgtaacaagacattaaatgagaaagaatggaatgaaaaatgggttaaaagaatgcaaaatcgcaaaaagaatgctttgaatttaaatatttcccaaaatttgattttctgagaaaatatattaaaaatcatacgtaattaaaaaaaaaaaaaaa

SEQ ID NO: 26110 - DNA, 1507 bp, Homo Sapiens
gagggctgtaagtggcgcgattcgcggcagcgccccgatggaacctcctggtcctgtgagggggcccttgcaagattccagctggtatgagccttctgcagagctagtgcagactaggatggctgtatcactaacagcagctgaaactctggcccttcagggtacacagggacaagagaagatgatgatgatgggaccaaaggaagaggaacagtcttgtgagtatgagaccaggctacctgggaaccactctaccagtcaagagatcttccgccaacgcttcaggcatctccgctaccaggagactcctggtccccgggaggccttgagccaactacgagtactctgctgtgagtggctgaggccagagaaacacacgaaggagcagatcctggagttcctggtgctggaacaattcttgaccatcctgcctgaggagctccaatcctgggtgcggggacatcaccctaagagtggagaggaggctgtgactgtgctggaggatttagagaaaggacttgaaccagagccgcaggtcccaggccctgcacatggacctgcacaggaagagccatgggagaagaaggaatctctgggagcagcccaggaagcactgagcatccagctccagcctaaggagacccagcctttcccaaagagtgaacaggtatatttacattttctgtcagttgttacagaagatggcccagagcccaaggacaaaggatcattgccacaaccacccattactgaagtggaatcacaggtgttctcagaaaaacttgctactgacacctctacatttgaagctacctctgagggtaccttagaactgcagcagagaaatcccaaagcggagagactgaggtggtcccctgcccaggaggaaagtttcaggcagatggttgtcatccataaggaaattcccacagggaagaaagaccatgaatgtagtgaatgtggtaaaaccttcatttataactcacatcttgttgtccaccagagagttcattctggagagaaaccctataagtgtagtgactgtgggaaaactttcaaacagagctcaaacctcggtcagcatcagagaattcatacaggagagaaacccttcgaatgtaatgaatgtgggaaggccttcagatggggtgctcatcttgttcagcatcagaggattcactcaggagagaagccctatgagtgtaatgagtgtgggaaggcctttagtcaaagctcatatctaagtcagcatcggagaattcacagtggagagaaaccttttatatgtaaagaatgtgggaaagcttatggatggtgctcagagctcattagacatcggagagttcatgccagaaaagagccttcccattgaattgaaggggagaacgtctccagacagaattctacatcggtctaatctactttaggactggatcccataaaagttataagttccttaaaaaaaaaaaaaaaaaaaaaaaaaaaaaaaaaaaaaaaaaaaaaaaaa

SEQ ID NO: 26111 - DNA, 2062 bp, Homo Sapiens
ccgggtcgggtcctccaggagcgccaggcgctgccgccgtgtgccctccgccgctcgcccgcgcgcccgcgctccccgcctgcgcccagcgccccgcgcccgcgcccagtcctcgggcggtcatgctgcccctctgcctcgtggccgccctgctgctggccgccgggcccgggccgagcctgggcgacgaagccatccactgcccgccctgctccgaggagaagctggcgcgctgccgcccccccgtgggctgcgaggagctggtgcgagagccgggctgcggctgttgcgccacttgcgccctgggcttggggatgccctgcggggtgtacaccccccgttgcggctcgggcctgcgctgctacccgccccgaggggtggagaagcccctgcacacactgatgcacgggcaaggcgtgtgcatggagctggcggagatcgaggccatccaggaaagcctgcagccctctgacaaggacgagggtgaccaccccaacaacagcttcagcccctgtagcgcccatgaccgcaggtgcctgcagaagcacttcgccaaaattcgagaccggagcaccagtgggggcaagatgaaggtcaatggggcgccccgggaggatgcccggcctgtgccccagggctcctgccagagcgagctgcaccgggcgctggagcggctggccgcttcacagagccgcacccacgaggacctctacatcatccccatccccaactgcgaccgcaacggcaacttccaccccaagcagtgtcacccagctctggatgggcagcgtggcaagtgctggtgtgtggaccggaagacgggggtgaagcttccggggggcctggagccaaagggggagctggactgccaccagctggctgacagctttcgagagtgaggcctgccagcaggccagggactcagcgtcccctgctactcctgtgctctggaggctgcagagctgacccagagtggagtctgagtctgagtcctgtctctgcctgcggcccagaagtttccctcaaatgcgcgtgtgcacgtgtgcgtgtgcgtgcgtgtgtgtgtgtttgtgagcatgggtgtgcccttggggtaagccagagcctggggtgttctctttggtgttacacagcccaagaggactgagactggcacttagcccaagaggtctgagccctggtgtgtttccagatcgatcctggattcactcactcactcattccttcactcatccagccacctaaaaacatttactgaccatgtactacgtgccagctctagttttcagccttgggaggttttattctgacttcctctgattttggcatgtggagacactcctataaggagagttcaagcctgtgggagtagaaaaatctcattcccagagtcagaggagaagagacatgtaccttgaccatcgtccttcctctcaagctagccagagggtgggagcctaaggaagcgtggggtagcagatggagtaatggtcacgaggtccagacccactcccaaagctcagacttgccaggctccctttctcttcttccccaggtccttcctttaggtctggttgttgcaccatctgcttggttggctggcagctgagagccctgctgtgggagagcgaagggggtcaaaggaagacttgaagcacagagggctagggaggtggggtacatttctctgagcagtcagggtgggaagaaagaatgcaagagtggactgaatgtgcctaatggagaagacccacgtgctaggggatgaggggcttcctgggtcctgttccctaccccatttgtggtcacagccatgaagtcaccgggatgaacctatccttccagtggctcgctccctgtagctctgcctccctctccatatctccttcccctacacctccctccccacacctccctactcccctgggcatcttctggcttgactggatggaaggagacttaggaacctaccagttggccatgatgtcttttcttctttttcttttttttaacaaaacagaacaaaaccaaaaaatgtccaaaaaaaaaaaaaaaaaaaaaa

SEQ ID NO: 26112 - DNA, 4762 bp, Homo Sapiens
tgccccctgaccccttcttccaaatatactcttttgtctcttgtcttttattcccaggttcgcccccttggttcagtccccctaggtccatgcaggctacaagtggcacttgaacaggcaacagtccgaacacagggactatgaggacatgaacgaagaaggtctgccggagcagaggaactgaaattgaaaggtgaacagggatgccgggccgggtctgccagcagcggatataaggtcagtgccctaaggaggtactgggagtagtgctttaaggaagtgctgggaaccggaagttttctgaatcaggctaacaagggggagaatttgtctgttgaagacaaacatcatgtgcagctgcttaaagttctgttgagacagtctggagctcaggttaattcgcaggcactaactaacctcctgcagaagccacaaaatgttactatgcataacccatggtttccccaggcaggcactcttgatgtggaaaattgggacagagcacgagaaggattaaaacgggctcatcaaaaaggtcttaaagttgattcttctgttttcttcacttggagttcagttcatactgtacttctgacattatcttcttcttattctgcaggagagcaggctgaatctaaatctgaaagaatatgttgtcccacccacagctccaattgaaaataaaaaacaggagagggaggataagaattgacctatactccctcctccaattgcagaaacatctgtaccgcctcctttggtagcagaaatagaaaccccaatacaaagaattttatgctctgctgccatagctggagagcccttaggacctctatgcgtaatgcaaacacaggttgtaaatgtgcgctggcacctgtgagatgtacaaaaaacatgggaaattttctcagaacttgtcaagatgtaggaactgagcttcattgctcttcaatgttagctgaagcaatggctaatttagtagttgacaaatctaaaaggagccaagggtcaaaccctaaaatgggaaaataattgtggaaaaactggacatttaaaaaaggaatgccaccagatctcaggacagaaaggatcttacaatgcagttccccccaccctgccccacagcggaaaaaatgccaggactttgtccttgctgtaacaaaggaaatcactgggctaatcagtgctgctcaaaatttcatcagattggcacagccctgtcgggaaatgagatgggggcctggaccccagccccacaaacaatgagggcattcccagcccaaacctcaaccctgtttcagggatgggttcccggaggtacattgattccctccccccaggaacaccaggaagtgcaggattagatctcgcagtcagagaacaggtaacgttagttggtggagacaaacctatcaaagttcccactggtatttggggacttttaccaacaggatacacaggactaattttaggcaaaagccggcttaacttgcaggtcattactatagtcccaggagttgctgactctgattatgaaagagaaattcaagtagttttaatgtcacaagatctttgggtttttgaacctgaagaatataatgctcaattattgcttgttccctgcaaattacacccctctccatgaaaggagaaatgaggaaataaagggtttgggagcacaactacatgggaaatctatctatcccaacccatagcctctaatagacccacatgtgtagtacaaattaaaggaaagaaatcttatgggcttatggatacgggaactgatgtgtcagtaatatctaaagacaattgcccccatcctggcccttgcaattaacttctacatccttagtgggagtaggaacagctcaacgtgttcaacagagtgctgagattttacctcgtctcagtccagatggacagtcatgtacttttcaactttatgttgcaaatatagccatcaatttatggggtcgagacttacttacagcatgggatgggagacttacaaatgaaaactttgataactcagaatttaaaatgtagaagaacatgggatatcagagtggaaaaggtttggggaggtttctacaatgaaatcctaacccggtatcagtaactggaaaaacagatagaaaagggctaaggtgtcaggatttctgacaggggtcattgatatttctcctccgcccactgccttaccattagaatggctctttccacctaatcaaacagtcaaaaccttgcaaatttctctttctttaattacacaaattgcatctacgggcaagcataggtcaaaaatgcttatgggatatgatcctgacaaaattattgttcctttagactcccagcaacaagccgcaacttgggaaatggtgactgcctggcaaactcttttgcagatttcgtgggtgctatagataaccactaccccttagacaaaattttacaattttataaaatccactctttcattcttcttgtgattactcatcacacgcctattccaggtggacagacttattttactgatggctcttccaaaggtcatgccactatctatggacctaaacacactcaaacaataatgacccctggtgctttagctcaatgctcagagctaattgtagtcattcaggttttacagcttacagcttcagatcctgtcaacattgtctgtgattcagcttatgttgtaaatgtagcccattgcataaaagcttctacagttaaaagtacactagacccagaactgcttaatttgtttcacttattctcatatgctgcatgctacatgccaaacaggtgagacagctgttcatgtacagctacactgtcatcatttgctcatatggggctacctaaacaaaaactgacaagggacccacttaatctagtcatgcttttcaaaatttcttacagctttgggctataacccaaaaaacaggaattccttataatcctagaggacaaggcattatagaacaggcacatcaaatattacaacgcatgctgaaaaaaacaaaaaaggggtataggaggccaactaccaccttaatcaaaactacatttagccttatttactttaaattttttgactgctggtatggatggtaagactccagcagaaagacattggcaaatgttagaggaaaagaggaaagtttatccaaaagtgttatggaaaacgccggaaaaaggaaaatggaaaggtccagtggatttactgatgaggggaagaaggcatgcttgtgtttttacaggagatggacaaaccgtgtgggtgccctcaaggtgcgtgcgactatggaatgggagactggaggaacccagggtggccaaccatgggcccagtccctctgatacaagccatgagtcagctaagcctgagtgcaaagatggagagaaggccaaccggagtcacgacacagttctaatgttacatttgtaaagagtatcaccactcaatttacagtttgtgtttttaatccttatgtctttttggcagctaagaaggaccagctctaggtaaacaatacccaattgacctataaatcttgccagttatatcactgcattaatcatagcacattgcaaacatgtaatatctctactttgttgattttaggtctcatccctgggctatggattcccgttaatctgtctgagccttgggctgccacacctgctttgcattttgtaaaaacttcttctaactcagctaactcattgtgtccatagagccttaggcacgataatttttgctattgtttccttgatcacaccaataacttctgttgtgatatcttctgtagctttgcatagttctattcaaacagcttagtacatggagaactggacatgcacagccagccaagcgtggctacttcagaataaaattaacactgagttacaaactgaagtggtaatgttgaaatccatggttctatggttaggggaacaagaacaaagcttgcaattgcagcaacaattgtgttgtcattttactcacactcatatttgtgtaaccaacttagaatataaccaaagtaagtatccgtgggaccttgtggaagcccattttcagggagctttcacatccaacatcacctttgatattggtgaattacaaaacaaaattcttgatttaaacaggcaaactcaagaatttgagccttctttagaagactggaccggattccagcaaggcctggagagcctcaacccttggaactatctaacacaccacagttacatcttttatgtggttcttggaataatgttgttttgtctctgtcttctgtttatagtctgtaaaatcagatggactgccaattggagaatgagagctgcccagcctggccttacgttctttcaattaattcataaacagaaagggggatatgcagggagccgaaggcccgtaggattcggcattccactggaggctatgtgatcaaacagcaaactgtttatcatgaatgcagaatgtgggcaaactcacaactgctcctgccgacagaaggtttgctggaggcaatcactccctggcactgaggttatctactgcgacatctagagcctgttgttcgaggaatgcagtcttgcaagcctactctggactgagcagctgaccccttcttccaccccccttctcactatctcttttgcctaataaatatggagggctgtgtaaagctcagggcccttgtctaaaaaaaaaaaaaaaaaaaaaaaaaaaaaaaaaaaaaaaaaa

SEQ ID NO: 26113 - DNA, 1924 bp, Homo Sapiens
cagagaactgccgcttgccgccattgacacgcacagatagaacccaaagaaaggcaaagagtcctgcccggcaccggcgccgcgtgggccaaacctgcgcccgtggaggggcgcgcagagggcaccgggcgccgggagcaggcggcgcagcaccagcattgtgttagtgccgggaggccactgtgtcagcaagctgagagggaaactgaagcaagatgtcgggccggagtgggaagaagaaaatgtccaagctgtcccgttcagctagggcaggtgtcatctttccagtggggaggctgatgcgttatctgaagaaagggacgttcaagtaccggatcagcgtgggcgcccctgtctacatggcggcagtcattgagtacctggcagcggaaattctagaattggccggcaatgccgcgagggacaacaagaaggcccggatagccccgagacacatcttgctggcagttgccaatgacgaggagctcaaccagctgctaaaaggagtgaccatcgccagtggaggcgtcctgcccagaattcaccccgaactgctggccaaaaagcgagggaccaaaggcaagtcggaaacgatcctctccccacccccagagaaaagaggcaggaaggccacgtcaggcaagaagggggggaagaaatccaaggctgccaaaccacggacgtccaaaaagtccaaaccaaaggacagcgataaagaaggaacttcaaattccacctctgaagatgggccaggggatggattcaccattctgtcttctaagagccttgttctgggacagaagctgtccttaacccagagtgacatcagccatattggctccatgagagtggagggcattgtccacccaaccacagccgaaattgacctcaaagaagatataggtaaagccttggaaaaggctgggggaaaagagttcttggaaacggtaaaggagcttcgcaaatcccaaggccctttggaagtcgccgaagccgccgtcagccaatccagtggactcgcagccaaatttgtcatccactgtcacatccctcagtggggctccgacaaatgtgaagaacagcttgaagagaccatcaaaaactgcctgtcagcggcggaggacaagaagctaaagtccgtcgcgttcccgcctttccccagcggcagaaactgctttcccaaacagactgcggcccaggtgaccctcaaagccatctcagcccactttgatgactcgagcgcgtcctcgctgaagaacgtgtacttcctgctcttcgacagcgagagcatcggcatctacgtgcaggagatggccaagctcgacgccaagtagccgccgcactttccagcagggatcggaggacgacccgagtcccaagagtggggttttgctttttaaaaggagagaggaggggtgatggcaggggagtggagggtggccgggcaggtcctgccggcgcagggagccctctgcccttcacactctcctccaaaagagcctccatctgtaaggaagcaggtctccgcgaggggtttctttccatgtgttttcctcctgttgttttagaacttttttaaaaaaacagacctcgttttagatttatagcattgacttttacacacattcacacaagaaaaaaatcctttcaaaattcttaaatcttctgttcctcctttttccaagggaagagggcaaaaagtggcctgggctctgttggtgtgcgtgttccgtggcggagagaagaaaatgggaaagacatctcactggtgcttttctcttttgttttagtgccccccgcccccatccctataatatctgtaactactcctaaaaaggttttgattcaggcttttttttggtttcattttgtttttttaagaaaaagaaaatgaaaggaaaaaaaaaaaaaaaaaaaaaaaaaa

SEQ ID NO: 26114 - DNA, 2581 bp, Homo Sapiens
cctggctgtgtggatgtctgacaggtgaggcgggggacgcagaagtgcagccgccctctcccacagcggagtccaaaacaggcctaccagtcagttcttatttctattgggtgtttccatgctccaccatgttaagagctaagaatcagctttttttactttcacctcattacctgaggcaggtaaaagaatcatcaggctccaggctcatacagcaacgacttctacaccagcaacagccccttcacccagaatgggctgccctggctaaaaagcagctgaaaggcaaaaacccagaagacctaatatggcacaccccggaagggatctctataaaacccttgtattccaagagagatactatggacttacctgaagaacttccaggagtgaagccattcacacgtggaccatatcctaccatgtatacctttaggccctggaccatccgccagtatgctggttttagtactgtggaagaaagcaataagttctataaggacaacattaaggctggtcagcagggattatcagttgcctttgatctggcgacacatcgtggctatgattcagacaaccctcgagttcgtggtgatgttggaatggctggagttgctattgacactgtggaagataccaaaattctttttgatggaattcctttagaaaaaatgtcagtttccatgactatgaatggagcagttattccagttcttgcaaattttatagtaactggagaagaacaaggtgtacctaaagagaaacttactggtaccatccaaaatgatatactaaaggaatttatggttcgaaatacatacatttttcctccagaaccatccatgaaaattattgctgacatatttgaatatacagcaaagcacatgccaaaatttaattcaatttcaattagtggataccatatgcaggaagcaggggctgatgccattctggagctggcctatactttagcagatggattggagtactctagaactggactccaggctggcctgacaattgatgaatttgcaccaaggttgtctttcttctggggaattggaatgaatttctatatggaaatagcaaagatgagagctggtagaagactctgggctcacttaatagagaaaatgtttcagcctaaaaactcaaaatctcttcttctaagagcacactgtcagacatctggatggtcacttactgagcaggatccctacaataatattgtccgtactgcaatagaagcaatggcagcagtatttggagggactcagtctttgcacacaaattcttttgatgaagctttgggtttgccaactgtgaaaagtgctcgaattgccaggaacacacaaatcatcattcaagaagaatctgggattcccaaagtggctgatccttggggaggttcttacatgatggaatgtctcacaaatgatgtttatgatgctgctttaaagctcattaatgaaattgaagaaatgggtggaatggccaaagctgtagctgagggaatacctaaacttcgaattgaagaatgtgctgcccgaagacaagctagaatagattctggttctgaagtaattgttggagtaaataagtaccagttggaaaaagaagacactgtagaagttctggcaattgataatacttcagtgcgaaacaggcagattgaaaaacttaagaagatcaaatccagcagggatcaagctttggctgaacgttgtcttgctgcactaaccgaatgtgctgctagcggagatggaaatatcctggctcttgcagtggatgcatctcgggcaagatgtacagtgggagaaatcacagatgccctgaaaaaggtatttggtgaacataaagcgaatgatcgaatggtgagtggagcatatcgccaggaatttggagaaagtaaagagataacatctgctatcaagagggttcataaattcatggaacgtgaaggtcgcagacctcgtcttcttgtagcaaaaatgggacaagatggccatgacagaggagcaaaagttattgctacaggatttgctgatcttggttttgatgtggacataggccctcttttccagactcctcgtgaagtggcccagcaggctgtggatgcggatgtgcatgctgtgggcgtaagcaccctcgctgctggtcataaaaccctagttcctgaactcatcaaagaacttaactcccttggacggccagatattcttgtcatgtgtggaggggtgataccacctcaggattatgaatttctgtttgaagttggtgtttccaatgtatttggtcctgggactcgaattccaaaggctgccgttcaggtgcttgatgatattgagaagtgtttggaaaagaagcagcaatctgtataatatcctctttttgttttagcttttgtctaaaatattattttagttatgatcaaagaagagagtaaagctatgtcttcaatttaatttcaatacctgatttgtactttccttgaaagctttactttaaaataccttacttataggcctggtgtcatgctataagtatgtacatacagtttcacttcaaaaaaaaaaaaaaa

SEQ ID NO: 26115 - DNA, 1951 bp, Homo Sapiens
gttcgctggagccctttcctcagacccggcccggtcttcgcgcccggactcctggcgccagcgctaggcgcactcaccgctctgacgggtgcagacgcgggagttgtcccagactgtggagtggcgggcacggccccagccccccttcccttccctgaccccttcttgccatcgccccagacatggggaacgcggcgaccgccaagaaaggcagcgaggtggagagcgtgaaagagtttctagccaaagccaaagaagactttttgaaaaaatgggagaatccaactcagaataatgccggacttgaagattttgaaaggaaaaaaacccttggaacaggttcatttggaagagtcatgttggtaaaacacaaagccactgaacagtattatgccatgaagatcttagataagcagaaggttgttaaactgaagcaaatagagcatactttgaatgagaaaagaatattacaggcagtgaattttcctttccttgttcgactggagtatgcttttaaggataattctaatttatacatggttatggaatatgtccctgggggtgaaatgttttcacatctaagaagaattggaaggttcagtgagccccatgcacggttctatgcagctcagatagtgctaacattcgagtacctccattcactagacctcatctacagagatctaaaacctgaaaatctcttaattgaccatcaaggctatatccaggtcacagactttgggtttgccaaaagagttaaaggcagaacttggacattatgtggaactccagagtatttggctccagaaataattctcagcaagggctacaataaggcagtggattggtgggcattaggagtgctaatctatgaaatggcagctggctatcccccattctttgcagaccaaccaattcagatttatgaaaagattgtttctggaaagaacttttgatatgaacaaaacaaaactttgagaaaaattaacagacaaggcagtgatttatttttgaagaatttgagaagtgtagactctcaagaggactaaaggtcatatgaagaatgatgagagaaccaaaatacattaaaatcacaaatggaagaagaatattttactaatacaaaaactaagaatgtaaatgttataataattgtttcaaatcatttaattgacagtaattataaagttcttgaatctttactatattacttttatttatacttcatataagaaatccagttttctaacaaggatactgtcataactaaatttacatttattaagaaaaactgctttagttaaaattaatgtgtcttcatttttatgcattggcctcgatttgccaatcattctctattggttaaaatttatattcagctgtttatgaatatatattcattttatatcaaactttaaaattttgtatctaataatcagcatatattctaaaatcataacagtctaaatcctgggcaccttagaagaatgacaccagaaaaccttattatatcacaatattctgttttccccttcatttatttagaaatatgacaggatatttggtgtacttttgttttttaactaaaagtaccagattctctctccccatgtgggatataaaattatccccatctcttactccctttactcatctaaagtagaagtcatgaaagtggaatttttgccattaaaaggctctgtattatgtgaagttagattgtattaaccatttcccaataaatcatctgtttcaaaactcaaattcaaactagaatgtgtctctattcacattgcaaaaatattattgtctctctggttagtggctaaaagccaaattggaaactaactagttttttaaattttttaaattgtgcaaattattaaaaatccaatttggtcttataaaaaaaaaaaaaaaaaaaaaaaaaaaaaaaaaaaaaaaaaaaaaa

SEQ ID NO: 26116 - DNA, 1708 bp, Homo Sapiens
ctcttctgaattctccattctgggctcttgcctgtgaaatctttctttgctttccccatcttttcctcgcattttttcaccatctttccctcaatctccaggagccaatgcgagactttggctccgattaagcgacggcccgagactcggggtgcgcgaggaggatcgacagagtggtgatggagagcaccccttcaaggggactgaaccgagtacacctacaatgcaggaatctgcaggaattcttagggggcctgagccctggggtattggaccgattgtatgggcaccctgccacatgtctggctgtcttcagggagctcccatccttggctaagaactgggtgatgcggatgctctttctggagcagcctttgccacaggctgctgtagctctgtgggtaaagaaggaattcagcaaggctcaggaggaaagtacagggctgctgagcggcctccggatctggcacacacagctgctcccaggcgggctccagggcctcatcctcaaccccattttccgccagaacctccgcattgcccttctgggtggggggaaggcctggtctgatgacacaagtcagctgggaccagacaagcatgcccgggacgttccctcccttgacaagtacgccgaggagcgatgggaggtggtcttgcacttcatggtgggctcccccagtgcagctgtcagccaggacttggctcagctcctcagccaggctgggctcatgaagagtactgaacctggagagccgccctgcattacttccgctggcttccagttcctgttgctggacaccccggctcagctctggtactttatgttgcagtatttgcagacagcccagagccggggcatggacctggtagagattctctccttcctcttccagctcagcttctctactctgggcaaggattactctgtggaaggtatgagtgattctctgttgaacttcctgcaacatctgcgtgagtttgggcttgttttccagaggaagaggaaatctcggcgttactaccccacacgcctggccatcaatctctcatcaggtgtctctggagctgggggcactgtgcatcagccaggtttcattgtcgtggaaaccaattaccgactgtatgcctacacggagtcggagctgcagattgccctcattgccctcttctctgagatgctctatcggttccccaacatggtggtggcgcaggtgacccgggagagtgtgcagcaggcaatcgccagtggcatcacagcccagcagataatccatttcctaaggacaagagcccacccagtgatgctcaaacagacacctgtgctgccccccaccatcaccgaccagatccggctctgggagctggaaagggacagactccggttcactgagggtgtcctgtataaccagttcctgtcgcaagtggactttgagctgctgctggcccacgcgcgggagctgggcgtgctcgtgttcgagaactcggccaagcggctcatggtggtgaccccggccgggcacagcgacgtcaagcgcttttggaagcggcagaaacatagctcctgagagcgcgggacttggacacggacctcggcgggcgggactgggcggggcggggcatcagaactcaggtgttttttatttacgcgtcagggcttttcttgtttaataaagttatgatagctaaaaaaaaaaaaaaaaaaaaa

SEQ ID NO: 26117 - DNA, 823 bp, Homo Sapiens
ggggacagccatggcggagcctgtgcaggaggagctctcggtcctggccgcgattttctgcaggccctacgagtgggaggtgctgagccgctcaggaccagaaaataacacagagaaaaatgaaaattgatcacatgagagcaaagactaaatatgtcaaaattgtggagaagtgggcttcagatttaaggctgacaggaagactgatgttcatgggagtacctgattcttcagaaaacctccaaagtagatgtggactcaagtggaaagaaatgcaaagagaaaatgattagtgtactgtttgaaacaaaagtacagacagaacacaaaaggtttctggcatttgaagtcaaagagtattcagcgttggatgaattacaaaaggaatttgaaactgcaggacttaagaagcttttctccgaatttgtacttgctctggtaaaatgaaatggaagacaggaatcttttagtaaaatagcagtgttttttgttgtttttgcattggatttggggagtggttaattgaaatagtcaattttaaagtttctctgaagcaaaatgataggcatcattctaacttcaggaacaaaagccagttctgttttatgaaatattaaacatgaagaaaacttgtatattctaatgtttgccaggaaaggctaggttcagtagatgagacattatttaaaagataaatttaaaaagatggtaaatgaacacttgtttttatagacaatatttgtttgaaactatgtaattttctggctaattttcttgtaattaaatgatttttcaaaaaaaaaaaaaaaaaaaaaaaaaaaaa

SEQ ID NO: 26118 - DNA, 1734 bp, Homo Sapiens
ggggagtctcggttagcttcacttcagcgggaacctgcccactaaggaggccgattctttccggctcgagcaggtccggacccgcccctctggcgtctagcagtctcggaggcctgcccgtatagttcagggccggacagcgagcggcggcgacttgccagtaagggtttggagtcatcagcaggtttaattttggaggaactttacaggtttggctccagcagctgctgttgccaccaccactagttcaagcaccatgcagtttacctcaatatcaaattctttgacctccactgctgctattgggctctcatttacaacttcaacgactaccaccgccactttcaccaccaacactactaccacaatcaccagtggctttactgtgaaccaaaaccaactgttatcaagagggtttgaaaaccttgtaccttatacttcaactgttagtgtagtagcaactcctgtgatgacatatggtcatctggagggtcttataaatgagtggaaccttgagctggaagatcaagagaagtactttcttctccaggccactcaggtcaatgcttgggaccatacattgattgagaatggtgagatgattcgtattttacatggagaagtgaacaaagtgaaactggatcagaaaagattggaacaagaattggattttatcctgtcacagcagcaggaactagaatttctgttgacttatttagaggagtctacgcgtgaccagagtggacttcattatctgcaggatgcagatgaggagcatgtggagatctccaccagatctgcagaattctgaatgcccatatggactccctgcagtggattgatcggaattcaggcatgctgcgaaggaaggtagaagtggtaacacgggttttcgaggattatcgtcacgaggagcatgcacacaatgtcaacactgctttttagtgaatgaccatatcttcagcatgtcgtttctggattattacctacaaattctgatgttaaatagagtagtatttatacttaatatttcatcttgatcataatgaattgtgcatcctttttttcatttaagtattgtactgttgagaattataccttagttttgtttttagtattagaaaatcaaaattatactagcccctttgtccagacagcaacctcttagatgctgactctatatgtgtaatttatgtcttactctccctggcatcagtacacatcatccttctcactccagttgaatcatagggtgatgtctgccaaaagtacatgccaacctatatagtgctagatactgtaaagtctcttctcctcaaaggaacctactgtctagtttgagatataattaatgcttgtctgcataaaaacaatatagataatataaagaagtgcagtatgaattatagaaagtgtgttatagagattcagagcagggaggaaaagttagggtagattattattaaagggttaaggaaaggtaagtttcaaggaatttggttatttttaatgtatggatatactggcattttatttggttttagcatatgatttatagttggtgatttccgtatatttgtttgtttttctttttttttgtttgtttgttttgttttgttttaaataagccttgttcttaggtttggaacagtctggtctcctgtgtttcatgtttcacctaagtcataaataaaggtaatgtcctaaaaaaaaaaaaaaaaaaaaaaaaaaaaa

SEQ ID NO: 26119 - DNA, 2191 bp, Homo Sapiens
ggggaacaagaatttgagaactgtaaataccaatccttgaaagggaccatggtgcggcctgtgagacataagaaaccagtcaattactcacagtttgaccactctgacagtgatgatgattttgtttctgcaactgtacctttaaacaagaaatccagaacagcaccaaaggagttaaaacaagataaaccaaaacctaacttgaacaatctccggaaagaagaaatcccagtacaagagaaaacccctaaaaaaagactccctgaaggtacttttagtattccagctagtgcagtgccttgtacaaagatggctttagatgacaagctctaccagagagacttagaagttgcactagctttatcagtgaaggaacttccaacagtcaccactaatgtgcagaactctcaagataaaagcattgaaaaacatggcagtagtaaaatagaaacaatgaataagtctcctcatatctctaattgcagtgtagccagtgattatttagatttggataagattactgtggaagatgatgttggtggtgttcaagggaaaagaaaagcagcatctaaagctgcagcacagcagaggaagattcttctggaaggcagtgatggtgatagtgctaatgacactgaaccagactttgcacctggtgaagattctgaggatgattctgatttttgtgagagtgaggataatgacgaagacttctctatgagaaaaagtaaagttaaagaaattaaaaagaaagaagtgaaggtaaaatccccagtagaaaagaaagagaagaaatctaaatccaaatgtaatgctttggtgacttcggtggactctgctccagctgccgtcaaatcagaatctcagtccttgccaaaaaaggtttctctgtcttcagataccactaggaaaccattagaaatacgcagtccttcagctgaaagcaagaaacctaaatgggtcccaccagcggcatctggaggtagcagaagtagcagcagcccactggtggtagtgtctgtgaagtctcccaatcagagtctccgccttggcttgtccagattagcacgagttaaacctttgcatccaaatgccactagcacctgagtgtggtacaggaggaatgtttggttgggagaatcacagctttacaagggtgtttatatttgatttgtgtttatatttgaggcaggtattgtaatataaaggaatccattaccatgtcctataaatgacctctagccattttatgattatgttctctgtaaaactcttcaagacttcaatgagaagtttgtttataagaattatcttctcatacctttccttgtgaagagcgtattctgtttttctatcagttcgacatgaagtccacatcacatgctgttcttttctagttacatgatgtgcctttctagctttgtctagtttatagcaccttaactttaactgttcagttttatctggcagaggaaaacattcttatttctttcagaagacatttctgaaatcttataagctacttaagctacgttgtcagttttatcgcaaagatgttttgtattttagccaaatctttttatagtacaaacttagaattattttacacactaaaatggttgcagttttatggcatatgtctccgatttagatggttattctctagaaaatagtatttaaagacattttatgaaatcttcattgtcaaaacctttaataaaagtggaaatattttgaaatgccctttttcttgataccactcatccacgtgttcctgattgtccacatttcatgataaaatgagagctctgcagagaatgttagcctttctgttgtaaatgtaatcttcaagtagtcactttttgttaagttctttagaaagtagttgtcaagtacttagtcatccctattatgatatgagatagtacagcttttcaggaagcttagatctgaatttactttgaaaaacaattgtaatgaatattttatatttacattgagaatttcaactagcttctgatcaatttttaataaaaaattttcaaatcatgttagctgttaaaaaatgtataataactcagtttttcttggtttatggaaatatctatattaatgtgaaaataattaatttagaattgtgattaaagtgagcatttgtctacaaaaaaaaaaaaaaaaaaaaaaaaaaaaa

SEQ ID NO: 26120 - DNA, 1250 bp, Homo Sapiens
gggaggcctttgctgttgtggataggaaagacttaacctaaaattaaaccagcaagaaagcattagtaaaaatctaacaatatgaagggctcttatgagtcatttttttcaaaagatgaaaactccagaaacgcacaggaacgaaatacctcccagaaacatgaagcaatcatcgaagactcactggtaatatttttaaaaagtatacagatcaaagcaaaaagaagccatgtgtaacaaagagaaatgtgcaaatattttttaaggcagtattaagtgcaagaggagtaacatgaaataaacattctttcacatggctactgggaatataaatttcgctccagaaaggccgtagcagtttgacgataggtggcaaaaccttaagattgtgtactggggcccagaatttttatttctaggaatgtatcctgaggaaattatccgagatccccacaaactgcaatgtttaggaattgtccttatagcattgcatacacaagaaaaacagagaaaagcctgatccctgtcagtggaaaaggggttcaatgaattacggtgtgtctgcatgaggcttttatgacattaaaaattgttgaacaacggccaggcacagtggctcatgcctgtaatcctaacactttgggaggccaaggtgggaagattgcctgagctcaggagtttgagaccagcctgggcaacacggtgaaaccccgtctctactaaaatacaaaaaattagccgggcgtcgcagcatgcgcctgtagtcccagctgctcaggaggctgaggcaggagaattgattgaacccgggaggcagaggttgcactgagctgagattaagccaccgcactccagcctgggcgacagagcaagattccgttcccaagaaaaaaaaattgttcaacaataagggcaaagggagagaatcataacatctgattaaacagaaaaagcaagatttttaaaactaactatataaggatggtcccagctgtgtcaaaaggaagcttgtttgtaatacgtgtgcataaaaattaaatagaggtgaacacaattattttaaggcagttaaattatctctgtattgtgaactaagactttctagaattttacttattcattctgtacttaaattttttctaatgaacacatatacttttgtaatcagaaaatattaaatgcatgtatttttcaaaatcaaaaaaaaaaaaaaaaaaaaaccaaaaaaaaaaaaaaaaaaaaaaaaaaaa

SEQ ID NO: 26121 - DNA, 1205 bp, Homo Sapiens
ggggaaatgcgcaaagaaaggacgccggggacacccggttgggctctgctgctcccttctgggttccgaggcccaagcccttggcagtgtttgtgagtggaagggaggtcacgctatcgtccgcggccccagcagccctgtgccctcgttggatcccgcgacgcggctcctttaagagcctcgcgggtcgcccgccgctaggtcgctccccggccatgcgggcgctgcgggccggcctgaccctggcgttgggcgcggggctgggtgcggtcgtcgagggctggcggcggcggcgggaggacgcgcgggcggcgccgggactgctgggccggctgcccgtgctgcccgtggcggcggcagccgagttgccccctgtgcccgggggaccccgcggcccgggcgagctggccaagtacgggctgccggggctggcgcagctcaagagccgcgagtcgtacgtgctgtgctacgacccgcgcacccgcggcgcgctctgggtggtggagcagctgcgacccgagcgtctccgcggcgacggcgaccggcgcgagtgcgacttccgcgaggacgactcggtgcacgcgtaccaccgtgccaccaacgccgactaccgcggcagtggcttcgaccgcggtcacctggccgccgccgccaaccaccgctggagccagaaggccatggacgacacgttctacctgagcaacgtcgcgccccaggtgccccacctcaaccagaatgcctggaacaacctggagaaatatagccgcagcttgacccgcagctaccaaaacgtctatgtctgcacagggccactcttcctgcccaggacagaggctgatgggaaatcctacgtaaagtaccaggtcatcggcaagaaccacgtggcagtgcccacacacttcttcaaggtgctgatcctggaggcagcaggtgggcaaattgagctccgcacctacgtgatgcccaacgcacctgtggatgaggccatcccactggagcgcttcctggtgcccatcgagagcattgagcgggcttcggggctgctctttgtgccaaacatcctggcgcgggcaggcagcctcaaggccatcacggcgggcagtaagtgagggtggagcccagtgagactgtgggtgtgtgcaggccggggagtattaaaggtggtgatttttggacaaaaaaaaaaaaaaaaaaaaaaaaaaaaa

SEQ ID NO: 26122 - DNA, 667 bp, Homo Sapiens
gggggtgaaaacgagatgctgtctcttagggactaaggaagctgtctttcctcttccgacatttgctgactggtcgatgctagatgatcttgagaccctgtgctgaggactggagaactacaggaaaggagcagtatctctgaattatcgtgtggaaggttgcttgtctagcccctgatgactgtgagcctcttcctcctgcttgccacctctcagtcacaagacggctgctgcgactcaggctcatgtcccaattcaaggcagcaagaaggccatggagcggcacctgccagcagatgcccctgcaggccatctctccaggctcaggaacctaaagaagaatctacccagatgtggtggctcacacctgtgatcccaccactttgggaggctgaggcaagaggatcacttgagcccaggagttggagaccaacgtaggcaatacagcaagactcccatctctacaaaaaaaaaaaaagaaagaaagaaagaaagaaaagaaattagctggctgtggtgctgcacatttgtaataccagctactctagaggctgaggctggaggatcacttgagccgaggagtgagctatgaccacaccattgcatttcagcctcagtgacagagcaaggccctgccaaaaaaaaaaaaaaaaaaaaaaaaaaaaaa

SEQ ID NO: 26123 - DNA, 1590 bp, Homo Sapiens
ggggggcagctcaagtggccaaggcaagatgggtcaaagtcagagtggtggtcatggtcctggaggtggcaagaaggatgacaaggacaagaaaaagaaatatgaacctcctgtaccaactagagtggggaaaaagaagaagaaaacaaagggaccagatgctgccagcaaactgccactggtgacacctcacactcagtgccggttaaaattactgaagttagagagaattaaagactatcttctcatggaggaagaattcattagaaatcaggaacaaatgaaaccattagaagaaaagcaagaggaggaaagatcaaaagtggatgatctgagggggaccccgatgtcagtaggaaccttggaagagattattgatgacaatcgtgccatcgtgtctacatctgtgggctcagaacactacgtcagcattctttcatttgtagacaaggatctgctggaacctggctgctcggtcctgctcaaccacaaggtgcatgccgtgataggggtgctgatggatgacacggatcccctggtcacagtgatgaaggtagaaaaggccccccaggagacctatgcagatattggggggttggacaaccaaattcaggaaattaaggaatctgtggagcttcctctcacccatcctgaatattatgaagagatgggtataaagcctcctaagggggtcattctctatggtccacctggcacaggtaaaaccttgttagccaaagcagtagcaaaccaaacctcagccactttcttgagagtggttggctctgaacttattcagaagtacctaggtgatgggcccaaactcgtacgggaattgttccgagttgctgaagaacatgcaccgtccatcgtgtttattgatgaaattgacgccattgggacaaaaagatatgactccaattctggtggtgagagagaaattcagcgaacaatgttggaactgctgaaccagttggatggatttgattctaggggagatgtgaaagttatcatggccacaaaccgaatagaaactttggatccagcacttatcagaccaggccgcattgacaggaagattgagttccccctgcctgatgaaaagacgaagaagcgcatctttcagattcacacaagcaggatgacgctggctgatgatgtaaccctggacgacctgatcatggctaaagatgacctctctggtgctgacatcaaggcaatctgtacagaagctggtctgatggccttaagagaacgtagaatgaaagtaacaaatgaagacttcaaaaaatctaaagaaaatgttctttataagaaacaggaaggcacccctgaggggctgtatctctaatgaaccatggctgtcatcaggaaaatggttgggagatttctcaatccctgaaagggatgaggttgggggagttgcccagaggaatccctgttcccactgatttttattagcaaaacatcctgtgtcttttggagtacgatgtgtaagtgcccattgggtggcctgttggtcactgtgcagcagtctgcttcccaataaagcgtgctctttcgcaaaaaaaaaaaaaaaaaaaaaaaaaa

SEQ ID NO: 26124 - DNA, 1611 bp, Homo Sapiens
gggggatgctttctgagagtcatggatctcatgtgcaagaaaatgaagcacctgtggttcttcctcctgctggtggcggctcccagatgggtcctgtcccagctgcagctgcaggagtcgggcccaggactggtgaagtcttcggagaccctgtccctcacctgcactgtctctggtggctccatcagcagtagtagttactactggggctggatccgccagcccccagggaagggactggagtggattgcaaatacctattatagtggaatcacctactacaacccatccctcaagagtcgcgtcaccatatccgtagacacgtccaagaaccagttgtccctgaaggtgaggtctgtgaccgccgcagacacggctgtgtatttctgtgcgaggcatggctatagcaggtcggggcgaactggggcgattgactactggggccagggaaccctggtcaccgtctcctcagcatccccgaccagccccaaggtcttcccgctgagcctctgcagcacccagccagatgggaacgtggtcatcgcctgcctggtccagggcttcttcccccaggagccactcagtgtgacctggagcgaaagcggacagggcgtgaccgccagaaacttcccacccagccaggatgcctccggggacctgtacaccacgagcagccagctgaccctgccggccacacagtgcctagccggcaagtccgtgacatgccacgtgaagcactacacgaatcccagccaggatgtgactgtgccctgcccagttccctcaactccacctaccccatctccctcaactccacctaccccatctccctcatgctgccacccccgactgtcactgcaccgaccggccctcgaggacctgctcttaggttcagaagcgaacctcacgtgcacactgaccggcctgagagatgcctcaggtgtcaccttcacctggacgccctcaagtgggaagagcgctgttcaaggaccacctgagcgtgacctctgtggctgctacagcgtgtccagtgtcctgccgggctgtgccgagccatggaaccatgggaagaccttcacttgcactgctgcctaccccgagtccaagaccccgctaaccgccaccctctcaaaatccggaaacacattccggcccgaggtccacctgctgccgccgccgtcggaggagctggccctgaacgagctggtgacgctgacgtgcctggcacgcggcttcagccccaaggacgtgctggttcgctggctgcaggggtcacaggagctgccccgcgagaagtacctgacttgggcatcccggcaggagcccagccagggcaccaccaccttcgctgtgaccagcatactgcgcgtggcagccgaggactggaagaagggggacaccttctcctgcatggtgggccacgaggccctgccgctggccttcacacagaagaccatcgaccgcttggcgggtaaacccacccatgtcaatgtgtctgttgtcatggcggaggtggacggcacctgctactgagccgcccgcctgtccccacccctgaataaactccatgctcccccaagcaaaaaaaaaaaaaaaaaaaaaaaaaaaaaa

SEQ ID NO: 26125 - DNA, 1313 bp, Homo Sapiens
caatcagtcctcctgcctcagcctcccgagtagctaagactaacaggtatgtaccaccatgcctggtttattgttttatttttttggcagagatgggtctcactgtgttgcccaggctgatctcaaactcctggcctcaagcgatcctcccatctcagcctcccaaagtgctgggattacagacctgagccaccacacctgggcaacagagtgaaacctgtccctgttttcctgctcttactctcacctctgaggcctcctctgcctggaagagattacagggaaattccaggcagcccttgtcaattgtttttatgaattctttacctgttccttttaaagacaaggaaactgaggcccaaagttctaagttgtttggcaaatggagtctcctaccctcagctcctgcaaggacctgggggacccccaggtccagcagccacatgattctgcagcagacagggacctagagcacatctggatctcagccccacccctggcaacctgcctgcctagagaactcccaagatgacagactaagtaggattctgccatttagaataattctggtatcctgggcgttgcgttaagttgcttaactttcattctgtcttacgatagtcttcagaggtgggaacagatgaagaaaccatgccccagagaaggttaagtgacttcctctttatggagccagtgttccaacctaggtttgcctgataccagacctgtggccccacctcccatgcaggtctctgtggggtctttgggatggatctcctagggctgggctggaagcctcatgtactgttgtcttctaggtaaccaccctgaagagaaggggtggcatcaggaaccgcagggaaccaagcagcctttggtccagtgctgctccttggaacagttgagtgtggcctcaaaccattctcctgggtagctcagtcataaaacaccgaatgcctgcctcaaaatagcctctgagggaagggagctgttgacaagtgaagccctcaggttgtgtgggattccagcaggttattacagcttgtggggggagggagggtccattccaccagctttgaatcccagggtcccctcagcttcactgggccacagtgtctgtcccaggaagaagcaaatggacagtgaggatgatggagagactacagctgccttgtctaaaacctgggatcttaaaagtgttattttggcttttattttttaaaaaaagaaaaggaaaaaaaaaaaaaaaaaaaaaaaaaaaaaaaaaaaaaaaaaaaaaaaaaaaaaaaaaaaaaaaaaaaaaaaaaaaaaaa

SEQ ID NO: 26126 - DNA, 2837 bp, Homo Sapiens
gtctactttgggttctcaaaatgcagatgaaacagttctacagaagtggtttacagatctctcagtcttgcagctaaaccggctattagatctgctttatctctgtgtgtcttgctttgagtataaagggaaaaaagtgtttgaacgaatgaatagcttgacctttaagaaatcaaaagacatgagagcaaagcttgaagaagctattcttgggagcataggtgccaggcaagaaatggtacggcgaagccgaggacagctcgagagaagcccatctggaagtgcctttggaagtcaagaaaatttgaggtggaggaaagatatgactcactggcgtcaaaacacagagaagcttgacaaatcaagagcagagattgaacacgaagcactgattgatggaaacctggctacagaagcaaacctaatcattttagatacattagagattgttgttcagaccgtttctgtaacggaatccaaagagagcattcttggtggagtgctaaaagtgctactacacagcatggcctgtaaccaaagtgcagtttatctacaacactgttttgctacacagagagccttggtttcaaagtttcctgaactcttatttgaagaagagacagagcagtgtgctgatttatgcctcaggcttctccgacactgtagcagtagcatcggtacaatacggtcacacgccagtgcctccctttacctactaatgaggcaaaactttgagattgggaataactttgccagggttaaaatgcaggtaacaatgtcactatcctccttggtgggcacatctcagaattttaatgaagaattcttaagacgttctctaaagactatattgacatatgctgaagaagatctggaattgagggaaacaacatttcctgatcaggtccaggatctggttttcaatctccatatgattctttctgatactgtgaaaatgaaggaacaccaggaggatcctgaaatgttgattgatctaatgtacagaattgccaagggttaccagacctctccagatctgcgattgacctggttgcagaacatggcaggcaagcactcagaacgaagcaatcatgctgaagctgcacagtgtctagtccactcagcagcacttgttgctgaatatttgagcatgctggaggaccggaaatatcttcctgtgggatgtgtaacatttcagaatatttcatctaatgttttagaagaatctgcggtctcagatgatgtggtatctccagatgaagaaggtatctgctctggaaaatactttactgagtcaggacttgtgggattactggaacaagcagctgcttccttctctatggctggcatgtatgaagcagttaatgaagtttacaaagtacttattcctattcatgaagctaatcgggatgcaaagaaactatccacaattcatggtaaacttcaagaagcattcagcaaaattgttcatcaggatggtaagcggatgtttggcacctattttcgtgttggtttttatggaaccaagttcggggatttggatgaacaagaatttgtttacaaggagcctgcaataaccaaacttgcagagatatctcacagattggagggattttacggagaaagatttggagaggatgtggttgaagtaatcaaagactctaatcctgtagacaagtgtaaattagatcctaacaaggcatatattcagattacctatgtggagccatactttgacacatatgagatgaaggacagaatcacctatttcgacaaaaattacaatcttcgtcgattcatgtactgtacaccctttactttagatggccgtgcccatggggaacttcatgaacaattcaaaaggaagaccattctgactacgtctcatgcctttccttatattaaaacaagggtcaatgtcactcataaagaagagatcatcttaacaccaattgaagttgctattgaggacatgcagaaaaagacacaggagttggcatttgcaacacatcaggatcccgcagaccccaaaatgcttcagatggtactccagggatctgtaggcaccacagtgaatcaggggcctttggaagttgcccaggtttttctgtctgaaatacctagtgacccaaagctcttcagacatcataataaactgcgactctgctttaaagattttactaaaaggtgtgaagatgccttaagaaaaaataagagcttaattgggccggatcaaaaggagtatcaaagggaactggagagaaactatcatcgccttaaagaggccctacagccactgatcaacagaaagatccctcagttatacaaggcagtattgcctgtcacctgccacagagattccttcagtcgaatgagccttcgcaaaatggatctctaaactgaatgcacttgttttattcatctgcaaagagccatgtattcaacatcgagtgtgaaaagatctattggaaaacaacatggaatggaattctggaaattattattcattgaagaatgcagtggccaagaaaatatcaaatgtagattgttaacgcttgagaatcatggctatggtttctaatgttctggtaacaagctgttatcttttaagacattttaatgactcaaaggtacactatacatttaccattatttataccatagctaaggttaaaaatttattccctttaagttcgtattttttaatttatattaccatttatagattcattttggaaccattttaaatgtagtaatgcttattttaaaggtactattaaatatgtgaatgtttcccctaaaaaaaaaaaaaaaaaaaaaaaaaaaaaaaaaaaaaa

SEQ ID NO: 26127 - DNA, 2624 bp, Homo Sapiens
ctcagggaggcggggctcgttccacagggacaccacgacggctcgcggcccccagcctctaccccgctccggatccgggatctgagcgccggccgcggtgcccaggcactcccttggcgggccggatggcggaccccggcccagatcccgaatctgagtcggaatcggtgttcccgcgggaggtcgggctctttgcagactcttactcggagaagagccagttctgtttctgtgggcatgtgctgaccatcacgcagaactttgggtcccgcctcggggtggcggcgcgcgtgtgggacgcggccctgagcctgtgcaattatttcgagagtcaaaatgtggatttccgaggcaagaaggtgatcgaactgggtgcggggacaggcatcgtggggatcttggcagcgctgcaggggggggatgttaccatcactgacctgcccctggccctagaacagatccagggcaacgtccaggccaatgtgccagctggaggccaggcccaggtgcgtgccttgtcctgggggattgaccatcatgtcttccctgcaaactatgacctggtgctgggggctgatatcgtgtacctggaacccaccttccctctgctgctggggaccctccaacacctgtgcaggccccatggcaccatctatctggcctccaagatgagaaaggagcatgggacagagagcttctttcagcacctcctgccccagcatttccaactggagctggctcagcgggatgaggatgaaaatgtcaacatctatagggccaggcacagggaaccaagacctgcttgacatcacccttgctgttcttctcaatctcttgctctaatgaaggaactgtgtatctcaaaaaccatatttccagagccacaaacatgaggaccaaaaaggatggatttccctggcctctctcactttcctccttccctctttgttaccccagatactcttgggcaggtgcagtgaggtgcctgcttacaaggaatcccagagttctggcagcactagtgttagaacaccaaggaggttcctggctcctgttctcagagaaggaggatggtaaggtatccaggatttttagggggtaagggagatatatgggatgtgagagcagtgattgtagacagactgtcactgatcacttccattcctgttgctgtttacacagaatggactttaaaaaaattctgtgggatttttttttctttttttctttttttttgagacagggtctcactctgtcatccaggctggagtgcagtggtgtgatcacagctcactgcagcctcaacctctgaaggcccagatgatcttcctgcctcagctccccaagtagctgggactagaggcatgcgccaccacacccggctaatttttgtattttcagtagagacagggtttcgccatgttgcccagggtggtctcaaactcctgggctcaagtgatccacccgccttgcctcccaaagtgctgggattgcaggcatggcccactgtgctagcctaggatttttttttttttttaagaaagaattaagccttaaaaatctattgtgcaagaacccaacttttactcaggagctgagaaggaagaagcctcaaaccacccatttcctgctttttagagatagagtctagtggaaccatggctctaactgggtcaagtcctcctagctctgaagctaaggctgcagagctgtcctttggactgtatttcttcatgctttccagagttagagccttgatcacggaacatcattgtgtgcagaagaatactgtacctagtactaagttcttttcatctttgatttttctttagcttcatcagtccttccttcctaatctctaatcccctgaagcctaacacagttcctaatgtgttttgccttaacctcttttctcttcccacattggtacttctggttggggctctctttacttactgcttaggcacatagtcaccttctctggactccctgcttccatgctttctccttcagtccattccgcaaactcttgtgatcttccaaaattagctctgattagctttcacttcctgtagaagcaagaacaagctcctctgcttggtacttagtctgtgtccatgtgatccaaaattaccttcctattgcatttcctactcctttgctacgtgtattggacctctggccaaattacaaaagatgtactctttgttctctaaaaccacactaaagttttctgacttctttcacactctttatgataatcctctgcctgaaaggctattgccacctgtcaaaatcttcattattctttgcctctttcctgagcctcttgcttgaatgtgatttctttctccctgagacccataaggttcatcttatgggaccttaatttgtcttgcatggacatttgtgattctcattttctcaccattaaattaccttggagggtagggctgtggtttactcctgtctaaacccctgaagcctaacacagttcctggcacacaacaggtgttcaacagatattgtgctcattcaataaatatttactcgctttgtttaaaaaaaaaaaaaaaaaaaaaaaaaaaaaaaaaaaaaaaaaaaaaaaaaaaaaaaaaaaaaaa

SEQ ID NO: 26128 - DNA, 2474 bp, Homo Sapiens
caggaagtgagcggcctgccttccgaaggagcatctgaaggaaaccagtacaccccggatgcccagcgctttaactgccagaaaccagatatagctgagaagtacctgtcggcttcagagtatgggagctccgtggatggccaccctgaggtcccagaaaccaaagacgtcaagaagaaatgttctgctggcctcaaactgagcaacctaatgaatctgggcaggaagaaatccacctcactggagcctgtggagaggtccctcgagacatccagttacctgaacgtgctggtgaacagccagtggaagtctcgctggtgctctgtcagggacaatcacctgcacttctaccaggaccggaaccggagcaaggtggcccagcaacccctcagcctggtgggctgcgaggtggtcccagaccccagccccgaccacctctactccttccgcatcctccacaagggcgaggagctggccaagcttgaggccaagtcttccgaggaaatgggccactggctgggtctcctgctctctgagtcaggctccaagacagacccagaagagttcacctacgactatgtggatgccgatagggtctcctgtattgtgagtgcggccaaaaactctctcttactgatgcagagaaagttctcagagcccaacacttacatcgatggcctgcctagccaggaccgccaggaggagctgtatgacgacgtggacctgtcagagctcacagctgcggtggagcctaccgaggaagccacccctgttgcagatgacccaaatgagagagaatctgaccgggtgtacctggacctcacacctgtcaagtcctttctgcatggccccagcagtgcacaggcccaggcctcctccccgacgttgtcctgcctggacaatgcaactgaggccctcccggcagactcaggcccaggtcccaccccagatgagccctgcataaagtgtccagagaacctgggagaacagcagctggagagtttggagccagaggatccttccctgagaatcaccaccgtcaaaatccagacggaacagcagagaatctccttcccaccgagctgcccggatgccgtggtggccaccccacctggtgccagcccacctgtgaaggacaggttgcgcgtgaccagtgcagagatcaagcttggcaagaatcggacagaagctgaggtgaagcggtacacagaggagaaggagaggcttgaaaagaagaaggaagaaatccgggggcacctggctcagctccggaaagagaaacgggagctaaaggaaaccctactgaaatgcacagacaaggaagtcctggcgagcctggagcagaagctgaaggaaattgacgaggagtgccggggcgaggagagcaggcgcgtggacctggagctcagcatcatggaggtgaaggacaacctgaagaaggctgaggcagggcctgtgacgttaggcaccaccgtggacaccacccacctggagaatgtgagcccccgccccaaagctgtcacacctgcctctgccccagactgtaccccagtcaactctgcaaccacactcaagaacaggcctctctcggtcgtggtcacaggcaaaggcactgtactccagaaagccaaggaatgggagaagaaaggagcaagttagaaaacaagcttcatctaaagactctcatgtcaatgtggaccttggtgacaatcctgctttgttaaagcaaaaactatgcgaaagggtgagtctgtttagaagaaaaagcaaagactgaggtactgtgaatggagagcttcagctaagaggaggctctgtcccttttcagagccaaaggaaataatacaacaaaaaggaggcttctttggagacctaagtctattggatgtaaacaagacgttgtatttagggatgttctgtgtttctttcttttttgaagttgtcatcaattgctttactaagatttttaaatagtgaaaacctcctgtttagactttggtggaagatgaatcaaggaagcagggccctgtcttatgggtcacatgtctttggtgagtgagaagacctaaactcctggccatcatctcttatccaatacttagcagttggggattaaaccatccttgccttcagttctctccaatattaccaggcccaactcagtcttcagtgattttaaacagcattgacatcatctgtaaaaccatcatctgtaaaaccatctatgacatgagttttgagaaacaataatggggaaaatatttgggaccaagctgaagcactaatcccactaagttaaagacttctttccagtccaaggcaggcctgaatcaactgtctttaaataaaattttaagtgatgctgtattatatataggaaaaaatgcttaaaatcctgtcatttagaacagtgaaaagtatcttttgagattaaagtgactctttactgtaggaaaaataaaaaaaaaaaaaaa

SEQ ID NO: 26129 - DNA, 1406 bp, Homo Sapiens
cccggcctcccgcccgccgcgctccagatgaagtgtgagcactgcacgcgcaaggaatgtagtaagaaaacaaaaactgatgaccaagagaatgtgtcagccgatgcaccgagtccagcccaggaaaatggagagaaatgtgatacctcaaagcacaaagtgctggtagtgtctgtgtgtcctcaatctttgccttattttgctgctaaattcaacctcagtgtaactgatgcatccagaagactctgtggtttcctcaaaagtcttggggtgcactatgtatttgatacgacgatagctgcggattttagtatcctggagagtcaaaaagaattcgtgcgtcgctatcgccagcacagtgaggaggaacgcaccctgcccatgctgacctctgcctgtcctggctgggtccgatacgccgagcgggtgctgggtcgccccatcactgcccacctctgcaccgccaagtccccccagcaggtcatgggctctttggtgaaggattatttcgccagacagcagaacctgtctccagagaagattttccacgtcattgtggccccttgttatgacaagaagctggaggctcttcaggaaagccttccccctgctttgcatggctcccggggcgctgactgcgtgttaacatcaggtgaaattgctcaaataatggagcaaggtgacctctcagtgagagatgctgccgtcgacactctgtttggagacttgaaggaggacaaagtgacgcgtcatgatggagccagctcagacgggcacctggcacacatcttcagacatgcggccaaggagctgttcaacgaggatgtggaggaggtcacttaccgagccctgagaaacaaagacttccaagaggtcacccttgagaagaacggagaggtggtgttacgctttgctgcagcctatggctttcgaaacatccagaacatgatcctgaagcttaagaagggcaagttcccattccactttgtggaggtcctcgcctgtgctggaggatgcttaaatggcagaggccaagcccagactccagacggacatgcggataaggccctgctgcggcagatggaaggcatttacgctgacatccctgtgcggcgtccggagtccagtgcacacgtgcaggagctgtaccaggagtggctggaggggatcaactcccccaaggcccgagaggtgctgcataccacgtaccagagccaggagcgtggcacacacagcctggacatcaagtggtgaagtcaggccagggccttccagctgctcttggggccagagccaagagcctctcagtagagggaggggctgccctgagtggagtattaaagacacttaagaaaaccgaaaaaaaaaaaaaaaaaaaaaaaaaaaaaaaaaaaaaaaaaaaaaaa

SEQ ID NO: 26130 - DNA, 2626 bp, Homo Sapiens
ggaggttggtggcgactccctcgctcgccctcactgccggcggtcccaactccaggcaccatgttccccgcgggcccccccagccacagcctcctccggctccccctgctgcagttgctgctactggtggtgcaggccgtggggagggggctgggccgcgccagcccggccgggggccccctggaagatgtggtcatcgagaggtaccacatccccagggcctgtccccgggaagtgcagatgggggattttgtgcgctaccactacaacggcacttttgaagatggcaagaagtttgattcaagctatgatcgcaacaccttggtggccatcgtggtgggtgtggggcgcctcatcactggcatggaccgaggcctcatgggcatgtgtgtcaacgagcggcgacgcctcattgtgcctccccacctgggctatgggagcatcggcctggcggggctcattccaccggatgccaccctctacttcgatgtggttctgctggatgtgtggaacaaggaagacaccgtgcaggtgagcacattgctgcgcccgccccactgcccccgcatggtccaggacggcgactttgtccgctaccactacaatggcaccctgctggacggcacctccttcgacaccagctacagtaagggcggcacttatgacacctacgtcggctctggttggctgatcaagggcatggaccaggggctgctgggcatgtgtcctggagagagaaggaagattatcatccctccattcctggcctatggcgagaaaggctatgggacagtgatccccccacaggcctcgctggtctttcacgtcctcctgattgacgtgcacaacccgaaggacgctgtccagctagagacgctggagctcccccccggctgtgtccgcagagccggggccggggacttcatgcgctaccactacaatggctccttgatggacggcaccctcttcgattccagctactcccgcaaccacacctacaatacctatatcgggcagggttacatcatccccgggatggaccaggggctgcagggtgcctgcatgggggaacgccggagaattaccatccccccgcacctcgcctatggggagaatggaactggagacaagatccctggctctgccgtgctaatcttcaacgtccatgtcattgacttccacaaccctgcggatgtggtggaaatcaggacactgtcccggccatctgagacctgcaatgagaccaccaagcttggggactttgttcgataccattacaactgttctttgctggacggcacccagctgttcacctcgcatgactacggggccccccaggaggcgactctcggggccaacaaggtgatcgaaggcctggacacgggcctgcagggcatgtgtgtgggagagaggcggcagctcatcgtgcccccgcacctggcccacggggagagtggagcccggggagtcccaggcagtgctgtgctgctgtttgaggtggagctggtgtcccgggaggatgggctgcccacaggctacctgtttgtgtggcacaaggaccctcctgccaacctgtttgaagacatggacctcaacaaggatggcgaggtccctccggaggagttctccaccttcatcaaggctcaagtgagtgagggcaaaggacgcctcatgcctgggcaggaccctgagaaaaccataggagacatgttccagaaccaggaccgcaaccaggacggcaagatcacagtcgacgagctcaagctgaagtcagatgaggacgaggagcgggtccacgaggagctctgaggggcagggagcctggccaggcctgagacacagaggcccactgcgagggggacagtggcggtgggactgacctgctgacagtcaccctccctctgctgggatgaggtccaggagccaactaaaacaatggcagaggagacatctctggtgttcccaccaccctagatgaaaatccacagcacagacctctaccgtgtttctcttccatccctaaaccacttccttaaaatgtttggatttgcaaagccaatttggggcctgtggagcctggggttggatagggccatggctggtcccccaccatacctcccctccacatcactgacacagctgagcttgttatccatctccccaaactttctctttctttgtacttcttgtcatccccactcccagcccctattcctctatgtgacagctggctaggacccctctgccttcctccccaatcctgactggctcctagggaaggggaaggctcctggagggcagccctacctctcccatgccctttgccctcctccctcgcctccagtggaggctgagctgaccctgggctgctggaggccagactgggctgtagttagcttttcatccctaaagaaggctttccctaaggaaccatagaagagaggaagaaaacaaagggcatgtgtgagggaagctgcttgggtgggtgttagggctatgaaatcttggatttggggctgaggggtgggagggagggcagagctctgcacactcaaaggctaaactggtgtcagtccttttttcctttgttccaaataaaagattaaaccaaaaaaaaaaaaaaaaa

SEQ ID NO: 26131 - DNA, 1904 bp, Homo Sapiens
gcccgcgcgggatccgggtggctgcaggctgctggcttctgcggctgcggggtcggggtcgcggccagggccaagccgcagcgagttcacaggcggaacccctgcaggcggcgccccctacgcgaggtcacccctgggaaggagcgcagcccacccggcccctccgcatccgagcaggacgcccgtctcctctccctgaggatttcaggtctccctgtcccaggaggcttgtgccaagatggcatcagctggagacacccaggcaggcccacgggatgcagcagatcagaacttcgactatatgttcaaactgctactgataggcaacagcagtgtgggcaagacttccttcctgttccgatacgcggacgactccttcactcccgccttcgtcagtactgtgggcatcgatttcaaggtcaagaccgtctaccgccatgacaagaggatcaagctgcagatctgggacacagcgggccaggagcgctaccgcaccatcaccacggcctactaccggggagccatgggcttcctgctcatgtatgacatcgccaatcaggaatcctttgccgctgtgcaggactgggccacgcaaatcaagacctactcctgggacaacgcccaggtcatcctggtggggaacaagtgtgacctggaggacgaacgtgttgtgcctgctgaggatggccggaggctcgccgacgaccttggtttcgagttctttgaagccagtgccaaggagaacatcaatgtgaagcaggtcttcgagcgcctggtggatgtcatctgcgagaagatgaacgagtccctggaacccagctccagctcaggcagcaacgggaaaggcccggccgtgggggatgctccagccccccagcccagcagctgcagctgctagagatggcccccaaccccccacccacccctctcctgcctcggcagggactgtgatcgaggcgtgagccacagtggttatctccaagctcagggcaatcccttccctcctgtcaactgctccccgactcctgcatggctcattccttcacaatgtcgccgtggctgccaggttcctcaggcagccccggtgggaggctgcggaccatggggactcagctctgcatggcaggcagaggcccagggacactgacgtgcatgagcttgctgctttccagggtgtgttgagggtggccatgggtgacacgtcccactctttctgatggaggggcatccgtggtgccttctagcttagaaccattttccaggtctcttctgggttgggcaggactgatattcccaagctggtggaagatggttcatcttcctcgcacagtgtgggttcttggagttcatccagggaaggcggcgcctctttctcaggtcctgcaggctggtctctgagcctgcccccacgaactttctggattccaaggtgggatggtgatccctttgacccctgcagaccctctacttgcgaaaagcagcattgaagcagccttttcccattgtagaagggacagggagtcagatcccctcaaccccccggcttcagggaccccagaagtgccttccaagcttcccccaagatccacatcacccacgaccctgccactgtttttgctgtgttcaccacatctctgatcctgaagtgaattctggaactatggaccacattagactgggcagagattcgcccaacccctagcactccggctctgggctttcggccagaagttaattaacctcagagccaggagcctggggctggggcctccctcccaggccctgtttagctgtttagctggttgtgttttaagcaagttcttgcccaatcatgcatcctgctagaaaaggaaatgaagcaacgttcccagccaccgcaaaaaaaaaaaaaaaaaaaaaaaaaa

SEQ ID NO: 26132 - DNA, 2536 bp, Homo Sapiens
ggcagggggtggtggagcaagatggcggctcatctgtcctacggccgagtgaacctaaacgtgttgcgcgaggcggtgcgtcgcgagctgcgcgagttcctggacaagtgcgcaggaagcaaggcaatagtttgggatgaatacctaactggaccctttggcctgattgcacagtattcactattgaaggaacatgaagtggaaaaaatgttcacacttaaaggaaatcgtttgccggcagctgatgtgaagaatataattttttttgtcagacccaggctagagttgatggatataatcgctgaaaacgtgctcagtgaagatagacgaggcccaacgagagattttcatattctgtttgtgccacgccgtagcctgttgtgcgaacagcggttgaaggatctgggtgtcttgggatcctttattcacagggaggagtacagcttagatctcattccattcgatggggatctcttatccatggaatcagagggtgcattcaaagagtgctacctggagggtgaccagacgagcctgtaccacgcagccaaggggctgatgaccctgcaagctctgtatggaacgatcccccagatctttgggaaaggagaatgcgctcggcaagtggccaatatgatgatcaggatgaagagagagtttacaggaagccagaattcaatatttcctgtttttgataatctcttgttgcttgatcggaatgtggatttattaacacctcttgccactcagctgacatatgaaggactcattgatgaaatttatggcattcagaacagttatgtgaaattacctccagagaaatttgcacctaagaaacagggcgatggtggtaaggacctccccacggaagcaaagaagctgcagctgaattctgcagaggagctctatgctgagatccgagataagaacttcaacgcagttggctctgtgctcagcaagaaagcaaagatcatctctgcagcattcgaggaaagacacaatgctaagaccgtgggggagatcaagcagtttgtttcccagttgccccacatgcaggcagcaaggggctcgcttgcaaaccatacctcaattgcagaattgatcaaagatgtcactacttctgaagacttttttgataaattaaccgtggaacaggagtttatgtctggaatagacactgataaggtcaacaattacattgaggattgtatcgcccaaaagcactcgttgatcaaggtgttaagactagtttgcctccaatccgtgtgtaatagtgggctcaaacaaaaagttttggattattacaaaagagagattctccagacatacggctatgagcacatattgaccttacacaacctggagaaggccggcctgctgaaaccgcagacggggggcagaaacaattacccaactatacggaaaacattacgcctctggatggatgatgttaatgagcaaaaccccacggacatatcgtatgtgtacagtgggtatgccccgctcagtgtgcggctggcccagctgctttcccggcctggctggcggagcatcgaggaggtcctccgcatcctcccagggccccactttgaggagcggcagccactgcccacaggactgcagaagaaacgtcaaccgggagaaaaccgagtgactctgatatttttccttgggggcgtaaccttcgctgaaattgctgccctgcgatttctctcccagttggaagatggaggtacagaatatgtcattgccaccactaaactaatgaatggaaccagttggatagaggctctgatggaaaaacctttctaggatgttcagaggagacttaacaagtgtactgcagaataaactacctctttgaagaaattgctgaaaggaagtaaaaccccatagaagaaacatgggaatacagaatatattctggggtcagcttcttaaattatactactgtttactgctttctccgtctcttttgtattccctttttttttttcctttgagacggagtcttgctctgtcacccagactagagtgcagtggcacggtctcacctcactgcaacctccacctcctaggttcaagcaattctcctgcctcagcctcctgagtagctgggactacaggcatgcaccaccacacccggctaatttttgtatttttagtagccatggtgtttcaccatgttggccaggctggtctcaaactcctgacctcaggtgatccacctgcctcggcctcccacagtgctgggattacaggcctgagccaccgtgcctggcccctaatctgctgaagaaagaagaatagaagaaaatcaacctgagtaaaagcagcactggttttgagttttctaagctcagggtcttcattagagacctctggaaatacattaaggatggtgggggtagataatccattcagccagacaaacggggccagctcttaaaataagaaagctgagactgaggaggtgaaactgaaaataaaaagagaaagttcatcctctaaaaaaaaaaaaaaaaaaaaaaaaaaa

SEQ ID NO: 26133 - DNA, 2212 bp, Homo Sapiens
gcccggctcctgggagcaggtctcggcccccgcttggggccccggccgtgcggccggagggagcggccggatggagcggaggatgaaagccggatacttggaccagcaagtgccctacaccttcagcagcaaatcgcccggaaatgggagcttgcgcgaagcgctgatcggcccgctggggaagctcatggacccgggctccctgccgcccctcgactctgaagatctcttccaggatctaagtcacttccaggagacgtggctcgctgaagctcaggtaccagacagtgatgagcagtttgttcctgatttccattcagaaaacctagctttccacagccccaccaccaggatcaagaaggagccccagagtccccgcacagacccggccctgtcctgcagcaggaagccgccactcccctaccaccatggcgagcagtgcctttactccagtgcctatgacccccccagacaaatcgccatcaagtcccctgcccctggtgcccttggacagtcgcccctacagccctttccccgggcagagcaacggaatttcctgagatcctctggcacctcccagccccaccctggccatgggtacctcggggaacatagctccgtcttccagcagcccctggacatttgccactccttcacatctcagggagggggccgggaacccctcccagccccctaccaacaccagctgtcggagccctgcccaccctatccccagcagagctttaagcaagaataccatgatcccctgtatgaacaggcgggccagccagccgtggaccagggtggggtcaatgggcacaggtacccaggggcgggggtggtgatcaaacaggaacagacggacttcgcctacgactcagatgtcaccgggtgcgcatcaatgtacctccacacagagggcttctctgggccctctccaggtgacggggccatgggctatggctatgagaaacctctgcgaccattcccagatgatgtctgcgttgtccctgagaaatttgaaggagacatcaagcaggaaggggtcggtgcatttcgagaggggccgccctaccagcgccggggtgccctgcagctgtggcaatttctggtggccttgctggatgacccaacaaatgcccatttcattgcctggacgggccggggaatggagttcaagctcattgagcctgaggaggtcgccaggctctggggcatccagaagaaccggccagccatgaattacgacaagctgagccgctcgctccgatactattatgagaaaggcatcatgcagaaggtggctggtgagcgttacgtgtacaagtttgtgtgtgagcccgaggccctcttctctttggccttcccggacaatcagcgtccagctctcaaggctgagtttgaccggcctgtcagtgaggaggacacagtccctttgtcccacttggatgagagccccgcctacctcccagagctggctggccccgcccagccatttggccccaagggtggctactcttactagcccccagcggctgttccccctgccgcaggtgggtgctgccctgtgtacatataaatgaatctggtgttggggaaaccttcatctgaaacccacagatgtctctggggcagatccccactgtcctaccagttgccctagcccagactctgagctgctcaccggagtcattgggaaggaaaagtggagaaatggcaagtctagagtctcagaaactcccctgggggtttcacctgggccctggaggaattcagctcagcttcttcctaggtccaagccccccacaccttttccccaaccacagagaacaagagtttgttctgttctgggggacagagaaggcgcttcccaacttcatactggcaggagggtgaggaggttcactgagctccccagatctcccactgcggggagacagaagcctggactctgccccacgctgtggccctggagggtaccggtttgtcagttcttggtgctctgtgttcccagaggcaggcggaggttgaagaaaggaacctgggatgaggggtgctgggtataagcagagagggatgggttcctgctccaagggaccctttgcctttcttctgccctttcctaggcccaggcctgggtttgtacttccacctccaccacatctgccagaccttaataaaggcccccacttctcccaaaaaaaaaaaaaaa

SEQ ID NO: 26134 - DNA, 2862 bp, Homo Sapiens
gtctgcccgcccgccccgcgcgggggccgagtcgcgaagcgcgcctgcgacccggcgtccgggcgagctggagaggacgcgaggagccatgaggcgccagcctgcgaaggtggcggcgctgctgctcgggctgctcttggagtgcacagaagccaaaaagcattgctggtatttcgaaggactctatccaacctattatatatgccgctcctacgaggactgctgtggctccaggtgctgtgtgcgggccctctccatacagaggctgtggtacttctggttccttctgatgatgggcgtgcttttctgctgcggagccggcttcttcatccggaggcgcatgtaccccccgccgctgatcgaggagccagccttcaatgtgtcctacaccaggcagcccccaaatcccggcccaggagcccagcagccggggccgccctattacaccgacccaggaggaccggggatgaaccctgtcgggaattccatggcaatggctttccaggtcccacccaactcaccccaggggagtgtggcctgcccgccccctccagcctactgcaacacgcctccgcccccgtacgaacaggtagtgaaggccaagtagtggggtgcccacgtgcaagaggagagacaggagagggcctttccctggcctttctgtcttcgttgatgttcacttccaggaacggtctcgtgggctgctaagggcagttcctctgatatcctcacagcaagcacagctctctttcaggctttccatggagtacaatatatgaactcacactttgtctcctctgttgcttctgtttctgacgcagtctgtgctctcacatggtagtgtggtgacagtccccgagggctgacgtccttacggtggcgtgaccagatctacaggagagagactgagaggaagaaggcagtgctggaggtgcaggtggcatgtagaggggccaggccgagcatcccaggcaagcatccttctgcccgggtattaataggaagccccatgccgggcggctcagccgatgaagcagcagccgactgagctgagcccagcaggtcatctgctccagcctgtcctctcgtcagccttcctcttccagaagctgttggagagacattcaggagagagcaagccccttgtcatgtttctgtctctgttcatatcctaaagatagacttctcctgcaccgccagggaagggtagcacgtgcagctctcaccgcaggatggggcctagaatcaggcttgccttggaggcctgacagtgatctgacatccactaagcaaatttatttaaattcatgggaaatcacttcctgccccaaactgagacattgcattttgtgagctcttggtctgatttggagaaaggactgttacccatttttttggtgtgtttatggaagtgcatgtagagcgtcctgccctttgaaatcagactgggtgtgtgtcttccctggacatcactgcctctccagggcattctcaggcccgggggtctccttccctcaggcagctccagtggtgggttctgaagggtgctttcaaaacggggcacatctggctgggaagtcacatggactcttccagggagagagaccagctgaggcgtctctctctgaggttgtgttgggtctaagcgggtgtgtgctgggctccaaggaggaggagcttgctgggaaaagacaggagaagtactgactcaactgcactgaccatgttgtcataattagaataaagaagaagtggtcggaaatgcacattcctggataggaatcacagctcaccccaggatctcacaggtagtctcctgagtagttgacggctagcggggagctagttccgccgcatagttatagtgttgatgtgtgaacgctgacctgtcctgtgtgctaagagctatgcagcttagctgaggcgcctagattactagatgtgctgtatcacggggaatgaggtgggggtgcttattttttaatgaactaatcagagcctcttgagaaattgttactcattgaactggagcatcaagacatctcatggaagtggatacggagtgatttggtgtccatgcttttcactctgaggacatttaatcggagaacctcctggggaattttgtgggagacacttgggaacaaaacagacaccctgggaatgcagttgcaagcacagatgctgccaccagtgtctctgaccaccctggtgtgactgctgactgccagcgtggtacctcccatgctgcaggcctccatctaaatgagacaacaaagcacaatgttcactgtttacaaccaagacaactgcgtgggtccaaacactcctcttcctccaggtcatttgttttgcatttttaatgtctttattttttgtaatgaaaaagcacactaagctgcccctggaatcgggtgcagctgaataggcacccaaaagtccgtgactaaatttcgtttgtctttttgatagcaaattatgttaagagacagtgatggctagggctcaacaattttgtattcccatgtttgtgtgagacagagtttgttttcccttgaacttggttagaattgtgctactgtgaacgctgatcctgcatatggaagtcccgcttcggtgacatttcctggccattcttgtttccattgtgtggatggtgggttgtgcccacttcctggagtgagacagctcctggtgtgtagaattcccggagcgtccgtggttcagagtaaacttgaagcagatctgtgcatgcttttcctctgcaacaattggctcgtttctctttttgttctcttttgataggatcctgtttcctatgtgtgcaaaataaaaataaatttgggcaaaaaaaaaaaaaaa

SEQ ID NO: 26135 - DNA, 2541 bp, Homo Sapiens
cggacgcgtgggcgacccacgcgtccggtgatggtgcctcaaagcagtaactttttgcttagagcttgagagtcaaagttaaggacccacatgtatacttcggctctagcgagtctaaggatgataatatggatacaaaatctattctagaagaacttcttctcaaaagatcacagcaaaagaagaaaatgtcaccaaataattacaaagaacggctttttgttttgaccaaaacaaacctttcctactatgaatatgacaaaatgaaaaggggcagcagaaaaggatccattgaaattaagaaaatcagatgtgtggagaaagtaaatctcgaggagcagacgcctgtagagagacagtacccatttcagattgtctataaagatgggcttctctatgtctatgcatcaaatgaagagagccgaagtcagtggttgaaagcattacaaaaagagataaggggtaacccccacctgctggtcaagtaccatagtgggttcttcgtggacgggaagttcctgtgttgccagcagagctgtaaagcagccccaggatgtaccctctgggaagcatatgctaatctgcatactgcagtcaatgaagagaaacacagagttcccaccttcccagacagagtgctgaagatacctcgggcagttcctgttctcaaaatggatgcaccatcttcaagtaccactctagcccaatatgacaacgaatcaaagaaaaactatggctcccagccaccatcttcaagtaccagtctagcgcaatatgacagcaactcaaagaaaatctatggctcccagccaaacttcaacatgcagtatattccaagggaagacttccctgactggtggcaagtaagaaaactgaaaagtagcagcagcagtgaagatgttgcaagcagtaaccaaaaagaaagaaatgtgaatcacaccacctcaaagatttcatgggaattccctgagtcaagttcatctgaagaagaggaaaacctggatgattatgactggtttgctggtaacatctccagatcacaatctgaacagttactcagacaaaagggaaaagaaggagcatttatggttagaaattcgagccaagtgggaatgtacacagtgtccttatttagtaaggctgtgaatgataaaaaaggaactgtcaaacattaccacgtgcatacaaatgctgagaacaaattatacctggcagaaaactactgttttgattccattccaaagcttattcattatcatcaacacaattcagcaggcatgatcacacggctccgccaccctgtgtcaacaaaggccaacaaggtccccgactctgtgtccctgggaaatggaatctgggaactgaaaagagaagagattaccttgttgaaggagctgggaagtggccagtttggagtggtccagctgggcaagtggaaggggcagtatgatgttgctgttaagatgatcaaggagggctccatgtcagaagatgaattctttcaggaggcccagactatgatgaaactcagccatcccaagctggttaaattctatggagtgtgttcaaaggaataccccatatacatagtgactgaatatataagcaatggctgcttgctgaattacctgaggagtcacggaaaaggacttgaaccttcccagctcttagaaatgtgctacgatgtctgtgaaggcatggccttcttggagagtcaccaattcatacaccgggacttggctgctcgtaactgcttggtggacagagatctctgtgtgaaagtatctgactttggaatgacaaggtatgttcttgatgaccagtatgtcagttcagtcggaacaaagtttccagtcaagtggtcagctccagaggtgtttcattacttcaaatacagcagcaagtcagacgtatgggcatttgggatcctgatgtgggaggtgttcagcctggggaagcagccctatgacttgtatgacaactcccaggtggttctgaaggtctcccagggccacaggctttaccggccccacctggcatcggacaccatctaccagatcatgtacagctgctggcacgagcttccagaaaagcgtcccacatttcagcaactcctgtcttccattgaaccacttcgggaaaaagacaagcattgaagaagaaattaggagtgctgataagaatgaatatagatgctggccagcattttcattcattttaaggaaagtagcaaggcataatgtaatttagctagtttttaatagtgttctctgtattgtctattatttagaaatgaacaaggcaggaaacaaaagattcccttgaaatttagatcaaattagtaattttgtttatgctgctcctgatataacactttccagcctatagcagaagcacattttcagactgcaatatagagactgtgttcatgtgtaaagactgagcagaactgaaaaattacttattggatattcattcttttctttatattgtcattgtcacaacaattaaatatactaccaagtaaaaaaaaaaaaaaaa

SEQ ID NO: 26136 - DNA, 2987 bp, Homo Sapiens
gttttgctgaacacttttttttaaaaaaggaaaaagaaaaggagttgcttgatgtgagagtgaaatggacgtaagattttatccacctgtagcccagcccgccgctgcgcccgacgctccctgtctgggaccttctccctgcctggacccctactattgcaacaagtttgacggtgagaacatgtatatgagcatgacagagccgagccaggactatgtgccagccagccagtcctaccctggtccaagcctggaaagtgaagacttcaacattccaccaattactcctccttccctcccagaccactcgctggtgcacctgaatgaagttgagtctggttaccattctctgtgtcaccccatgaaccataatggcctgctaccatttcatccacaaaacatggacctccctgaaatcacagtctccaatatgctgggccaggatggaacactgctttctaattccatttctgtgatgccagatatacgaaacccagaaggaactcagtacagttcccatcctcagatggcagccatgagaccaaggggccagcctgcagacatcaggcagcagccaggaatgatgccacatggccagctgactaccattaaccagtcacagctaagtgctcaacttggtttgaatatgggaggaagcaatgttccccacaactcaccatctccacctggaagcaagtctgcaactccttcaccatccagttcagtgcatgaagatgaaggcgatgatacctctaagatcaatggtggagagaagcggcctgcctctgatatggggaaaaaaccaaaaactcccaaaaagaagaagaagaaggatcccaatgagccccagaagcctgtgtctgcctatgcgttattctttcgtgatactcaggccgccatcaagggccaaaatccaaacgctacctttggcgaagtctctaaaattgtggcttcaatgtgggacggtttaggagaagagcaaaaacaggtctataaaaagaaaaccgaggctgcgaagaaggagtacctgaagcaactcgcagcatacagagccagccttgtatccaagagctacagtgaacctgttgacgtgaagacatctcaacctcctcagctgatcaattcgaagccgtcggtgttccatgggcccagccaggcccactcggccctgtacctaagttcccactatcaccaacaaccgggaatgaatcctcacctaactgccatgcatcctagtctccccaggaacatagcccccaagccgaataaccaaatgccagtgactgtctctatagcaaacatggctgtgtcccctcctcctcccctccagatcagcccgcctcttcaccagcatctcaacatgcagcagcaccagccgctcaccatgcagcagccccttgggaaccagctccccatgcaggtccagtctgccttacactcacccaccatgcagcaaggatttactcttcaacccgactatcagactattatcaatcctacatctacagctgcacaagttgtcacccaggcaatggagtatgtgcgttcggggtgcagaaatcctcccccacaaccggtggactggaataacgactactgcagtagtgggggcatgcagagggacaaagcactgtaccttacttgagaatctgaacacctcttctttccactgaggaattcagggaagtgttttcaccatggattgctttgtacagtcaaggcagttctccattttattagaaaatacaagttgctaagcacttaggaccatttgagcttgtgggtcacccactctggaagaaatagtcatgcttctttattattttttttaatcctttatggacattgtttttcttcttccctgaaggaaatttggaccattcagattttatgttggttttttgctgtgaagtgctgcgctctagtaactgccttagcaactgtagatgtctcggataaaagtcctggattttccattggttttcataatggatgtttatatgaaactactaaagactttttaaatggcttgatgtagcagtcatagcaagtttgtaaatagcatctatgttacactctcctagagtataaaatgtgaatgtttttgtagctaaattgtaattgaaactggctcattccagtttattgatttcacaataggggttaaattggcaaacattcatatttttacttcatttttaaaacaactgactgatagttctatattttcaaaatatttgaaaataaaaagtattcccaagtgattttaatttaaaaacaaattggctttgtctcattgatcagacaaaaagaaactagtattaagggaagcgcaaacacatttattttgtactgcagaaaaattgcttttttgtatcactttttgtgtaatggttagtaaatgtcatttaagtccttttatgtataaaactgccaaatgcttacctggtattttattagatgcagaaacagattggaaacagctaaattacaacttttacatatggctctgtcttattgtttcttcatactgtgtctgtatttaatctttttttatggaacctgttgcgcctatttatgaaataataaatataggtgtttgtaagtaaatttgttagtatttgaaagaggtttctttgatgttttaacttttgctggcaaaaaaaaattcacgcttggtgtgaatactttattatttagtttttacagtaacatgaataaagccaaacctgcttttcatttagcagcaaattaaagtaaccagtccttatttctgcatttctttggttgatgcaaacaaaaaactattatatttaagaactttatttcttcatacgacataacagaattgccctccaagtcacacaagctccaagactaaacaaacagacaggtcctctgtcttaaaaaggttacttcttggttctcagctggttctagtcaattctgaaccaccaccccccgacccccgcaaaaaaaaaaaaaaa

SEQ ID NO: 26137 - DNA, 2148 bp, Homo Sapiens
cttcgagccgccacgtaatgccacgtccccgcgcatgcgcatcttggccgctgctggcggctgtttccgggcttagagggctggagtggccgccgagttggaggcggtggtggcagcagtaggagtgtgtagagtgcgggattgggggccaggccctgcggagggcgggggaagttgtcttcttttttttccggaggggccggtaaacctggtggctgaacggcaagatgaatttcctccgcggggtaatggggggtcagagtgccggaccccagcacacagaagccgagacgattcaaaagctttgtgacagagtagcttcatctactttattggatgatcgaagaaatgctgttcgtgctctcaaatcattatctaagaaataccgcttggaagtgggtatacaagctatggaacatcttattcatgttttacaaacagatcgttcagattctgaaataataggttatgctttggacacactatataatataatatctaatgaagaagaagaagaagtagaagaaaattccacaagacagagtgaagatttgggaagccaatttacagaaattttcattaagcagcaggaaaatgtcactcttctgttatctttattggaggagtttgatttccatgtccgctggcctggtgtgaagcttcttacttctcttttaaaacaactagggcctcaggtgcaacaaattattttagtcagtcctatgggtgtttcaagattgatggacttactagcggattccagggaagttatacgtaatgatggcgtcttactactgcaggcactaacaagaagcaatggtgcaatccagaaaattgttgcttttgaaaatgctttcgagagactactggacattatttcagaggaggggaacagtgatggaggtatagtagttgaagattgtttgattttgctccaaaacttattaaaaaacaacaactccaatcaaaattttttttaaagaaggctcatatattcaacgtatgaaaccttggtttgaagttggagatgaaaattctggctggtctgcacagaaagtgaccaatctacatctaatgctacagcttgttcgtgtattggtatctcccaccaaccctcctggtgctaccagtagctgccagaaggctatgttccagtgtgggttattgcagcagctttgtactatcctaatggctactggggttcctgctgatatcctgactgagaccataaatactgtatcagaagttattcgaggctgccaagtaaaccaagactactttgcatctgtaaatgcaccttcaaacccaccaagaccggcaattgtagtacttctcatgtccatggttaatgaaaggcagccatttgttttgcgctgtgctgttctctattgtttccagtgtttcttgtataaaaaccaaaaaggacaaggagaaatcgtgtcaacacttttaccttctaccattgatgcaacaggtaattcagtttcagctggccagttattatgtggaggtttgttttctactgattcactttcaaactggtgtgctgctgtggcccttgcccatgcgttgcaagaaaatgccacccagaaagaacagttgctcagggttcaacttgctacaagtattggcaaccctccagtttctttacttcaacagtgcaccaatattctttcacagggaagcaaaatacaaacaagagttggattattaatgttgctttgtacctggctaagcaattgtcccattgcagtaacgcattttcttcacaattcagccaatgttccattccttacaggacaaattgcagaaaatcttggagaagaagagcagttggtccaaggcttatgtgcccttttgttgggcatttcgatttatttcaatgataactcacttgagagctacatgaaagagaagctaaaacaactgattgagaagaggattggcaaagagaatttcatagagaaactaggatttattagcaaacatgagttgtattccagagcatctcagaaaccccagccaaactttcccagtccagaatacatgatatttgatcatgagtttacgaagctggtaaaagaacttgaaggtgttataactaaggctatttataagtccagtgaagaagataaaaaaaaaaaaaaa

SEQ ID NO: 26138 - DNA, 1149 bp, Homo Sapiens
ggggaatgataagcaaaggatagctgtggttgcattttttcctgagaatggagtaagtgattttcaaaaagcacaaataattggcagtcagagagaaaatggatgggcagtgggtgttgagtcagattttgatttttgccagacagctataaaaagaatttttaatgattctgattttactggctttcttactgtggaatatggaacaatcttaagttcggctaactccataaactggggccgactacttccgcaggtagtttatcatgcttccgcatatcttgatcttgttagtcaaggatttatttcttttggaagcccagtcgatgtctgtattcccacaggaaactttggtaacattttagcagcagtgtatgccaaaatgatgggaatcccgattcgaaaatttatctgtgcctctaatcagaaccatgttttgactgattttataaaaacaggacattatgatctaagggaaagaaaactagcacaaaccttttcaccgtcaatagatattctcaaatcttcaaacctagaacgacatttacacttgatggctaataaagatggacagctaatgacagaattatttaatcgattagaaagtcagcatcatttccagatagaaaaggctctagttgagaaacttcagcaggattttgtagctgactggtgctctgagggagagtgcctagcagctattaactccacctataatacttcagggtatattttggatccacacactgctgttgcaaaagtggttgcagatagggtgcaagacaaaacttgccctgtgattatctcatctacagcccattactcaaagtttgcacctgctatcatgcaggctttaaagattaaagaaatcaatgagacttcatcaagtcagctctatttgctgggttcatacaatgcattacctccactgcatgaggctttattagagagaacaaaacagcaagagaagatggagtaccaggtctgtgcagctgatatgaatgtcttgaagagtcatgtggaacaacttgtccaaaatcaattcatatgaaagctttcagagtaaatttttttttctagctataagcatgcaataataaatctcaaacactgatttgtaaaaaaaaaaaaaaaaaaaaaaaaaaaaaa

SEQ ID NO: 26139 - DNA, 1134 bp, Homo Sapiens
gggtatgagagagttaagagagaatatcctaaagagagtctgtgatcatactaattttcacctttaatgctaggaatggatatgatagacagtaaagagcatctatgataaggcttccttagtgtgaaagtaaacttaagtgcccaagtcatggagacttgaaaagggtaaacctgtttcacctcccaaatttatatattcaaagtatttacttaaaattcagaagccagaagttcatgtcatgattaccaggaagttcaggccagaatgaatccctagagaagccaggccaagcctggataattgcagctggatgaccctggcccgaaagtcacagttcagttgccttattcctagttcaggcttactatctagaacctcatgctagcttaggttgcatgtttacattgctgcagtgtctttactggaagcttagttggatcgaaatggacaccgagatggagatgcttctggctagatttcgcagaaccccaggagacctgcatttagaccactctgtccatttgtgtgcccacccccacccccagggtctaagtgtagactccaagaggagcagcccagagcttggaggagaggtgtgtctggggcaccactggtgggtggtgctgctcttctttttgttgtagttaatgcggtgtcttttaatggactctcaggcctcccagacagccttgttcctttaaggcagaagctcttcttcattgtgtacctcctgggattcatgaggtgtgagatttggcctgcttgactttgaattcaagtttttcaagtgactctcagtgtcagaagaagcatttcatgctgtccacatgtggtatgtccacagctcaccttcaaaggcttagatgtagccatcacagagagtggtattttattaagaacccaagtcccagcctgaccaacatggtgaaaccccatctctactaaaaatacaaaaattagccgggcgtggtggcacgcgcctatactcccagctacttaggaggctgaggcaggagaatcacttgaacccgggaggcagaggttgcagtgagccaagatcacaccactgcactctagcctgggcgacagtgagactccaccccaaaaaaaaaaaaaaaaaaaaaaaaaaaa

SEQ ID NO: 26140 - DNA, 973 bp, Homo Sapiens
cggagctggaaatgcagctattgaggtcttcgaatgctgcggagctggaggcggaggcagctggggaggtccgagcgatgtgaccaggccgccatcgctcgtctcttcctctctcctgccgcctcctgtctcgaaaataacttttttagtctaaaaaaagaaagacaaaagtagtcgtccgcccctcacgccctctcttcctctcagccttccgcccggtgaggaagcccggggtggctgctccgccgtcggggccgcgccgccgagccccggccgccccgggccgcccccgcacgccgcccccatgcatcccttctacacccgggccgccaccatgataggcgagatcgccgccgccgtgtccttcatctccaagtttctccgcaccaaggggctcacgagcgagcgacagctgcagaccttcagccagagcctgcaggagctgctggcagaacattataaacatcactggttcccagaaaagccatgcaagggatcgggttaccgttgtattcgcatcaaccataaaatggatcctctgattggacaggcagcacagcggattggactgagcagtcaggagctgttcaggcttctcccaagtgaactcacactctgggttgacccctatgaagtgtcctacagaattggagaggatggctccatctgtgtgctgtatgaagcctcaccagcaggaggtagcactcaaaacagcaccaacgtgcaaatggtagacagccgaatcagctgtaaggaggaacttctcttgggcagaacgagcccttccaaaaactacaatatgatgactgtatcaggttaagatatagtctgtggatggatcatctgatgatgatggataaatttgatttttgctttgggtgggctcctcttggggatggattatggaatttaaaccatgtcacagctgtgaagatctggcacaagatagaatggtaaaaaaaaaaaaaaaaaa

SEQ ID NO: 26141 - DNA, 1460 bp, Homo Sapiens
ggggagccctgaggagccggaccgatgtggaaactgctgcccgccgcgggcccggcaggaggagaaccatacagacttttgactggcgttgagtacgttgttggaaggaaaaactgtgccattctgattgaaaatgatcagtcgatcagccgaaatcatgctgtgttaactgctaacttttctgtaaccaacctgagtcaaacagatgaaatccctgtattgacattaaaagataattctaagtatggtacctttgttaatgaggaaaaaatgcagaatggcttttcccgaactttgaagtcgggggatggtattacttttggagtgtttggaagtaaattcagaatagagtatgagcctttggttgcatgctcttcttgtttagatgtctctgggaaaactgctttaaatcaagctatattgcaacttggaggatttactgtaaacaattggacagaagaatgcactcaccttgtcatggtatcagtgaaagttaccattaaaacaatatgtgcactcatttgtggacgtccaattgtaaagccagaatattttactgaattcctgaaagcagttgagtccaagaagcagcctccacaaattgaaagtttttacccacctcttgatgaaccatctattggaagtaaaaatgttgatctgtcaggacggcaggaaagaaaacaaatcttcaaagggaaaacatttatatttttgaatgccaaacagcataagaaattgagttccgcagttgtctttggaggtggggaagctaggttgataacagaagagaatgaagaagaacataatttctttttggctccgggaacgtgtgttgttgatacaggaataacaaactcacagaccttaattcctgactgtcagaagaaatggattcagtcaataatggatatgctccaaaggcaaggtcttagacctattcctgaagcagaaattggattggcggtgattttcatgactacaaagaattactgtgatcctcagggccatcccagtacaggattaaagacaacaactccaggaccaagcctttcacaaggcgtgtcagttgatgaaaaactaatgccaagcgccccagtgaacactacaacatacgtagctgacacagaatcagagcaagcagatacatgggatttgagtgaaaggccaaaagaaatcaaagtctccaaaatggaacaaaaattcagaatgctttcacaagatgcacccactgtaaaggagtcctgcaaaacaagctctaataataatagtatggtatcaaatactttggctaagatgagaatcccaaactatcagctttcaccaactaaattgccaagtataaataaaagtaaagatagggcttctaagcagcagcagaccaactccatcagaaactactttcagccgtctaccaaaaaaagggaaagggaaaaaaaaaaaaaaaaaaaaaaaaaaaaaaa

SEQ ID NO: 26142 - DNA, 1778 bp, Homo Sapiens
gggggtgggtaacttgcttttgggagccagcggtatggcgtcgggctgcaagattggcccgtccatcctcaacagcgacctggccaatttaggggccgagtgcctccggatgctagactctggggccgattatctgcacctggacgtaatggacgggcattttgttcccaacatcacctttggtcaccctgtggtagaaagccttcgaaagcagctaggccaggaccctttctttgacatgcacatgatggtgtccaagccagaacagtgggtaaagccaatggctgtagcaggagccaatcagtacacctttcatctcgaggctactgagaacccaggggctttgattaaagacattcgggagaatgggatgaaggttggccttgccatcaaaccaggaacctcagttgagtatttggcaccatgggctaatcagatagatatggccttggttatgacagtggaaccggggtttggagggcagaaattcatggaagatatgatgccaaaggttcactggttgaggacccagttcccatctttggatatagaggtcgatggtggagtaggtcctgacactgtccataaatgtgcagaggcaggagctaacatgattgtgtctggcagtgctattatgaggagtgaagaccccagatctgtgatcaatctattaagaaatgtttgctcagaagctgctcagaaacgttctcttgatcggtgaaaccataaggagcccagtgttcctgttcatgaaatctcccttttactggaaaacaggaatattgactaccaaatcacaatgcaattgaagccgtactgcttttttgagcagttattcattccagtgattaaaactgattgtgcagaatattctaagaggtcagaaattggtgtgtataactacatttttagtgatgcaatttattgattagtgagtaagatactgtttttattgagagatttgatttttataaagtaaaaatacggctgcattagggttacaaacagaaaagtgtcttaatgtctaaggagggcatattagctacactacaaaaacaaattttgtctgtacttctgaaaagaattttgttgtttctcagctgttttccaaaagcaaaggaagtctttatggtttttttctatttcatgttattgtgatttgtttataagtttgggtggggtgcataccatattcttggttcttaaaatctatcacttttcaccttacacttgatgtgtgaaaactataaaaacaatgtgtgaaacccaggggttctaaaatacaagcatagattttatcagggtgttttgtcaaagcaggttattcagtgattcctccccaccattcttaagaacgttaaataatgctgttgtgttagctctgagtagaaaggaaaaagtaaaacctctgtttggaggtaatattgggttgaattctgactgcccctttctagctggacctttaacaaatcacccaatcttttttgtgtttctctaaagtcatttatacattaaatgtaattatagcaactgtggggttctgttgagaattaagagctaacactatatatgtaaagtttccagtactagtcccagaatttagaatatgctcaacacaaagtaaacagcattatataagtttatatttttgtgagttataaagtactttgatatattctcattaaatctgtaaatcacctctataagtaagtggtaataataaagcagatatttttgtccccatttataaaaaaaaaaaaaaaaaaaaaaaaaaaaaa

SEQ ID NO: 26143 - DNA, 690 bp, Homo Sapiens
gggggcactcttgtctgcttacgagggctcctcccttcagctttggtccctcggggcgtctgggcagcctacgctttccggataaaaatggcagaatgaaagaattatgagtggaactagagaataggaaagacatgaaccaacgcccaaaatgagaaagaaggacatataaagaaaaagacaaatacaagtgaaaaaaatagactaatggattaacgtccctgtcgtgtgacattttctgactatggaaatgatattagacaaaaagcaacttcaagtggttttcttatttgagttcaaaatgggtcataacgcagcagagataacttgaaacatgaacagcgcatttggcccaggaactactaacgaacatacagggcagctgtgattcaagaagttttgcaaagcagactagagccttgaatatgaggaacacagtggccagccattggatgcttcacttcttgaagcatcttgacagctttttgcaggtgaaatgcttccacaccagcaggatgcagaaaaatgctttccaagagtttgttgaatccagaagcatggatgtttatgctgcaggaataaacaaatttatttctcgttggcaaaaaagtgttgattgtaatggttcctattttgattaataaagatgtgtttgagccgaaaaaaaaaaaaaaaaaaaaaaaaaaaaaa

SEQ ID NO: 26144 - DNA, 1474 bp, Homo Sapiens
gggggaagaggacggctttctggtatggcgcggcctttgtctcttgctgccgctggagctccagatctcttgttcactgctctgtgttctctgctcatagaggcccagcctctgaggccctttgacctgcaggtattgggagatccacagccaagagccaggaccccctagaagtctagaaatggtattgttctctccaagccagaactgatcacctgtctggagcaaggaaaaaaacctctgaccgtgaagagacatgagatgattgccaaacccccagagatggagtctcgctctgtcacctagacggaagtgcagtggtgcgatctcagctcactgcaacctctgccttttgggttcaagaaattctcctgcttcagcctctctagtaactcggattacaggtgcccgccaaaacgctcagctaattttctgtatttttagtaagatagcgtacattatgttggccaagctggtctcaaactcctgacctcaggtgatttgcccaccttggcctcccaaagtgctaggattacaggcttaagccactgcacctggcctgtgttacatattttgtatatagatatataaatgaggaacattaataacattttaaaataatgactacatctttgttttccaccaacaaccaacatgggtttcatttttattgcatcatcaacagagttggcattttttaaaaaatatatagtggccattctaatgggtgtgagatgatttcgctgtcattgtgtttttttttcatttctctgcaaatgagtaattttgtgcatcctgtcaaatgtttcttcccatttgtgtagttttttgatgaaagttttgtttgttcatttataaatcaagttattgaactttatggtttagtttttagagttgttgatatatttttaatattaacttttttcacatgtaatttgcaaatatattcacccattttctaaatatgttgtcattctcgaattttcttttgatgtacagaaattttgacatctactatagttaatggtttctattcttgtatttgttgctcatgcatttaatgtcatatctaagaaaatggtgccaagacaatgtcatgtctttttcctgtattttttctgaaagatttgttagttttttgtgtctaagtattttatttaaaatatatttttgtatcattcaagaaaataatccaactttattttatcgatgttgatattcagttttcaacaccattttttgaagagatgatttttctctattttgtactcatggcaaccttttggaagatcatttgatcatatacagaagggttcattccggagctctctattctgttctttcatctgtttatctttgtgccagtatcacattgtttatgttactgtagcttttaactgtaggttgtattaacatctttgaaaaataaagttttttgacccctgaaaaaaaaaaaaaaaaaaaaaaaaaaaaa

SEQ ID NO: 26145 - DNA, 1772 bp, Homo Sapiens
agcgctgcaaggacaaccggctggggtccttgcgcgccgcggctcagggaggagcaccgactgcgccgcgtaagtgccgcctgccctgcgtgggtcgtgccagctcagcgggacaggtcctcgcctcggtccctcggacttagggagcgcggggcagaccctgagagatggttggtgccatgtggaaggtgattgtttcgctggtcctgttgatgcctggcccctgtgatgggctgtttcgctccctatacagaagtgtttccatgccacctaagggagactcaggacagccattatttctcaccccttacattgaagctgggaagatccaaaaaggaagagaattgagtttggtcggccctttcccaggactgaacatgaagagttatgccggcttcctcaccgtgaataagacttacaacagcaacctcttcttctggttcttcccagctcagatacagccagaagatgccccagtagttctctggctacagggtgggccgggaggttcatccatgtttggactctttgtggaacatgggccttatgttgtcacaagtaacatgaccttgcgtgacagagacttcccctggaccacaacgctctccatgctttacattgacaatccagtgggcacaggcttcagttttactgatgatacccacggatatgcagtcaatgaggacgatgtagcacgggatttatacagtgcactaattcagtttttccagatatttcctgaatataaaaataatgacttttatgtcactggggagtcttatgcagggaaatatgtgccagccattgcacacctcatccattccctcaaccctgtgagagaggtgaagatcaacctgaacggaattgctattggagatggatattctgatcccgaatcaattatagggggctatgcagaattcctgtaccaaattggcttgttggatgagaagcaaaaaaagtacttccagaagcagtgccatgaatgcatagaacacatcaggaagcagaactggtttgaggcctttgaaatactggataaactactagatggcgacttaacaagtgatccttcttacttccagaatgttacaggatgtagtaattactataactttttgcggtgcacggaacctgaggatcagctttactatgtgaaatttttgtcactcccagaggtgagacaagccatccacgtggggaatcagacttttaatgatggaactatagttgaaaagtacttgcgagaagatacagtacagtcagttaagccatggttaactgaaatcatgaataattataaggttctgatctacaatggccaactggacatcatcgtggcagctgccctgacagagcgctccttgatgggcatggactggaaaggatcccaggaatacaagaaggcagaaaaaaaagtttggaagatctttaaatctgacagtgaagtggctggttacatccggcaagtgggtgacttccatcaggtaattattcgaggtggaggacatattttaccctatgaccagcctctgagagcttttgacatgattaatcgattcatttatggaaaaggatgggatccttatgttggataaactaccttcccaaaagagaacatcagaggttttcattgctgaaaagaaaatcgtaaaaacagaaaatgtcataggaataaaaaaattatcttttcatatctgcaagatttttttcatcaataaaaattatccttgaaaaaaaaaaaaaaaaaaaaaaaaaaaaaaaaaaaaaaa

SEQ ID NO: 26146 - DNA, 2300 bp, Homo Sapiens
gccgccgccgccgccgccgccgcgccgcggcttgagggcgggaggctgggggagggtagcggagccggcgccgccgccatgttgggtctgaagcggctgctgtaggcgccgacggagcgagcgggcgtgcggagcgggcgacagtggcgtgggatctgcctctctgcgagcagctgggagcggcggcggcggcgccatgagcgggggcaccccttacatcggcagcaagatcagcctcatctccaaggcggagatccgctacgagggcatcctctacaccatcgacaccgaaaactccaccgtagcccttgccaaagttcgatcctttggtacagaagacagaccgacagatcgtccaataccacctcgagatgaagtctttgaatacattatattccgtgggagtgacattaaagaccttactgtttgtgagccaccaaaaccacagtgttctttgcctcaagacccagctattgttcagtcctcactaggctcatcgacttcttcattccagtccatgggttcttatggacctttcggcaggatgcccacatacagtcagttcagtccgagttccttagttgggcagcagtttggtgctgttggtgttgctggaagctctttgacatcctttggaacagaaacatcaaacagtggtaccttaccccaaagtagtgcggttggttctgcctttacacaggatacaagatctctaaaaacacagttatctcaaggtcgctcaagccctcagttagaccctttgagaaaaagcccaaccatggaacaagcagtgcagaccgcctcagcccacttacctgctccagcagctgttgggagaaggagtcctgtatcaaccaggcctttgccatctgccagccaaaaggcaggagagaatcaggagcacaggcgagctgaagtacacaaagtttcaaggccagaaaatgagcaactcagaaatgataacaagagacaagtagctccaggtgctccttcagctccaaggagagggcgtgggggtcatcggggtggcaggggaagatttggtattcggcgagatgggccaatgaaatttgagaaagactttgactttgaaagtgcaaatgcacaattcaacaaggaagagattgacagagagtttcataataaacttaaattaaaagaagataaacttgagaaacaggagaagcctgtaaatggtgaagataaaggagactcaggagttgatacccaaaacagtgaaggaaatgccgatgaagaagatccacttggacctaattgctattatgacaaaactaaatccttctttgataatatttcttgtgatgacaatagagaacggagaccaacctgggctgaagaaagaagattaaatgctgaaacatttggaatcccacttcgtccaaaccgtggccgtgggggatacagaggcagaggaggtcttggtttccgtggtggcagagggcgtggtggtggcagaggtggtaccttcactgcccctcgaggatttcgcggtggattcagaggaggtcgtgggggccgggagtttgcggattttgaatataggaaagacaacaaagttgctgcatagtctacaaacaagtctctgaaaataggtgaatttctagctcttcatggtcctgaacattgatttcagtctttgcaaagaatgaagaagtgaattcgctgtacatttgtcaccagcactgggtttttgttttttgtttgtttttccgcttaatttcaaagataaaatgcagttacttttgggggtggaaggctcatcttaaaacatgagcattaaatatatttggaatagcagaaggttaagtaatttcttatgtatagttaaactaaagcagtacttcagtgggacttaacaagtattttttcatcactgaaaggttttttttttttatcactaaattgtatttggcaattgcaagttgcctgcagatagggccgtgatactgtgttttgagccacagaaggttgtgtgtgtgtgtgtgtgtgtgtgtgtgtgtatgtgtgtgtctttttcctcctttcttttggggaatcctgtaatatgaggtagcttatttcgtcaattaattagggtgctggatggtagagaattttgtcagtcaactatgtacacacagtaaatactgtttcttaggcaaaggtaacttttttatatagttgtaaaattccattatattccattgccaaagaaacattaagaactttgtatagctgtataaaaagcaactaattttttaaagaataaacattttaaagtcagcaaaaaaaaaaaaaaa

SEQ ID NO: 26147 - DNA, 2073 bp, Homo Sapiens
ggggcgtcccgggatatttggaggataaagggtgatgaccacacctgccggctccggcagcggcttcggctccgtgtcctggtggggcctgtccccggcgctggacctgcaggctgaaagtcctcctgtggacccagactcccaggccgatacagtgcacagcaaccccgagctagatgtgctgcttctgggctctgtggatggacggcacctgctgcggaccctgtcccgagcgaagttctggcctcgcaggaggttcaacttctttgtgctggagaataatctggaagctgtggcccgacacatgctgatcttcagcctagccctggaggaaccggagaagatggggctgcaagagcgaagcgagaccttcctggaagtgtgggggaacgcgctgctgcgcccgccagtggccgccttcgtgcgtgcccaggccgacctgctggcgcacctggtccccgagcccgaccgcctggaggaacagctgccctggctcagcctccgcgccctcaagttccgcgagcgggatgccctggaggccgtattccgcttctgggctggcggcgagaaagggccccaggcgttccccatgagccgcctctgggactcgcgcctgcgccactacctgggctcccgctacgacgcccggcgcggtgtcagcgactgggacctgcgcatgaagctgcatgaccgcggggctcaagtcattcacccccaggagttccgacgctggcgggacacaggcgtcgcctttgaactcagggactccagcgcctatcatgtgcccaaccggaccctggcgtccggtcgcctcctgagctaccgtggggagcgcgtggcagcgcgcgggtactggggggacatcgccacggggcccttcgtggccttcggcatcgaagcggacgacgagagcctcctgcggacgagcaacggccagccagtcaagacggccggggagatcactcaacacaacgtgacggagctgctccgcgacgtggccgcctgggggcgcgcgagagccaccgggggggacctggaggagcagcagcacgcggagggaagcccggagccagggactccagcagccccgaccccggaatctttcaccgtccacttcctgccgctcaattctgctcagactctccaccacaagagctgctacaacggccgattccagctcctctatgtggcctgtggtatggtccatcttctcatccctgagcttggggcctgtgtggcacccggagggaacttgattgtggaattagcccggtacctggtggacgtgcggcaggagcagctgcagggattcaacacccgggtcagggagctagctcaggcagctggatttgctccacagaccggggccaggccttcagagaccttcgcacgtttctgcaagtcccaggaatcagctctgggcaacactgtcccagctgtggaacccggaactccgccccttgacatcctggcccagcctcttgaagccagcaacccagcccttgagggcctgacccagcctctgcagggtgggaccccacactgtgagccctgccagctgccctctgagtctccaggttcactctcagaggttctggctcagcctcagggggccttggctccgcccaactgtgagtcagactccaaaactggagtctgacccaacccctagacaccccttatctccaacttccaaagtcaggttgtaggatgagaacccgctgataccattctaagtccgctgctagagtcctcaattttattctaatcattcccactcagtacccgccacccccaccccgggagtgttggtagactttcaaattccatttctgagattctatggtctattcctagaattctagattgttctctcagaattccaaattccacttctgaggctctaagcccagcctaggatctgacactgagtctcaggcccttgactttggcccccttgttcccaggcaccctgtggctgactaggggctggggtgtctcctcaccagggcctggtcagcacccagatggttcaagtaaagcaagttgtgtccaccaaaaaaaaaaaaaaaa

SEQ ID NO: 26148 - DNA, 1810 bp, Homo Sapiens
gttccccttcctctatgaaggaataagttggaccaagggaagtcggggacgtaaaaaatgaagcaaaacaatgccagggtgtctcccgctttactcttcaggaatggtgtcccaagttggaggctttgtgtcagctgcaaatcctaccagttatgtccaagaatggctttccctcgggcaggtggcagcggccatctcccactgggaatatggcgtagtatctccggtccattccttggatgctaaggactgcgggaatgagggagtcagataaagaacaaacctcgaaacgaacagttaaattgaaatgctatgtgcctgacccaatggtaggcacatagtaggcactcaactcatatgtttaattgaattgaaaatatcccttaggaaaaaaaaaacacacaaaaaaccacaagagccccagccagtttactccaggtagatttccacaatatgcaaagtggtggtggggtcaagacagatgacaccagcactttaaactctttgtgtgggtatgcgtgggtgtatgtttgggaagaaaaacaaaggtgcagactatcttcctttttttcttcttcagcctccatccctggcctcctcccctcacacacactggacttggtacaaaatgtcggtgtggtcctagatgaagcattggggtgggggagggagagggagctttgtgttaagtgcctactggaaatgcactgtggggttttttcctgtatgggaaaccatttatgccaagcttttccccatttcccatatttatctcatctggttagctgcctctgcttccagctttgtgtaattctctttgccagctgcacaaagctgattttttccaaagtctaaagactgagctcacctggctagattgttgtgtgttttgttgaattttttcataatgtaatgccgtatttattgtttttaaaatgaaaggaatactaataagtcttaaaagttccttcatgcataagatttttttccagttactgggtttaactggtgtacattaattagatgtccatactgtattttgtttgcattaagtaattttctttttgacttagtatccggcacacaaagtgggttagtactacagtatttgcgttactttaagtactaagtatgcaggtttcctggtaccattgagttgctgctattaaagctcacacacgaaatggctaaaagttacaagtgtgcaaattatgactgcgtgagccttagaaaataaaatgtataaagggcaacacatgagctgtcaaacagtgttaggagtgtgtttatatgtacagagttgtgcatagcaatcgttttatttaagttgatatgtagtctactcacattttcattatttagcaattttgtacaaaaatagcaattaatttgtaaacactgccagaatactttctagctgctttgtaattttttaagagtgttattttgtttttgtttttctgttctttgttgtggctcttgttttcatttttgttgtacgtgtagatctgtaaataaaattgcagtatttaaagcttaagctttcaggaaaaagaaaataagaattcagtgtgtgcatgacaactcgtgtgtatgagaaggagggatatgaaggaagatggcttgcagagtaagtcgggtggcaattgtcagggtgtgggaatttcttttcctacggggtacgtgattttgtaaaaaggaagtatttctcccaaaattgggagtaggcaaactactaatcagtttagctttgtgttgtatgctagtttaaaaaagaaaatatgtaatataatgtaaaaaaaaaaaaaaa

SEQ ID NO: 26149 - DNA, 2100 bp, Homo Sapiens
agcgtccgcccaaggtcgcgggccgcttggggagtcagcagcgcgccaggccccttcgggccccacacgcattaggtgccttcttgatgggtacggagtgaacgcgggcggcggcgggaccgaggcagcgcccagtttgtaaccgccgcgccgcccgtgcccgcgcgcgccacaccccagcgcgcttccggccgggccacgtgaccgcgcgtgcacgtgttccggcctctccgcttcgccgctccgaacctcctcctggtcgtcccggcattcgtccacgcggagccggcttgggcggggcccgggaggcggcggccggagaagccgcggagacgcgagcgccgagcgtcgcgagggagcaggcccgggcaggcaagcggcggcctccgccatgaaccccaggggcctgttccaggacttcaaccccagtaagtttctcatctacacctgcctgctgctcttctcggtgctgctgcccctccgcctggacggcatcatccagtggagctactgggccgtctttgcccccatatggctgtggaagcttctagtcgtcgcaggcgcctccgtgggcgcgggcgtttgggcccgcaaccctcgctaccgcaccgagggagaggcctgtgtggagttcaaagccatgctgatcgctgtgggcatccacctgctgctgctcatgttcgaagtcctggtctgcgacagggtggagaggggcacccacttctggctgctggtcttcatgcctctcttcttcgtgtcccccgtgtccgtggctgcctgcgtctggggctttcgacacgataggtcgctggagctggagatcctgtgctcggtcaacatcctgcagttcatcttcatcgccctaaagctggacaggattattcactggccgtggctggtggtgtttgtgcccctgtggatcctcatgtcgttcctttgcctggtcgtcctctattacatcgtctggtccctcctgttcctgcggtccctggatgtggttgccgagcagcggagaacacacgtgaccatggctatcagttggataacgattgtcgtgcctctgctcacttttgaggtcctgctggttcacagattggatggccacaatacattctcctacgtctccatatttgtccccctttggctttccttactaactttaatggccacaacatttaggcgaaaggggggcaatcattggtggtttggcattcgcagagacttctgtcagtttctgcttgaaattttcccatttttaagagaatatgggaacatttcatatgatctccatcacgaagatagtgaagatgctgaagaaacatcagttccagaagctccgaaaattgctccaatatttggaaagaaggccagagtagttataacccagagccctgggaaatacgttcccccccctcccaagttaaatattgatatgccagattaaactcctagagaggacccaggcacacacagactccacttggccttcgcctcttgttcattcatcccaaacctggaaatggaaacaggcttcaaacactcgtctcacgccgtgtttgagatcaccgcctcatcagtatgcatcatagatggaggtggtttcagtatgtgggtgtgtgtggtgtgtacctgggtaagagacttgctttccaggttcgcactttcaggtgtagctgggggcagtaagtcgaattgttttagtaggtcctcaaaaggaataaccacacagctgtttgtttaaatgctactgtacctatcaaaactattgtttaaaaagtatttttatacactgctaatctaaaattgtatttcagattgtgcctgtcataacaatagcaaatgtaaaaagttctctttcccaccacttgtttataaacctcatagttgatatttttagtgttcctactgttaaaatactctctccttgggctttgctgatactggtctttaatattctgataggtgaatttttctaatggaatgaacccatgcatatatagtatttatatgaatattttagcagtgtaatatgttgaattctagttctctgcattaccattattacgttaaagtattttttaaaaaaaaaaaaaaaaaaaa

SEQ ID NO: 26150 - DNA, 2054 bp, Homo Sapiens
gcgcggtggcctgacggtcgcaaggattacattcgcctgacccggcccggcttgaccctgcccgggcgcgccatgttcgcgcgtgggtcccggaggcgccgctccgggcgtgcgcctccagaggcagaggacccagaccggggccagccctgcaactcctgtagggagcagtgccctggcttcctgctccacggctggagaaagatctgccagcattgcaaatgcccgcgggaggagcatgcagtgcacgcggtgcctgtggacctggaacgcatcatgtgtcggctaatctcggacttccagcgccactccatctccgacgacgactcaggctgtgcatcggaggagtatgcctgggtgcccccaggccttaagccggagcaggtatatcaatttttcagctgcctcccagaggacaaggtcccctacgtcaacagtcctggggagaaatacaggatcaagcagctgctgcaccagctgcccccacacgacagtgaggcacagtactgcacagcactggaagaggaggaaaagaaagagctccgagcctttagccagcagcggaagcgggagaatctggggcgtggcatcgtgcgcatcttcccggtgaccatcactggggccatctgtgaggagtgcggaaagcagattggaggtggggacatcgcagtgtttgccagccgtgcaggcctgggtgcctgctggcacccacagtgcttcgtgtgtaccacgtgccaggaactgctggttgacctcatctacttctaccatgttggcaaggtctactgcgggcgtcaccatgccgaatgcctgcgtccacgctgccaagcctgtgacgagatcatcttctcccctgagtgcacggaggctgagggccgccactggcacatggatcacttctgctgctttgagtgtgaagcttcactaggagggcagcgctatgtcatgcgtcagagccgcccccactgctgcgcctgctacgaggcccgccacgcggagtactgtgatggctgtggggagcacatcggcctggaccaaggccagatggcttacgagggccagcactggcatgcctcagaccgctgcttctgctgtagtcgctgtgggcgggccctgctgggccgcccattcctgccacgccgaggcctaatcttctgctctcgagcctgcagccttgggtccgagcccacagctccagggccgagccgccgcagctggagtgccggccctgtcacagccccacttgcagcctccacagcctctttctctgctgtgaagggggcatcagagaccaccaccaaaggcaccagcacagagttagcgccagctacaggccctgaggagccctcccgctttctgagaggggctccccaccgccactccatgccggaactggggctccgcagtgtccccgagccgcccccagagtcccccggccagcctaacctgcgcccagatgatagtgccttcggtcgtcagagcaccccacgcgtcagcttccgcgaccctctggtgtctgaaggaggcccgcgccggaccctgagtgcacccccggcccagcgccgcaggccacgcagtcccccacccagggcccccagccgtcgccgccaccatcatcataatcaccatcaccatcacaaccgccacccaagcagacgtcgccactatcaatgtgacgcgggatcagggtcagactcggaatcttgctccagctcgccctccagttccagttccgaatcatcagaggatgatggcttcttcctaggagagcgcatccctctgcccccgcatttgtgcaggcccatgcctgctcaggacactgcaatggagaccttcaactccccatctttatcgctccccagggactctcgcgcagggatgcctcgtcaggcccgagacaagaactgcatcgtggcttgaaggcaggccgtcctggagggggctccattctccagtcagagtagatgatgaggcccatgcccctcacccccacgccccgcccctacaacctaagtcataaatcctcttcctccctccttaaaaaaaaaaaaaaa

SEQ ID NO: 26151 - DNA, 2051 bp, Homo Sapiens
cggagaggaagcgccggaaacgggagaatgattccgcgtctgtaatccagaggaacttccgcaaacacctgcgcatggtcggcagccggagggtgaaggcccagacgttcgctgagcggcgcgagcggagcttcagccggtcctggagcgaccccacccccatgaaagccgacacttcccacgactcccgagacagcagtgacctgcagagctcccactgcacgctggacgaggccttcgaggacctggactgggacactgagaagggcctggaggctgtggcctgcgacaccgaaggcttcgtgccaccaaaggtcatgctcatttcctccaaggtgcccaaggctgagtacatccccactatcatccgccgggatgacccctccatcatccccatcctctacgaccatgagcacgcaaccttcgaggacatccttgaggagatagagaggaagctgaacgtctaccacaagggagccaagatctggaaaatgctgattttctgccagggaggtcctggacacctctatctcctcaagaacaaggtggccacctttgccaaagtggagaaggaagaggacatgattcacttctggaagcggctgagccgcctgatgagcaaagtgaacccagagccgaacgtcatccacatcatgggctgctacattctggggaaccccaatggagagaagctgttccagaacctcaggaccctcatgactccttatagggtcaccttcgagtcacccctggagctctcagcccaagggaagcagatgatcgagacgtactttgacttccggttgtatcgcctgtggaagagccgccagcactcgaagctgctggactttgacgacgtcctgtgaggggcagaggcctccgcccagtcaccatcaggccactccctctgcaccgggacctggggctgggccgcctcgtgctccccgggactgtgtggctccggtctcgcctggagccacttcagggcacctcagacgttgctcaggttccccctgtgggttccggtcctcgctgcacccgtggccgcagaggctgcagtccctgggggccgggaggatcccgccctgtggcccgtggatgctcagcggccaggcactgacctgccatgcctcgcctggaggctcagctgtgggcatccctccatggggttcatagaaataagtgcaatttctacacccccgaaacaattcaaagggaagcagcatttcttgttaactagttaagcactatgctgctagttacagtgtaggcaccccggcccagcagcccagcagcccacatgtgttcaggaccctccctgcccaccccctccctgccgtatcgatcaccagcaccagggtggcccgtgtgcgtggggccagcgtcgccgggctgcccagcctggctctgtctacactggccgagtctctgggtctgtctacactggccgagtctccgactgtctgtgctttcacttacactcctcttgccaccccccatccctgcttacttagacctcagccggcgccggacccggtaggggcagtctgggcagcaggaaggaagggcgcagcgtcccctccttcagaggaggctctgggtggggcctgctccccatccccccaagcccacccagcactctcattgctgctgttgagttcagcttttaccagcctcagtgtggaggctccatcccagcacacaggcctggggcttggcaggggcccagctggggctgggccctgggttttgagaaactcgctggcaccacagtgggcccctggacccggccgcgcagctggtggactgtaggggctcctgactgggcacaggagctcccagcttttgtccacggccagcaggatgggctgtcgtgtatatagctggggcgagggggcaggccccccttgtgcagagccaggggtctgagggcacctggctgtgttcccagctgagggagggctggggcgggggccgggcttggaacgatgtacgataccctcatagtgaccattaaacctgatcctccaccgcgaaaaaaaaaaaaaaaa

SEQ ID NO: 26152 - DNA, 2139 bp, Homo Sapiens
gcgggacccagcggagcgagccggctctcgctcctgcggactttgtcgctccactcgcgccactcccaattccttctaacttgttcgtgccaaccccagatgcagaagaaccacagcttccagacgggactggcagggaagggcctgcagcagctaggggcctggccaatccagagcctgccccagagcccaaggttttaagctctgcagcgtcactccctggctctgaactcccctcctccaggcctgagggttcccagggaggagagctttcgcgctgtagttcaatgagttcattatcacgtgaagtgagccagcattttaatcaggctcctggcgacctccctgctgcagggggccctcccagcggggccatgcccttctacaaccctgctcagctggcacaggcctgcgccacctccgggagctcaaggctagggaggattggccagaggaagcacctggtgctgaactaggcttgccctgctgtgaacttgcacttggagccctgacgctgctgttctccccgaagaacccgaccgacctccgcgatctccgtcccgcccccagggagacacagcagtgactcagagctggtcgcacactgtgcctccctcctcaccgcccatcgtaatgaattattttgaaaattaattccaccatcctttcagattctggatggaaagactgaatctttgactcagaattgtttgccgaaaagaatgatgtgactttcttagtcatttaggatgatttaaggatatagtattcctggtcatttaagaatgttcattcattgaggccggagctgtctctgccacaggagagccacatggtcggtagtaaccagggcctctccaagcccagctgtgagtcactgcccagtgagtcccgcgcttcctttaaggtgctgggagcaaagagagggtgactgaggcagaccccaacccctgctctgcaccatctgggccctcgccgtgtttgaacctggctgaatgagtggagggcgctgtgttctcaatcagcgcctccgaggagccgtggggttccttcggcattagttcacggtttttgagagaggccctagttactgcagtgaatttctttcctgttgcaaagacgcttccggcctcactttactttctgtggcctgatgaggaccatgggtgattttgtgtacccaaagcgctggggactgcccaccgtgtggcccagtcactgggaaggagccccagagagccggctgtctgacatgatggctcagggtggtcatccaggttgaaaactgaccgtgtgatgtttgatttgggcttcatttcgtgtgtaggagcacggttagactcactgttaaggaagctggatgcacttctctaaaaggctgcactttccgtgagcacttttcgtggtacaatccacatgacccactttctcccctgggggacgttggttcagaggttggtagcacttggggagagtatcttaacacagtttcttgacagcagctctggaacttagtatttctgccccgagttttgccacactgagactttgagtagctcctggtggactcaaccctgttcaactcagagacgggcctcctctcactgatgcaaagctttaaggcttctctgactgttctgaaactcttcgtattcttgtcaagtctaaagagactgaagaaaagatttaaatactaataaaaatcagtagataatttctgtaggttctgctggaggaatacaaactgtttggtgttttaaatttaagtgtagaaattgtagaatgtggaattagcacagatccttcctggctttctgtttcacttgatcatttagcccagaccacccaggatgttttccaaaatgttccacaggcgtgtcccgctggatccatttgtccttgtcacttggagaaaggccagtccctgtgacggggcagccctctctgtccctcggtcagctcgtgtgaatcctgggacctcttccggtcggctctgcccgctgttctggggtcgactgccacgacttttgattcaagaagcttcctccaggcgggagcggctatttttcctaaatgagaattgttacattgcaaattgttgaataaaatattttgcgctccttcaaaaaaaaaaaaaaa

SEQ ID NO: 26153 - DNA, 2086 bp, Homo Sapiens
gcattctcatctcaccttgccatactataagatgtctggtttgtctatggctgaagttctggcccgcacggactggacagtagaggatggattacagaaatacgagagaggattaatcttttacattaatcattcactttatgaaaacctggatgaagaattaaatgaagaattagcagcaaaagtggttcagatgttttatgtggctgagccaaagcaagtgccccatattctctgtagtccttctatgaagaatattaatcctttaactgccatgagctatctaaggaagctggatacttctgggttttcatcgatcttagtgacattgaccaaggcagcagtggctctgaaaatgggagatcttgacatgcacagaaatgaaatgaaaagccattcagagatgaagttggtatgtggcttcattctggaacctcggctgttgattcaacagagaaagggacagattgttccaaccgagcttgcacttcacttgaaggaaactcagcctggattgcttgtggcttcagttctgggcttgcagaagaacaacaaaattggaattgaagaagcagattccttttttaaggtgctttgtgctaaggatgaagatacaattcctcagctcttggtagacttttgggaagctcagctagtggcatgtctcccagatgtggtacttcaggaactctttttcaaactcacatcacagtacatctggagattgtctaagaggcagcctcctgacaccacaccattgcgaacatcggaggatctgataaatgcctgtagtcattatggcttaatttatccatgggttcatgtcgtaatatcatctgattctttagctgataaaaattatacagaagatctttcaaaattacagtctcttatatgtggtccttcatttgacatagcttccattattccgttcttggagccactttcagaagacactattgccggcctcagtgtccatgttctgtgtcgtacacgcttgaaagagtatgaacagtgcatagacatactgttagagagatgcccggaggcagtcattccatatgctaatcatgaactgaaagaagagaaccggactctgtggtggaaaaaactgttgcctgaactttgtcagagaataaaatgtggtggagagaagtatcaactctacctgtcatcattaaaagaaacattgtcaattgttgctgtggaactagaactgaaggatttcatgaatgttctcccagaagatggtactgcaacatttttcttgccatatcttctctattgcagtcgaaagaaaccattgacttaaaggtatcatttgaaaaataccataatggcatttgagactgaatttctaaaaattgaatgccaaagtacaagtagaggagttttttattttatatatctcacacacacacacacacacacacacacacacacacacacacacatatatgatacaaatgctttcaggctgcttaccttaccgtgtagtggtaactattcacttcttaatttatgacctcaatcaatttaattgtctagaatgtaaaaagtctttaagacataagaattcctcaaagaagccatacattttttaaggtggggattgacttttattccaaggaacaacatcagttcactgttgttggagacatgacaatcattttcatcccaagaacactttaaggaaacattttacaagtatgcttgaaagaatgtcactaactggtccagaattttatcttcttgatttttccagatttctctatgtttttgagaaagatgttaatgttttgccatggtaaaagatttcaaacctcattttttttgttccttttcttgttacttttaagaaaactcatgctctgtttctctgaatcaaatgaagtagaagtttacaaagctaactttcttcttgtctagctattaacatgatttgtcaaatgcatgtttttttcagccaaagccttgtttccatttttgttgatgtgtactcttgctcttttagctagagtgtatgtgaaaataaagaaatacatcattgtattcacaaaaaaaaaaaaaaaaaaaaaaaaaaaaa

SEQ ID NO: 26154 - DNA, 2688 bp, Homo Sapiens
atcagtaccagaaaaatacaaatctattcatcaaatcagacccagttgtgcatttccagtttgccatgacacagaagagcgctgtagacttgtgcttagctatgttctagagggtttaaaatctgtcgatagcagcatcaaaaaagaaagcgaccttccagcagctgaccccagcactccaatcccgttaaaatatgaagatgaatcctcaagagggggtcccgaggggctagagaagcagatggccttgtttttggacaaaagtcacagtgggctcccttcagaagggcaattattccagtcaatctggaatgatccctggctcttggcaacataaaatgaaacttcagctgattctcaagtcatcaaaggcctattatgttttgtccgatgctgccatgagtcttcagaaatacggaagagcattacgatacattaaattagctttgcaaagccatgatacttattgctgcctctgcaccaatatgctttccgaagtgctgttgtttctctctcaatatttgacactttgtggtgatatccaactaatgctggcccagaatgcaaataatagagcagcacaccttgaagagtttcattaccaaacaaaagaagaccaggagatcctgcatagccttcacagagagtccagttgccaaggatttgcatgggcaactgatttgtctacagacttagaaagtcaactctctgttagttgtaaatgttatgaggctgctaatgaaatcttgcagtttagtgacttgaaaagccaaaatccagaacactatgtacaagtattaaagagaatgggtaacattagaaatgaaattggtgtgttttacatgaatcaggctgctgcattacagagtgagagactagtgagcaaatctgtgtctgctgccgagcaacagttgtggaaaaaaagcttttcttgttttgaaaagggaattcacaactttgaatcaattgaggatgccaccaatgccgcccttttattatgtaacacgggaaggctcatgcggatttgtgcgcaggcccactgtggtgcaggggatgaactgaaacgtgaattttcaccagaagaaggcttgtattataataaggctattgattactatttgaaagcgctaaggtcattgggaacacgagacatacacccagctgtttgggattcagtgaactgggaattgtccactacttactttactatggcaactctacagcaagattatgctccgttatctagaaaagctcaggagcagattgagaaagaagtcagtgaggccatgatgaagtccctaaaatactgcgatgtggattcagtgtctgctcgacagcccctttgtcagtatcgagctgcaaccatccatcacaggctggcctccatgtaccacagctgtctgaggaatcaggttggtgatgaacaccttaggaaacaacaccgggtgctggcagatcttcattacagcaaggccgcaaagctgtttcagctgctgaaagatgctccctgcgaactgcttagagtacagctagagagagtagcatttgctgaatttcagatgaccagtcagaatagcaatgttggaaagttgaaaacactatctggggctcttgatataatggtgagaactgagcacgcattccagcttatccagaaggagcttatagaagaatttggccagcctaagagtggtgacgccgctgcagctgctgatgcttctcctagtctcaatcgagaagaagtgatgaaactcctcagtatatttgagtctcggttgtcatttcttctccttcagtccattaaactgctatcttcaactaaaaagaaaacaagcaataacatcgaagatgacacaattctcaaaaccaacaagcacatttactcccagcttttgagagcaactgcaaataaaaccgcgactcttctggaaagaatcaacgttatcgtccacctgctgggccagcttgccgccggcagtgcagcgagcagcaatgccgttcagtgactgcacagagccgtgtcccagacacgctgtcagtgccttcaacacggagccggtttgttcattcggtgctttgtttcattaaataatagggaaatatccatttaaaacaggtatatcagtggaaacacagagttattttaagtgacagacaaattacggttgagttctgtggcttcttcacttgaagtgctaacatcagaatcaaacttaaagcttccactatttatgtctttgagaagtatgtagtacctcggtattaacagacctgctgtgatgcagttacactttcacgtatttttgaagtatgtcaagctacacgggtctaagatatgattattttggataaaatgttactttggtcaagagaacttttatccagatgacattacaggttcaagtgggttaaggagacctcctgtacatctacagtgtttccttttaaattgtccagaaaaaaggtgtgttcttcataagcttcagtgcaggatttttcaaagacgagctgttgtgcaatttgctgtatttaatgcatgttctgaaaggattcacttttgactttatatgacagttgatcaagaacaggtactacccctttttttcatttcaaacttgaaactgtgaataaggtaagaaaactattttgaataaataaactatttatttaaaaaaaaaaaaaaaaaaa

SEQ ID NO: 26155 - DNA, 1398 bp, Homo Sapiens
gaggcgcgggcggcggcgaccgcggcgccagtgagggggccctggggcccgggcggctccgggccggggccccgccgcgggacggaccatgctacgctccactggcttcttccgggccattgactgcccctattggtctggggcgcccggggggccctgccggcggccctactgccacttccggcaccgcggggcccggggccccggcgcgcccggtgacggcggagaggcgccccccgcagcagtgaaggctgcaccagacgcatctgtacctgccctgtgcggtctgtctgtggcacgggttctgaggattccgagtctgaaggtggtggtgttgaagctgcatgggatggttgcgaaactgctctgcaagatctcggcctgtccatggccccctcagtgacggggctgggttacgacccctacaaccctgagctgcccaagccccccgcgcagagggagaatggcaccctgggcctgggggaggagccgcgcccggatgtgctggagttggagctggtcaaccaggccatcgaggccgtgcgcagtgaggtggagctggagcagcggcgctaccgggagctgctggagacgacccgtgagcaccgctccgccgaggcccccgccctggcgccccgcggccccaacgccagccccactgtgggcccggacgaggatgccttcccactggccttcgactacagccccggcagccacggcctattaagccctgatgccggctaccagcccaccccactggccgcccctgccgagccgggcagcaagtactcgctggcgtccctggacaggggtcagggcagaggtggagggggtggcggtgccctggaatacgtccccaaggctgtgagccagccccggcggcacagccgccccgttcccagtggcaagtacgtggtggacaactccaggccacccacagacctggagtatgaccctctctccaactactcggcccggcacctcagcagggccagctcccgggatgagcgggccgccaagcggccccggggctcccgcggcagtgagccctacacacctgctcccaagaagctctgtgacccctttggcagttgcgatgcaaggttctcagactcagaagatgaggccgccacggtcccaggtaacgagcccaccacggccagcacccccaaagccagggccgaccctgagatcaaggccaccgggcagccaccctccaaagagggcctggaggccgaggggggcggcctgcgggagaccaaggagacggccgtgcagtgcgacgtgggggacctccagccgcccccagccaagcccgcctccccagcccaggtccagtcctcacaggatgggggctgccccaaggagggaaaacccaagaagaaaaaaaaaaaaaaa

SEQ ID NO: 26156 - DNA, 2752 bp, Homo Sapiens
cctggcagcagctccgccgcccagaggcgtccgagaccctccgactcgtgggtacgcataggcctcgccagcgagccttgcccaggcaacgagtcgccagcccgccccctcgccgcgggctaggtctcacctcgccaccagtacgtcttggacaagtagtgccaggtctgatgccgggtgtggtgagtgccgccgggacccaggtgcgccgcctcgatgaggtcccggcgtcgctccggctgcagcaccacctccagctccgcgaaggtcttgcggtgccgctgccgccgctggtaatacagagtcccgccgcgcaccacgtagcaggcggcagcttttcggattttacgcttgacattgccctcggtgcccggcgcatacggctcgcgctcgttcgtcaggtaacgcaggatggcccggtagctttcctcgcttgacatcgcggaccgcggctccctgagggcgcctgtcagggacaggtgaggaaaacggcccgctacctacgggcggctgcaggaggagcggcggcaccgtagggagaaacggctgcgcctttggcgagcgctcttcgacggctcccttagtccgaaggaaaagcgggcgagttggtaaccagggggaactgcacttctccagcgcgcgggatccgctggcgactgacaaaatggctgctgcaccaccggaagtgacgcaaggcaagggcggggactgagccctgattggagcgcactctcgttttctggcttgatggagccgatccagtgacgtcaggaatgcgggtggacattttggaagcgggtaggacccttcactgcagttcgagggagtctttaagcagacatcttaagtcctggcagtttctcttttcatttttcccttttccacgctttctaaggagccacgtgtagggggagctggtggacagttgagagttcagccgaaacatccagagggttaggagtccgtttttacgtttgagactcccaacatcataaaagcatattttcaggcttctggaaaaatattagtctcttgacacgggaccagagacagcccatttacatggaaatttagattccagttaacagttataaaattttcagtgcctccctcagtgatgagttattgtttctaaacttgcacctgctagctccagactactcaaggaagagtcgagattcttttggaattatcagcatttatagtcaatcttattgcgagtggaaaagggggtcggtaacactattttaaggctttatttacatatatttttacacaaacgtaggggaaaaggttctccattttgcaccaaatatatatgagggtgcaagaaggggagcggacttgagctgcgtctcccagtgcgtgctgaggatgctaatacaggtatttagctggtaatcccggagcagcgaccccggtcaccctttcctgggacgaatctgcagcgctcacaggggcccagggctgacatccctcctcggggactggggttggacactgtcgccgctttgctaaagccagaacatttcaggccgagggctccagctgcagacacggcctagtacacttctccaccggagggtctgtagtctctgggtgaggccctttgacgctcctagaagtagctgacgggcagacaggtgaatacagcaggctcgaaaacagaatcatacagccagcctctggtgttaggggcgtgtttttgtgtgtgtgcacacgcagtaattcccggatggcccggacatccttgaaagattccaggtgcggggacatgagctctcaaggcccagaagaaaaaagaaactaccaggcttgggatctacttagttgctgagtttgccactatagctcaaaggaggaatttaaaaatggagatgcacctctttcccccatggggtcgggcagtgagagcagaagaccaaatgcaccctctgcgaacccaggaggctggtctacgtgtcaggccaaccccactctcctgtcatactgtctttaaatattttggccgggcgcggtgactcacgcctgtaatcccagcactttgggaggccgaggcgggcaaatcacgaggtcaggagatggagaccatcctggctaacatggtgaaaccctgtctctactgggcctgaggtcccagctactcgggaggctgaggcaggaggatcgcttgaacccgggaagcagaggttgtagcgagccgagattgtgccactgcattccagcctgggtgacagagggagactccgtctcaaaaaaataaaaaaactaaacattttaagttaattgatatttaatattaaacatttaatatattaagtgaatacattcaaatctgcaaacaatacagctaggttgtagaagagttaaaaaaatccctccactcagtttttgccaaaacaccacctgtaagcactgagaagcctactgatgcacgcattatcctttgggccaatagaaacaaacgttttaataaaatgctttcccagtggtcaaattgtcttcctgagtaaagctaaacttgctgtagtgagaacaggtagtgtttatttctagctgcttctgggtcccaggttacctaagacccaagggtaatgacaatgggcagctccactttattaaaagccaacatttagcccagacattttattctccaaaaatcagcaagcatagctttacattcaagttgggtataatgactttattttcccagtaattccctaaataaaactattacaaaaaaaaaaaaaaa

SEQ ID NO: 26157 - DNA, 1929 bp, Homo Sapiens
gaggaagatggccgtgccctgtttttcggtgtaaggcagcgacggcggctgcgacggcgagactgagatcctggtgtcgtgggcacctgagttctagcttcccccagcgagcgcgcgtcccttcgtgcctaggcgagagccggctcttccccgggagatgcgtttgtcccaggctcgggggctcagtgggagttcatgctgcgctggaggctcttggccaccgctctaatcgccttgtgccgccgcagcgccagctccgtcgccagcggtgagcctcccgattcccccccttgcccctggcggcggcgatgaccggggagaagatccgctcactgcggagggaccacaagcccagcaaagaagaaggggacctgctggagcccggggatgaggaagcggcggctgccctcggcggtacctttaccagaagcaggattggcaagggcggcaaagcttgtcataagatcttcagtaaccatcaccaccggctacagctgaaggcagctccggcctcctccaatccccccggcgccccggctctgccgctgcacaattcctccgtgactgccaactcccagtccccggcccttctggccggcaccaaccccgttgctgtcgtcgcggatggaggcagttgccccgcacactacccggtgcacgagtgcgtcttcaagggggatgtgaggagactctcctctctcatccgcacgcacaatatcgggcagaaagataatcacggtgaggagtgctagcccctctccacctctctccttccccgagcctagggtgtgcctccccaggcttctggaatcctaggccccctccagcagactcttctttttgcccatcatccgggccgttcggtaaatcatgatcgactcagtaatagcgtgccagtggtcaaggggttggttcttgtgggtgcaaaggaatgtatcctccttgcccacttcaaagtttgtcgtgagaagctgttttgtttgagacaggccttcgatttgctgattctggactgtcagaaattttaggttgcctcccacccaacatggttttctccctttgtttatggagctatatatctttatttctctctcttccccctaccttggcattttaaattttgaacgcataaattgccctcctcccttcattgctcacatacagatcccatcttgactgcaactggttgtgattttgcctgccaccaggttgtttcttttttgtctgctttcagtaaacttagaatgttagatttctgaaagccacacagtagaaatttgttggtatttgatacgtagaacagttaaagtgacttctcaacagccgatttttgtttgagtagagatttgattttttgcttgttttaagtagataattgctaatagtaatgtctcatcttgatgactgtgactaaaaatagtattatgatttttatggtaattttatcttagtcaatattgaccatttctttttgccttgtcagctgaattttttgtttaattctaaaaaataatgtgactgagttgacttttaagcaacagtaaatttattattgaagactaatgtgaacactgacattttaacatttaatagccgttttaaactgggtagttggcaaatattgttgatcgctctgctattaatatgaaaattgtatacattcagttagaacacactgaaccaactttgtgctcaaaatgatatacgtatcaatgaaatatttgcctgtgaaataagctcacttaattccattggatcgtaggctttttaggacaaaaattcagataaaaaaaacgagtaagatttctcttggctgtataattatctaacaactgcatttgttttcagaatttacaatgttgtaattgtaataaaatcaccacctatcatttatcataaatccccaaaaaagtaaaaaaaaaaaaaaaa

SEQ ID NO: 26158 - DNA, 2021 bp, Homo Sapiens
ggcggggtgacccggggaaggggcgcgcacagagacagagggagccagccgggccccacggtgtcctcggacgcctccgaaatctccctgcgtgtttgtttcttcggagcttcaccggagcctgactctggaaccggcctgtctgcctgctgcagtctgcacatcttcacaatgaaatcttcaccagctcagaaccatcaacttgctacactgtgttcctccagtgcccagttcacaggaagcactcaagagtaggatcaattgttatcaacctctagcagattattgaatagacggtcgttacatgaaactgacactcagttcttcatggtccacgatagttcttatatccagaaaacgtacttacgttatcaactctgactccataagacaactttgcaaagtcttggctcataactattagtgaaatggtgaaaaatcagacaatggtcacagagttcctcctactgggatttctcctgggcccaaggattcagatgctcctctttgggctcttctccctgttctatgtcttcaccctgctggggaatgggaccatcctggggctcatctcactggactccagactccacacccccatgtacttcttcctctcacacctggccgtcgtcaacatcgcctatgcctgcaacacagtgccccagatgctggtgaacctcctgcatccagccaagcccatctcctttgctggctgcatgacatagacctttctctttttgagttttgcacatactgaatgcctcctgttggtgctgatgtcctacgatcggtacgtggccatctgccaccctctccgatatttcatcatcatgacctggaaagtctgcatcactctggccatcacttcctggacatgtggctccctcctggctatggtccatgtgagcctcatcctaagactgcccttttgtgggcctcgtgaaatcaaccacttcttctgtgaaatcctgtctgtcctcaggctggcctgtgctgatacctggctcaaccaggtggtcatctttgcagcctgcatgttcatcctggtgggaccactctgcctggtgctggtctcctactcacacatcctggcggccatcctgaggatccagtctggggagggccgcagaaaggccttctccacctgctcctcccacctctgcgtagtgggactcttctttggcagcgccatcgtcatgtacatggcccctaagtcccgccatcctgaggagcagcagaaggtcctttttctattttacagttctttcaacccgatgctaaaccccctgatttacaacctgaggaatgtagaggtcaagggtgccctgaggagagcactgtgcaaggaaagtcattcctaagaggtgtgacatttgaactgccagcctcagttgtcacgtggactcttgatgcccaattattgcctcaatccagaaaagtttacttctctttatctgtgctttactgacagaagggcaagtcttctctcgttttttgcagataaaattttagatgtgttgcattcattgggtttctatgagatgtggttttatcagacaattttttcttttatttcacaattactttaatatctgtaaaataaagaattattttaattcattttcccagtcccaaaagttaaatacaggccacttacttctttaaccaaatgatatagtttggctctgtgtccccacccaaatctcatgtcaaattgtaatccccgcatgtcaggggagggacctggtgggaggtgattggatcatggggagggatttcccccttgctgttctgtgttctcacgaaatctgatggtttaaaagtgcagcacttctccctttgctctctctctcctgctgtgccatggtaagacgtgccttgcttcccctgtggcttccgccatgattgtacctttcctgaggcctctccagccatgtggaactgtgagccaattaaacttcttttctttagaaattaaaaaaaaaaaaaaaaaaaaaaaaaaaaaaaaaaaaaaaaaaaaa

SEQ ID NO: 26159 - DNA, 3253 bp, Homo Sapiens
cccaggcagcttgtggcggcgaagccatcggtgttcgctgatgtccagtctatggagtcagttggtaccggtggcggcgcggaggcagaaggcggtgtccgagtaggggcctctgccccaccaggatgttaccgggcttggccgccgccgcggcccacagatgtagctggtcctccctgtgccggctccgtctgcgatgcagggcggcggcctgtaatcccagcgaccgccaggagtggcagaatttagtgacatttggaagcttttcaaacgtggttccctgtagtcatccatatattggtaccctgagtcaagtaaagttgtactccacaaatgttcagaaagaaggacagggatcacaaacactcagagtggaaaaagtaccatcatttgaaacagcagaaggtataggcgcagaactcaaagctccacttaagcaagaacctctccaagtaagagttaaagcagtccttaagaaaagggagtatggatcaaagtacactcagaataatttcatcactggagtcagagcgataaatgagttctgcctcaaatccagtgatctagaacaacttcgaaaaatcagacgacgaagtccccatgaagatactgagtcttttactgtatacttgagatcagatgtggaagcaaaatctttggaagtttggggaagccctgaagctcttgccagagagaaaaaattgcgtaaggaagcagaaatagaatacagagaaaggctatttagaaaccaaaaaatattaagagaatacagagatttcttgggaaataccaagccacgctccagaacagcatcagtgttttttaagggaccaggaaaagtggtgatggttgcaatttgcatcaatggattaaactgcttctttaaatttcttgcctggatttataccggttcagcaagtatgttctcagaagctatacactcattatctgatacttgtaatcagggtttactagcattgggcatcagtaagtctgttcaaacaccagatccttctcatccgtacggattttcaaatatgcgctatatttcttcgctaattagtggtgttggtattttcatgatgggtgcaggactatcttggtaccatggagtcatgggattgcttcatcctcaaccaatagaatcccttctatgggcatattgtattttagcaggatcattagtatctgaaggagcaacacttcttgttgctgtaaatgaacttcgtaggaatgctcgggctaaaggaatgtcattttacaagtatgtaatggaaagtcgtgatcctagtacaaatgtgatattattggaggatactgctgcagtcttgggagttataatagcagccacttgcatgggccttacttctataacaggcaatccactgtatgacagcctaggttctttgggtgtgggcaccttattaggcatggtctcagcattcctcatctacactaacacagaagcactcttagggcggtccatccagccagaacaagtacaacggctcactgaactcctggagaatgacccatcagtaagggcaattcatgatgttaaagccacagatctgggattaggtaaagtaagatttaaggcagaagtagattttgatgggcgagttgttacaagatcatatttggaaaaacaagattttgaccaaatgttacaagaaattcaagaagtgaaaactcctgaagaactagagacctttatgcttaaacatggagaaaatattattgatactttaggagctgaagtagatagacttgagaaggaactgaaaaaacgaaatcctgaagttcgacatgtagatttggagatactgtgagtttgatggaatgaatcacctgggtggggaccttggaaacaagtttgtccgtccactctacaaagtttcctcctctcctacactgaaagactcagtgccatgcagaagccttttttttaagatgaaggaaatattttatgtaaagagcaactcagcaggacacagaactaaaactactacttacatctaacagacacactacaagttgaatcaatttgaaaatcatgtttttatgcttccatagggaacattttggttatttaaattgttcataatgtcccatatttcacctgttcagtgtatactgtactttgcaatcatctttccttttttcacattggtaaaaataagtggcatccataggatcatgatttttaatttgttgcctctgaagatttcactccatcaagatctgccaatcttcaatattctggctaaatcttggtatgtggtttttaaacagtcactccgtttcaaagtctgtctttccttatagaatgtggaaattatttctccataccttgtgattttgacctgagtgctaagagaatcactctccttacctagttatctacaaatgttcattccagaaatgtttagttactgaattgaatgaagacatctcagtacactcttttaggtcatagtagttgccattttgtaaaatttcttttttcttctttgcttttttccccttatttggtttaatttttctaatgttaggagatatagtcctagatatttccatgggccagtgtgatgacttttttttaaatgaggttcagtaccataatgtttatttactggaagataatgcatttataagcattttaaaattctgtaaagtgggttagaaatatttataattttacaggcaggacagcatttgacttttatttaaaaggcggcactacttatgtaaatctgagctgtgggatatttcttgctttaagagagagacagaatctctcactgaaactcatggtcatgattttgtataatatagttcatactgtgtctgtgagtttcttcaattacaaatgggcatttagtatagttatattgactataacatgtaagtaaatagctttctactgaccctaagttatcaaggtggaaaaaaaacatgcaattcagtaattgaaaatgtggtgaaaagctgcagctgtcatcatcaaaacaactcataacatactttaaaatgttcaggtagcagtgagcattgttcatatgagaatggcggctgggtgatctctttgctgaattaatgagttcttaacatgtggacccaactgcctgtgtgagatctgtgtcttaaaacttactggaatggaaatctatgaattattgcaaattgtaatgctggaaacaaaaaataaatccttggttaaaggaaaaaaaaaaaaaaaaaaaaaaaaaaa

SEQ ID NO: 26160 - DNA, 2090 bp, Homo Sapiens
gtggttatgtggctggaccgccgcggatggctcagggttcttggacattggcgctacgaccttaggcgccctagctttaccaggacttggagtggcgataagggcccaatggcagaaacagtgtctacccaggttgggacagagggcgggctgagggcttcgcatcagcaaaacggtgacgctggtggcgacgcgaaggttgagctgtcccccgggcccccgaagccggctggccgggaagtggagccggccccagtaggcggggagcatccctcggctgcagccccaggcccgggcaagcataagaagcggcggggcgcaaccagggagcgtgtcgtgccgcccccgaagaagcggcggaccggggtgagcttcggagatgagcactttgcagaaaccagttattacttcgagggcggcctgcgtaaggtgcggccctattactttgacttccggacctactgcaaaggtcgctgggtgggccacagcttgctgcacgtcttcagtaccgagttccgagctcagcccctggcctactatgaggccgcggtccgggcgggccgcctgcaactcaacgagaagccggtgcaggacctcaacatcgtgctcaaggacaatgatttcttgcggaacacagtgcacaggcatgagccaccagtcacagcagagcccattcgcctgctagctgagaacgaagatgtggtggttgtagacaagccttcctccattcccgttcacccctgtggccgcttccgacacaacacagttatcttcatcctaggcaaggagcaccaactcaaggagctacaccccttgcatcggcttgaccgccttacctcaggggtgcttatgtttgccaagacagctgcagtctctgagagaattcacgagcaggttcgggaccggcagctggagaaggagtacgtgtgccgggtggaaggggagttccccactgaggaagtgacctgtaaagaacccatcttagtggtgtcttacaaagtaggggtgtgccgtgtagatccccggggcaagccctgtgagacagtgttccagaggctaagctacaatggccagtccagtgtggtacggtgccggccactcacaggccgcacacaccagattcgagtccaccttcagttcttgggccatcccattctcaacgaccccatctacaactcagttgcctggggtccttctcgaggccggggcggctacattcccaagacaaacgaggagttgctacgggacctggtagcagagcaccaggccaaacagagcctggatgtgctagatctctgtgagggtgacctgtccccaggactcacagactctacggccccctcctcagagttgggcaaggacgacctggaagagttggctgcagctgcccagaagatggaggaagtagctgaggcagcccctcaggagttggacacaatagccttggcatcagagaaggcagttgaaacagatgtcatgaatcaagagacagacccactctgtgcagagtgccggctggtgcgacaggatcccttgccccaagaccttgtgatgttcctacatgccctacgctataaagggccaggctttgagtacttttcaccaatgcctgcctgggcacaggatgactggcaaaaggactgagggtgtggccaatggagggattgcttcttgggttgtgacaaggatgggctatagggcaagggctgaccccatgggctagtacttggggtttctataggaatgaggacgggcttctaaagagacctgctcatacttgctacctccttccagtgggaatttggagactttttggtttgtaaatatatccctttttctaacatctttgatgtctggttttcttccggcttcttttttattactgatgtaaaattcacataacataaaattaaccactttaactagccaggcacagtggctcatggctataatcctagtactttgggaggtagaagtgaaaggatcactggaggccaagagttcaaggttaaagtgaactgtgattgtgctgctgcactccagagcctaggtgacagagtgagaccctgtctcttaaaaaaaaaaaaaaa

SEQ ID NO: 26161 - DNA, 2059 bp, Homo Sapiens
gcagtgatataaatatatttttttcttagactaaatatgagctgactatctcttttgatgtgtgtacataggtgtgagtgtgtgtgtatgcgtgcctgtctgtgtgcgggtgtgtgtatgtgcatagcctcatgcttaggactacccatgaatgttgtggaatgctacacctggagagttctggttttccaccagtttcaagatgaagaactacatgatacagtggacctggagaccatccccttggaaagacaacccagagatgttcagcatcctgtatctacacgcatcctgtatctacacgtgtattttgtagctgtcacactaaccttaataagaattctacagctttggacagaggcattttcaccttaatggtgaagtaatttaaaatataaatccattcaggtgacaacccatcatcaaaattacaaattttctgattgaactcatctgaatcatcagttccttgatggagagagagaaggagatggaatgtgtctggtaaccccaaatggagtacaagtagcctttgttttcctgcataaatggacttgttgaatgcgaacgaatatatgcaattcatatacttttggagatgaacgtagatatgtgtgtcagctttgagatggtgtgtcctggattaatactttgtctcccaatatcacagaaaaatacatgccagtgactcttgaggttaaggtagttgggatgaaatggcctcaggcaatttcacattccctaattacctggaaagttctacagtaattaatatgcagctaactcctgttgccctcacaagagcatcagccttctagaatcggagctccggagtgtgaagattcagtattgatatgatatgtataccaaactccagccaacttactgccatttttcataatctgagtggctgccttgcttatcctaagctgtggttgcagaaaccgtggccatttatataagctataacatcaaatcagggaaaaatgaggaaaaaaaatagattctgaaccatttattgttgaataagtagagaaaatcatcaataaatatttattacattctgacagggtgtgtggcattgtgttctatgccagagtgacaaagttgattcacccctttttggggaccttaatatattttttaagggatgtgcctatgcattgatgcctgaaaaatatgtataaagaaatgaggttgactcttctgagcagttcatcttttccagaggtaagggtaggaggccaacttcaggatctgggtctaagcccgtgggcaagccctggccgagtgagctccaatgctaactcatgtgccgatctctagagcagtgggaaactaccccgctgcaccaaatcaagtagcttcaccttgtgtatgcaggccccaagttattttttagcaatcttacgagtgaaatgttctggtgggttgaaaaacgttcttattttaaagaaaggttgtgctcgctacactgctggtgtgtgcgttctgagacctcttgtattcaatctgtgaaggatatgtgtattaatccgtacacccgtatagcctcaatatttgtctgaagacacttaaattctgacccataaaggaaagttctagaagcaatattttcacttatttaacattctccaaacaacatcaagcattgatacacactgaagagtgcgtttattttttgtatcactctaagtatgttggaatatgcaaggactgtggttcaaattagaatgtataaggcatattataatttagttcatactgaaaaagaaattaacagaacattgttcggttcacacgttccaaaatttgagtgatttctggagttagacatagattttctattttgttttaatttgtcaaggtatttttcttcccttcatgaactttaggtacacataacttatgtcatttatttatggtcttttatacctagtttgtaaaattgtaaaatagcaaactaaatgcaaagagtttgcatttgaaaataataaagtagttaccgtatacaaaaaaaaaaaaaaaaaaaaaaaaaaaaaaaaaaaaaaaaaaaaaa

SEQ ID NO: 26162 - DNA, 1796 bp, Homo Sapiens
gtcctccagcctcagcagatgagacttttacgcatcatcttcagcgactgagaaaactcattaaaaagcgctctgaactgtatgaagctgaagagagagccctcagagttatgctagaaggagaacaagaggaagagaggaaaagagaattagaaaagaaacaaagaaaagaaaaagagaaaattttacttcagaaacgtgaaattgagtccaagttgtttggggatccagatgagttcccacttgctcacctcttggagcctttccgacagtattatctccaagccgagcactccctgccagcgctcatccagatcaggcatgattgggatcagtacctggtgccatccgatcatcccaaaggcaacttcgttccccaaggatgggtccttcccccgctccccagcaacgacatctgggcaactgctgttaagctgcattagtaaagatgctccaggagtgtggtccagccagcgctctttccagctgtaaatattagcgatggtgccatcttttgctgtagactaaactgcaacttctaaattccatgtggcattcccctaccctgaagttatgctttccttctgtgctctgtgctggccagaggtgcctcttgaatcagattaatgtggtttttcaggaaaggacttaggtgaactgaggtttttaccacaggcagtgaatgaccttggttcaccaaatttgcctctgttttgaggggcttggtccagagtgacttgttaatttactctaacttccttgtgtgttgatgggtaagtacactcaaacactgaatacaggtgtgtgatgggtagatttcacagcccttctactaatagtgagtgtgaaggcaagcttgatgcaaaacctcctgacctttcctacctgaagagccctttgacttctaggaagaaaggtcaaaaatgttatcttcagttgtgttaatcccagttttagtgcagcttaggaggctgctagttaggaagatggcagtggctgtaggctgggttgccagaaaagatggtggcctagtcttattattcagatggagaacttagaaaacctgaagagtacccaaattggattgtattttaatggacaatggctgtattttttccatgttagaaggatcctaatgaaagcacctgttatttttaagtttctaagggtctagttgttcagaatccccaaggatatttccctaacctcactcagtcacattgtaggagccagtgtagctatggaattatcttaggaactcaagcttctaaaactatccatgtagtcaaatctaggggaaaaagcaaataaaaatagtaaaatttggccgggcacagtggctcacgcctgtaatcccaacactttgggaggccgaggcgggccgatcacgaggtcaggagatcaaggccatcctggctaacacggtgaaaccctgtctctactaaaaatacaaaaaaatattagctgggcgtaggtggtgcacacctgtagtcccagctactggggaggctgaggcaggagaatggtgtaaaacccaggaggcagagcttgcagtgagccgagatcgcgccacggcactccagcctgggagacagagcaagactccgtctcaaaaaaaaaaaaagtaaaatttattttttatattcattaataaatgctgttgtgcttggagatgatcactcatataacatgtcatttttttggttctgttttggtttggtttttgccaattattttgttatatttccaaaaaactaaataaaaatcatttttattttttaaaaaaaaaaaaaaaa

SEQ ID NO: 26163 - DNA, 1141 bp, Homo Sapiens
cccctggccgtgggcttgggcctcggcttcacaggatggggctgccagtgtcctgggcccctcctgccctctgggttctagggtgctgcgccctgctcctctcgctgtgggcgctgtgcacagcctgccgcaggcccgaggacgctgtagcccccaggaagagggcgcggaggcagcgggcgaggctgcagggcagtgcgacggcggcggaagcgtccctactgaggcggacccacctctgctccctcagcaagtcggacaccagactgcacgagctgcaccggggcccgcgcagcagcagggccctgcggcctgccagcatggatctcctgcgcccacactggctggaggtgtccagggacatcaccggaccgcaggcagccccctctgccttcccacaccaggagctgccccgggctctgccggcagctgcagccaccgcagggtgcgctggcctcgaggccacctattccaacgtggggctggcggcccttcccggggtcagcctggcggccagccctgtggtggccgagtatgcccgcgtccagaagcgcaaagggacccatcgcagtccccaagagccacagcaggggaagactgaggtgaccccggccgctcaggtggacgtcctgtactccagggtctgcaagcctaaaaggagggacccaggacccaccacagacccgctggaccccaagggccagggagcgattctggccctggcgggtgacctggcctaccagaccctcccgctcagggccctggatgtggacagcggccccctggaaaacgtgtatgagagcatccgggagctgggggaccctgctggcaggagcagcacgtgcggggctgggacgccccctgcttccagctgccccagcctagggaggggctggagacccctccctgcctccctgccctgaacactcaaggacctgtgctccttcctccagagtgaggcccgtcccccgccccgccccgcctcacagctgacagcgccagtcccaggtccccgggccgccagcccgtgaggtccgtgaggtcctggccgctctgacagccgcggcctccccgggctccagagaaggcccgcgtctaaataaagcgccagcgcaggatgaaagcgaaaaaaaaaaaaaaa

SEQ ID NO: 26164 - DNA, 2428 bp, Homo Sapiens
gcgacccgaggcctccgctgcgcgtggattctgctgcgaaccggagaccatggccaaaccagcacagggtgccaagtaccggggctccatccatgacttcccaggctttgaccccaaccaggatgccgaggctctgtacactgccatgaagggctttggcagtgacaaggaggccatactggacataatcacctcacggagcaacaggcagaggcaggaggtctgccagagctacaagtccctctacggcaaggacctcattgctgatttaaagtatgaattgacgggcaagtttgaacggttgattgtgggcctgatgaggccacctgcctattgtgatgccaaagaaattaaagatgccatctcgggcattggcactgatgagaagtgcctcattgagatcttggcttcccggaccaatgagcagatgcaccagctggtggcagcatacaaagatgcctacgagcgggacctggaggctgacatcatcggcgacacctctggccacttccagaagatgcttgtggtcctgctccagggaaccagggaggaggatgacgtagtgagcgaggacctggtacaacaggatgtccaggacctatacgaggcaggggaactgaaatggggaacagatgaagcccagttcatttacatcttgggaaatcgcagcaagcagcatcttcggttggtgttcgatgagtatctgaagaccacagggaagccgattgaagccagcatccgaggggagctgtctggggactttgagaagctaatgctggccgtagtgaagtgtatccggagcaccccggaatattttgctgaaaggctcttcaaggctatgaagggcctggggactcgggacaacaccctgatccgcatcatggtctcccgtagtgagttggacatgctcgacattcgggagatcttccggaccaagtatgagaagtccctctacagcatgatcaagaatgacacctctggcgagtacaagaagactctgctgaagctgtctgggggagatgatgatgctgctggccagttcttcccggaggcagcgcaggtggcctatcagatgtgggaacttagtgcagtggcccgagtagagctgaagggaactgtgcgcccagccaatgacttcaaccctgacgcagatgccaaagcgctgcggaaagccatgaagggactcgggactgacgaagacacaatcatcgatatcatcacgcaccgcagcaatgtccagcggcagcagatccggcagaccttcaagtctcactttggccgggacttaatgactgacctgaagtctgagatctctggagacctggcaaggctgattctggggctcatgatgccaccggcccattacgatgccaagcagttgaagaaggccatggagggagccggcacagatgaaaaggctcttattgaaatcctggccactcggaccaatgctgaaatccgggccatcaatgaggcctataaggaggactatcacaagtccctggaggatgctctgagctcagacacatctggccacttcaggaggatcctcatttctctggccacggggcatcgtgaggagggaggagaaaacctggaccaggcacgggaagatgcccaggtggctgctgagatcttggaaatagcagacacacctagtggagacaaaacttccttggagacacgtttcatgacgatcctgtgtacccggagctatccgcacctccggagagtcttccaggagttcatcaagatgaccaactatgacgtggagcacaccatcaagaaggagatgtctggggatgtcagggatgcatttgtggccattgttcaaagtgtcaagaacaagcctctcttctttgccgacaaactttacaaatccatgaagggtgctggcacagatgagaagactctgaccaggatcatggtatcccgcagtgagattgacctgctcaacatccggagggaattcattgagaaatatgacaagtctctccaccaagccattgagggtgacacctccggagacttcctgaaggccttgctggctctctgtggtggtgaggactagggccacagctttggcgggcacttctgccaagaaatggttatcagcaccagccgccatggccaagcctgattgttccagctccagagactaaggaaggggcaggggtggggggaggggttgggttgggctcttatcttcagtggagcttaggaaacgctcccactcccacgggccatcgagggcccagcacggctgagcggctgaaaaaccgtagccatagatcctgtccacctccactcccctctgaccctcaggctttcccagcttcctccccttgctacagcctctgccctggtttgggctatgtcagatccaaaaacatcctgaacctctgtctgtaaaaaaaaaaaaaaaaaa

SEQ ID NO: 26165 - DNA, 1741 bp, Homo Sapiens
ccgttctgctctcgggggcaccttccggggttcctaagccgcggggcccctcgctgcccctcgaggccctttccctgacctaggctttggcctgggctactcgttccggagccgccatgtcgtccgacttcgaaggttacgagcaggacttcgcggtgctcactgcagagatcaccagcaagattgcgagggtcccacgactcccgcctgatgaaaagaaacagatggttgcaaatgtggagaaacagcttgaagaagcgaaagaactgcttgaacagatggatttggaagtccgagagataccaccccaaagtcgagggatgtacagcaacagaatgagaagctacaaacaagaaatgggaaaactcgaaacagattttaaaaggtcacggatcgcctacagtgacgaagtacggaatgagctcctgggggatgatgggaattcctcagagaaccagagggcacatctgctcgataacacagagaggctggaaaggtcatctcggagactagaggctggataccaaatagcagtggaaaccgagcaaattggtcaggagatgttggaaaaccttagtcatgacagagaaaagatacagcgagcacgtgaaagacttcgggaaacagatgctaatttgggaaaaagctccaggattctgacagggatgttgcgaaggggttgttctgtgaaaaaacaatgtaacctgtctctggccccaaaggcttgaaccagaaccagccagtggaaattactcaaacacgtattgtgccttcaatgagaagccttctcactgaaagagctgccctggacggaaaatgagtagtgagatgatgctggtggaagtatttatagatgcgcagtgcatgagtacttggcaaggatgctatcaaaggggaaactgacatcaaatgtgctgtggttctgggtgatttatctggtcccttcccatcccagagctttatgattctgtaataatcaagggagaaacccattacatagtggacaattttttttctttttttttctttttctttttttttttgagacagagtcttgccctgtcgcctggctggagtggagtggcacaatcttggctcactgcaacctccacctcccaggtccaagcgattctcttgcctcagcctcccaagtagctgggactacaggcacacaccaccacgcccagctaatttttgtatttcttttttttttttttgtagagatggagtttcaccatgttggccaggatggtctcgatctcttaaccttgtgagccaccgtgcccaaccctaacaattatttttaaaaggaggaatttaaatgagctgtggattattcattttgtcccataagaagataattaaaaaatgacaaaaatgaactgaacaaaaaagttctaacaaaataataaggctgaatttttaaagtctcttccgcatcttctgttccctgggatgccttagacggggtgtgcagtattttaggtacatcgtgagcaaggagcctgcattcccagggggcggcagggacagcatgtaaggtcttagtccagctctgtgatctgaaggcaaagcctctatgtgtgaaacacaggggtacctcaaaaatagaacaagagcactccatccatgtgcggatgactgtcaaggtcactgagacctacagtgatctggaaaattaaagctctctggccgcctttcctctcaggacatacttctggagatcaaaaaaaaaaaaaaa

SEQ ID NO: 26166 - DNA, 2335 bp, Homo Sapiens
cgccattgctggccttttcccttttctgcagccatggtggatgcctgggtcactggccccttggcagctaggcctcagaaagcagcaggctctgccacagactccctggatgctttgggaagtctgagctccaaacgggaccccttcctcaccagctcaatcaacaagcatagagcctagggagcacacaggcctccacagggaacccaggagccggaagctgtctgagcagggggataccctgccgatgaggcttctcaggggacacctacccccgcatatcactcaccgcaggaaccagcggtctcccaggccatactcccgtccgcagatcccggagcgaggccacaggcagcgaggcagcttccgctccagcatcaccgtggtggccacaatctgcgtatgggaacaaaaggagaagtcagagatgaggctgggcgcagacagaggtaggggtagggcagcctttgttgaccttcttcagtgggagagagttgatagagcttgagaccaacaattctttacccaatgacccaacatccatgacgcagccaggccagaggcaggagaaagacaggaagcagaagccccattcccaggagcacaggcaccagagaaagcaaatagaaagggcttttaagggctcccagatattttgaccctacagacataaaggccacttataaatataaacatcccacttagaatatcaatatatattcctggagaaaatatttttctgagtgaaccttatttcccagcttagtttttccactccgttttctacacagcatagttaaatgccttccagtttgggaaatttccattattttgctgaaatgatttttttagataaattattttctaggtgttttttaaatgaggatttgattcatctcatggtcttctctccctatcttgaagatctggctgaagatagcttctgctactataggaagttttggtggcattacttttttaacacatcctgctttccatatcaaattttgcagacttaaatattatcaagaagacttgatactccagtttttatttgggaacaaaatgtactgagtgcaattttagccaccgttaattttcttttgatttatttcttgttgattcctctagaaaacactgagcttttaactgttgagaaaactgtgaggcattcttctcagcgattccagtattgcctggttgaattgctaatcagtgcttctgtacattttgcatgattttgctagctttgccacaactgtccaaacataagtggggtggagatatcctgtctctcagcttggcaggttccttggtaggaaggggatgacttgccctaaccctccctgccaccagggggctcacctgggccctccacagctcatcccgctcatgggccactcgccagtgagtgtcgcccatcatggcaatgaggaggttgagcatgagcagtgtggcgatgatggcaaaggcagcataggtgatgctgtacatgaagggcaggtccacgttgtagttggctgggccatcgatgatggtaaggaacagctcgaaggtgctgaacagggccatggggtagtcgtagaagtggcctagctcctcggggtcctctgtctggaagatgatatagaaggctgctccacccaagggggtgagggttaccatggcaaccatgcagacgaccagcccaccccgggctctgcgtgcatgtccatcctggtcccttcatctcaatatcaccagctctgcagtgctccaaactttgggtttttacggtccctagttttgtatgagcctcatcttgatcctaagagccacctctccctaacactcccgatttttctcacctctggaggacgtcccatcctctgataccataggtctcctctgatctctgcattactcctcctccccaagtttagccagagccagtgccccctagacttcctcatctcttccctgccatggcccctggtcctggacagatgattacctgaagcaaagcccaggatgaccacagccatcagccagcagaatcgcatcaggtcgccaaaaatcatctagaaggagcaggaggcagagaacatctgcacacattccccaagcaattgccccatccagcctctaacaggtctcaccccgacaagtctcacagctccaccctctgggacagggattggctatctatggcctgtggaccagatctacctgacctgctttggtgtggcctttgaactgaaaagggtttctacattttttaaaaggattgttaaaaaagaagaaaaacatgcagtgaggccatgtgtggcttgcagaaaaaaaaaaaaaaaaaaaa

SEQ ID NO: 26167 - DNA, 2166 bp, Homo Sapiens
gctgcgggatgccgttccttcgcgcgtgaggctgcggctctgacgccccataggctccttcaatttccgtgatcctcggagtccccaggagaccaggtgatggcagcagccagactcctgccagtgccggcaggaccccagcccctgtcgttccaggccaagctgaccttcgaggatgtggctgtgctcctctcccaggatgaatgggaccgcctgtgccctgctcagaggggcctctacagaaatgtgatgatggaaacctatgggaatgtagtctcattgggacttccaggatccaagcctgacataatctcccagctggagcgaggggaagatccctgggtcctggacaggaagggggctaagaagagccagggcctgtggagtgactactcagacaacctcaaatatgaccacactacagcctgtacacaacaagacagtttatcttgtccatgggaatgtgaaaccaagggagagagtcaaaatacagacttgagtccgaagccattaatttcagagcaaacagtgattctggggaaaacacccttggggaggattgatcaagaaaataatgaaacaaagcaaagcttctgtctgagtccaaactctgttgaccaccgtgaagttcaggtcttaagccaaagcatgccactcactccgcaccaggcagtgcctagtggagagaggccctacatgtgtgttgagtgtgggaagtgctttggccggagttcccacctccttcagcatcagcgtatccacactggagagaagccctatgtgtgcagtgtatgtgggaaggccttcagccagagctcagtccttagtaaacacaggagaattcacacaggtgagaagccctatgagtgtaatgagtgtggaaaagcctttagagtgagctcagatcttgctcagcatcacaagatacatacaggagagaagcctcacgaatgtcttgagtgtcggaaagccttcactcaactctcacatctcattcagcaccagcggatccacacgggagaaaggccatatgtgtgtccgttgtgtgggaaagccttcaaccatagcactgttctgcggagccaccagagggtacacactggggagaagcctcacaggtgcaatgagtgtgggaaaaccttcagtgtgaagaggacactgctgcagcaccagaggatccacaccggggagaagccctacacgtgcagcgagtgtgggaaggccttcagcgaccgctcagtcctcattcagcaccacaacgtgcacaccggggagaagccctatgagtgcagtgagtgtgggaagaccttcagccaccgctccacactgatgaatcacgagcggatccacaccgaggaaaagccctatgcatgctacgaatgtgggaaggccttcgttcagcactcacacctgatccagcaccagagagtccacactggggagaagccctatgtgtgtggtgaatgtgggcacgccttcagtgcacgccggtctctgatccagcatgagagaatccacacaggtgaaaagcccttccagtgcacagaatgtggcaaagccttcagcctgaaagcaactctgattgtgcacctgaggacccacacgggcgagaagccatatgagtgcaatagctgcgggaaggccttcagccagtactcagtgctcatccagcaccagcggatccacacaggcgagaagccctatgagtgcggggagtgtgggcgtgccttcaaccagcatggccacctaatccagcaccagaaagtgcacagaaagttgtgacccatggctgacacaagaatccattctcacagaaactgcatgtggaaccacaagcagccttcagcccaagagaagtctctgttaactctataggaagcttttctttggcgattcagtgtcacaaaataactccagaaagaagcacttagcgtgctgttcctgtggaaaaacttcagagactacctgttttattttcctcaacatcttgaagttatgttggagagtaatcatacaattgtagagaattttggtaaaaaacagccataattctttaacattagtttatttgaactaagggaatttaaggcataagaaccattatcccaataaaatcttacattccaaataaagttctttttctaagaacaaaaaaaaaaaaaaaaa

SEQ ID NO: 26168 - DNA, 2081 bp, Homo Sapiens
gcgcgatggcggcggctgccgccgagacccccgaagtccttcgggaatgcggttgcaagggcatccggacctgtctgatctgcgagcggcagcgcggcagtgacccgccctgggagctgcccccagcgaaaacataccgtttcatttactgctccgacaccggctgggccgtgggcacagaggagtctgactttgagggctgggccttccccttcccaggagtgatgctgatcgaggactttgtgacccgggaggaagaagccgagttggtgcggctcatggaccgtgacccctggaagctctcccagtctggacggaggaagcaggactatggccccaaagtcaactttcggaaacagaagctaaagaccgagggcttctgcggcctccccagcttcagccgggaggtggtgcggaggatgggcctctacccggggctggagggcttccggcccgtcgagcagtgcaacctggactactgccccgagcggggctctgccattgacccccacctggacgacgcctggctgtggggggagcggctggtcagcctcaacctcctgtcccccaccgtgctgtccatgtgtcgggaggcgcccgggagcctgctcctctgctcggccccgtcggctgccccggaggccttggtggacagcgtgatagcacccagccggtcggtgctatgccaggaggtggaggtggccatccccttacccgcccgctccctgctggtcctcaccggggcggcacggcaccagtggaagcatgccatccaccgcagacacatcgaggcccgccgcgtctgcgtcactttccgggagctgtcggctgagtttggccctggagggaggcagcaagagctgggccaggaactgctgcggatcgccctctccttccagggaagacccgtgtgaaccgcctccttggctccagacttgactgatcccgggattgaaatgaggagcacagaacagggcctcctgcaactcacggggtttcaagagaagatggctgacccctgatgctgtgagcagtgtgagccctgcccaggagcaggttttgatgggaacgtacctccaggcagcccccttccacctggaccgtggccacacttttttggttatttagtttgtcacagtcttggggacatgggatcatttgagcttaaaaaatactgggggccgggcacagtggctcacacctgtaatcctaacactttgggaggctgaggtgggcggatcacttgatgccaggagttcgagaccagcctggccaacacggtgaaaacccgtctctacaaaaactacaaaaattagccgggtgtggtgactcacagccgtaatcccagctactcgggaggctaaggtgggagaattgcttgaacctgggaggcggaggttgcagtgagccaagatcacgccactgcactccagcctcggtgacagagcaagactgttttgaaaaaaaaaaaaaatgggaacattttaaatgattttcacctttattatgcatctattttcatggggtttcccgatatctcactgtccagtcccttcatttggggaatgtgttggattagggaacagggttgaagatttgaagtttagactaaagagctgggaacagcttcagagtcaggctcagcctgactcatgcttgacacccccacgcccagggagggttgggggatgtgaggagggcagggaaatctgagagcctccttccagccccataacgctgttaacaagtaggaaaaattaaagctcccggccaggcgcggtgactcacacctgtaatccgagtactttgcggggctcaggtgggaggattgcttgaggccagcctgggcaacatagtgagacccccatctctacaaaaaatacaaacattagctgggcgtctgggcatggtggcacacacctgtagtcccagctactcgaaaggctgaggcgggaggatggctttaccaccatgtcaaggctgcagtgagctcatgatcataccactgcacttaacttggcaacagagcaagaccctgtccctaaaataaataaaaggaaaacaaaaaaaaaaaaaaaaaa

SEQ ID NO: 26169 - DNA, 2406 bp, Homo Sapiens
cctcgtgccgaagtaaatgaggctccatagtctctaaccagagaatttctgctgttttaaagattcaacttgtttttcactgttcagtggcctaaatgtagattatgagaaataccacattagaccagtagaatcagctttaagactgggaaaacaacttcttacagtgtttttgctcaaacttccaatttaatgtcaaataaacaaatattccataaagatcattataaagaaaatttaatgtgtggatgtgtacttttggcagtctctctgggatcatttcttaagtcaactaggtatatttttttaaaatctcgtttttagggttaccttatgacaagtgtaacagtaactccaaccttagagactataacatgattaaagaaagttatgaagctccagttatacaatggggataaaatatgaattatatacccagaatgcaattgagttgtaggtgttgaatctttggaaaatgccctctagcttctggaatgaccctgatggatgggtttaagtttggaaagatggacatgatattaatctgatccagagctgacacattttcaactccagtttgaaaagagaaggatgataatgagactttgggccattacctgtgtggcatatctagtgaaaagaatctacagtgtgcgtttggaagtgaagatttagatttcttcccagtggaggaatgccagaaactgtatttccagtactgggaatttgctgctttgcataacagaattccttttttgactggcccagtatctgtatgagtttggaataatcttttccctaaatgtttgatatgattcatcactgaagttatctggggctagagttctgtttgtgggaaaattttgaaatttgaatttaatttctttaatattcatattttctatttcttcttgtttcagttttggtaatttgtgcctttcaaggaatttgtccattccatctaaatgttgaatttattggtataaagttattgacagtattcccttgatatccttttaatggctacaaaagccatagtcacttgtcctcttttgttcttaatattgttaatttatatcttctcttttgttcattgctttagttaggggtttgtaatttttattgatcatttaaaggagcaacttttggttttactaattttctctatttgcttattttctatcgcattgatttctgcagttatctttatttctttccttctactttgagtttgcttttcttctagcttttttaaggtagaagtttatattagtaattttagaacttttctctctccaagcactgttttagctgcatttcacaagttttgatgtgttttcatgaacgcgtagttcaaaatagtgtcagatttcccttgtaatttaattttgatctatgacttttctagaaatgtgttaattttcaaacatttgggggagttttcagttatcttttggctatcgattttttaaatttattgtggttagagaatttgctctgtattttcaatcctaaatgttttatggcccaaaattatggtttatcttggtaaatgatccttgtatatttgaaaataatgtacattctgctattttggggaatattactctataaatgataggtcaaatcggttgacagtttttttcaagtcttctgtatacttgctgatttttttttttttggtctttgtcctatcaacaagtgagagatgattgttgaaatctccaaatataattatagttttttgtttctctttttagttctgtcaggtttgcttcatgtattttgaagctgtataattatatgcaaatatgctaaggattattatgtatttttaatgacataattctttcatcattatgaaatctccatctttatcgctgataatattccttgtcctaaagttcaaagagcattgaggtgtgttttggcaggcagttgagttactattgggtcgacttgatcctttggaatcttgtttgtttttaatgtttgttagggtgggtgtaaagttgtctttatttaaggacggtggttgtcaactttcagtctcatgaccccctgaaactctaaaaacttattgaggactccgaagaattcttgcttatgtggattgtattaatgcttaccatatcagaaattaaaactgagaaataagtaaaacaatatttacttattagttccttttcaaatgacaataataaacccatttcatgttcagctctctcttaactatgttctttcttattagttttcgtttccttctaaccacaaataaacatataaaatcttaaaaaaaaaaaaaaaaaaaaaaaaaaaaaaaaaaaaaaaaaaaaaaaaaaaaaaaaaaaaaaaaaaaaaaaaaaaaaaaaaaaaaaaaaaaaaaaaaaaaaaaaaaaaaaaaaa

SEQ ID NO: 26170 - DNA, 2776 bp, Homo Sapiens
gtctgtctgtctggcgtcctgacatctactttgcatcagtgtcagaaacatttgaaacaaaggttgatgactacagtcaagagtgggcagctcaaacagagaagagttatgagaaatcagagctttctctcgacaggttgaggaccttgctgcagctgaagtggcagcgctcactgtgtgagccgggcgaggctgtgggcctgctggctgcccagagcatcggagagccctccacccagatgaccctcaacaccttccactttgcaggcagaggcgagatgaacgtcaccctgggcattccaaggttgcgggagattctcatggtggccagcgccaacatcaagacacccatgatgagcgtgcccgtgctcaacaccaagaaagccctgaagagagtgaaaagcctgaagaagcaactcaccagggtgtgcttgggggaggtgttgcagaaaattgacgtccaggagtccttctgtatggaagaaaaacagaacaaattccaggtgtaccagctgcggtttcagttcctgccacatgcatattaccagcaggagaagtgcctgagacccgaggacatcctgcgcttcatggaaacaagattctttaaacttctgatggaatccatcaaaaagaagaataataaagcatcagctttcaggaacgtaaacactcgaagagctacacagcgggatctggacaacgctggggagttggggaggagtcggggagagcaggagggtgatgaggaagaggaggggcacattgtggatgctgaagctgaggagggagacgccgatgcctctgatgccaaacgcaaggagaagcaggaggaggaggttgattatgagagtgaggaagaggaggagagggagggcgaggagaacgacgatgaagacatgcaggaggaacgaaatccccacagggaaggtgctcgaaagacccaagagcaagatgaagaggtgggcttaggcactgaggaggacccgtcccttcccgccctcctgacgcagccccggaaacccacccacagccaggagccccaggggcccgaggccatggagcgccgggtccaggctgtgcgtgagatccacccgttcatagatgactaccagtacgacaccgaggagagcctgtggtgccaggtgacagtgaagctccctctgatgaagatcaactttgacatgagctccctggtagtatctttggcccatggtgccgtcatctatgcgaccaagggcatcactcggtgcctcctgaatgaaacaaccaacaataagaacgagaaggagcttgtgctaaacacagaaggaatcaacctcccagagctattcaagtatgcagaggtcctggatctgcgccgcctctactccaacgacatccacgccatagccaacacgtatggcattgaggccgcgctgcgggtgatcgagaaggagatcaaggatgtgtttgccgtgtatggcatcgcggtcgaccctcgccatctctccctggttgctgattatatgtgcttcgagggtgtttacaagccactgaatcgctttgggatccggtcaaactcttccccgctacagcagatgacatttgaaaccagcttccagtttctgaagcaagccaccatgctgggatcccacgatgagctgaggtctccttctgcctgccttgtggtcgggaaggtcgtcaggggcgggacaggcctgttcgagctcaagcagcctctgagatagcagctaccccggcaccatctgcccagctccaaggacccttggtgagggcgtggcccagcctgccttctgcatgagaggaccaggagactggaatccagggcagttccaagtgacagtacagagcacagcagcgaccttgggcctgaaagcagtgggcctctgagctgggccagcttcacctggaaagtgacagagttgctcatccttgcccctccctgtctctggatttttatcaaggtttaccaagtcttctgagtccccctgagatggctggggcttcacctgtgctgcaggaggcctctgtggcataacccctaaggagaagtcctgattcacgattcactgagaagaccaaggggaagccatgctttgctgctggggaccccaggcacctccagagtagggaagcggggttcttttgctgtgagtggccagggacaacagacaagattcctgggggctcccgatgagcaggaacgtggagcctgctgcccaaggcctgctccttccggctgctccagcccctgggggcagagtccacaaagagtccccatcaagacttcttccctgagtcaagtacagcgtagcatagtcctccacccacccaacctctctgcctggccagggtcctggccctgccactgtgtggcgaggtgtccttctagaccacatcagccccaaggctgggagcagtcgctccagggccgcagcagttcactcccacacatagaacccaggtcactgctggggcgattgaacaggttgcctggcttttctctgctgtcagtttggtgtggaggcctatgttctgccccatacaccccacaggccctgcttatgggaaggaacacaggcctccagcccagaggactgtgccgccctgttcttggccgtccacgtttcctctccctctagcaccagcaatacatttccctggcatggacagaaaagacagagaggacttgtacaaaggctttgtaaaaccagaggctagcttctaaaaaaaaaaaaaaaaaaaaaaaaaaaaaaaaaaaaaaaaaaaaaaaaaa

SEQ ID NO: 26171 - DNA, 1808 bp, Homo Sapiens
agcacagcgtgtacctcctggccacccagcactgcgcagccgtggtgtccagcctcctgggcagccccttgcccttggacagccacacctgcatgctgtggcgggcgctggcggtggagcctcgcctagctgcccaggtcctggggctgctgctggagaagatgagtagggacgtccctttcaaggagagccgggccttcctgctgggccgcaccccagaccgcgtggccacgctgctgcctctctcggctacctgtgcactgtttgaggtcatgtccacgcctgcagcggggcccgcggtgctcgagctctacccccagctgtttgtggtgcttctgctgcgcgtcagctgcaccgtgggtgtccagctgccccggaacctgcaggcccaggaaaggaggggtgccagtccagccctagccaccaggaacctggaaccctgcagctctgcagtggacaccctgcggtccatgctactccgcagcggcagcgaggatgtggtacagcgcatggacctggagggaggctgggaactgctcaggacctcggcggggcatgaggagggggccaccaggttggccagggccatggctgagcacgcagggccccgactccccctggtgctgaagacgctggcatgcacacacagcagtgcgtatgagaaccagagggtgaccaccaccgccttcctggccgagctgctgaacagcaacgtggccaacgacctcatgctcttggactcgctgctggagagcctggcggctcgccagaaggacacatgcgccagcgtgcggaggctggtgctccgcggcctggccaacctggcctccggctgccctgacaaggtgcgaacccacggcccccagctcctcacagccatgattggcgggctggacgacggggacaaccctcacagcccagtggccctggaggccatgctgggccttgcgaggctggtgcacctggtggagtcctgggacctgcgctcagggctgctgcacgtggccatccgcatccggcctttcttcgacagtgagaagatggagttccggacggcatctatccgcctctttgggcaccttaacaaggtctgccacggagactgtgaggacgtcttcctggaccaggtggtgggcgggctggcgcccctgctgctgcacctgcaggaccctcaggccactgtggccagcgcctgcaggtttgccctgcgcatgtgtggccccaatctggcatgtgaggagctctcagctgctttccagaaacacctgcaggagggccgagccctgcacttcggggagttcctcaacaccacctgcaagcacctgatgcaccatttcccagacctgctgggccgtctcctgaccacctgcctgttctacttcaagagcagctgggagaacgtccgagctgctgcacccctgttcaccgggttcctggtgctgcactcggagcccaggcagcagccgcaggtggacctggaccagctcattgcggcccccctcctctacccccagcgctccagatcctgctgaaggacccggcccccgaggtgcggacgagggctgctgaggccctgggccgcctggtgaagctcgcctaaggctccggccagcacccccagcgaggagtatgcacccagacctgtgcctgagctccaagacagggcctcctgaggaccacagcctgggcacacgactggaggggcctggccccagaacaggcactgctggggaccaaacccaagcccttcagtgagggatgtgcccaataaactcatctgctcccagcgagaaaaaaaaaaaaaaaaa

SEQ ID NO: 26172 - DNA, 2628 bp, Homo Sapiens
ctgagaagggcacagccgcgcggcggagggcagagtcagccgagccgagtccagccggacgagcggaccagcgcagggcagcccaagcagcgcgcagcgaacgcccgccgccgcccacaccctctgcggtccccgcggcgcctgccacccttccctccttccccgcgtccccgcctcgccggccagtcagcttgccgggttcgctgccccgcgaaaccccgaggtcaccagcccgcgcctctgcttccctgggccgcgcgccgcctccacgccctccttctcccctggcccggcgcctggcaccggggaccgttgcctgacgcgaggcccagctctacttttcgccccgcgtctcctccgcctgctcgcctcttccaccaactccaactccttctccctccagctccactcgctagtccccgactccgccagccctcggcccgctgccgtagcgccgcttcccgtccggtcccaaaggtgggaacgcgtccgccccggcccgcaccatggcacggttcggcttgcccgcgcttctctgcaccctggcagtgctcagcgccgcgctgctggctgccgagctcaagtcgaaaagttgctcggaagtgcgacgtctttacgtgtccaaaggcttcaacaagaacgatgcccccctccacgagatcaacggtgatcatttgaagatctgtccccagggttctacctgctgctctcaagagatggaggagaagtacagcctgcaaagtaaagatgatttcaaaagtgtggtcagcgaacagtgcaatcatttgcaagctgtctttgcttcacgttacaagaagtttgatgaattcttcaaagaactacttgaaaatgcagagaaatccctgaatgatatgtttgtgaagacatatggccatttatacatgcaaaattctgagctatttaaagatctcttcgtagagttgaaacgttactacgtggtgggaaatgtgaacctggaagaaatgctaaatgacttctgggctcgcctcctggagcggatgttccgcctggtgaactcccagtaccactttacagatgagtatctggaatgtgtgagcaagtatacggagcagctgaagcccttcggagatgtccctcgcaaattgaagctccaggttactcgtgcttttgtagcagcccgtactttcgctcaaggcttagcggttgcgggagatgtcgtgagcaaggtctccgtggtaaaccccacagcccagtgtacccatgccctgttgaagatgatctactgctcccactgccggggtctcgtgactgtgaagccatgttacaactactgctcaaacatcatgagaggctgtttggccaaccaaggggatctcgattttgaatggaacaatttcatagatgctatgctgatggtggcagagaggctagagggtcctttcaacattgaatcggtcatggatcccatcgatgtgaagatttctgatgctattatgaacatgcaggataatagtgttcaagtgtctcagaaggttttccagggatgtggaccccccaagcccctcccagctggacgaatttctcgttccatctctgaaagtgccttcagtgctcgcttcagaccacatcaccccgaggaacgcccaaccacagcagctggcactagtttggaccgactggttactgatgtcaaggagaaactgaaacaggccaagaaattctggtcctcccttccgagcaacgtttgcaacgatgagaggatggctgcaggaaacggcaatgaggatgactgttggaatgggaaaggcaaaagcaggtacctgtttgcagtgacaggaaatggattagccaaccagggcaacaacccagaggtccaggttgacaccagcaaaccagacatactgatccttcgtcaaatcatggctcttcgagtgatgaccagcaagatgaagaatgcatacaatgggaacgacgtggacttctttgatatcagtgatgaaagtagtggagaaggaagtggaagtggctgtgagtatcagcagtgcccttcagagtttgactacaatgccactgaccatgctgggaagagtgccaatgagaaagccgacagtgctggtgtccgtcctggggcacaggcctacctcctcactgtcttctgcatcttgttcctggttatgcagagagagtggagataattctcaaactctgagaaaaagtgttcatcaaaaagttaaaaggcaccagttatcacttttctaccatcctagtgactttgctttttaaatgaatggacaacaatgtacagtttttactatgtggccactggtttaagaagtgctgactttgttttctcattcagttttgggaggaaaagggactgtgcattgagttggttcctgctcccccaaaccatgttaaacgtggctaacagtgtaggtacagaactatagttagttgtgcatttgtgattttatcactctattatttgtttgtatgtttttttctcatttcgtttgtgggtttttttttccaactgtgatctcgccttgtttcttacaagcaaaccagggtcccttcttggcacgtaacatgtacgtatttctgaaatattaaatagctgtacagaaaaaaaaaaaaaaaaaaaaa

SEQ ID NO: 26173 - DNA, 2628 bp, Homo Sapiens; identical to SEQ ID NO: 26172

SEQ ID NO: 26174 - DNA, 2358 bp, Homo Sapiens
cttaggtcgtggtggccccggtggtggtgggctccgggcgggctcgcgtcatcctgcccccgctgcgatgcatccgcggcgcccggacggatttgatggcttgggctaccggggtggtgcccgggacgagcagggctttggcggcgccttccctgcaaggtccttcagcaccgggtcggacctgggccactgggtgacgactcccccagatatccccggcagccgcaacctgcactggggcgagaagagcccgccctacggcgtgcccaccacctccaccccgtacgaaggccccacggaggaacccttttccagtggcggcggcggcagtgtgcaggggcagagcagtgaacagctgaatagatttgctggatttggtattggacttgcaagtctctttacagaaaatgtactggcacatccttgcattgttctacgccgccaatgtcaggttaattaccatgctcagcattaccatctcactccatttacagtcatcaatattatgtacagtttcaacaaaactcagggacctagagccctgtggaaaggaatgggaagtacatttattgtccagggagtcacacttggagcagaaggcataattagtgaatttacacctttgccaagggaggttttacataaatggagtcctaaacaaataggagaacaccttctactgaaatccctaacttacgtggtggcaatgcctttttattcagcaagtctgattgaaacagtgcagagtgagataattcgagataatactggcattttggagtgtgttaaagaaggaattggaagagtgataggcatgggagtgcctcatagcaaacgacttcttccgcttctttccttgatcttccctacggtgcttcatggagttcttcattacatcatcagctcagttattcagaagtttgtcctactaattctaaagagaaagacttacaatagccacctagctgagagcactagccctgtgcagagtatgttggatgcttattttccagaacttattgctaactttgctgccagtctttgttctgacgttatactttacccattggaaacagttttgcaccgccttcacattcaaggaacacgcacaataattgacaatacagaccttggctatgaagtgcttccaattaatacacaatatgagggaatgagagactgtatcaataccataaggcaggaggaaggagtgtttggtttttataaagggtttggtgctgttataatacagtacacactgcatgcagctgttttacagattaccaaaattatttactctacacttcttcaaaataacatttgagatttaggttccttcactgagtagtctggaagatataatctggataatttgctatgaagttatgagggatacaagtgaaatactggggaagaaaatggattggaaagtaaaattggtactaaagcccatactgattatcttgactttgttttttaaggcataggtatatattttggatcaaaatccttccaaatttgaaaactcaataaaaataacacttattaaattctagttagtgtagcactcatgctgaagtaaacatgatcgtaggcagaagcaaaattttattataaaatctaaaacaaaactttatagagttgaatctattccatctgacttcaatatttgccaaacgtttattttacctcctagattgatgttggtatagtatccttaatacagtgtagtatattaatgtccttaatacaatcaggaggtttttacctttaagcaaataaattatgtcattattgaaaaagacttaagggatgattagacttggcaatctgtaagcaggagtataaatgttttaaattgcattgtccctatgtaactatcttaatggctatatatatgtattttataaagccatttatgtatacacatgtaacttggaatttccttcatccctacacattttctacacttacatcaccttattgcataaaacaaagtcacgcgctttctgcttgaacatcaaaatatcaaaaaccaaggtacccaaaagatacaagtcagagacaacatccttgtccatatccaaacccagtgtttcagtgctagcaacttaatttctcatacatttatagagtttggtttgctttgctagttgtgtgaatcattgggctgtttttagagccactgttaagagagaatataaaataatcatgacaattactactgtttccacatttacaaattgtgtacttaaatgaacctcatttcccttttatttctgaatggcttgtctgagaggaaacaaaattaaaattcatctgggaaaaaaaaaaaaaaaaaaaaaaaaaaaaaaaaaa

SEQ ID NO: 26175 - DNA, 4094 bp, Homo Sapiens
gttgtgaacaggttagagttacttgttattggtaaatagccactatggagactaaggaccagaagaaacacagaaagaaaaacagtggacccaaagctgcaaagaaaaagaagtggcatctgcaggatctccagctaggagacgaagaaaatgcccagaagagaaatgccaatgcttttgcagttcagtctgctgtgtggatgtctcgatcctttcacaggactctggatttgaagacacaaaagcatcatattccagtggttgatggaactccactagagccgccaccaatagcggtagtggtgacggggcctccaaagttggaaagagcactttgatataatgcctcattcggaacttcacctggcagaagttcaccgagatcagaggccctgtgacgatcgtgtcaggtaaaaagcgcagactcaccattattgaatgtgggtgtgacattaacatgatgattgatctggctaaagtagcagatctggtactgatgcttatagatgccagctttgggtttgaaatggaaatgtttgagtttctaaacatctgtcaagcacatggctttcctaaaattctgggagttctcacccacctcgactccttcaagcataacaagcaactgaagaagacaaagaagtgattaaaacacaggttctggacagaagtttaccaggttgccaaactgttctacctttctggaatggtgcatggagaatatcaaaaccaagaaatccacaatctgggccattttattacagttatgaagtttaggcctctcatggcaaacttttcacccttatatcctggcagacagttaaaaggatggaagatttgacaaacccggaggatatccaaacaaacatcaaatgtgacctgcaggtgtcactttatggttatttaagaggagcacacttgaaaaataaaagccaaattcacatgccaggacaaggtggggctcacccatgagctggtccagagtctcatctccacctactccaccattgatgccaagatggcttcaagtcgagtgatgctgctttccaattccaaaccacttgggtcagaggctatagataatcaagggtgagtggtgtcattgagcaaacacaaagtcgggctcatccaaggatgagattttgccagagaaaggacgagcagcaagtcagggagcttaaggtaattatgagaaagtgactatctaaaattgcttaggtagaaggagacagattggatttttgtgtgtttggtatttgggataagagggatgtgggtgtgtacttgacatgggttgtttattctcgctctctctcttttttttttttttgagagggagtctcactctgtcacccaggctggagtgctgtggcacggtcttggctcactgcaacctctgcctcccgagttcaggggattctcctgcctcagcctcccgagtagctgggattgcgggtgcctgccaccatgcccggctaatttttgtgattattttttttagtggagacgaggtttcactatgtaagtgaagctggtctcgaactcctgacctcagatgatccacccgcctcggcctcccaaagtgctgggattacaggtgtgagccaccgcgcctggcctgtttattctcttaagagagaaaatgaggggattaatggactgtagttctggacaaggtggaaaactcttaaagtggaagtattggggcgaatgctctgacaggctaggatggtgcagtcagtcccttcacccagaaatcagtagaatgttagcagttcagactcaaaccttgtgaaaaacaggtggtggaaaggaaatccctcacagcaactggcaccataatcaagacaatgtttgcagaataaatggagttacctgctttcagccccaggtcatagctattgtctgccctgctgatatgtgataataatttgtgatcatgttgtcttaaaatggggtcactcatctccagtagaattaagtccacagtgaagttgtccccccatccccaaagagataaacatatatgaatgaactcacgtgataacaactactgctgcctgggatcatgagagacctgaactgaactgataggaagtgaaaggtggctgagataatgagaatagacccatctgcagaggatcataaaaccagcaaagacaagatcttgtctaagatgccttcacaaactttgtccatgagaactcttaaggatttcaccagacctgttggctgctgctgtgatctctgcccaagaggagcctctgaccaacatccaaagggcttctggacccactggactcctctggaggtaccttagtctcccgatccatggctgtgtttttttactccctttatcgctgcctgtgtgtagaatgataattgcacaattgatagtgtgaagacctcttgataaatggtaaatctgagcatatgtatttggctgacatgtcattgtgaaacctcacagcttcagtcagtgtcaacgcagctagggagcatgtacctaatgcacatatcactgggcatagtctacaggcacctaataactcaggtaccttaacagtcactaatgagtgtctctccaaggactaaacaatggaagactgtagaagatgctattcattaaaatatctcaagaatatggaagactattattcgcttctcatgggacaggactttatagggcacctgaaaaaactcccatgaaaaatcacttttacaaaatgtcaagttatgatatccaagatgaaaccaatgagtcacaacattcacataatacactgtacaaccctgatctcttgactgtcatcaaatgtttcttacctctaaaccaaagtttcattttataatttaatttttctcattttttccattctcttagcttaagaaaagatcattacaaactttttgtaagtttttcatatatgcttgcaaagggttgtaaaactttattgtgattattcttgctttaagctgaaacttccctaatctttctttagagattgtggcatagcatgttagtttcttttccatatccaattgttttctgttatgaatacagaaatacaggcactgtcttgtaactttaaatagacatcatctcaagtctacaagaattatccaaaatggtatttaatgacatttctaggtcttcagacactattaatgcagattgtagcctctaggtcctgaagattttactagatactggttactgaaactgagctttcttgaattctttttccttccactgtggtttcccgcatttcaacatatcacctatttttgtcctcaaaggttacttaaatgttttccacagaattaaattaaatatgaatcatccctcctctgatttttgaaatgaccctttgcttcctatgataatgattcttctggtccgttttgtagttatatgttagagtttgtaaatagtcacacattttgcaactgcatataattttcttattattttttcctcttcctctaaaactgctgttatttcttttaactttttgtgggaaaaattaaacccatctttcactttgttgatatacttatttataattgaactccttgatttttgctcgaattgcttttcaagttacccacttttagggaagacattatttgggttttgtttagtgtatcaggctttttttagttagttgtatcaagaagtgtagacttttctatacataatatcctttttcccacagtatttttttttttttaaagtctagccaggtgcagtggctcacgcctgtaatcccagactttgggaggccgaggccggcggatcacgaggtcaagagatggagaccatcctggctaacacgttgaaaccccgtctttactaaaaatacaaaaaattagctggacatggtaacgggtgcctgtggtcccagctaatcgggaggctgaggcaggagaatggcatgaacccgggaggcagaggttgcagtgagccgagatcgtgccactgcactccagcctgggtgacagagcaagactccatctcaaaaaaaaaaaaaaaaaattatgttaaaataaaggtcatcaaaagatattttcctaaaaaaaaaaaaaaaaaa

SEQ ID NO: 26176 - DNA, 2426 bp, Homo Sapiens
cctttgcccgccttggcggccggctctacgttccctgttctcgcctgcagctccgccatggctcctaaaggcagctccaaacagcagtctgaggaggacctgctcctgcaggatttcagccgcaatctctcggccaagtcctccgcgctcttcttcggaaacgcgttcatcgtgtctgccatccccatctggttatactggcgaatatggcatatggatcttattcagtctgctgttttgtatagtgtgatgaccctagtaagcacatatttggtagcctttgcatacaagaatgtgaaatttgttctcaagcacaaagtagcacagaagagggaggatgctgtttccaaagaagtgactcgaaaactttctgaagctgataatagaaagatgtctcggaaggagaaagatgaaagaatcttgtggaagaagaatgaagttgctgattatgaagctacaacattttccatcttctataacaacactctgttcctggtcgtggtcattgttgcttccttcttcatattgaagaacttcaaccccacagtgaactacatattgtccataagtgcttcatcaggactcatcgccctcctgtctactggctccaaatagaccatgtcagcttcaccccctggctttgtgtctatgggtggcctgtggtatatggaaaagtagcagggtggtcagggtgggagacacaagatgtttttatagtctagagcctttaaaaaacccagcagaatgtaattcagtatttgtttattggctgttttttgacagattgttgaaattaaatgaattgaaagggaaactcagagtactaggacgtttattaaaaggaaaaaaatgtcttgcaatgtgctgtaatcacaagaggagaaaataacttgtttccttgatctgtcagaggtcacagtaacctgggccgagctgttattatttattatataatagtagtaggaagttaataactggttctctgtgttccaagcacaatattacaacttcttttgaaccgtaaatatcagaatgaatcctcttcccaggggattgaacagaagcttaatgtttacaagtgtttgaatttgtgatctgaaataacacaaaattaaaaacatgatttctctaattttccaactagaggaagagaaacttgtggaaaagttctttttttttctttttttttcttaaagaagggcagccaaggtagtaacctaaaaatagtgcccaggcatatgagagttgtcctacgaggttaaagaacacactgttccactgtatggctttggccctgagtggccagggaggtcaacttgaccctgccatgttggtttgacttactaagacacaggaatcactgttttccttgaccagggtctcacaccctggaggaatgttaagtaagagaaagaacctctttcctgaatattgacatgtaaaagaccaaagtaatttttctgaacttctgcaattctgagaactctccaaggaatttacagtgattttagtgcttgtcagcatttttccatgaggactttcatacatttgactctttagttcacaggttcccattgattgtgagcaagatatttatctctttagcccttggggatccagctgagagcaatctcttgcatttttttacccgtgtatgtacagatatcatttcttgtgtatgccatgacttgaaaaagtttgggaagctctttagcaatatcagctaaaaggatatgaaatcacaggtgatagcagttgtcattcagtaatttcctacaagcagcaccccaaaggaaatatagtcctaatctttactatccacttctaaatttaatgtgaatttcatacatgttattagttgttttctttataattttataaaaattattcatcgggagtttaacttccacttccatgctatcggatgtgttgggctccatgcaagaacttggaagaaaaacaggcaggaatgcatttgcataatgacccagatcatcattttctgcaactgagaattatatttcatcattgcttctagaagtctgcaattctttacttttctttggtgcattattatctaggtgccatcactggataatgtggagtgactagagaagtcacatatcactgtaaggtacagttagggtaacactttagaggtttattatttttaaaaaacttttcttgaactcctggccaacatggtgaaaccccgtctctactaaaaataccaaaattagccaggcgtgatggtgggcgcctgtaatctcagctacttgggaggctgaagcaggagaactgcctgaacccaggaggcagaggttgcggtgagtcgagatcgtgctactactgcctgggtggcaagggtgagactccatctcaaaaaagaaacaaaaaaaaaaaaaaaaaaaaaaaaaaaaaaaaaa

SEQ ID NO: 26177 - DNA, 1811 bp, Homo Sapiens
gttaggtgcctggatgacaagtggacagtttaagccggttcctcagatcctaatggagctgccccctgccgagcaacagaggctctttaacgaagccgcagccatcatcaggcacctggagtggacggacgccgtgcagctgactgcgctggtcatgggcagcgaggccctgcagcagcagctgctggccatgctggtgaactacgtcaccaaggagctgcgggccgagatccagtatgatgactaggccgcacctccggggaggtggggggcccctttaaatgactctgtgattctgaagaggtggcttgggagttgggagaagcccagcggatgccccctggggaatctccacatcatcagtgtattactagtaatgtcccgctggagaggccaccgctgtgcagtgtcatgttccagaaattactgatgaagcagcatgtgttggtggcatgtgcactggcctgccatgacagccctctgactggccccccagtgaagagtaaaggcctgcctgccgcaggcttcggaggcgtctgctgagtcctctcacccgcatgggtctggggaagtgatcacgctcagccgacggtctgaccacacttcatcctccccccggggccttctcatcttgggagatgactcctcttcagagcacctgctgcaggactggatcccaccccgctgcaggtcctggggtctcagggccttggagcagcccatgctggaatcatgtttacctcctagtgcaaccgtcccctacccagggactgtcgaatggccccacggaggggacgggcggcctgctgagtgaagccacaaataccgagtggacttgaccccggcccccactaggctgcacacctagactcgccctgccagggcctcgctcttcccatctgaaaagtcctggtagttcttgaggtttacttctcaaatgaaatatttttagtaaaaagtacaggtatatctcggagatattgtgggttcagttccagaccacctcggtaaagccaacatcacaataaagcaaggaagcgcattgttttagtttcccagtgcatctaagtcatgtttactgcatattgcagtccactaaatgtgcaatagcattatgtctaacaaatatacaaaccttaatttaaaaatatttactgttcaaaatgctgacacagaaacgcaaagtgagcacatgctgttggaaaatggtgccaaatagacttgcctgatgccaggctgctacaaaccttcaatttaaaaaaaaaaaacagtattcacaaagcatagtagaatgaggtatgcctgtattgctctttctgaagtggtgtgatataaaccatctctaagaaatgtttctaccgtaaagatttccccagtacagtcagctctctgtaactgtggtctccacatttagatccaaccagccttggataggaaatatttgaaaaaagaaattgcattggtactgaacacgtacagacctttttttcttgccattattccctaaacaatatggtgtagcatatttacatagcatttatattgtatttggtattataagaaatctagagatgatttaaattatacaggaaggtgtgcgtaggttacgtgcaaacgctatgccattgcccatcagggacttgagcatcctcagatgtcggtgtctgagggttgaggttgcagtcctggaacccatcccccatggatactgaggcatagctgtactgtgtgttttcactttgctttcagaactacgacttgaatgtgatcgattacaataaatgtttttctaaaaaaaaaaaaaaaaaaaa

SEQ ID NO: 26178 - DNA, 1698 bp, Homo Sapiens
cttcctcacagttctcacatatggaaaggatacacactttgtagaaacaagaactttatgttatccaagttctaggatagccatgagctccaattatctcagagctctgagtcctctactcaatacccattgagatttatgtgttctgaggcttttgtcttctagctacttacttcattctccatgggtaacgtcattcatccacattaactaatttcctcactccaagctcttttctagagataatctccagtccctgtgcagaaactgtcattgcactttctgctgaaatggcagtttcttctcagcaaggtgagattatggaatccagaatcttttttcaggggtcacatgcccatttccccacttgcatgaatgtcgacactgcagccacagttttggccgtaaatgtgaatttggcaagtaaccactgttcccagggaaatgtcccaatcagaagaagattatctgggacactgatactgacagggagatgggacattctgagggacccggaggcagggtgccacctcctcaacttccctgagggctgcctagaatctgtttcctctcactctgaattattcttcctcttatggctgaccaaaaacatggaacctcacaaagtccactgtaacagctttatatttgtgaagtgaagaacatgaagacagtttcaagcaaagttattgagtggacactttgtgttttttttgagaagtctcactctttcacccaggctggagtgcagtggcacgatctcggctcactgcaactccacctcccgggttcacgccattctcttgcctcagcctcctgagtagctgggcctataggttccctccaccacgcccagctaatttttgtatttttagtagagatgggctttcactacgttagccaggctggtctcaaactcctgacctcatgatccacccccctcggcctcctaaagtgctgggattacaggcatctgccaccgcactcggcttatccctagaaatcctatgatagcatgatgtataggcacctaaaggcatggcacttgagaaatgtgaataagattgtaagttacaaatagcaaggtacagtcagatgttaacagtctcagcccctaaatgtcaccttgtattacagcatgttatataagcacatacaggcacatacatgaaatagtgatacttcattctcagtaatatcttcatccttctcactggaaagatctttgatgatttttaatcaacataggagtttcaatgatatctagaagtttaaaagggctcgttcaaacaaattatgaccacacacactgaagagtatgtttgtctcttgtggtgtaaatttttttttattacaccaaattatgttcacacaaaacctttgtaatcagggggaattaaagagccttcctggaaaatggaggttgcaatcagccgagatggtgccatcgcactctagcctggggaatagagtgagatcctgcctcaaaaaaaaacaaaaaaattctttattttctccataaactacagtttatataagcaaaagtttcagtactaagcaattttagtctctgcagtctcttgtcttgaattaatacaacttttgttaattctcttatgaagttaatcttcctgcttgtatgtgaattaaatatatgtcaaactttttttgtacaaaagaaaaaaaaaaaaaaaaaaa

SEQ ID NO: 26179 - DNA, 2430 bp, Homo Sapiens
gcagctgcggcggggccgaatcctaatgtacctggctagctggtggtgagtaggggctttggggccaacttggtgggctccccaaggaaacccctttgaaaccaatggatgcattcacgggctcgggtctcaagaggaagtttgatgatgtggatgtgggctcatcagtttccaactcagatgatgagatctccagcagtgatagtgctgacagctgcgacagcctcaatcctcctaccactgccagcttcacacccacatccatcctgaagcggcagaagcagctgcggaggaagaatgtacgctttgaccaggtgactgtatactactttgcccggcgccaaggttttaccagtgtgcccagccagggtggtagctctctgggcatggcccagcgccataactctgtacggagctatacactctgtgagtttgcccaggaacaggaggtgaaccatcgagagattctgcgtgagcacctgaaggaagagaaactccatgccaagaaaatgaagctgaccaagaatgggacagtggagtcggtggaggctgatggcctgacgctggatgatgtgtcagatgaagatattgatgtggaaaatgtggaggtggatgattacttcttcctgcagcctctgcccaccaaacggcgacgggccctgctgagggcttctggggtccaccgtattgatgctgaagagaagcaagaacttcgagccatccgcctgtcacgggaagaatgtggttgtgactgccgactgtattgtgacccagaagcgtgtgcctgcagccaggctgggattaaatgccaggtggatcgcatgtcctttccatgtggctgctcccgggatggctgtgggaacatggcaggacgcattgaatttaatccaatccgggtccggactcattacctccacaccattatgaagctggagctggagagcaagcggcaggtgagccgcccagcagccccagatgaggagccctccccgactgccagttgcagcctgacaggagcacagggctctgagacccaggacttccaggagttcattgctgagaatgagacagcagtgatgcacctgcagagtgcagaggaactggagcggctcaaggcagaagaagattccagcggctctagtgccagcctggactcgagcatcgagagcctgggtgtgtgcatcctagaggagcctctggctgtccccgaagagctgtgcccaggccttacagcccccattctcatccaggctcagctgcccccaggctcctctgtcctgtgttttaccgagaactcagaccacccaactgcctcaacggtgaacagcccatcctacttgaacagtgggcccctggtctattatcaagtggagcagaggccagtcttgggagtgaaaggagagcctggtacggaagaaggctcagcctctttcccaaaggagaaggatctgaatgtcttctctctccctgttacctcactcgtggcttgtagctccacagacccagctgccctctgtaaatcagaggtggggaaaacacccaccctagaagctctattgcccgaagattgtaaccctgaggagcctgaaaatgaagacttccacccttcctggtccccctcaagcctccccttccgcacggacaatgaagagggctgtgggatggtgaagacctcccagcagaatgaggatcggccccctgaagattcttccttagaactccctctggcagtgtgacaggcgctagaggtcctgcctcttacccattctctatttattcccttattttatctaacaccatttcaaaacaaaactgtagaagcagctgctgctcccatgttattttattggggtctttggggaatgggtgggaaaggattgtttgagtattttttaaaagggaaacagtaccaaggagaccagccctaccttgatctggggatagtcttggggcaaagaaagctgcgtagtgctgaacattaagctttctgggccactggaacaaagaactaggatctcacaggaaaagctgggtaactcaagcagctattctttctgtagggaccagaacacgagaatttgaagagcatggcaaagccctttctctcccaagccccaggcagagtacaagctcatttttctcggtggttattctgatatcccattttggtgtgtcataatacttcaaactggaaagtcacctggtcgagtctagggaggagggagtggaagggtctctgcttctgtacaaaatctccaggatttacaaaaatgtaacctgccttccttcaatcccatatttggtaaataagttaatatttgacatgtttggtgttctctgacctgttccccacactggggattcctggtctgtaacttgaattgtttcttccacatgttcttaagtactagaaaaaaaaaaaaaaaaaaa

SEQ ID NO: 26180 - DNA, 2057 bp, Homo Sapiens
ctgctctcgaccatctggctcctcatcgtcctctggggttcttatggtgggacccaacttcagggttggcaagaagataggatgtgggaacttcggagagctcagattaggtaaaaatctctacaccaatgaatatgtagcaatcaaactggaaccaataaaatcacgtgctccacagcttcatttagagtacagattttataaacagcttggcagtgcaggtgaaggtctcccacaggtgtattactttggaccatgtgggaaatataatgccatggtgctggagctccttggccctagcttggaggacttgtttgacctctgtgaccgaacatttactttgaagacggtgttaatgatagccatccagctgctttctcgaatggaatacgtgcactcaaagaacctcatttaccgagatgtcaagccagagaacttcctgattggtcgacaaggcaataagaaagagcatgttatacacattatagactttggactggccaaggaatacattgaccccgaaaccaaaaaacacataccttatagggaacacaaaagtttaactggaactgcaagatatatgtctatcaacacgcatcttggcaaagagcaaagccggagagatgatttggaagccctaggccatatgttcatgtatttccttcgaggcagcctcccctggcaaggactcaaggctgacacattaaaagagagatatcaaaaaattggtgacaccaaaaggaatactcccattgaagctctctgtgagaactttccagaggagatggcaacctaccttcgatatgtcaggcgactggacttctttgaaaaacctgattatgagtatttacggaccctcttcacagacctctttgaaaagaaaggctacacctttgactatgcctatgattgggttgggagacctattcctactccagtagggtcagttcacgtagattctggtgcatctgcaataactcgagaaagccacacacatagggatcggccatcacaacagcagcctcttcgaaatcaggtggttagctcaaccaatggagagctgaatgttgatgatcccacgggagcccactccaatgcaccaatcacagctcatgccgaggtggaggtagtggaggaagctaagtgctgctgtttctttaagaggaaaaggaagaagactgctcagcgccacaagtgaccagtgcctcccaggagtcctcaggccctggggactctgactcaattgtacctgcagctcctgccatttctcattggaagggactcctctttgggggagggtggatatccaaaccaaaaagaagaaaacagatgcccccagaaggggccagtgcgggcagccagggcctagtgggtcattggccatctccgcctgcctaaggctctgagcaggtcccagagctgctgttcctccactgcttgcccatagggctgcctggttgactctccttcccattgtttacagtgaaggtgtcattcacaaaaactcaaggactgctattctccttcttccccttagtttactcctggtttttaccccaccctcaaccctctccagcataaaacctagtgagctaaaggctttgtctgcagaaggagatcaagaggctgggggtaaggccaagaaggtaggaggaaaatggcagacctgggctggagaagaaccttctccgtatcccaggtgtgcctggcagtatggtttcctcttcctctgtgcctgtgcagcattcatcccagctggccttggggttcaggttccttcttccctccctcctgtgaagttacactgtaggacacaagctgtgagcaatctgcagtctactgtccctgtgtgttggcgttcttagcttttttgacaaactcttttctccaggtagtaggacaatgaaaattgttctaagcaaaggaaagaaaactgactttgttgcacttttagtttttttaaaaaaaacaaaaacaaaaacatggcagatgcaaaaaaaaaaaaaaaaaaaaaaaaaaaaaaaaaaaaaaaaaaaaaaaaaaaaaaaaaaaaaaaa

SEQ ID NO: 26181 - DNA, 2671 bp, Homo Sapiens
ggtggccgagaaccagggctttgtggcagcactgatggtgcaggaggcaccggccctggtacggctgagcctggggtcccatcgggtcaagggcccactcccagtgttgaagctccagccggaggcgctggagcccatctactctctggagctgcgcttccgtgtggaaggacagctgtatgcacccctggaggctgtccatgtgccctgcctgtgtcctggccgccctgcccgccctctgctcctgcctctgcagccccgatgcccggcccccgcacggctggatgtccatgccctttacaccacatccactggtctcacgtgccatgcccacttgccacccctgttcgtgaactttgccgacctctttctgcctttcccgcagcctccagagggggccgggctgggcttctttgaggagctctgggattcctgcctgccagagggtgctgagagtcgtgtgtggtgtccacttgggccacagggcctggagggcttggtgtcccgccacctggagccttttgtggtggtggcccagcctcctaccagctactgtgtagcaatccacctgcccccggactcaaagctgctgctgcggctggaggcggccctggcagatggagtgcctgtggccctgcggaccgatgactgggccgtgctgcccctggcgggggactacctccgtgggctggcggctgctgtctgagccccgggagaccaggtgggggcaggactgtggcccttgtgggggccaaggcacactcctgtagctctgtcgccaaaaccctgcattccgcagtgccctcgctggcttgttttcttttgggccccggttgggagcaggctcctgggggtgagggtctgtctgagtctgtttttgctgctctagcaagatccctgagacggggtaagttataataaacagaaatgtattggctcagagctctggaggctgggaagtccatagtggagggcccagagcccagtgaggacccttctgcatcttcccatgacagaggacagagtgacaggagtgaggggagagagcgaacccactcccaagataacggcctgagtccacgcaggagggcagagccctcgtggcctgaccacctcttagggtctaatcttatactgttacagtggcaatcgcatttcaacgtgagcgtgggaggggacaaacattcaaaccatagcagggtcataggccccaagaaggcttccagacagaacccggcactgtagagctacagagttccttctcacccagacacactagtgctctccagaatctctgcccaggaggcaggggaaaaatctcctttctgcttcccagagagggtctggccttgcccaaggccactcagtgatttaggaagaaggctgaagctagagtgtggacctgacctgttggacagtacttttctttctttttttttcggggaggggttaaagacaggatctcactctggcgctctggagtgcagtggtgtgattagggatcattgcagactctgcctctcaggctcaggtgatcctcccatctcagcctgcctccgagtagctgggactacaggtgtgagtcaccactgtattttttgcagacaggatctccctgtttcctaggctggtctcgaactcctgggcttaaatgactcttctgcctcagcctcaccaaagtgttgggattactggtgtgagcccccacacctggccgagccagcgcttctcaactcccaaggtttgcaagctccctgccccagggagctcacgccaggcaggccagtgggcctaagccagaaacagaaagacagcagtggccaggtggagagcttcccaagctgtgccgattagagccagctctaggaagggcctgctaataaggtctagggtctgagaccaagttttttctaatctcagcccctaagaaacctaatttgtgcttaggaatcttcccaggtaagaagaactagttcctctagttgttgtttttttttcccaaacatgcaaacactgaggattgagctgtgtggggtcagctgtgctgccaggcacatgtacgttgcctcatttcatccttgcaacagctctgcagggccccgcagatgaggaaatccgtaggcaggagcggttgagtgattttcctaaggtcacccagctgtttggtaatagtgttttgtcatctggtagcaggtttccattaccatgccatcagagcagacctcagccagggccacagaggtcccaaccgtctctgccctcttctgctgcccctgcctcatgggctcccagccacaggttccccatgggccagctttacgcctcctgatccttccgattggggcagactaggagaggaaagacgggcctgggctgggtgcggtggctcatgcctgtaatcccagcactttgagaggctgaggcgggtggatcacctgaggccaggtgtttgagatcagcctggccagcatggcgaaaccctgtgtctaataaaaatacaaaaattagccgggcgtggtggcgggcgcctgtaatcccagctacttgggaggctgaggcaggagaattacttgaacctgggaggcagaagttgcagtgagccgagatcacgccactgcactccagcctgggcgacagagcaaggctctgtctcaaaaaaaaaaaaaaaaaa

SEQ ID NO: 26182 - DNA, 1455 bp, Homo Sapiens
accttgggggcctcactgcagccgccgctgctgttggagtgggctttgcgagtctgaacgttggcggggctaggctcgttaactgccgagagcctccgggtttgcggtggaggacgctgaggcccgtggggggcaggcacccgggcgccgggcctcccagccgacatgtctctagtggcggaagccttcgtctcccagattgcaggctggagtgcagtggcacaacctgggctcactgcaacctccgcttcccgggttcaagcgattctcctgccttagcctcccgagtagttgggattacaggcgcccgccaccacgcccgcgcggattcatggaaaatttttaaatctgcatgtactttaaagaaatacttttgagtcggtggactgaacatgactgatgtatatagctgcagaaccttggcctgaaaatgctacattatatcagcaattgaaaggggagcaaattttactttctgacaatgcagcttctcttgcagtgcaggcctttttgcaaatgtgtaacttgcctatcaaagtagtttgtagggcaaatgcagaatatatgtctccatctggtaaagtaccttttattcatgtgggaaatcaagtagtatcagaacttggtccaatagtccaatttgttaaagccaagggccattctcttagtgatgggctggaggaagtccaaaaagcagaaatgaaagcttacatggaattagtcaacaatatgctgttgactgcagagctgtatcttcagtggtgtgatgaagctacagtaggggagatcactcatgctaggtatggatctccttacccttggcctctgaatcatattttggcctatcaaaaacagtgggaagtcaaacgtaagatgaaagctattggatggggaaagaagactctggaccaggtcttagaggatgtagaccagtgctgtcaagctctctctcaaagactgggaacacaaccgtatttcttcaataagcagcctactgaacttgacgcactggtatttggccatctatacaccattcttaccacacaattgacaaatgatgaactttctgagaaggtgaaaaactatagcaacctccttgctttctgtaggagaattgaacagcactattttgaagatcgtggtaaaggcaggctgtcatagagttatgtgttagtctcaggagtcttaacttttgaaatatgttttacttgaatgttacattagatattggtgtcagaattttaaaaccaaattactgctttttgaaacctcaaattatataatgtatcttatgtatgtgctttatattgttatttgtgtatacattaaaataattctgaattatttaatctgatatgttgtattctgtatcttgaaatttttgtttccttgaaacatgcatgcatttaaaaataaagcttaaacaactgtaaaaaaaaaaaaaaaaaaaaaaaa

SEQ ID NO: 26183 - DNA, 1713 bp, Homo Sapiens
gtctccaggggagcgatggcagccgggggtctgagccgctccgagcgcaaagcggcggagcgggtccggaggttgcgggaggagcagcagagggagcgcctccgccaggtgtcgcgcatcctgaggaaggcggcggcggagcgcagcgccgaggagggccggctgctggccgagagcgcggacctggtaacggagctgcagggccggagccggcggcgcgagggcctgaagcggcggcaggaggaggtgtgcgacgacccggaggagctgcgggggaaggtccgggagctggccagcgccgtccggaacgccaaatacttggtcgtctacacaggcgcgggaatcagcacggcagcgtctatcccagactaccggggccctaatggagtgtggacactgcttcagaaagggagaagcgttagtgctgccgacctgagcgaggccgagccaaccctcacccacatgagcatcacccgtctgcatgagcagaagctggtgcagcatgtggtgtctcagaactgtgacgggctccacctgaggagtgggctgccgcgcacggccatctccgagctccacgggaacatgtacattgaagtctgtacctcctgcgttcccaacagggagtacgtgcgggtgttcgatgtgacggagcgcactgccctccacagacaccagacaggccggacctgccacaagtgtgggacccagctgcgggacaccattgtgcactttggggagagggggacgttggggcagcctctgaactgggaagcggcgaccgaggctgccagcagagcagacaccatcctgtgtctagggtccagcctgaaggttctaaagaagtacccacgcctctggtgcatgaccaagccccctagccggcggccgaagctttacatcgtgaacctgcagtggaccccgaaggatgactgggctgccctgaagctacatgggaagtgtgatgacgtcatgcggctcctcatggccgagctgggcttggagatccccgcctatagcaggtggcaggatcccattttctcactggcgactcccctgcgtgctggtgaagaaggcagccacagtcggaagtcgctgtgcagaagcagagaggaggccccgcctggggaccggggtgcaccgcttagctcggcccccatcctagggggctggtttggcaggggctgcacaaaacgcacaaaaaggaagaaagtgacgtaatcacgtgctcgatgaagaacagttggcactttgcagatggccagtgtcacggtgaaggctgggttgcccccacgggtctagggagaacgaactctttggggatgacattttcaccgtgacatttttagccatttgtccttgaggaagccccttgcactgctgcggttgtaccctgatacggcctggccatcgaggacacctgcccatccggcctctgtgtcaagaggtggcagccgcacctttctgtgagaacggaactcgggttatttcagccccggcctgcagagtggaagcgcccagcggcctttcctcgctcaccaggccagtctcagggcctcaccgtatttctactactacttaatgaaaaagtgtgaactttatagaatcctctctgtactggatgtgcggcagaggggtggctccgagcctcggctctatgcagacctttttatttctattaaacgtttctgcactggcaaaaaaaaaaaaaaaaaa

SEQ ID NO: 26184 - DNA, 3402 bp, Homo Sapiens
gtggctccccgtcctggtgcgggacctgtgccccgcgcttcagccctccccgcacagcctactgattcccctgccgcccttgctcacctcctgctcgccatggagtcgctggttttcgcgcggcgctccggccccactccctcggccgcagagctagcccggccgctggcggaagggctgatcaagtcgcccaagcccctaatgaagaagcaggcggtgaagcggcaccaccacaagcacaacctgcggcaccgctacgagttcctggagaccctgggcaaaggcacctacgggaaggtgaagaaggcgcgggagagctcggggcgcctggtggccatcaagtcaatccggaaggacaaaatcaaagatgagcaagatctgatgcacatacggagggagattgagatcatgtcatcactcaaccaccctcacatcattgccatccatgaagtgtttgagaacagcagcaagatcgtgatcgtcatggagtatgccagccggggcgacctttatgactacatcagcgagcggcagcagctcagtgagcgcgaagctaggcatttcttccggcagatcgtctctgccgtgcactattgccatcagaacagagttgtccaccgagatctcaagctggagaacatcctcttggatgccaatgggaatatcaagattgctgacttcggcctctccaacctctaccatcaaggcaagttcctgcagacattctgtgggagccccctctatgcctcgccagagattgtcaatgggaagccctacacaggcccagaggtggacagctggtccctgggtgttctcctctacatcctggtgcatggcaccatgccctttgatgggcatgaccataagatcctagtgaaacagatcagcaacggggcctaccgggagccacctaaaccctctgatgcctgtggcctgatccggtggctgttgatggtgaaccccacccgccgggccaccctggaggatgtggccagtcactggtgggtcaactggggctacgccacccgagtgggagagcaggaggctccgcatgagggtgggcaccctggcagtgactctgcccgcgcctccatggctgactggctccggcgttcctcccgccccctcctggagaatggggccaaggtgtgcagcttcttcaagcagcatgcacctggtgggggaagcaccacccctggcctggagcgccagcattcgctcaagaagtcccgcaaggagaatgacatggcccagtctctccacagtgacacggctgatgacactgcccatcgccctggcaagagcaacctcaagctgccaaagggcattctcaagaagaaggtgtcagcctctgcagaaggggtacaggaggaccctccggagctcagcccaatccctgcgagcccagggcaggctgcccccctgctccccaagaagggcattctcaagaagccccgacagcgcgagtctggctactactcctctcccgagcccagtgaatctggggagctcttggacgcaggcgacgtgtttgtgagtggggatcccaaggagcagaagcctccgcaagcttcagggctgctcctccatcgcaaaggcatcctcaaactcaatggcaagttctcccagacagccttggagctcgcggcccccaccaccttcggctccctggatgaactcgccccacctcgccccctggcccgggccagccgaccctcaggggctgtgagcgaggacagcatcctgtcctctgagtcctttgaccagctggacttgcctgaacggctcccagagcccccactgcggggctgtgtgtctgtggacaacctcacggggcttgaggagcccccctcagagggccctggaagctgcctgaggcgctggcggcaggatcctttgggggacagctgcttttccctgacagactgccaggaggtgacagcgacctaccgacaggcactgagggtctgctcaaagctcacctgagtggagtaggcattgccccagcccggtcaggctctcagatgcagctggttgcaccccgaggggagatgccttctcccccacctcccaggacctgcatcccagctcagaaggctgagagggtttgcagtggagccctgagcagggctggatatgggaagtaggcaaatgaaatgcgccaagggttcagtgtctgtcttcagccctgctgaacgaagaggatactaaagagaggggaacgggaatgcccgcgacagagtccacattgcctgtttcttgtgtacatgggggggccacagagacctggaaagagaactctcccagggcccatctcctgcatcccatgaatactctgtacacatggtgccttctaaggacagctccttccctactcattccctgcccaagtggggccagacctctttacacacacattcccgttcctaccaaccaccagaactggatggtggcacccctaatgtgcatgaggcatcctgggaatggtctggagtaacgcttcgttatttttatttttatttttatttatttatttatttttttgagacggagtttcgctcttggtgcccaggctagagtgcaatggcgcgatctcagctcacctcaacctccgcctcccgggttcaagcgattctcctgcctcagcctccctagtagctgggattacaggcgcccgccaccatgcccggctaattttgtatttttagtagagacagggtttctccatgttggtcaggctggtctcaaactcccgacctcaggtgatccacccacctcggcctcccaaagtgctgggattacaggcgtgagccaccgcgccccacctaacccttccttatttagcctaggagtaagagaacacaatctctgtttcttcaatggttctcttcccttttccatcctccaaacctggcctgagcctcctgaagttgctgctgtgaatctgaaagacttgaaaagcctccgcctgctgtgtggacttcatctcaaggggcccagcctcctctggactccaccttggacctcagtgactcagaacttctgcctctaagctgctctaaagtccagactatggatgtgttctctaggccttcaggactctagaatgtccatatttatttttatgttcttggctttgtgttttaggaaaagtgaatcttgctgttttcaataatgtgaatgctatgttctgggaaaatccactatgacatctaagttttgtgtacagagagatatttttgcaactatttccacctcctcccacaaccccccacactccactccacactcttgagtctctttacctaatggtctctacctaatggacctccgtggccaaaaagtaccattaaaaccagaaaggtgattggaaaaaaaaaaaaaaaaaaaaaaaaaaaaaaa

SEQ ID NO: 26185 - DNA, 1384 bp, Homo Sapiens
gactcccagaactccggacgtgtgcggcgcagtgagtcgcagccatgttcctggttaactcgttcttgaagggcggcggcggcggcggcgggggaggcgggggcctgggtgggggcctgggaaatgtgcttggaggcctgatcagcggggccgggggcggcggcggcggcggcggcggcggcggcggtggtggaggcggcggtggcggtggaacggccatgcgcatcctaggcggagtcatcagcgccatcagcgaggcggctgcgcagtacaacccggagcccccgcccccacgcacacattactccaacattgaggccaacgagagtgaggaggtccggcagttccggagactctttgcccagctggctggagatgacatggaggtcagcgccacagaactcatgaacattctcaataaggttgtgacacgacaccctgatctgaagactgatggttttggcattgacacatgtcgcagcatggtggccgtgatggatagcgacaccacaggcaagctgggctttgaggaattcaagtacttgtggaacaacatcaaaaggtggcaggccatatacaaacagttcgacactgaccgatcagggaccatttgcagtagtgaactcccaggtgcctttgaggcagcagggttccacctgaatgagcatctctataacatgatcatccgacgctactcagatgaaagtgggaacatggattttgacaacttcatcagctgcttggtcaggctggacgccatgttccgtgccttcaaatctcttgacaaagatggcactggacaaatccaggtgaacatccaggagtggctgcagctgactatgtattcctgaactggagccccagacccgccccctcaccgccttgctataggagtcacctggagcctcggtctctcccagggccgatcctgtctgcagtcacatctttgtggggcctgctgacccacaagcttttgttctctcagtacttgttacccagcttctcaacatccagggcccaatttgccctgcctggagttccccctggctctaggacactctaacaagctctgtccacgggtctccccattcccaccaggccctgcacacacccactccgtaacctctcccctgtacctgtgccaagcctagcacttgtgatgcctccatgccccgagggccctctctcagttctgggaggatgactccagtccctgcacgccctggcacacccttcacggttgctacccaggcggccaagctccagaccgtgccagacccaggtgccccagtgcctttgtctatattctgctcccagcctgccaggcccaggaggaaataaacatgccccagttgctgatctctaaaaaaaaaaaaaaaaaaaa

SEQ ID NO: 26186 - DNA, 1834 bp, Homo Sapiens
ggtggcatccatgacaatgaatgtgatccaaaccgtgcctaacttggactggctctctgtgtggatcaaagcgtatgcttttgtgcacactggtgacaactcaagagcaatcagtaccatctgttcactagagaaaaaatccttattgcgagataacgtggacctattgggaagcttggcagatctgtacttcagagctggagacaataaaaactctgtcctcaagtttgaacaggcacagatgttggatccttatctgataaaaggaatggatgtatatggctacctactggcacgagaagggcggctagaggatgttgagaaccttggatgccgccttttcaatatctctgatcagcatgcagaaccgtgggtggtttctggctgtcacagcttctatagcaaacgctactcccgggccctctatttaggagccaaggccattcagctgaacagtaatagtgttcaagctctgctacttaagggagcagcacttaggaacatgggcagagtccaagaagcaataatccactttcgggaggccatacggctcgcaccttgtcgcttagattgttatgaaggtcttatcgaatgttacttagcctccaacagtattcgagaagcaatggtaatggctaacaacgtttacaaaactctgggagcaaatgcacagacccttacccttttagccaccgtttgtcttgaagacccagtgacacaggagaaagccaaaacattattagataaagccctgacccaaaggccagattacattaaggctgtggtgaaaaaagcagaactacttagcagagaacagaaatatgaagatggaattgctttgctgaggaacgcactggctaatcagagtgactgtgtcctgcatcggatcctaggagatttccttgtagctgtcaatgagtatcaggaggcaatggaccagtatagtatagcactaagtttggaccccaatgaccagaagtctctagaggggatgcagaagatggagaaggaggagagtcccacggatgccactcaggaggaggatgtggacgacatggaagggagtggggaagaaggggacctggagggcagcgacagtgaggcggcccagtgggctgaccaggagcagtggttcggcatgcagtgagggggcggcagctccatggccgcagtggcctgccctgctctgagcacttccgtggactgaaggaaccgtaggagcctgctctcagaaggacaatgattcagcatgtgattgcagcaggggtctctgccccctcgctcccaattcctagtcgtgacttcatttctaaaacagagcctgaccaaccttccatgtatctccatcctcccctgctccagccagggaggactgagggagtgccccgagacccacgcacatgttggggcttctgggccaagagtactttttatataactaatttctaaatccaaaagctcaaggaatagacagtgttctgtgacatggattggtttgaaggagttacccaccatcccagcacgataatgtcatctcccaagttggatggcagcacgatctggccctagggagcttcctgttcccagaagtcattgtcctgggctatccagatgtccctagtaaatcttgcttccttctgcaatgttagtaatgccttaagctgacagttgctattttgcagaacagttttcctctttgcttagctagtaacttgcctctgagcctgggctgatctgagaaacaggtgtgacaagagcatgaaccagaggtgcacctggggcagttccctaataaaactggtttgtacagtcaaaaaaaaaaaaaaaaaaaaaa

SEQ ID NO: 26187 - DNA, 1809 bp, Homo Sapiens
gcgagtccaaaatggcggctctcaggctggcgcgctccgtgctgctggggctttgaggtggtcgccgggggtccgggggaccctttccccgccgcggaagccctagaggatgaatcggggaccctgctaaggtctggcggcggggctggagagcagtggcagcaagggctgcggtggcgtccacgcagcgggatgtgcgagagttactccaggtcgttgttgagggtctcggtggcgcagatctgccaggcgctgggctgggactcggtgcagctcagcgcctgccacctcctcacggacgtgctgcagcgctatctgcagcagctgggccggggctgccatcggtactctgagctctatggccgaacagacccaattttggatgatgttggtgaagctttccagctgatgggggttagtctacatgaactagaagactatattcacaacattgagcctgtcaccttcccacaccaaattccgtcatttcctgttagcaagaacaatgtacttcagtttcctcaacctggaagtaaagatgcagaggaaagaaaagaatacattcctgattacctgccacccattgtgtcttctcaagaagaagaagaagaagagcaggtgcccactgatggaggcacatcagcagaagccatgcaggttcccttggaagaagatgatgaattggaggaggaagaaattattaatgatgagaatttcctgggcaagagaccactggatagtcctgaagctgaagaactgccagccatgaagcggcctcggctattaagcactaaaggggacacgctagatgttgtgttattggaagctcgagagccactcagctcaataaatactcaaaagatcccaccaatgctttctccagtccatgtacaggacagtacagacttggcacctccctcacccgagccgccaatgttggctccagttgcaaaatcacaaatgccaactgcaaaaccattagaaacaaagtcatttacacctaaaacaaagactaaaactagctctccaggacagaagactaaatcacctaaaaccgcccagtcaccagcaatggtcggaagtcctattcgatcaccaaaaactgtatccaaagaaaagaaatcacctggacgttccaagagccccaagagtcccaagagccccaaggtcacgactcacattccccaaacacctgtgagacctgaaacgcccaacaggactccttcagctacactcagtgaaaaaatcagtaaagagactatccaggtaaaacaaatacagacaccccctgatgctgggaaactgaacagtgagaatcagccgaaaaaggctgtggtagcagataaaacgattgaggcctctatcgatgctgtgattgcacgagcctgtgctgagcgagagccagatcctttcgaattttcttctggatcggaatctgaaggagacatttttactagccctaagagaatttcaggcccggagtgtactactcccaaagcttccacttccgcgaacagtttcacaaagtcaggatccactcctctgcctctttccggtggaacctcaagttccgataactcatggacaatggatgcctccattgatgaggttgtacgtaaagcaaaactgggaacaccttcaaatatgccccccaactttccttatatctcttctccgtcagtgtctcctcccactcccgaacctctccacaaggtgtatgaggagaaaaccaagctgccttcctccgtggaggtaaagaagaagttgaaaaaggaactaaagactaaaatgaaaaaaaaaaaaaaaaaa

SEQ ID NO: 26188 - DNA, 1849 bp, Homo Sapiens
cgccgtccagggctagagcaagcgcggccccgcggcccggagccatgctgaggagctgcgccgcgcgcctccgcacgctgggggctctgtgccggccgccagtaggccggcgcctgccgggaagcgagccgcgacccgagctgaggtcattttcttctgaggaagtcattcttaaggactgttctgtccccaaccccagctggaacaaggacctaagactgctctttgaccagtttatgaagaaatgtgaagatggctcctggaaacgtttgccttcatataaacgtacacctactgaatggattcaagacttcaaaacccattttcttgcctggttaatggccgggcgctgtggctcacgcctataatcccagcactttgggaggccaaggcaggcggatccctgagttcgggagttcaagaccagcctgaccaacacggagaaaccccgtctctactaaaaatacagaattagtcaggcgtggtggtgggcgcctgtaatcccagctactcaggaggctgaggcaggagaatcgcttgaacccgggaggcggaggttgcgacccaaagcttatgaaagaagaacaaatgtcacaggcccagctcttcaccagaagctttgatgatggcctgggctttgaatacgtgatgttctacaatgacattgagaaaaggatggtttgcttatttcaaggaggcccttacctggaaggaccacctggattcattcatggaggtgccattgcaaccatgattgatgctactgttggtatgtgtgcaatgatggctgggggaatcgtcatgactgccaatctcaacatcaattataaaagacctatccctctttgttctgttgttatgataaatagccaacttgataaagttgaaggaaggaaattttttgtttcctgtaatgttcagagtgttgatgagaagaccctatactcagaggcgacaagcttatttataaagctgaatcctgctaaaagtctgacataaagagctgctggtgaactccatctcattctcgcccctccagaagaagcagttgtcccccaaatactctgctccctcactgctgaatccctgtagggagaagcctgccaacagtgaccttccgaaacagccttctgaatacaaagaggattcagtttccatcttctcaactttttaacacagaaacacttcctgcgagcatatcgacaactctcgggccaggcgctgtggctcacacctataatcccagcactttaggaggccgaggcaggcggattgcctgagctcaggagttcaagatcagtctgggcaacacgatgaaactccgtctctactaaaatacaaaaaattatccaggcatggtggcgtacgcctgtagtcccagctactcaggaggctgaggcaggagaattgcttgaacccaggaggaagaggttgcagtgagccaagatcatgccacatcactccaacctgggcaacagaacaagaacccatctcaaacaaacaaacaaacaaacaaaaaaaaactcttgtctccttaggatatgttacctgctccactgcagactagagaaataaatgtgtattgaaccttttactgcaaacttgaaaatgctagaaaaccaagcatgaagaataaatacatggcgggaaacacacaggcatgtgcatatgcatatacattgtaagttagtaagttagaaagctagctttgttgtatctgaacacatgaatcttttttggtcagtgtaggaagcacagccagatcctataggaatgaatacctcaaatctgttgtctgagattctagagattaaaccactgtgccatttttaaaaaaaaaaaaaaaaaa

SEQ ID NO: 26189 - DNA, 1781 bp, Homo Sapiens
gagtgaagagagcgcgacggcggcggcggcggcggcgcagctattgctggacggccagtgggagagcgaggcctgagcctctgcgtctaggatcaaaatggtttcaatcccagaatactatgaaggcaagaacgtcctcctcacaggagctaccggttttctagggaaggtgcttctggaaaagttgctgaggtcttgtcctaaggtgaattcagtatatgttttggtgaggcagaaagctggacagacaccacaagagcgagtggaagaagtccttagtggcaagctttttgacagattgagagatgaaaatccagattttagagagaaaattatagcaatcaacagcgaactcacccaacctaaactggctctcagtgaagaagataaagaggtgatcatagattctaccaatattatattccactgtgcagctacagtaaggtttaatgaaaatttaagagatgctgttcagttaaatgtgattgcaacgcgacagcttattctccttgcacaacaaatgaagaatctggaagtgttcatgcatgtatcaacagcatatgcctactgtaatcgcaagcatattgatgaagtagtctatccaccacctgtggatcccaagaagctgattgattctttagagtggatggatgatggcctagtaaatgatatcacgccaaaattgataggagacagacctaatacatacatatacacaaaagcattggcagaatatgttgtacaacaagaaggagcaaaactaaatgtggcaattgtaaggccatcgattgttggtgccagttggaaagaaccttttccaggatggattgataactttaatggaccaagtggtctctttattgcggcagggaaaggaattcttcgaacaatacgtgcctccaacaatgcccttgcagatcttgttcctgtagatgtagttgtcaacatgagtcttgcggcagcctggtattccggagttaatagaccaagaaacatcatggtgtataattgtacaacaggcagcactaatcctttccactggggtgaagttgagtaccatgtaatttccactttcaagaggaatcctctcgaacaggccttcagacggcccaatgtaaatctaacctccaatcatcttttatatcattactggattgctgtaagccataaggccccagcattcctgtatgatatctacctcaggatgactggaagaagcccaaggatgatgaaaacaataactcgtcttcacaaagctatggtgtttcttgaatatttcacaagtaattcttgggtttggaatactgagaatgtcaatatgttaatgaatcaactaaaccctgaagataaaaagaccttcaatattgatgtacggcagttacattgggcagaatatatagagaactactgcttgggaactaagaagtacgtattgaatgaagaaatgtctggcctccctgcagccagaaaacatctgaacaagttgcggaatatacgttatggttttaatactatccttgtgatcctcatctggcgcatttttattgcaagatcacaaatggcaagaaatatctggtactttgtggttagtctgtgttacaagtttttgtcatacttccgagcatccagcactatgagatactgaagaccaaggattcagcattagaacatctatacatatggtgatctaaatgtacaaaatgtaaaatgtataagtcatctcactttttgtcaagacattaaaccatcttagatcgaaaaaaaaaaaaaaaaaaaaaaaa

SEQ ID NO: 26190 - DNA, 1444 bp, Homo Sapiens
ggggggacttcggggcggcctcggacggccatggcctttaccctgtactcactgctgcaggcagccctgctctgcgtcaacgccatcgcagtgctgcacgaggagcgattcctcaagaacattggctggggaacagaccagggaattggtggatttggagaagagccgggaattaaatcacagctaatgaaccttattcgatctgtaagaaccgtgatgagagtgccattgataatagtaaactcaattgcaattgtgttacttttattatttggatgaatatcagtggagaaaatggagactcagaagaggacatgccagtagaagttattactttggtcattattggaatatttatatcttagctggctgaccttgcacttgtcaaaaatgtaaagctgaaaataaaaccagggtttctatttatcagttttttttttttaatgttgcacttgtagtttcattacaaaagatcagatcatgaaaggcagtaactctccaggactggaatatctgattgctcagtgttaatagtagttcatgctgtggtgagattgttaaaagggtgcaagactgttgcttctctttttttagatatttttctatctctcacttctcagggatgaaattctttttcaaagttttgaagttccttgcaacttagccatgatgtgagtggttatccctagataaaattaaaaggatttttaaaaagtaattactgcacataaaatgataaataggtaatttgaataattttattttaagctccttggttaattattttgtctattgtctcagctataaattcaaatttatacatactattgagtattaatattctctgatttcagggagaattctgtcagtcacatgatgattatgtttttgtttaacattctttccatgcacttgttattttattaatttgcctgaatgatgagaccagaccagtgtctacagattttcattgtcagaaaaatctataagtctgccctttttacaatgatgatttaaaaaaaacaacagcgtaaatattagcccacaagagcagtcctaaacaatcacaattacactgtactacccaagaagactgtttattgtgaagcatttacctttcaaaaaatcattacatttctatttcttggtggagcagcacattgtggagtgtgattcttaattcttcattgagtttgtcaataggacattgatgctggataggttgtcttttgtttttatgtctcagaccatcttgtgagattgtttgcctatctcataatacagttttatgcagaaaggttgaaactatgtaaatggtttttatggaaattatcagttacaatattttaaaggtgtagaatggcatctttgtttataggagaacatttgtaaataaagttaaatttctaagtctaaaaaaaaaaaaaaaaaaaaaaaaaaaaaa

SEQ ID NO: 26191 - DNA, 1782 bp, Homo Sapiens
gggagacacacacagcctctctgcccacctctgcttcctctaggaacacaggagttccagatcacatcgagttcaccatgaattcactcagtgaagccaacaccaagttcatgttcgatctgttccaacagttcagaaaatcaaaagagaacaacatcttctattcccctatcagcatcacatcagcattagggatggtcctcttaggagccaaagacaacactgcacaacaaattagcaaggttcttcactttgatcaagtcacagagaacaccacagaaaaagctgcaacatatcatgttgataggtcaggaaatgttcatcaccagtttcaaaagcttctgactgaattcaacaaatccactgatgcatatgagctgaagatcgccaacaagctcttcggagaaaagacgtatcaatttttacaggaatatttagatgccatcaagaaattttaccagaccagtgtggaatctactgattttgcaaatgctccagaagaaagtcgaaagaagattaactcctgggtggaaagtcaaacgaatgaaaaaattaaaaacctatttcctgatgggactattggcaatgatacgacactggttcttgtgaacgcaatctatttcaaagggcagtgggagaataaatttaaaaaagaaaacactaaagaggaaaaattttggccaaacaagaatacatacaaatctgtacagatgatgaggcaatacaattcctttaattttgccttgctggaggatgtacaggccaaggtcctggaaataccatacaaaggcaaagatctaagcatgattgtgctgctgccaaatgaaatcgatggtctgcagaagcttgaagagaaactcactgctgagaaattgatggaatggacaagtttgcagaatatgagagagacatgtgtcgatttacacttacctcggttcaaaatggaagagagctatgacctcaaggacacgttgagaaccatgggaatggtgaatatcttcaatggggatgcagacctctcaggcatgacctggagccacggtctctcagtatctaaagtcctacacaaggcctttgtggaggtcactgaggagggagtggaagctgcagctgccaccgctgtagtagtagtcgaattatcatctccttcaactaatgaagagttctgttgtaatcaccctttcctattcttcataaggcaaaataagaccaacagcatcctcttctatggcagattctcatccccatagatgcaattagtctgtcactccatttagaaaatgttcacctagaggtgttctggtaaactgattgctggcaacaacagattctcttggctcatatttcttttctatctcatcttgatgatgatagtcatcatcaagaatttaatgattaaaatagcatgcctttctctctttctcttaataagcccacatataaatgtacttttccttccagaaaaatttcccttgaggaaaaatgtccaagataagatgaatcatttaataccgtgtcttctaaatttgaaatataattctgtttctgacctgttttaaatgaaccaaaccaaatcatactttctcttcaaatttagcaacctagaaacacacatttctttgaatttaggtgatacctaaatccttcttatgtttctaaattttgtgattctataaaacacatcatcaataaaataatgactaaaaaaaaaaaaaaaaaaaaaaaaaaaaaaaaaaaaaaaaaaaaaaaaaacccaaaaaaaaaaaaaaaaaaaaaaaaaaa

SEQ ID NO: 26192 - DNA, 1204 bp, Homo Sapiens
gggccctttattttcttcaccactcccctacaaaattttaaattcttgaaatcttttgctaattgagattttcatcttgtgcaaacacagggcatttttggcagttggagaacaaagcaatccaaggtaaacagctgtaggctttggattggtgtgtaagaaatatgcgtggcccgcatgtcttagaaatgtaattaaaggaacgatttagttatagtccacttttttggggggatgtggttttgtggagtaacatgtcctacactattctaccagaatttggaatttttccatgaagatgtacggaaatctgatgttgaatatgaaaatggcccccaaatggaattccaaaaggttaccacaggggctgtaagacctagtgaccctcctaagtgggaaagaggaatggagaatagtatttctgatgcatcaagaacatcagaatataaaactgagatcataatgaaggaaaattccatatccaatatgagtttactcagagacagtagaaactattcccaggaaactgtgcctaaggccagtttcggtttctctggcattagtccattagaagatgaaataaacaaagggtctaaaatctcaggcctgcaatactctatacctgacaccgagaaccagacgctgaattacggaaagacaaaggagatggaaaagcaaaatacggataagtgtcacgtttcctctcacactagactaacagaatcaagcgtgcatgattttaaaacagaagatcaagaggttatcacgacagattttggccaagttgttctaagacccaaggaggcaaggcatgctaacgtgaaccctaatgaggatggagaatcaagttcaagttctcccactgaagaaaatgcagccactgacaatattgccttcatgattaccgaaaccactgtccaggttctttccagtggggaggtgcatgatattgttagccaaaagggagaagacatacagacggttaatatcgatgccagaaaagagatgaccccccgacaagaagggactgacaatgaggatccagtcgtgtgcctggacaagaaaccagtgatcatcattttcgatgagcccatggacatccggtctgcctataagagactttcaactatctttgaggaatgtgatgaggaattagagagaatgatgatggaggaaaagaaaaaaaaaaaaaaaaaaaaaaaaa

SEQ ID NO: 26193 - DNA, 2270 bp, Homo Sapiens
gggttgcggccggaagccgggcgccgcggctctgcttccctcggggatctggcgacatggccagaaaggctctcaagcttgcttcgtggaccagcatggctcttgctgcctctggcatctacttctacagtaacaagtacttggaccctaatgactttggcgctgtcagggtgggcagagcagttgctacgacggctgtcatcagttacgactacctcacttccctgaagagtgtcccttatggctcagaggagtacttgcagctgagatctaaggtgcaccttcgctctgccaggcgtctctgtgagctctgctgtgccaaccggggcaccttcatcaaggtgggccagcacctgggggctctggactacctgttgccagaggagtacaccagcacgctgaaggtactgcacagccaggctccacagagcagcatgcaagagatccgccaggtcatccgagaagatctgggcaaggagatccatgatttgttccagagcttcgatgacacccctctggggacggcctccctggcccaggtccacaaggcagtgctgcatgatgggcggacggtggccgtgaaggtccagcacccaaaggtgcgggctcagagctcgaaggacattctcctgatggaggtgctcgttctggctgtgaagcagctgttcccagagtttgagtttatgtggcttgtggatgaagccaagaagaacctgcctttggagctggatttcctcaatgaagggaggaatgctgagaaggtgtccagatgctcaggcattttgacttcttgaaggtcccccgaatccactgggacctgtccacggagcgggtcctcctgatggagtttgtggatggcgggcaggtcaatgacagagactacatggagaggaacaagatcgacgtcaatgagatctcacgccacctgggcaagatgtatagtgagatgatcttcgtcaatggcttcgtgcactgcgatccccaccccggcaatgtactggtgcggaagcaccccggcacgggaaaggcggagattgtcctgttggaccatgggctttaccagatgctcacggaagaattccgcctgaattactgccacctctggcagtctctgatctggactgacatgaagagagtgaaggagtacagccagcgactgggagccggggatctctaccccttgtttgcctgcatgctgacggcgcgatcgtgggactcggtcaacagaggcatcagccaagctcccgtcactgccactgaggacttagagattcgcaacaacgcggccaactacctcccccagatcagccatctcctcaaccacgtgccgcgccagatgctgctcatcttgaagaccaacgacctgctgcgtggcattgaggccgccctgggcacccgcgccagcgccagctcctttctcaacatgtcacgttgctgcatcagagcgctagctgagcacaagaagaagaatacctgttcattcttcagaaggacccagatctctttcagcgaggccttcaacttatggcagatcaacctccatgagctcatcctgcgtgtgaaggggttgaagctggctgaccgggtcttggccctaatatgctggctgttccctgctccactctgagtggaattgctctccctgccccattctggtgtctttccactcctcagcccctcatcttgcctccacccagctgctccatttttgccacatcgtggcccgcagccccagagtcactgtccatgtcaccatcctcctcctcctttggaatcctctccgcacactgtggcccttgtctcagggcccacaagctgaactgtggcatagctctctcttcttctccaagaagactcagcagcctacattcccattcctggtatgtgccattgggttggatgtccccactacttccgttaacccttcccattgtcaagatgtgccacgggtgccactgggggcacactgaacttgtagggagtgtgattttgttggaggtgcacatggtctctgaatttgacagagaacaccttccctttccttgccatgtcaccctccagaggaagtcacacctcagcgaggtggtttggcatctggggccaactccattacagctatgagctcactgctgtcagtgacgtttggtgttttctgtactgtgtttcaataaaaactccttcaaggttaaaaaaaaaaaaaaaaaaaaaaaaaaaaaaaaaaaaaaaaaaaaaaaaaaaaaaaaaaaaaaaaaaaaaaaaaaaaaaaaaaa

SEQ ID NO: 26194 - DNA, 1807 bp, Homo Sapiens
tggaaactttcatcagcaccagaatgagcacattggagagaaaccctacagagggagtgttgaggaggcgttgtttgcgaagaggtgtaagttgcatgtgtcaggggagtcatctgtcttcagtgagagtgggaaagactttttgctcaggtcaggattactccagcaagaggccactcacactgggaagtcaaacagcaaaactgagtgtgtgtctctgtttcatgggggaaaaagccattacagctgtggaggatgcatgaaacattttagcaccaaagatatactcagtcagcacgagagactgctccctacagaagaaccttctgtgtggtgtgaatgtgggaaatcctctagcaaatatgacagcttcagtaatcatcaaggagttcacactagagaaaaaccttatacgtgtgggatatgtgggaaattatttaacagtaagtcccacctccttgtacaccagagaattcacactggagagaagccatatgagtgtgaggtttgtcagaaattttttaggcacaagtaccacctcattgcacaccagagagttcacactggagaaaggccatatgaatgcagtgattgtgggaagtcatttacccacagctctacattccgtgttcataagagagttcacactggtcagaagccttatgagtgcagtgaatgtgggaaatcttttgccgaaagctccagtctcactaaacacaggagagttcacactggagaaaagccttacgggtgcagtgaatgtgaaaaaaaatttaggcaaatctcttcacttcgtcatcatcagagagttcacaaaagaaagggcttatgagtgcagtgagtccagtctcattaaatattggagaatacacacctgagtaagatcctgtgattgcagcaaatgtggaaaatgtttacccaaaggtctgctctccttggatattggagagttcacactagagaagagtccttacaagtaaaataaatttgggcagttttgtagccacacctctgtattccttcaggattatagttaacactgaatgaaggccttactagtgtgacaaatacaggatatttatccagaagtctggctgcataactcacaggagagctgtcatgtgggaggattgctacatgggaggatttgcttgggcctgggaggcagaggttgcagtgagccgagattgcaacactgcagtccagtctggaccacagagtgagaccctgtttcaaaaataaaatatataaatgacatccaataaagtatgcatatttgagctgtaggataagtcttgaattttctttttcttttttttgagacagcctcgctctgtcacccaggctggagtacagtggcataatctcggctcactgcaagccctgcctcctgggttcatgccattctcctgcctcagcctccctaatagctgggactacaggcaaccaccaccactcctaccttttttgtatttttagtagagatggggtttcaccctgttagccaggaagttctcaatctcctgacctcgtgatctgcccgccttggcctctcaaagtgttgggattgcaggcgtgagccactgctcctggcttgaattttcttataatcccatgaaaccatcatcagagtcacaataatgaatttatctaatctatcacctttgtattcacctggagcctttataaagtttttctctatgcagacaaccattgatttactctgctgtataatactttccattttctagaattttctgactgatgtaataaagtgtttcctcttataaaaaaaaaaaaaaaaaaa

SEQ ID NO: 26195 - DNA, 2579 bp, Homo Sapiens
ctcgtagcccacagcccactgccggcggctgggcgctgccgaggctcggggcgcgcgcagttggcgtctgccagtgccaagactgtgccgcccccacagccgaggcgcgaaagggggacgcccggcctctgggccgctgccttcgctttctcttcgttgttgcgaacgccgtccgctcaggaggcgccccgcgaccggcgcgatgagtgccaacgaggaccaggagatggaactagaagcattacgctctatttatgaaggagatgaaagtttccgggaattaagtccagtttcttttcaatataggataggtgaaaatggtgatcccaaagccttcttaatagagatttcctggacagaaacatatccccaaacacctccaattctatctatgaacgctttttttaacaacaccatatcatcagctgtaaagcagagtatattagccaagctacaggaagcagtagaagctaatcttggaaccgctatgacctatacattgtttgaatatgccaaagacaataaagagcagttcatggagaatcacaatcccatcaattccgcaacatcgctaagcaatatcatctcaattgaaactcctaatacagccccatcaagtaagaaaaaagacaaaaaagaacaactttcaaaagcccagaagcgtaagctggcagacaaaacagatcacaaaggagaacttcctcgaggctggaactgggttgatgttgtgaagcatttaagcaaaactggctctaaggatgatgagtagcacttggaatttgagacaaggaaagagcattctttaaagagtaaaactgggttcaaaatctttcattactattttctggtattgaggcgactttttataaaacacaattttttgtatgtttcttacattaaaaaggttgtaagttgaaagttcatgaagagatcttgttgtattaaattattttcacaaacttgccttaataaaaggtgaaaatgttactgtttagtatactttatgaagccccttgagctttataaatggacaggcatggggaataagaatcagtgttaatttaaatgatcttatcctggtggatgtgctattttcttaaaggagtatgaagcccttttcaaactatcatcccagtggagcggagtactcagtgaacagttactccatagtgcaatccatattaataggcttcttctcttaagtcttcatctcttcttttgcttaattactgaaccgtaaattacttcagagaaatttaaatgctggtatttgaactttatacatgatactttttgtagtttcttttaatttttgaaagatgaactgcttccttttaataaattaatatctatttatacttttctcttgatttgggtcaagatgtttgatcatgagtgctttgagtggtatgtggaataggagaatataaaaacaaatctgccaaatacactagaaagcattttagtaagaaatgctggccctttcttaaaacatttctcttgcatataccaggatgggagtaaaagatgccttaatatttagtttttgtattgttggagacattgattttaataaaatcctatttatctgctgttgtgtgcttttagttgttggataactgaggtctcctaaatggttcaacataaaaccacatttcaagtcttgtttctttttggagtgtcttttcaagtattcaaatgtatttctcaacctgagcatctttttaatcatatacatgggagtcttttaaatgctgaactgttacacatgcttgatttaaaaataataataatagaggaaactattggtctagttgtgccaagaaaagtttctgatgtttatgtgtgatgtacagtgattttgtatatgcgcccagctttaagaacacataaaactattacgtctggtaggaagattgttagtgcctcaagttacacctgtgcagcttgggtctgagttttgatagaacagtaaacatttaaagaagttaagagcagtttgagctgtatccgcggtttttactcgttaactgacttcagctaaatagtttgaattatagagtaagtataattacagcaaaggagttaatctcattttcaaagctgtttctcattttatttcttgaattaatgtagagcaaaacatgttaaaattcaggaccactggaatatggcaacttatgtttcagggttgtgtgtgggtagtatttgtggttgtattggtttgttttttgtttttggagaaacatctgctagtggaataaaatactttgttttgctctgaagagactgaaattgttcaggcttattatggctcatagattacagagaatgatgctagttacatgccaatgaactatttttactctttttatatgaaatgtaaaaatttgtaggggttctggtgatggtggtacctcttattaccttatgtaaaacacttgaacagcctcatcaatattgccgtcatctgtttaacactcccagtatattttctcaatgtctgttacttaaaattttgtggagtgacataattaataagcaataaagtctgaattatacacaaaaaaaaaaaaaaa

SEQ ID NO: 26196 - DNA, 1217 bp, Homo Sapiens
ggggtcctgctgggtgccgaggtagccaggtcaggggtcaagagtggaacaccctcactggcccgggccggcgcgggagggctgtgtgatggcctcggagcgcccggagccggaggtggaagaagctgggcaggtgttcctgttaatgaaaaaggattatcgaatctcccgaaatgttcgcctggcttggttcctcagtcatctgcaccaaactgtgcaggccacaccccaggagatgctgtctgaacaggaattggaagtcctcagtgtcctgccccctgggtggcagccagatgaaccagtggtcccaaggccattcctcctggtaccttccacccgggtcaccttcctggcttggcagtatcggtttgtcattgagttggaccttagcccatctactggcattgtggatgattccacaggggagatcttgtttgatgaagttttccatgccctgtcccgctgcttaggcgggctgcttcggcccttccgagtgcctggatcttgcatcgacttccagcctgagatctatgtaactatccaggcctactcctccatcattggactgcagtcccaccagagacagggtttcaccatgttggccaggctgccctcgaacttctgacctcaagtgatccacctgcctcagcctcccaaagtgctgggattacaggcatgagctactgtgcctggcccaaagcagcatttgaactgagttttgaagaaagaattgaggttaaccattcaaagaaggggaaatggacttttctgacagagggaccagcaaaagcaaatacatggtactatgaacctgtactctcaatcacaggtgttttagggaactacatattattcagtgtcaacagagtaaaatttgaatgtggaaagggatggtaaagaggagactgtagacataagtgggagctggttatgaaaggccatgaatgtgacactaaggactttgtgctttattctatgggggagttcagtgtggaggataagagcactggatctggaatcacattgcctgtgtttgcttcctggcagtaccacttactggttgtgtgtccttgagcaagttacttaacctttctgtgcatctgtgacctttttccaaaggggatattaacattgcttatatcatatggtgattgaattaatacatgtcaagcacttagaactgtgcttgccaaaaaaaaaaaaaaaaaaaaaaaaaa

SEQ ID NO: 26197 - DNA, 2299 bp, Homo Sapiens
gttccggcgttgcccggcagtccgcagtcctcggcgggaaggctgtcccggcgcctcaggcagctctgcgtgggccggggtgacttcctcgcgatcccctgcgcgaggtgaagggcagggacctttgccgcgccttccacgcgccgtgccccaccggcgagtggctccatcttcctcagacttatcgctcgcggacaggcgccgtgggtctcccgggcctccgtaccgtcctccttcccagcggctccgggaagcggttccctgtcttcggacgcatttcacccgcgcggggagagcttcccgggaaggttccacggcggccgagggtttccgcgcccgggacgcgtttcggctgaggccgtgggtccagtccacgggttctgcccgcacggtccaatggccggggaggcggagggaggagtgggggctccttaatgtgacccagaagggcctataccgggatgtgatgctggagaactttgcactcgttagctcactgggacttgcaccttcgagatcccctgtgtttacccagctggaggatgatgaacagtcgtgggtgcccagctgggtggatgtgactccagtcagcagagcagaagccaggagaggttttggtcttgtctgccatctctaccatgattttcaggccccgcatgttcctgcctctctggcctgcgtctcctcattgcccttctctgtatctgtgcagagctgtctactgttggcgactcagtgcgtgtcttgaaatgtgcacatatccttaaacagatggtttgtgtagagtggaggatgagagagcccatcctgagcatctaaagagctacagagtcatccagcaccaggacactcatagtgaggggaaaccaagaaggcacactgagcatggggcagctttcccacctggttccagttgtgggcaacagcaagaagtccatgtggcagagaagctgttcaaatgcagtgactgtgggaaggtgttcttaaaggcctttgccctccttgaccatctgataacgcattctgaagagagacccttcagatgcccaacaggcagaagtgctttcaagaagtcagctcatattaacccccgaaaaattcacactggagaaacagcccatgtgtgtaatgaatgtgggaaggccttcagttacccgtctaagctgaggaaacaccagaaggttcacacaggcataaaaccttttaagtgtagtgactgtggtaaaaccttcaaccgcaaagacgcacttgttctacaccagaggattcacactggagaaaggccttacgagtgcagcaaatgtggtaaaaccttcagtgttctgtctaccctcattcggcaccggaaagtgcacattggagaaaggccctatgagtgtacagaatgtgggaagttctttaaatacaataatagcttcattcttcaccagagagttcacactggagaaaggccttttgaatgcaagcaatgtgggaaaggctacgtgacccgttcaggcctctatcagcactggaaagtccacactggggaacggccctatgaatgtagcctgtgtgggaaaaccttcactaccagatcctaccgcaatcggcaccagcagttccacactgaagagaggtcttatgaatgtacagagtgtgggaaggccttcaaacatagttccaccctccttcagcacaagaaagtccatactccagaaaggcgtcaggaggacagggcacatgggaaggtcgttagctgctagcaccgtgttcatcaggaaaggtcttattccagaaaggaggttaaggagagtggccgtgagagtgccatccgaaagaagctaaaccttgcacatcccaacacccaccccagggagagttcccgtgtgtgcctggtgtgtgggacgctttcgggacccacattgcactctgacttgcctggggctgttggcagtgtcacatcactgagtttatccaccgccatccacctctatccaccccataaggtccctacagcaagtgggacagcagaccttgtgctccttgctctaaacagtagagaatcgttaatagtggagcccaaaacaggcctcattccctacccttgactggtttagctgtggacatgacccacctctggccggaggagctgagctggtatctgctgggggcttcctgggaaggtttaccattttcatggaaatggttgacattacacatggtatttgtcatgccctagcatggactgtctcatactgctctggactatgtggtaataaaggctttattgtttaagccgcttaaaaaaaaaaaaaaa

SEQ ID NO: 26198 - DNA, 1869 bp, Homo Sapiens
gcgctgcgtccaggatctagggccacgaccatcccaacccggcactcacagccccgcagcgcatcccggtcgccgcccagcctcccgcacccccatcgccggagctgcgccgagagccccagggaggtgccatgcggagcgggtgtgtggtggtccacgtatggatcctggccggcctctggctggccgtggccgggcgccccctcgccttctcggacgcggggccccacgtgcactacggctggggcgaccccatccgcctgcggcacctgtacacctccggcccccacgggctctccagctgcttcctgcgcatccgtgccgacggcgtcgtggactgcgcgcggggccagagcgcgcacagtttgctggagatcaaggcagtcgctctgcggaccgtggccatcaagggcgtgcacagcgtgcggtacctctgcatgggcgccgacggcaagatgcaggggctgcttcagtactcggaggaagactgtgctttcgaggaggagatccgcccagatggctacaatgtgtaccgatccgagaagcaccgcctcccggtctccctgagcagtgccaaacagcggcagctgtacaagaacagaggctttcttccactctctcatttcctgcccatgctgcccatggtcccagaggagcctgaggacctcaggggccacttggaatctgacatgttctcttcgcccctggagaccgacagcatggacccatttgggcttgtcaccggactggaggccgtgaggagtcccagctttgagaagtaactgagaccatgcccgggcctcttcactgctgccaggggctgtggtacctgcagcgtgggggacgtgcttctacaagaacagtcctgagtccacgttctgtttagctttaggaagaaacatctagaagttgtacatattcagagttttccattggcagtgccagtttctagccaatagacttgtctgatcataacattgtaagcctgtagcttgcccagctgctgcctgggcccccattctgctccctcgaggttgctggacaagctgctgcactgtctcagttctgcttgaatacctccatcgatggggaactcacttcctttggaaaaattcttatgtcaagctgaaattctctaattttttctcatcacttccccaggagcagccagaagacaggcagtagttttaatttcaggaacaggtgatccactctgtaaaacagcaggtaaatttcactcaaccccatgtgggaattgatctatatctctacttccagggaccatttgcccttcccaaatccctccaggccagaactgactggagcaggcatggcccaccaggcttcaggagtaggggaagcctggagccccactccagccctgggacaacttgagaattccccctgaggccagttctgtcatggatgctgtcctgagaataacttgctgtcccggtgtcacctgcttccatcccccagcccaccagccctctgcccacctcacatgcctccccatggattggggcctcccaggccccccaccttatgtcaacctgcacttcttgttcaaaaatcaggaaaagaaaagatttgaagaccccaagtcttgtcaataacttgctgtgtggaagcagcgggggaagacctagaaccctttccccagcacttggttttccaacatgatatttatgagtaatttattttgatatgtacatctcttattttcttacattatttatgcccccaaattatatttatgtatgtaagtgaggtttgttttgtatattaaaatggagtttgtttgtatcaaaaaaaaaaaaaaaaaaaaaaaaaaaaaaaaaaaaaaaaaaaaaaaaaaaaaaaaaaaaa

SEQ ID NO: 26199 - DNA, 2648 bp, Homo Sapiens
cctctagctcgagcagcaggagcagcccgcaccggacaacttgcgagccatggggctggcggatgcgtcgggaccgagggacacacaggcactgctgtctgcaacacaagcaatggacctgcggaggcgagactaccacatggaacggccgctgctgaaccaggagcatttggaggagctggggcgctggggctcagcacctaggacccaccagtggcggacctggttgcagtgctcccgtgctcgggcctatgcccttctgctccaacacctcccggttttggtctggttaccccggtatcctgtgcgtgactggctcctgggtgacctgttatccggcctgagtgtggccatcatgcagcttccgcagggcttggcctacgccctcctggctggattgccccccgtgtttggcctctatagctccttctaccctgtcttcatctacttcctgtttggcacttcccggcacatctccgtggggacctttgctgtcatgtctgtgatggtgggcagtgtgacagaatccctggccccgcaggccttgaacgactccatgatcaatgagacagccagagatgctgcccgggtacaggtggcctccacactcagtgtcctggttggcctcttccaggtggggctgggcctgatccacttcggcttcgtggtcacctacctgtcagaacctcttgtccgaggctataccacagctgcagctgtgcaggtcttcgtctcacagctcaagtatgtgtttggcctccatctgagcagccactctgggccactgtccctcatctatacagtgctggaggtctgctggaagctgccccagagcaaggttggcaccgtggtcactgcagctgtggctggggtggtgctcgtggtggtgaagctgttgaatgacaagctgcagcagcagctgcccatgccgatacccggggagctgctcacgctcatcggggccacaggcatctcctatggcatgggtctaaagcacagatttgaggtagatgtcgtgggcaacatccctgcagggctggtgcccccagtggcccccaacacccagctgttctcaaagctcgtgggcagcgccttcaccatcgctgtggttgggtttgccattgccatctcactggggaagatcttcgccctgaggcacggctaccgggtggacagcaaccaggagctggtggccctgggcctcagtaaccttatcggaggcatcttccagtgcttccccgtgagttgctctatgtctcggagcctggtacaggagagcaccgggggcaactcgcaggttgctggagccatctcttcccttttcatcctcctcatcattgtcaaacttggggaactcttccatgacctgcccaaggcggtcctggcagccatcatcattgtgaacctgaagggcatgctgaggcagctcagcgacatgcgctccctctggaaggccaatcgggcggatctgcttatctggctggtgaccttcacggccaccatcttgctgaacctggaccttggcttggtggttgcggtcatcttctccctgctgctcgtggtggtccggacacagatgccccactactctgtcctggggcaggtgccagacacggatatttacagagatgtggcagagtactcagaggccaaggaagtccggggggtgaaggtcttccgctcctcggccaccgtgtactttgccaatgctgagttctacagtgatgcgctgaagcagaggtgtggtgtggatgtcgacttcctcatctcccagaagaagaaactgctcaagaagcaggagcagctgaagctgaagcaactgcagaaagaggagaagcttcggaaacaggctgcctcccccaagggcgcctcagtttccattaatgtcaacaccagccttgaagacatgaggagcaacaacgttgaggactgcaagatgatggtgagctcaggagataagatggaagatgcaacagccaatggtcaagaagactccaaggccccagatgggtccacactgaaggccctgggcctgcctcagccagacttccacagcctcatcctggacctgggtgccctctcctttgtggacactgtgtgcctcaagagcctgaagaatattttccatgacttccgggagattgaggtggaggtgtacatggcggcctgccacagccctgtggtcagccagcttgaggctgggcacttcttcgatgcatccatcaccaagaagcatctctttgcctctgtccatgatgctgtcacctttgccctccaacacccgaggcctgtccccgacagccctgtttcggtcaccagactctgaacatgctacatcctgcccaagactgcacctctggaggtgcagggcacccttgagaagcccctcacccctaggccgcctccaggtgctacccaggagtcccctccatgtacacacacacaactcagggaaggaggtcctgggactccaagttcagcgctccaggtctgggacagggcctgcatgcagtcaggctggcagtggcgcggtacagggagggaactggtgcatattttagcctcaggaataaagatttgtctgctcaaaaaaaaaaaaaaaaaaaaaaaaaaaaaaaaaaaaaaaaaaaaaaaaaaaaaaaaaaaaa

SEQ ID NO: 26200 - DNA, 3757 bp, Homo Sapiens
gacccacgcgtccgcatccgaagaatgcgactcttggcggacagcgcagtcgcagggctccggcctgtgtcctctaggagcggagcccgtttgctggtgctggaggggggcgcacctggcgctgtgctccgctgtggccctagcccctgtgggcttctcaagcagcccttggacatgagtgaggtgtttgccttccacctagacaggatcctggggctcaacaggaccctgccgtctgtgagcaggaaagcagagttcatccaagatggccgcccatgccccatcattctttgggatgcatctttatcttcagcaagtaatgacacccattcttctgttaagctcacctggggaacttatcagcagttgctgaaacagaaatgctggcagaatggccgagtacccaagcctgaatcgggttgtactgaaatacatcatcatgagtggtccaagatggcactctttgattttttgttacagatttataatcgcttagatacaaattgctgtggattcagacctcgcaaggaagatgcctgtgtacagaatggattgaggccaaaatgtgatgaccaaggttctgcggctctagcacacattatccagcgaaagcatgacccaaggcatttggtttttatagacaacaagggtttctttgacaggagtgaagataacttaaacttcaaattgttagaaggcatcaaagagtttccagcttctgcagtttctgttttgaagagccagcacttacggcagaaacttcttcagtctctgtttcttgataaagtgtattgggaaagtcaaggaggtagacaaggaattgaaaagcttatcgatgtaatagaacacagagccaaaattcttatcacctatatcaatgcacacggggtcaaagtattacctatgaatgaatgacaaaagaatcttctggctagggtgttagatatatttatgcatttttggttttgtttttaaatcaagcacatcaacctcaagcccgtttagcaatgaggcagtgtagatgaatacgtaaaataaatgactttaaccaagtagctataatgggacttagcactgtatgcatacttaaaaaggttttgaaaaacaaactacttgagaaatatttgtttatatttttctctaacatcatgctatgtgtcagtctgaacatctgacaacagaaatttcagttattattctagctaagttttgaaaacatttgtcatgctgtttaatagaaaactgcaaaccagagacactgactccattaataaaccatattttgtgccgttttgactgttctgaccaaatactaatgggaacaattcttgacgtttttctgttgctgattgttaacatagagcagtctctacactaccctgaggcaactctacattggaacactgaggcttacagcctgcaagagcatcagagctgaccatacatttaaacagaaatgctggtttatttgcaaaatcaccagtatattttctattgtgtctataaaaaatcagtcatttaagtacaagaatcatattttccattcctttttagaaatttattttgttgtccctatggaaatcattcacatctgacaatttatatgttaaagagttttactctctctattttggtccaatttgtatctagtggctgagaaattaaataattctaaagtatgaagttacctatctgaaaatgtacttacagagtatcattttaaaatggatgtctctttaaaaattttgttacttttaccaacaatgtaatataatttatgtatattttattaataatagtgaattccttaaaatttgttctatgtacttatatttaatttgatttaatggttactgcccagatattgagaattggttcaaatattgagtgtgtttcaatatattatctggcttatttcaacatgagtaatatgagcaaaataagttaaaacctgcgtctgatcaattttcctcatgactagaactaaaacagtaaatttggacaatattaagcctcaaataatcatctccaaactccttctaacactttttaaatcagattggaagacatggacaaatcaggttcatgtgttgcatctttatgtcctttgccaatatccaagatcatcacatatggtagatattcacatggagtttcaaattcagaatagattaccattaccttcctgcccttacacatcctactccttatttaaaagttctatttgtgacttttcatttcctgaaagtttaaaaatacaatttgagaatgtttataatacattctctcctgtcttttcacggttacgtctgttattgctgaaatacaccacattttctttgttctggtcaaggttaactcaatatctgtgtgaaagagaactactaacaacgttacaatagaggctagatttgaaaaaaaaaatctatagatctaattgatacaattgtagaacaaaatgtcaaaataatgttttaagtataagagaagatggaccaaggagagagagatcatttgaaaatctaattgtagcttttctaggctcacattcatgtactacttttagcacccttatgggctgtgctcgccccctggacagttgagctttggattatcttcctcttcaattttccctctattgacccgagtgtctccctctgcttctacagatttatagtactccttggctcttttgagtctccacttttactcactgtctctgggatttttaagatccttttcttctcttataaatcatcctcttaatgaaaattagcctaacaaaagtttggagactggaatcctactttgagccactgacttgaaataactcttttggcaagttgcctgacatcctgtcttaccaaggtggcatatttgcatttttactgcttaaaacatttttttttttttaccatctttatccaaatttatcatattgatggtaggactaacaggctttttagaagctggctttaactttgagtctcaagctacaatgctgttgggcagcctggtcttcccacgtgagggtttaactttgtttatttgcctccagttattccaaaatgcttattaaatgaaaggcccaggaacatgtttattttagtcacctttgctttttaacaattttgttttgtaatcaatgagtaattcatgatgaattatttttgactaatggatagccgaaggccaggcttttaattctaataggtaatgttcttcttttgtcttattgaaacaatgagaatactctgtgcatttcaaatgcactccgattatgctgtggttttattcacataagcacaatatgtgttttatttataacttcataacaaacttataatataataatttaccttagcagacatgcaaaagcttattcttgtgtgacttactttctttaagctaataatataaaaataaatatgtatcttaaaaatctataataaaacattagaaattaaagatatgtgctttttattttgcagatgagttcatttgcttttgtagatgtgttttcagagctaggtacagaggaatgtttgctacctttagcggtgaaaaaagaaagagagtcaagaattttgttggattgtgtttgtgtgtgcatatatttgatatcatcattatatttgtaatctttggacttgtaatcatagcctgtttattctactgtgccattaaatatactttaccttatacataacgaataaaatacctagatgtagatttatttacaaaaaaaaaaaaaaaa

SEQ ID NO: 26201 - DNA, 2100 bp, Homo Sapiens
cggacgcgtgggtcgtaaaggcaaaaaggccaaagcctcactgtttcaattgtggttctgaagaacaccaaatgaaagattgcccaatgcctcggaatgctgctcgaataagtgaaaagagaaaagagtatatggatgcctgtggagaagcaaacaatcagaatttccagcagcgataccacgcagaagaagtagaagaaagatttggaagattcaagccaggagttattagtgaggaacttcaagatgcactaggtgtgacagacaagagtcttccaccttttatctatcggatgcgccagctagggtacccaccagggtggctcaaagaggctgaattggagaattcggggcttgcactctatgatggaaaagatggcactgatggggaaacagaagttggagaaatacaacagaataaaagtgtcacttacgatctctcaaaattggtcaactatcctggttttaatatatctactcccagaggaattccagacgaatggaggatctttggttccataccaatgcaggcatgtcagcagaaggatgtgtttgccaattaccttacttctaacttccaagcgccaggtgtgaagtctggcaacaagaggtcttcatctcactctagcccaggtagtccaaagaagcagaagaatgaaagcaactcagcgggatctcccgccgacatggagctcgattcagatatggaggtaccacatggttctcagagcagcgaaagttttcagtttcaaccaccattacctcctgacactcctccactcccccggggaactcctccacccgtcttcacccctccactcccaaagggcaccccgccgctgactcccagtgactcaccccagaccagaacagcatctggagctgtggatgaggacgcactgactctagaagaacttgaagaacagcagaggcggatctgggcagctcttgagcaggccgagagcgtaaacagcgactccgacgttcctgtggacacacctttaactggcaattccgttgcctcatcaccttgtccaaatgagctagacctccctgtcccggagggaaaaacatctgaaaagcagacgctggatgagcctgaggtaccagagatttttacaaagaaatcagaagctggacatgcctccagtccagactctgaggtgacatcactttgtcagaaggaaaaagcagagttggctccggtaaacactgaaggtgcccttcttgataatggcagtgtcgtaccaaactgtgacatcagcaatgggggcagccagaagctctttcctgcagacaccagtccttcaacggccactaaaattcatagccctatacctgacatgagcaaatttgcaactggaatcacgccatttgaatttgagaatatggcagaatctactggaatgtacctcaggataagaagcttattaaagaactcaccccgaaaccagcagaaaaacaaaaaggcctctgaataatggcttgacttagcactgagagctatttaataactttgttccgttaattagtactaattaagtggatagatagaatggttttcctgtttgtccctcccatgtttaaaaatctatccaaggttcatgttccaaagtcaagcctattttaaagaaagactgagctcactagttcagtatattttattctcactgacaaaacttggggggagatgtgaatatgacctggtttagagagggtttgttaaggtttatactatttttggattgtgactatccgtcgagagtgatggtttttatctgtcttttgtacattgttttccctttctacattttgctaattatcctgtatataagtttaatatatcactttttaaaagaaaaaattctaccattttaaattcatgtttcaactcctacaaccaaatgagaaaaatcagggatgagcagctttatcccatttggggtatttttgtaagtgatttacatgtgtcaattttagtaatacttttacttttttgtaacttcatccttcatatatgcttgctatacaggtatgttcatctttgtgtacagaggtttaataaattagttttcatatacataaaaaaaaaaaaaaaaa

SEQ ID NO: 26202 - DNA, 1983 bp, Homo Sapiens
gacccacgcgtccgactcaacagagctatggcgggtttgactgtgagagacccagcggtggatcgttctctacgttctgtgttcgtggggaacattccttatgaagctactgaagagcagttgaaggacatcttttctgaggttggacctgttgttagtttcagattggtatacgatagagagacaggaaagccaaagggttatggcttctgtgaataccaagaccaagagacagcacttagtgccatgcggaacctgaatgggcgcgaattcagtgggagagcacttcgagtggacaatgctgccagtgaaaagaacaaagaagagctgaagagccttggcactggtgcccctgtcattgagtcaccttatggagagaccatcagtcctgaggatgcccctgagtccattagcaaagcagttgccagccttccaccagagcagatgtttgagctgatgaaacaaatgaagctctgtgtccagaatagtccccaggaggcacggaacatgttacttcagaaccctcaactggcttatgctttgctgcaagcacaggtagtgatgagaattgtggatccggaaattgccctgaaaattctgcatcgccagacaaatatcccaacgctgattgcaggcaaccctcagccagtccatggtgctgggcctggctcaggatccaatgtgtcaatgaaccagcagaatcctcaggcccctcaggcccagtctttgggtggaatgcatgtcaatggcgcacctcctctgatgcaagcttctatgcagggtggagttccagcaccagggcaaatgccagctgctgtcacaggacctggccctggttccttagctcctggaggaggaatgcaggctcaggttggaatgccaggaagtggaccagtgtccatggaacgggggcaagtgccgatgcaagaccccagagcagctatgcagcggggatccttgcctgcgaatgtcccaacccctcgaggcttgttaggagatgctccgaatgatccacggggaggcactttactttctgtaactggagaggtagagcctagaggttacttgggaccacctcatcagggtccacccatgcaccatgtccctggccatgagagccgaggaccacccccacatgaactgaggggagggccattacccgagcccagacctctaatggcagaaccaagaggacccatgctagatcagaggggtccacccttggatggcagaggtggaagggatccccgaggaatagatgcacgagggatggaggcccgagccatggaggcaagagggttagatgccagaggattagaggcccgtgcaatggaggcccgtgcgatggaagctcgtgcaatggaggcccgagcgatggaggcccgtgcaatggaagtccgagggatggaggccagaggcatggataccagaggcccagtgcctggccccagaggacctatacctagtggaatgcagggtcccagtccaattaacatgggggcggttgtcccccagggatccagacaggtcccagtcatgcagggaacaggaatgcaaggagcaagtatacagggtggaagccagcctggcggctttagtcccgggcagaaccaagtcactccacaggatcatgagaaggctgctttgattatgcaggttctacaactgactgcagaccagattgccatgttgcctcctgagcaaaggcagagtatcctgattttaaaggaacaaatacagaaatccactggagcaccttgataggttttcaaaaatacctggcaagaaatctggaaattctataattttgttgaaatattgaaaaaagatgacctgcatcctaacccttgaatgactcaaatcagtgccaggtggaggactcccatcaccttctctcagaacaaaatcacttcattttattgtcttagtttgtatattttctgtgacttgaaataaactttgaacacaaaaaaaaaaaaaaaa

SEQ ID NO: 26203 - DNA, 3128 bp, Homo Sapiens
gtacctccatggtcccggtggctgtgacggcggcagtggcgcctgtcctgtccataaacagcgatttctcagatttgcgggaaattaaaaagcaactgctgcttattgcgggccttacccgggagcggggcctactacacagtagcaaatggtcggcggagttggctttctctctccctgcattgcctctggccgagctgcaaccgcctccgcctattacagaggaagatgcccaggatatggatgcctataccctggccaaggcctactttgacgttaaagagtatgatcgggcagcacatttcctgcatggctgcaatagcaagaaagcctattttctgtatatgtattccagatatctgtctggagaaaaaaagaaggacgatgaaacagttgatagcttaggccccctggaaaaaggacaagtgaaaaatgaggcgcttagagaattgagagtggagctcagcaaaaaacaccaagctcgagaacttgatggatttggactttatctgtatggtgtggtgcttcgaaaactggacttggttaaagaggccattgatgtgtttgtggaagctactcatgttttgcccttgcattggggagcctggttagaactctgtaacctgatcacagacaaagagatgctgaagttcctgtctttgccagacacctggatgaaagagttttttctggctcatatatacacagagttgcagttgatagaggaggccctgcaaaagtatcagaatctcattgatgtgggcttctctaagagctcgtatattgtttcccaaattgcagttgcctatcacaatatcagagatattgacaaagccctctccatttttaatgagctaaggaaacaagacccttacaggattgaaaatatggacacattctccaaccttctttatgtcaggagcatgaaatcggagttgagttatctggctcataacctctgtgagattgataaatatcgtgtagaaacgtgctgtgtaattggcaattattacagtttacgttctcagcatgagaaagcagccttatatttccagagagccctgaaattaaatcctcggtatcttggtgcctggacactaatgggacatgagtacatggagatgaagaacacgtctgctgctatccaggcttatagacatgccattgaggtcaacaaacgggactacagagcttggtatggcctcgggcagacctatgaaatccttaagatgccattttactgcctttattattatagacgggcccaccagcttcgacccaatgattctcgcatgctggttgctttaggagaatgttacgagaaactcaatcaactagtggaagccaaaaagtgttattggagagcttacgccgtgggagatgtggagaaaatggctctggtgaaactggcaaagcttcatgaacagttgactgagtcagaacaggctgcccagtgttacatcaaatatatccaagatatctattcctgtggggaaatagtagaacacttggaggaaagcactgcctttcgctatctggcccagtactattttaagtgcaaactgtgggatgaagcttcaacttgtgcacaaaagtgttgtgcatttaatgatacccgggaagaaggtaaggccttactccggcaaatcctacagcttcggaaccaaggcgagactcctaccaccgaggtgcctgctccctttttcctacctgcttcactctctgctaacaatacccccacacgcagagtttctccactcaacttgtcttctgtcacgccatagttggctactctcaagccagcacattgttagacccatcttaattaagccttacctccatgtaaagaacagcacgtctgttccaaggacctcagctcttcttgtttctacagatggcaacagctccatagggacagcttgtataattaccttcagaggccaactgacagaatcctggcaggaacagacattatcttgccagttagaagtacttctgtctcacttatgtccaaagagtggctatagatcttggccttcttccctgaatgctttttttttttggcccccaagaaagtcccttttatagcactttagcacaggcaatgctacaggaacaaagtttcaatgctgctgagagtgaaagaaaggaggaaagtctgccactctaccctgagctggcagtagggcactgagtaccctaggaagaagtcagagcaatggatacaaatgaccttgctcttggatttgctgagcatgatccctattctgatgtcagagattaggtttaaatggaatagagctatccatttgttcttactctctagggagacaatcttccaaaacagttttgggggggtcttctaaagctttcaaattggaagtaactttattcaactagagttgaataaaagaagggcaaaaataatctcacagagcttggaactgctgatagcccttactgagggcaaaagatggctatattgttagctatactcctaccaaagcaagcaaggagataggattatagataatttcacggacatttggaaataacattggtgattatacagacaagaataaactcacttcaagctggtctgttttaataaattttcaacgtaattgtctatttttttccctcccatctgcaacagaatacatttttttcagcctttatctagatgaggtaaagggaatcattcttatggtgctcttggagagtttcaggcctgtgcatgtgtgtacagcaggaggtaatatgctataatgtctgctgtaatatatttgcacagtagatgctatggatcattctgagctcagggtccagactttattcttattcccagaattttgtgttacgtttttacctcctaacatatgacacttcatcttatattaaggaaggtttagaatatctaatacgacttgaattcatttgttactaagccttctcaggcaagctgtatactagttactggtctccactgccatgccttttcaaggttcccatggtccagaatgatgtttgattcttaatttttctgtcccttttataatttgttttaatgattttgctacatttggaattcaataaaaaatgtgaacaataataaaaaaaaaaaaaaa

SEQ ID NO: 26204 - DNA, 2745 bp, Homo Sapiens
cggacgcgtggggagccagagccggacacggctgtggccgctgcctctacccccgccacggatcgccgggtagtaggactgcgcggctccaggctgagggtcggtccggaggcgggtgggcgcgggtctcacccggattgtccgggtggcaccgttcccggccccaccgggcgccgcgagggatcatgtctacagcctctgccgcctcctcctcctcctcgtcttcggccggtgagatgatcgaagccccttcccaggtcctcaactttgaagagatcgactacaaggagatcgaggtggaagaggttgttggaagaggagcctttggagttgtttgcaaagctaagtggagagcaaaagatgttgctattaaacaaatagaaagtgaatctgagaggaaagcgtttattgtagagcttcggcagttatcccgtgtgaaccatcctaatattgtaaagctttatggagcctgcttgaatccagtgtgtcttgtgatggaatatgctgaagggggctctttatataatgtgctgcatggtgctgaaccattgccatattatactgctgcccacgcaatgagttggtgtttacagtgttcccaaggagtggcttatcttcacagcatgcaacccaaagcgctaattcacagggacctgaaaccaccaaacttactgctggttgcaggggggacagttctaaaaatttgtgattttggtacagcctgtgacattcagacacacatgaccaataacaaggggagtgctgcttggatggcacctgaagtttttgaaggtagtaattacagtgaaaaatgtgacgtcttcagctggggtattattctttgggaagtgataacgcgtcggaaaccctttgatgagattggtggcccagctttccgaatcatgtgggctgttcataatggtactcgaccaccactgataaaaaatttacctaagcccattgagagcctgatgactcgttgttggtctaaagatccttcccagcgcccttcaatggaggaaattgtgaaaataatgactcacttgatgcggtactttccaggagcagatgagccattacagtatccttgtcagtattcagatgaaggacagagcaactctgccaccagtacaggctcattcatggacattgcttctacaaatacgagtaacaaaagtgacactaatatggagcaagttcctgccacaaatgatactattaagcgcttagaatcaaaattgttgaaaaatcaggcaaagcaacagagtgaatctggacgtttaagcttgggagcctcccgtgggagcagtgtggagagcttgcccccaacctctgagggcaagaggatgagtgctgacatgtctgaaatagaagctaggatcgccgcaaccacaggcaacggacagccaagacgtagatccatccaagacttgactgtaactggaacagaacctggtcaggtgagcagtaggtcatccagtcccagtgtcagaatgattactacctcaggaccaacctcagaaaagccaactcgaagtcatccatggacccctgatgattccacagataccaatggatcagataactccatcccaatggcttatcttacactggatcaccaactacagcctctagcaccgtgcccaaactccaaagaatctatggcagtgtttgaacagcattgtaaaatggcacaagaatatatgaaagttcaaacagaaattgcattgttattacagagaaagcaagaactagttgcagaactggaccaggatgaaaaggaccagcaaaatacatctcgcctggtacaggaacataaaaagcttttagatgaaaacaaaagcctttctacttactaccagcaatgcaaaaaacaactagaggtcatcagaagtcagcagcagaaacgacaaggcacttcatgattctctgggaccgttacattttgaaatatgcaaagaaagacttttttttaaggaaaggaaaaccttataatgacgattcatgagtgttagctttttggcgtgttctgaatgccaactgcctatatttgctgcatttttttcattgtttattttccttttctcatggtggacatacaattttactgtttcattgcataacatggtagcatctgtgacttgaatgagcagcactttgcaacttcaaaacagatgcagtgaactgtggctgtatatgcatgctcattgtgtgaaggctagcctaacagaacaggaggtatcaaactagctgctatgtgcaaacagcgtccattttttcatattagaggtggaacctcaagaatgactttattcttgtatctcatctcaaaatattaataatttttttcccaaaagatggtatataccaagttaaagacagggtattataaatttagagtgattggtggtatattacggaaatacggaacctttagggatagttccgtgtaagggctttgatgccagcatccttggatcagtactgaactcagttccatccgtaaaatatgtaaaggtaagtggcagctgctctatttaatgaaagcagttttaccggattttgttagactaaaatttgattgtgatacattgaacaaaatggaactcatttttttttaaggagtaaagatttttaattctgtgattgtgtgtatgtgtgttgaaactgtaaagcttttatgactctaatattaatctcttaaatgaaattaaaaggcaaaagaacatgaaaaaaaaaaaaaaa

SEQ ID NO: 26205 - DNA, 1761 bp, Homo Sapiens
gaagctgcatcccagaggagcgcgtccaggagcggacccgggagtgtttcaagagccagtgacaaggaccaggggcccaagtcccaccagccatgcagacctgccccctggcattccctggccacgtttcccaggcccttgggaccctcctgtttttggctgcctccttgagtgctcagaatgaaggctgggacagccccatctgcacagagggggtagtctctgtgtcttggggcgagaacaccgtcatgtcctgcaacatctccaacgccttctcccatgtcaacatcaagctgcgtgcccacgggcaggagagcgccatcttcaatgaggtggctccaggctacttctcccgggacggctggcagctccaggttcagggaggcgtggcacagctggtgatcaaaggcgcccgggactcccatgctgggctgtacatgtggcacctcgtgggacaccagagaaataacagacaagtcacgctggaggtttcaggtgcagaaccccagtccgcccctgacactgggttctggcctgtgccagcggtggtcactgctgtcttcatcctcttggtcgctctggtcatgttcgcctggtacaggtgccgctgttcccagcaacgccgggagaagaagttcttcctcctagaaccccagatgaagttcgcagccctcagagcgggagcccagcagggcctgagcagagcctccgctgaactgtggaccccagactccgagcccaccccaaggccgctggcactggtgttcaaaccctcaccacttggagccctggagctgctgtccccccaacccttgtttccatatgccgcagacccatagccgcctgcaaggcagagaggacacaggagagccagccctgagtgccgaccttgggtggcggggcctgggtctctcgtcccacccggagggcacagacaccggcttgcttggcaggctgggcctctgtgtcacccactcctgggtgcgtgcagacccttcccctccaccccccaggtcttccaagctctgcttcctcagtttccaaaatggaaccacctcacctccgcagcacccgacttaccaggacgcatgcccctccctctgccctcatcaaacccacagacccggactccctttctgccaccccaggctggtccggccccaggtgtggggtccgctctctccactcccagggctccgcgcccaagtgagggggcccctgccggagcctcagacacactccagttcagggctgtggggggccttggccacatacctgtcccttggctatgagcaggctttgggggcccttccgcggcagccccgggggccgaggtagggtcgggggcttagaggctgggatggctcctggccccaccgccagggggcagcgcaggccgggctgggaggcggcggcggcggctcgggctggggggtcaggtggacgctgccctccggggctggtcgcgcatccctcagtccctcggccacccgggggtcgctccctcgtgcccaccgcacctgccgagcctctttggacccagatctgttcatgcttttgtcttcgtcactgcggcggggccctttgatgtcttcatctgtatggggtggaaaaatcaccgggaatcccccttcagttctttgaaaaagttccatgactcgaatatctgaaatgaagaaaacaaaccgactcacaaacctccaagtagctccaaatgcaatttttaaaatggaaaacaaaaatctgaaaaaaaaaaaaaaa

SEQ ID NO: 26206 - DNA, 2679 bp, Homo Sapiens
ggtcagcggcgcgggtgctgcgcctagctgcgcaccatggccgggttgctggcgttgctgggtccggcaggcagggtgggcgcccgggtccggcctcgcgccacctggctcctgggcgccaccgccccctgcgccccgccgcccctggccctggccctgctcccgcccaggctagacgcccggctgctccgcacggcgcgcggggactgccgcggccaccaggaccccagccaggccacggggacaacaggcagcagcgtcagctgcacagaggagaaaaagcaaagcaagtcacagcaactgaaaaagatttttcaagagtatggcactgttggcgtgtcattgcacattggaatctcattaatttccttgggcatattttacatggttgtgtcaagtggtgtggacatgcctgcaatcctgctgaaactcggatttaaagagtccctggtacagtcaaaaatggcagcaggcacaagtaccttcgtggtggcctatgcaatccacaagctgtttgtgccagtgagaatcagcattacgctagtctctgtgcccttgattgtcagatattttcgaaaagtgggattttttaaacctccagctgcaaaaccttaatgaactcttcagttgtacacactgaaaacctatttcttctaaattacatgatttggattggttttagggttttagggttgtagggtttcttttggagaggtagggggctaattgctatgttctcatggataaactttgccagcaaaaatcaggcttttgaacaattttaattttttgcctcataaattttgtgaatgctattcattatagggcttgtatatataatctaaaatgtcagcaaggcatcggagatgggttaacatctcaaaacaaaatagcctacaaatgttccttgtgggagactttggcgagggtctgtgggtaaaagcaccagggggttaatcttggctcagtttcctaaaaagcattgattaatttaactggcttttaaatatccccttccgctgatatttgttgtcagctgcctacagtttaatatgcagcgttcacaaaacagctgccagtgctacaattaatgaagcaaaacttaatatgtaatcacaatctaaattagcatcaatactttgacattcattacattggtttgggggaagaaaagtatttctggtatgtttcattgatccccagataccttccaatctggacatgatggggctgattccagatggtttttctgaaatttcattaaggtaggtcagcgtcatttgtctctgtttaggtaaaatataaaaaccctgcccagtagcagtggcatcgcttggttcctgatgcccatgttccagaggaattcggataccacaaacagctaagacaatctcagcttttcttagacaatcttctatctcaaacttcagacattccagaattgtcatgatgtttacactgtctgagttaaaaatcctgttcaagaaaaaaaaagattttgtatcacttcttaaaaaggaatattcatagcacttgtcacaaatagaaggcaaccatgagataatacaagccagggagaggcttgtattacatgacaggtgtaattagtctgctgagccagctttacccaatgaagggcatatgtgttagagagattagctaagagtagaaattcgagcatagaggccaggtgcggtggctcacgcctgtaatcccagcactttgggaggttgaggcaggcgtgtcacttgaggccaggagttcgagaccagcctggccaacatgatgaaaccccgtctctactacaaatacaaaaattagccgggtgtggtggcacacgcctgtagtcccagctactggggaggctgaggcagcattgcttgaacccaggaggtggaggttgcagtgagccaagatcacaccactgcactccagcctgggcgacagagggagacactgtctccaaaagaaagaaatcccagcgtagatccaaactgagacactgaggcttcgtccttatagtagtcaggagcaggcgattgaagtaattctgtcctgcggggttcagcatcatgcacgttccccctgggccattctctgatgcagggcacttgctccacactctgggaacccagattcaccagtctgccctgtcacgtagttgaaggagttgcatttatctttctggctcctaattcctttaaaattacatttgttgcagaacctccacaaggctaaataaaattacatttgtgaccatcagagaactgaataaaccattaactggccatcctggttttgcagagatcaggttgttgacagttcctggttgacccacagctacccatgtcagttatctccactaacatatccaagaatctttgtaggacaatttctccacctgcaaggtctttcaggtagaactcttcttttaaggcaattagcccattgccaaaaggttttactgtcttaaagctgtctttctgagatctaattccaaggacttctccacagctaagtgagatgcctcacaccattaggtgatgctttggacagaacagagtattttcatcttgtgtttaaagcaattccttggcttcggctcctcaccactttctatgccagtctcccatttatgtccctagtaatgcctatgcaaaaaaaaaaaaaaaaaaaaaa

SEQ ID NO: 26207 - DNA, 3238 bp, Homo Sapiens
ccggttcagccatggggacctctccgagcagcagcaccgccctcgcctcctgcagccgcatcgcccgccgagccacagccacgatgatcgcgggctcccttctcctgcttggattccttagcaccaccacagctcagccagaacagaaggcctcgaatctcattggcacataccgccatgttgaccgtgccaccggccaggtgctaacctgtgacaagtgtccagcaggaacctatgtctctgagcattgtaccaacacaagcctgcgcgtctgcagcagttgccctgtggggacctttaccaggcatgagaatggcatagagaaatgccatgactgtagtcagccatgcccatggccaatgattgagaaattaccttgtgctgccttgactgaccgagaatgcacttgcccacctggcatgttccagtctaacgctacctgtgccccccatacggtgtgtcctgtgggttggggtgtgcggaagaaagggacagagactgaggatgtgcggtgtaagcagtgtgctcggggtaccttctcagatgtgccttctagtgtgatgaaatgcaaagcatacacagactgtctgagtcagaacctggtggtgatcaagccggggaccaaggagacagacaacgtctgtggcacactcccgtccttctccagctccacctcaccttcccctggcacagccatctttccacgccctgagcacatggaaacccatgaagtcccttcctccacttatgttcccaaaggcatgaactcaacagaatccaactcttctgcctctgttagaccaaaggtactgagtagcatccaggaagggacagtccctgacaacacaagctcagcaagggggaaggaagacgtgaacaagaccctcccaaaccttcaggtagtcaaccaccagcaaggcccccaccacagacacatcctgaagctgctgccgtccatggaggccactgggggcgagaagtccagcacgcccatcaagggccccaagaggggacatcctagacagaacctacacaagcattttgacatcaatgagcatttgccctggatgattgtgcttttcctgctgctggtgcttgtggtgattgtggtgtgcagtatccggaaaagctcgaggactctgaaaaaggggccccggcaggatcccagtgccattgtggaaaaggcagggctgaagaaatccatgactccaacccagaaccgggagaaatggatctactactgcaatggccatggtatcgatatcctgaagcttgtagcagcccaagtgggaagccagtggaaagatatctatcagtttctttgcaatgccagtgagagggaggttgctgctttctccaatgggtacacagccgaccacgagcgggcctacgcagctctgcagcactggaccatccggggccccgaggccagcctcgcccagctaattagcgccctgcgccagcaccggagaaacgatgttgtggagaagattcgtgggctgatggaagacaccacccagctggaaactgacaaactagctctcccgatgagccccagcccgcttagcccgagccccatccccagccccaacgcgaaacttgagaattccgctctcctgacggtggagccttccccacaggacaagaacaagggcttcttcgtggatgagtcggagccccttctccgctgtgactctacatccagcggctcctccgcgctgagcaggaacggttcctttattaccaaagaaaagaaggacacagtgttgcggcaggtacgcctggacccctgtgacttgcagcctatctttgatgacatgctccactttctaaatcctgaggagctgcgggtgattgaagagattccccaggctgaggacaaactagaccggctattcgaaattattggagtcaagagccaggaagccagccagaccctcctggactctgtttatagccatcttcctgacctgctgtagaacatagggatactgcattctggaaattactcaatttagtggcagggtggttttttaattttcttctgtttctgatttttgttgtttggggtgtgtgtgtgtgtttgtgtgtgtgtgtgtgtgtgtgtgtgtgtgtgtttaacagagaatatggccagtgcttgagttctttctccttctctctctctcttttttttttaaataactcttctgggaagttggtttataagcctttgccaggtgtaactgttgtgaaatacccaccactaaagttttttaagttccatattttctccattttgccttcttatgtattttcaagattattctgtgcactttaaatttacttaacttaccataaatgcagtgtgacttttcccacacactggattgtgaggctcttaacttcttaaaagtataatggcatcttgtgaatcctataagcagtctttatgtctcttaacattcacacctactttttaaaaacaaatattattactatttttattattgtttgtcctttataaattttcttaaagattaagaaaatttaagaccccattgagttactgtaatgcaattcaactttgagttatcttttaaatatgtcttgtatagttcatattcatggctgaaacttgaccacactattgctgattgtatggttttcacctggacaccgtgtagaatgcttgattacttgtactcttcttatgctaatatgctctgggctggagaaatgaaatcctcaagccatcaggatttgctatttaagtggcttgacaactgggccaccaaagaacttgaacttcaccttttaggatttgagctgttctggaacacattgctgcactttggaaagtcaaaatcaagtgccagtggcgccctttccatagagaatttgcccagctttgctttaaaagatgtcttgttttttatatacacataatcaataggtccaatctgctctcaaggccttggtcctggtgggattccttcaccaattactttaattaaaaatggctgcaactgtaagaacccttgtctgatatatttgcaactatgctcccatttacaaatgtaccttctaatgctcagttgccaggttccaatgcaaaggtggcgtggactccctttgtgtgggtggggtttgtgggtagtggtgaaggaccgatatcagaaaaatgccttcaagtgtactaatttattaataaacattaggtgtttgttaaaaaaaaaaaaaaaaaaaaaaaaaaaaa

SEQ ID NO: 26208 - DNA, 3019 bp, Homo Sapiens
gcgccaccagggcagcagccgccgcagccgccgccgctgggcagaggagccggagacgcgagcgggcgaggtggcggcggcggcggagcgggagcgggtaccgggcgcgggcagagcgcggcggcgcggagacggggttttgccatgttgacctggctggtctcgaactcctgaacgcaagtgatccgcctgcctcagcctcccaaggtgctgggattacaggcacgagccactgtgcctggcctcaactgttgcttcttataaaggtgtgttccagagaacaagccttcagacatttgctatattgacgctgagctgtcaggggactcaggcttatgaggaggtattgttacacaaaacagtgtctagtgaagacgacaagaaagaggggaaaggatcggaaaaagaagctaaaatactatagaaaaccatgagatctattcgatcttttgctaatgatgatcgccatgttatggtgaaacattcaacaatctatccatctccggaggaacttgaagctgttcagaatatggtatctactgttgaatgtgctcttaaacatgtctcagattggttggatgaaacaaataaaggcacaaaaacagagggtgagacagaagtgaagaaagatgaggccggagaaaactattccaaggatcaaggtggtcggacattgtgtggtgtaatgaggattggcctggttgcaaaaggcttgctgattaaagatgatatggacttggagctggttttaatgtgcaaagacaaacccacagagaccctgttaaatacagtcaaagataatcttcctattcagattcagaaactcacagaagagaaatatcaagtggaacaatgtgtaaatgaggcatctattataattcggaatacaaaagagcccacgctaactttgaaggtgatacttacctcacctctaattagggacgaattggagaagaaggatggagaaaatgtttcgatgaaagatcctccggacttattggacaggcagaaatgcctgaacgccttggcgtctcttcgacatgccaaatggtttcaggcaagggcaaatggattaaaatcatgtgtaattgtcctccgcattctgcgtgatttgtgcaacagagtccccacatgggcaccattgaaaggatggccactagaacttatatgtgaaaagtctataggtacttgtaatagacctttgggcgctggggaggccttgagacgagtaatggagtgtttggcatctggaatactacttcctgggggtcctggtcttcatgatccttgtgagcgagacccaacagatgctctgagctatatgaccatccagcaaaaagaagatattacccacagtgcacagcatgcactcagactatcagcctttggtcagatttacaaagtgctggagatggacccccttccatctagtaagccttttcagaagtattcctggtcagttactgataaagaaggtgctgggtcttcagctctaaagaggccatttgaagatggattaggggatgataaagaccccaacaagaagatgaaacgaaacttaaggaaaattctggatagtaaagcaatagaccttatgaatgcactaatgaggctaaatcagatcaggcctgggcttcagtataagctcctatctcagtctggccccgttcatgccccagtcttcacaatgtctgtagatgtggatggcacaacatatgaagcctcaggaccatccaagaaaacagcaaaacttcacgtagcggtgaaggtattgcaggcaatgggatatccaacaggctttgatgcagatattgaatgtatgagttccgatgaaaaatcagataatgaaagtaaaaatgaaacagtgtcttcaaactcaagcaataatactggaaattctacaactgaaacctccagtaccttagaggtaagaactcagggccctatcctcacagcaagtggcaaaaaccctgtaatggagctcaatgaaaaaagaagaggtctcaagtatgaactcatctcagagactggtggaagccatgacaagcgctttgtaatggaggtagaagtagatggacagaaattcagaggcgcaggtccaaataagaaagtggcaaaggcgagtgcagctttagctgccttggagaaactgttttctggacccaatgcggcaaataataagaaaaagaagattatccctcaggcaaagggcgttgtgaatacagctgtgtctgcagcagtccaagctgttcggggcagaggaagaggaactctaacaaggggagcttttgttggggcgacagctgctcctggctacatagctccaggctatggaacaccatatggttacagcacagctgcccctgcctatggtttacccaagagaatggttctgttacccgttatgaaatttccaacatatcctgttccccactactcattcttttagcaaatgacagaagctaattcctattgaacaacaatacagtacaacacagaatgttagagaaaaagcctttttatcctgctttctttgaacacatacttgatcaaaattatttgtaaagaacatctttcctactttttgattttaacaaatgcaaatttagttctctaaaacttgaaaaaaaaaagaaaccagttctgtgaaaacggtacctcatttctggaaaataacttataccagcccttctgttctagggaaataaaagtctagcagttcaaagtttaagttttaagagacgtatcagattatgtaaaattaaatttgtgaaggatgtatagagtctcaaacactgatcacaaataaactgctttgttgtaacacagagtactgcctggttcctgatgcagtcactgattcttagttgattgatatgtatttgccccagggcactttaatttgggctgtagttattttttttaatacaatagagacttttcatttaactttaactttgtaaatattgaagtgtgtaataaagccaataaaatatgggtttgaaaaaaaaaaaaaaaa

SEQ ID NO: 26209 - DNA, 3449 bp, Homo Sapiens
gtgaaagaacaggctttcatgttactctgtgatcttctgatgattttcagccaccaattaatgacaggtggcagagagggccttcagcctttggtgtttaatccagatactggactccaatctgaactcctcagttttgtgatggatcacgtttttattgaccaagacgaggagaaccagagcatggagggtgatgaagaagatgaagctaataaaattgaggccttacataaaagaaggaatctacttgctgctttcagcaaacttatcatttatgacattgttgacatgcatgcagctgcagacatcttcaaacactacatgaagtattacaatgactatggtgatattattaaggaaacactgagtaaaaccaggcagattgataaaattcagtgtgccaagactctcattctcagtttgcaacagttatttaatgaacttgttcaagagcaaggtcccaacctagataggacatctgcccatgtcagtggcattaaagaactggcacgtcgctttgcccttacatttggattggaccagattaagacacgagaagcagttgccacacttcacaaggatggcatagagtttgcatttaaataccaaaatcagaaaggacaagagtatccacctcctaatctggcttttcttgaagtactaagtgaattttcttctaaacttcttcgacaggacaaaaagacagttcattcatacctagagaaattccttaccgagcagatgatggaaaggagggaggatgtatggcttccactcatctcctatagaaattcattagtcactgggggtgaagatgatagaatgtctgtgaacagtggaagtagcagcagcaaaacctcatcagtaaggaataagaaaggacgacctccacttcataaaaaacgagtagaagatgagagtctggataacacatggctaaacaggactgacaccatgattcagactcctggccccctgccagcaccacaactcacatccactgtactgcgggagaacagtcggcccatgggagaccagattcaagaacctgagtctgaacatggttctgaaccagactttttacacaatcctcagatgcagatctcttggttaggccagccgaagttagaagacttaaatcggaaggacagaacaggaatgaactacatgaaagtgagaactggagtgaggcatgctgttcggggtctaatggaggaagatgctgagcccatctttgaagatgtgatgatgtcatcccgaagccagttagaagatatgaatgaagaatttgaggacaccatggttattgatctgcctccatcaagaaatcggcgagagagagctgagctaaggccagacttctttgactctgcagctatcatagaagatgattcaggatttggaatgcctatgttctgaagtctgaagaaaatttacaaatctggaactctattatttagagctagaggcctatatactgtgatagcttgtatggggaaaaacacttttgatgtgatctgatttgttttttaatcaaatgattaaggtcaatccctttttgcagtgacagaagaggagcatgtaaattacccaagggaatgttggtgaatgtcaactcagaaagactgacctgaaaatcatttgtgtcctactattggacttatcccaatacagatgtgtgtgtttttctggagggaggaagaaattttaaatttttaaaacagctgtcaagataaacactgttatacacctgttttatgaaaactcaacattgagtaaaaaaaaacatatttttaactttattttcctgttgtacaatttaaaaaccgttttaacattttgcctttttatgttttaaaagctaaccatttttattaaacctatgagtaagcagctcatcctaattgcgaagagtgttttggagttcactggatttggttgacctttgtggaacacaaataatgaaggagcagaacattgacaagctaagatgaaattctgacatagtacatctctgccaaaaaccacacaccctctgtggatatggatatgaattcccagattttatatactcttgaataaaaggtttatttttatttataagtgggcataaaataagaaatgtccatgcagccatttttccaacagatgctgtacaccgttcattttatatagactagggagattcaaatacagtgcattttctattggtatttgttctgtgcatttttagcaacttctaccagcaaataaagtattctcagtaaaacgaaaatgattctcaagttatcagtttgctgtttttaccacttatttcatgccctgccaaattcaagttacacagacttccattttcttaagataatcaatcatgaagaaatcctttatcaatcattcaaaagtaattttaagtgtaacataactgtgtttacttcccatgcacttaatacccttatgcgctaattttgtgaattaagtttactgattatagaagtatgtgctgcatagaagtctgtgcttagagggtgaagttcctaagcttaccttgaattacagctacatttcagtgttaaatgtgcatattaagaataattcttttggggaaagaaattatgaatcttcaggacagtctacaatggtttagagttacattctgcctagacttttatgacttgctgctattgttttaaaaaccccacttagtctcttcctttctgatttctaaagtaagcctcagaatttccaaaccaattcatccacagctgtttctgggctggtttttaaagtagctgcaacagaatcatgaggctttccctttttatcaaatacgaaaaacattttttaaaattctgcacacccagtgatcatcttttgtgcgggaaagcaagatgatgatggatgattttattcatccttttagtaaagacacaaaacatttttctcaacatttgtacagttctgaaaaaaacctggtcaccaaaaatatcttctctgctaattcagcaattcttgggctccagttaggggagctggggcctcactttctcccagaattgtgggcttcactggaagtgaaggtgcaggaatgactggactgtccaccccagccctgcctgcctgtggttttggccagggagcaagccatgaggtgccctggcacatgcacaaattgatcctttgcgtgacagtcttgtatggaaaacagatgctgacagaattgtagactaccatgccacacaaaaaggctaaatatctactccaatgggtttccagttcagtttgaagtcaatcaaatttttgtattttcggtgtctccttgattggttttgctagtaattctgtaaattgtacatttgcaatatgaggttttttttccttttgtacaatttgaaactgatgcttcacctttcctttaataaactattcaaaatcagaaaaaaaaaaaaaaa

SEQ ID NO: 26210 - DNA, 1851 bp, Homo Sapiens
aacaaaacaaaatataaatgtacatcatttaatgtcccagtggctctattctacctgtaagaaaatgatacaaaaccacctaagatattttgaagcctgacaaatcagcttcatggaaaaaggtaaaaaatgcatttttcaaccgaaagggcagatccaatagaagacccgctccttaaataaacataaaatgtaaaaagttggaaaattaagagtaatgttccatctggaaactgaacttttgtccttgaacttgtgttggcaccaagcctcatacacagtgagctcaataactgttgggacaaaggaaggaaggacaaaatgtgtaacttcccagcatctgggagatgctgtctcttgcctcactgagtgttccttttctttgctctcatgtcattccctgagaacaatgaattctgggacaggctaaacatcatgatgaagtttcttaaacagactttcttagtggaaatccatttagatctgggtgtgctctatggggagtgctgacgtcaaagagcaaatgtctataaggggcccttttaaaatgaacattttcctcattgagcaagctgggattctctaatgtagaaatcaagccatctttataatttcacttcagatgtttatgtttttgttttttttttgtctccaatgatggtaaaaataaaaactacgcattacttaaaggagtttccctcacatgtaaacactgttaggaagtctggattaagttgaaagtcctgttttaactttttttctctcatataccaaacactctgtatttctcttaaagaagccctttaagagaaagccctaattttatatctgacagtaaagtttgctgcaagtgtatgagttcaaacacatcccttgttttctgtccctaggggaaaagtcatgtagttttagcttggctccagtgttaatattatattcagtagcagccttagaagagtggtctaagacttgaacctggagcaattttatagcacagaatcctacgaagataggactgtgaacatttgttttctttttcgtgtgtgtcaaactaactggtttttgctttaccaataaaatgtcctcggcagagtaaattttaaacgtgaaaattatagatcttgatattgaatccatcagtgattcaagagatacacctatttgcctaaaacaacctaagatgtattggttatggaatcatgtgttggataggttcttaagacctgtttcctcaaatcttgacacagttttcaagggtggcttattgacttgcacggttgggcagataatccagatttacctaagattgggtaaaaaagtcatctgtgactttgctggcagggcatttgctaagtggagtacaggatctaaaagggttttcttagaaagggcaatattgtccaatgaagtaagcagaaggactctgggttagaagcatctgcacaaaaactggtgagacctactctccactgctctgcagctggatggctgatggcaggctgagcagtggggaagcaggttttaacaacagggagtccttccaggtcactgtatattgagaagaaacataaaactattgtctgttacattccgaggtcagccttcttcttaacgttttataatatgcaaatgccagcttctggaaagcaagtatcatcatgtaccaaatgctttatacaccatcacattcatgaattttttagcatggtcagaacttgtgtaaatatgtctcttagatgattttggggagatgtgatttatttttcatattttcaaaatgcatttcatttcaaataaagttatctattgagacaaccaaaaaaaaaaaaaaaaaaaaaaaaaaaaaaaaaa

SEQ ID NO: 26211 - DNA, 668 bp, Homo Sapiens
gcctttccttttgtttttctcaggttttgcgtgggaggcggtcccgggatttcaagggtctacgcgcttttctatggcgaatgcaacccgacgagggagtgggctgtatcttcagagttgtctccgtctttccaagaacagaacaaaatgaacaaggtagaacagaagtcccaggagtcagtatcatttaaagatgtgactgtgggcttcacccaggaggagtggcagcacctggaccctagtcagagggctctgtatagagatgtgatgctggagaactacagcaaccttgtctcagtggggtattgtgttcacaaaccagaggtgatcttcaggctgcaacaaggagaagagccatggaaacaggaggaagaattcccaagccaaagctttccagaagtctggacagctgatcacctgaaagagaggagccaagaaaaccaatctaaacatttgtgggaagttgtattcatcaataatgaaatgctgactaaggaacaaggtgatgtaataggaataccatttaatgtggatgtaagttcttttccttccagaaaaatgttctgtcagtgtgattcatgtggaatgagtttcaacactgtttcagaattggttatcagtaagataaactatttacgaaaaaaaaaaaaaaaaaaaaaaaaaaaaaa

SEQ ID NO: 26212 - DNA, 1154 bp, Homo Sapiens
acaggcacaggtgaggaactcaactcaaactcctctctctgggaaaacgcggtgcttgctcctcccggagtggccttggcagggtgttggagccctcggtctgccccgtccggtctctggggccaaggctgggtttccctcatgtatggcaagagctctactcgtgcggtgcttcttctccttggcatacagctcacagctctttggcctatagcagctgtggaaatttatacctcccgggtgctggaggctgttaatgggacagatgctcggttaaaatgcactttctccagctttgcccctgtgggtgatgctctaacagtgacctggaattttcgtcctctagacgggggacctgagcagtttgtattctactaccacatagatcccttccaacccatgagtgggcggtttaaggaccgggtgtcttgggatgggaatcctgagcggtacgatgcctccatccttctctggaaactgcagttcgacgacaatgggacatacacctgccaggtgaagaacccacctgatgttgatggggtgataggggagatccggctcagcgtcgtgcacactgtacgcttctctgagatccacttcctggctctggccattggctctgcctgtgcactgatgatcataatagtaattgtagtggtcctcttccagcattaccggaaaaagcgatgggccgaaagagctcataaagtggtggagataaaatcaaaagaagaggaaaggctcaaccaagagaaaaaggtctctgtttatttagaagacacagactaacaattttagatggtaaggttcacaaataggttgatttctttcttcagctttctgacatgtccagcccatctctaatgaggactcccagatcatcactttatggctgttaggtgtttcccatatgaaattagaggagctgggtcagggagacaaaagtcttctattagtcttatggatagctcctccttgagtgtattttgtgcaaaagattaagaagctggactctactgccattaaagctgagagaatcctaaggttatttgtggcttcggggttatatttattactactactactaataaatattcaacaagtaaataaatcttttttaaatcaaaaaaaaaaaaaaaaaaaaaaaaaaaaaa

SEQ ID NO: 26213 - DNA, 1919 bp, Homo Sapiens
agatgcaaggcggcgattttcccttctgtcagatcttgatgaacaaagcagtcataattcatctctagaaagatttatatcctggcatttgaaatgctttttatttagaatagtagtaaaaaatggaaaaagaaaaaggaaatgatgatggaataccagaccaagagaattccttggatttttctgaacactttaaccaacttgaattgttggaaacacatggacaccttattcctactggtactcaaagtctttgggtaggcaattctgatgaagatgaggagcaagatgacaaaaatgaagagtggtatcgattgcaagaaaaaaaaatggaaaaagacccaagcagattgcttctttgggctgctgaaaaaaatcggcttaccacagtgcggagactcctttctgaaaaggccactcacgtgaacactagggatgaagatgagtatacccctcttcatcgagcagcctacagtggacacttagatattgttcaggagctcattgcacagggggccgatgttcatgcagtgactgtggatggctggacgcccctgcacagtgcttgtaagtggaataataccagagtggcttctttcttactgcagcatgatgcagatatcaatgcccaaacaaaaggcctcttgacccccttgcatcttgctgctgggaacagagacagcaaggataccctagaactcctcctgatgaaccgttacgtcaaaccagggctgaaaaacaacttggaagaaactgcatttgatattgccaggaggacaagtatctatcactacctctttgaaattgtggaaggctgtacaaattcttcacctcagtcttaacaattctagtaattttcctaagtttctaaataccagtgcctcctgtgtgtgagatgtattcccataatcaaagttgacgtcaaacatcttactacaaaaattcagtgacattcattataacattcttccaagtgaattgcctgactttgatgtcaaaatgtatttgaaagtaatttgcatatatctttaattatttctgtggagtttgtgatttttttatcagaaataattttaatgtgtgtatacttaaaaacttgacacgggttgtacagaaactggtatttttggtgctgatacaagagaaatgtatttttaaatatcccacatcctggatctttgttgggtatttagtatattgacatatatttttataaggtgaggtaactcagaacttaatttaaaagtcttaaatattctgatacaattcagctgtcttctctaccttaccatagccagttgctttcattttaaaccagagcaagtaacatattagtgacttgaatcttcataagttaaagtaaaaaacagcaaaaaacctagatctttgtcttttagaacacagaccattttcgggaaagcagttagctaagtgtttaattcatgaatattgtatactgcatcccctaccacaatttacacaatcctgtggatagtcctacctcaccctggtcaacctacatgatccttaagctaatggcgaatcacgatgaccttgtagacatgcacacaactatacctttgtccaacagatcataatatatctgctatccaactggttttacctgcctaatcctactgatttgggcactgcttgtatagtctctcaagttcacaggaaatgttgattttctaaggtcctcatttttacagagtatacaggcaaagtgacaggggaaaaggaattagtctaagagtaaggggatgattattatattgaggctaaaaccacaaagtggctcaggctttaaaaaaaaaaacactgtggataatgacaaaaagcataagtaaaaatatttgagaaaaataaagtacaagttttgaacaacgaaaaaaaaaaaaaaaaaaaaaaaaaaaaaa

SEQ ID NO: 26214 - DNA, 1335 bp, Homo Sapiens
ggctctaacgaatttgaatgaggagcctcagcgctttcggcgccattttcgagtgatgcctgatctcatcaatctagcgggagagacaggataacctgtccgagagtatagcgccactatgactccgccggaaaaattactttaaaaatcgccaaaaattacttggagcaaagggcagtcggcggagcttcgccaaggctggcgcagtcggttttgacctgtagcagagaaccaattctggagaacagcctcacttctttgattgaatacttacataatgcattggaacatgacatgagattaaggtttaataatgatagaatgaagaccacaataaaagagacctctacttagctcagcaattcttacctttcttacctatttgatgaagatgtcttttgaaaggtgtactgcaaggaacaaaatgtttgtaaattctccttttaccaaggtggataattactgtaccttcctcatggaaaaagttttatttaaagtgttatttctcattgaatactatcaaaaaggaaaaaaaaatgacctaaacttttgagatagatttggctctagtaagtatttagttatatcacttgcatatctgggagaagaaataagagactatcatcagtacattcccatctactaaaaaaatttattttacacatgtcaagggattacttataacttccattttattactaatagcttgaacccttttaatgaagacctaactcctccaccagaaatttaagtttatgttcttactttgtttacttataaaatacatctcaggtatttcggatgtctttttttttctaagcctatatgaaatgaaaaatatattggcaaaataaatgtttaaaccttttacgttaaaattactttgaaagatgaaaagttagcgctgtttttgtctacgttatactgaaattaaatgtttataatttatattttgggtttatgtataaatcatggaatttatgcaaaaatatgagtagtacagattctcctctaattctgtaggactttgaataatgtgatttttttcttataattggacccttgtgttttgaagaaatgccaactgcttgaagaatctccttgttatttgtattatttgctatagggttagatgttgagaaattctgctgacaaaaaattttaagccagttttacactaaatgttcctcagtctgattaatttgttattggatgtattctgtatctttcttttgtaatttgtaacttttatccacttagcacgaatgattctattaaagaaaatcattaggaagtggtagaaactaaaaaaaaaaaaaaaaaaaaaaaaaaaaa

SEQ ID NO: 26215 - DNA, 960 bp, Homo Sapiens
gaacgaaaacgcagaattgagcaggatatgctagaaaagaggaaaatacagcgtgaattagcaaaaagggctgaacaggaaggagatgattcactacttataactgtggtacctgtcaaatcatataaaacatctggaaaaatgaaaaagaattttgaggatctagaaaaagaacgtgaagagaaagaaaggatcaagtacgaggaagataaaagaataagatatgaagaacaacgaccatctctcaaggaagcaaagtgtctttcattagttatggatgatgaaatagaaagtgaagcaaaaaaagaatcactttctcccagaaaattgaaactaacttttgaagaactggagcgacaaagacaagaaaaccgaaagaagcaagctgaagaggaagcaagaaaacgtttagaagaagagaagcgtgcttttgaagaagcaaggcggcaaatggtaaatgaagatgaggaaaaccaagacacagcaaaaatttttaaagggtaccgccctggtaaactcaaactcagttttgaagaaatggaaaggcaaagaagagaagatgaaaaaaggaaagcagaagaagaagccagaaggagaatagaggaagaaaagaaggcgtttgctgaagcaaggagaaatatggtagtagatgatgactccccagagatgtataagacaatctctcaagaatttcttacaccgggaaaactggaaattaattttgaagaattattaaaacaaaaaatggaagaagaaaaacgacgaacagaggaggaacggaagcataagctagaaatggagaaacaagaatttgaacaactgagacaggaaatgggagaggaagaggaagaaaatgaaacctttggattgagcagagaatatgaagaactgatcaaattaaaaaggagtggctctattcaagctaaaaaccaaaaaaaaaaaaaaaaaagaaaaaaaaaa

SEQ ID NO: 26216 - DNA, 1514 bp, Homo Sapiens
gcccctccctccgcccgcccgccggcccgcccgtcagtctggcaggcaggcaggcaatcggtccgagtggctgtcggctcttcagctctcccgctcggcgtcttccttcctcctcccggtcagcgtcggcggctgcaccggcggcggcgcagtccctgcgggaggggcgacaagagctgagcggcggccgccgagcgtcgagctcagcgcggcggaggcggcggcggcccggcagccaacatggcggcggcggcggcggcgggcgcgggcccggagatggtccgcgggcaggtgttcgacgtggggccgcgctacaccaacctctcgtacatcggcgagggcgcctacggcatggtgtgctctgcttatgataatgtcaacaaagttcgagtagctatcaagaaaatcagcccctttgagcaccagacctactgccagagaaccctgagggagataaaaatcttactgcgcttcagacatgagaacatcattggaatcaatgacattattcgagcaccaaccatcgagcaaatgaaagatgtatatatagtacaggacctcatggaaacagatctttacaagctcttgaagacacaacacctcagcaatgaccatatctgctattttctctaccagatcctcagagggttaaaatatatccattcagctaacgttctgcaccgtgacctcaagccttccaacctgctgctcaacaccacctgtgatctcaagatctgtgactttggcctggcccgtgttgcagatccagaccatgatcacacagggttcctgacagaatatgtggccacacgttggtacagggctccagaaattatgttgaattccaagggctacaccaagtccattgatatttggtctgtaggctgcattctggcagaaatgctttctaacaggcccatctttccagggaagcattatcttgaccagctgaaccacattttgggtattcttggatccccatcacaagaagacctgaattgtataataaatttaaaagctaggaactatttgctttctcttccacacaaaaataaggtgccatggaacaggctgttcccaaatgctgactccaaagctctggacttattggacaaaatgttgacattcaacccacacaagaggattgaagtagaacaggctctggcccacccatatctggagcagtattacgacccgagtgacgagcccatcgccgaagcaccattcaagttcgacatggaattggatgacttgcctaaggaaaagctcaaagaactaatttttgaagagactgctagattccagccaggatacagatcttaaatttgtcaggtacctggagtttaatacagtgagctctagcaagggaggcgctgccttttgtttctagaatattatgttcctcaaggtccattattttgtattcttttccaagctccttattggaaggtatttttttaaatttagaattaaaaattatttagaaaaaaaaaaaaaaaaaaaaaaaaaaaaaa

SEQ ID NO: 26217 - DNA, 1085 bp, Homo Sapiens
agttccggcgcgggtgttgagagcggtgtggtaggtgttgtagccgctatggtgaagttcgctttgtagcggccccggctagagagttggcctgttccctgcctttgtgacccggaggagcttttggggtgcgtcaagcccctggcctgaggcagcgaactggtttgtggcctgtttgattcctgtcagaggtttgctgacccaagacagtatcgaaaatgcatattaagtcaattattctagagggattcaagtcctatgctcagaggaccgaagtcaatggttttgaccccctcttcaatgctatcactggcttaaatggtagtgggaaatccaacatattggactccatctgctttttgctgggcatctccaacctgtctcaggttcgggcttctaatttacaagatttagtttacaaaaatgggcaggctggtattaccaaagcctctgtgtcaatcacttttgataattctgacgaaaagcaaagtcctttaggatttgaggttcatgatgaaatcacagtaacaaggcaggtggttattggtggtagaaataaatatttaatcaatggagtcaatgccaacaacaccagagtacaggatctcttctgttctgttggccttaatgttaacaaccctcactttctcatcatgcagggccgaattacaaaagtattgaatatgaaacctccagagattttatccatgatagaagaagcagctggaaccaggatgtatgaatacaaaaaaatagctgcacagaaaactatagaaaaaaaggaggctaagctgaaagaaattaagacgatacttgaagaagagattactccaaccattcaaaaattaaaagaggaaagatcgtcctacttggagtaccaaaaagtaatgagagaaatagaacatttgagtcgtttatatattgcttatcagtttttgctggctgaagataccaaagtacgctcagctgaggaattaaaagaaatgcaagataaagttataaagcttcaggaagaattgtctgagaatgataaaaaaataaaagcacttaatcatgaaaaaaaaaaaaaaaaaaaaaaaaaaaaa

SEQ ID NO: 26218 - DNA, 1381 bp, Homo Sapiens
gcacaagccggccttgaaatcagagcctttccagcaactccgagagcgtgtgctcggcgaccgcgggcttggccagcggcgcgcgctcggcgccccggcgcccccagccccacgcgcgccgggcgggcgccatggaggagggctccagctcgcccgtgtcccccgtggacagcctgggcaccagcgaggaggagctcgagaggcagcccaagcgcttcggccggaagcggcgctacagcaagaagtcgagcgaagatggcagcccgaccccgggcaagcgcggcaagaagggcagccccagcgcgcagtccttcgaggagctgcagagccagcgcatcctggccaacgtgcgcgagcgccagcgcacccagtcgctcaacgaggccttcgcggcgctgcgcaagatcatccccacgctgccctctgacaagctgagcaagatccagacgctcaagctggccgccaggtacatagacttcctctaccaggtcctgcagagcgacgagatggacaataagatgaccagctgcagctacgtggcccacgagcgcctcagctacgccttctccgtgtggcgcatggagggcgcgtggtccatgtccgcctcccactagcgccgcgccacccacctccggaccggcgcgccagggctgtccgtcgcgtcggcggcgcaagtggaattgggatgcattcgagtctgtaacttctgaaacctgaacaacctcaggaggcccccacctctgccctccaccagcgtcgagagaagggacagcagtgacatcggacagaagacccgggctcccgtcctcccccaggacggtccccacataggaagggcactcccagccctcttgctggtgacattgtcatggtcatcttgtttctgtttggatttttcttctgggtcttatgtttggggggaggtttattctttctgaaaatgtctagattcaggaacacatttatgaggatttggattttgaatttgtatttccctctaagtgccttttttaatgtctatttttttaataaaacagaaatgcattcttgtacaattctgttgaaactggaccaaggctctcagaagaggacccccgagttccttcccctcccccgagcctctgcatgattgtttcaagtcagcctggaattcttactttcacgccgctattcttttcctttctccgtgattgcttggctagccattttaaaaaaaatattctctgttcagtgtatatgttgcttgtttgttttatttattgagatatttttacaagctaagtgactgcagtgtggctgtgtatcctgctccccacccaggaaaaataaagacgtccgcgcagccatggacaaaaaaaaaaaaaaaaaaaaaaaaaaaaaa

SEQ ID NO: 26219 - DNA, 1556 bp, Homo Sapiens
gactcactgtcaacaacatcccatcctgaagacttgcttaccacaactgagagtggggagtcagtttgaggcctagcatcacttaaacttcctccaaaggcacaaaagccagaagagaaaaatgaagacgggacattttgaaatagtcaccatgctgctggcaaccatgattctagtggacattttccaggtgaaggctgaagtgttagacatggcagataatgcatttgatgatgaatacctgaaatgtacggacaggatggaaattaaatacgttccccaactgctaaaggaggaaaaagcaagccaccagcaattagatactgtgtgggaaaatgcaaaagccaaatgggcagcccgaaagactcaaatctttctccctatgaattttaaggataaccatggaatagccctgatggcatatatttccgaagctcaagagcaaactcccttttaccatctgttcagtgaagctgtgaagatggctggccaatctcgagaagattatatctatggcttccagttcaaagctttccacttttacctcacaagagccctgcagttgctgagaaaaccttgtgaggccagttccaaaactgtggtatatagaacaagccagggcacttcatttacatttggagggctaaaccaagccaggtttggccattttaccttggcatattcagccaaacctcaggctgctaatgaccagctcactgtgttatccatctacacatgccttggagttgacattgaaaattttcttgataaagaaagtgaaagaattactttaatacctctgaatgaggtttttcaagtgtcacaggagggggctggcaataaccttatccttcaaagcataaacaagacctgcagccattatgagtgtgcatttctaggtggactaaaaaccgaaaactgtattgagaacctagaatattttcaacccatctatgtctacaaccctggtgagaaaaaccagaagcttgaagaccatagtgagaaaaactggaagcttgaagaccatggtgagaaaaaccagaagcttgaagaccatggtgtgaaaatccttgaacccacccaaatacctgaagataaaagtcaaggaaatatcaacaatcctactccaggtccagttcctgttccaggtcccaaaagccatccttctgcatcctcgggcaaactgctgcttccacagtttgggatggtcatcattttaatcagtgtttctgctataaatctctttgttgctctgtagtttgatgcattgtttatctttcttattctttacttgaaataactatagggatccacaggagatcaaaaggaatgatgtattttttacgtgttggccaaagtcactggataaaatgagaattgtatatttgttattcattttgcaaattcagaaagttggtccagatatatgtcacagaacttttcacttgtatactactcttacaatggaaaaaaatcccgaaaactgtatacttctgattaaattcaataaaagattttgattaggtaaaaaaaaaaaaaaaaaaaaaaaaaaaaaa

SEQ ID NO: 26220 - DNA, 1214 bp, Homo Sapiens
ataaaaatggcgctggccgctcgtttgctaccccagttcctgcactctcggtcgctgccctgcggggccgtccgactccggactcctgctgtggccgaggtgaggctgccgtcggccacactttgctacttctgccgctgtcgcctcggcttgggagcggcgttatttccacgaagcgctagggccttggcagcctcggcgctacctgcccagggctcccggtggccagtgctcagcagcccgggactccccgcagccttcgcttctttccctgcctgccctcagcgcagctacagcacggaggagaagccccagcagcaccagaaaaccaagatgatcgtcctgggattctccaaccccatcaactgggttaggactcgaattaaggccttccttatctgggcctatttcgacaaagagttcagcatcacagagttctccgagggagcgaagcaggcttttgctcatgtatccaagttgctgtcacagtgtaaatttgatctgttggaagaacttgtggccaaagaggtgctacatgcattgaaagaaaaggttacttcactacctgacaaccataaaaatgcccttgctgctaacatagatgaaattgtatttacatcaacaggagacatctccatttactatgatgagaaaggaaggaagtttgttaacatcctgatgtgcttttggtatctaaccagtgccaacatccccagtgaaactttaagaggagccagtgtattccaggttaagttggggaatcagaatgtggaaactaaacaacttcttagtgcaagctatgagtttcagagggagttcacacaaggagtaaagcctgactggaccattgcacggattgaacactcaaaattattagaataattttcttggaaaaatcagcttatggactttagcagttgctgtgaaaaactaaggaagaaaaattttggggtcatttgatcttcacttaatctaagtctgtgaattacttttatattattttgaaatactccttgcagtatattggcatgatacagtaaaagcattttccacagattgttatcaccttctttaaaagaagtcaaaatttaaaaaatacaatagcacgttgttggtgtcatattcaataacatttccaatgctacatataattttatagacataataaagaaggtattgaaaaaacctaaaaaaaaaaaaaaaaaaaaaaaaaa

SEQ ID NO: 26221 - DNA, 946 bp, Homo Sapiens
tcagtcttagacgactgcgtcgtgctatgaccggactttttcttgaaaggggatgacagcatgggaggcaatggctccacatgtaaacccgacactgaaagacaaggcactctctccacagcagccccaacaactagccctgcaccctgtctctctaaccaccacaacaaaaaacatttaatccttgccttttgtgctggggttctactgacactgctgctgatagcctttatcttcctcatcataaagagctacagaaaatatcgaagggagaggcttcccatttccccaggcccattgctgagatgggtccctcttctttctggcaccatggcagatcactccaagccccaggccccagatcctcactcagatcctccagccaagctttcatccatcccaggggaatcacttacctatgccagcacaactttcaaactctcagaagaaaagagcaatcacttggctgagaaccattctgcagactttgaccccattgtctatgctcaaattaaagtaacaaactaactcagcttttccaatgaggcttgaatccatttcctctcatctcagccctatcttcacacatcactttcacttttttacaaattttggaccaccacctgtgtgaaactgcagtcggagttgtttagatgtgatctggcaatgctatccagcatctttggagaccaatggtcagtcttttcctggccagaggaaagattgatggccctcccacttgaactgacagcctgtgagccccttgggggcatagactgccttccttggacccttccaaagtgtgtggtacggggctcagtgcacagagtattcacccagcatcatgaatcaacttgggaggagtcaaccaaatgaacaatctaccaaaaatttcaaataaagtcaaaccccccacaaaaaaaaaaaaaaaaaaaaaaaaaaaaaa

SEQ ID NO: 26222 - DNA, 1434 bp, Homo Sapiens
ttgctgggtgtcccagggcctgaggcaggacggtactccgctgacaccttccctttcggccttgaggttcccagcctggtggccccaggacgttccggtcgcatggcagagtgctacggacgacgcctatgaagcccttagtccttctagttgcgcttttgctatggccttcgtctgtgccggcttatccgagcataactgtgacacctgatgaagagcaaaacttgaatcattatatacaagttttagagaacctagtacgaagtgttccctctggggagccaggtcgtgagaaaaaatctaactctccaaaacatgtttattctatagcatcaaagggatcaaaatttaaggagctagttacacatggagacgcttcaactgagaatgatgttttaaccaatcctatcagtgaagaaactacaactttccctacaggaggcttcacaccggaaataggaaagaaaaaacacacggaaagtaccccattctggtcgatcaaaccaaacaatgtttccattgttttgcatgcagaggaaccttatattgaaaatgaagagccagagccagagccggagccagctgcaaaacaaactgaggcaccaagaatgttgccagttgttactgaatcatctacaagtccatatgttacctcatacaagtcacctgtcaccactttagataagagcactggcattgggatctctacagaatcagaagatgttcctcagctctcaggtgaaactgcgatagaaaaacccgaagagtttggaaagcacccagagagttggaataatgatgacattttgaaaaaaattttagatattaattcacaagtgcaacaggcacttcttagtgacaccagcaacccagcatatagagaagatattgaagcctctaaagatcacctaaaacgaagccttgctctagcagcagcagcagaacataaattaaaaacaatgtataagtcccagttattgccagtaggacgaacaagtaataaaattgatgacatcgaaactgttattaacatgctgtgtaattctagatctaaactctatgaatatttagatattaaatgtgttccaccagagatgagagaaaaagctgctacagtattcaatacattaaaaaatatgtgtagatcaaggagagtcacagccttattaaaagtttattaaacaataatataaaaattttaaacctacttgatattccataacaaagctgatttaagcaaactgcattttttcacaggagaaataatcatattcgtaatttcaaaagttgtataaaaatattttctattgtagttcaaatgtgccaacatctttatgtgtcatgtgttatgaacaattttcatatgcactaaaaacctaatttaaaataaaattttggttcagtaaaaaaaaaaaaaaaaaaaaaaaaaaaaaa

SEQ ID NO: 26223 - DNA, 1165 bp, Homo Sapiens
gaattgttggcaaccaacctaaggtggcctcaggatgcttggatattaattcatctgtgaaaggggctcgttttgtcagattctgtgatgcattcaatattccactcatcacttttgttgatgtccctggctttctacctggcacagcacaggaatacgggggcatcatccggcatggtgccaagcttctctacgcatttgctgaggcaactgtacccaaagtcacagtcatcaccaggaaggcctatggaggtgcctatgatgtcatgagctctaagcacctttgtggtgataccaactatgcctggcccaccgcagagattgcagtcatgggagcaaagggcgctgtggagatcatcttcaaagggcatgagaatgtggaagctgctcaggcagagtacatcgagaagtttgccaaccctttccctgcagcagtgcgagggtttgtggatgacatcatccaaccttcttccacacgtgcccgaatctgctgtgacctggatgtcttggccagcaagaaggtacaacgtccttggagaaaacatgcaaatattccattgtaaacaaatcaaaggaaaagaaaccaagaactgaattactgtctgcccattcacatcccattcctgccttttgcaatcatgaaacctgggaatccaaatagttggataacttagaataactaagtttattaaattctagaaagatctcttttgtgccttactgtaaaattatttacttttttaaacattttaagttgtattttttgagcataaattcgatttttttaggtggaaatctgaaaaatcaatacaactagaaagaaaaatagtacacagtgttatcatctagagctgatttttatttcacacctctgggtattgttctttttcctctcgagttagtttttttatccataggtgagatatatagtaagtttttaaggcaaagtatttcttaggcttaagtttccttattttaaaaatagggtaatatgccctatctatctcctaattcctccatgaattgaggattaaatgtgatgtttgcaattgtggtatatgtgtttagcagtacagatgctcaataaggcatagcaccctatgttgactcaggttatttccagaaatgtgttcttaaaaaaaaaaaaaaaaaaaaaaaaaaaaaa

SEQ ID NO: 26224 - DNA, 1657 bp, Homo Sapiens
aggttctagctctcagtctgcgcgagggtgtaggaaggaaagcccaggacctccggagcagagcacagcagctgcagaggcaaggccagcatgtcgcccaacttcaaacttcagtgtcacttcattctcatcttcctgacggctctaagaggggaaagccggtacctagagctgagggaagcggcggactacgatcctttcctgctcttcagcgccaacctgaagcgggagctggctggggagcagccgtaccgccgcgctctgcggtgcctggacatgctgagcctccagggccagttcaccttcaccgccgaccggccgcagctgcactgcgcagccttcttcatcagcgagcccgaggagttcattaccatccactacgaccaggtctccatcgactgtcagggcggcgacttcctgaaggtatttgatggttggattctcaagggggagaagttccccagttcccaggatcatcctctcccctcagctgagcggtacatagatttctgtgagagtggtcttagcaggaggagcatcagatcttcccagaatgtggccatgatcttcttccgagtccatgaaccaggaaatggattcacattaaccataaagacagaccccaacctctttccttgcaatgtcatttctcagactccaaatggaaagtttaccctggtagttccacaccagcatcgaaactgcagcttctccataatttatcctgtggtgatcaaaatatctgatcttaccctgggacacgtaaatggtcttcagttaaagaaatcctcagcaggttgcgagggaataggagactttgtggagctgctgggaggaactggattggacccttccaagatgacgcctttagctgatctctgctacccctttcatggcccggcccagatgaaagttggctgtgacaacactgtggtgcgcatggtctccagtggaaaacacgtaaatcgtgtgacttttgagtatcgtcagctggagccgtacgagctggaaaacccaaatggaaacagtatcggggaattctgtttgtctggtctttgaataaccaacccagtgatttacatgctgatagctaagtgagtttttaatggccattgtgtatgattttgatgcacaactagttaaaagcctttcataccagtcagtattcccagccttgagcgcacgcgcgcacacacacacacacatacacacacgcattaatttttgtactttgcttcttttatgtttgtaatctgtaaatgaacacatggcagaaaataacccctgattggtaggatcatagttctaaatggaaatgtttgtaattcttcgatgtgctacaaacctgaaactggtaagacaagcacaaagcaacgtgcaataaaaaaatcgtatctcaagggaaaatactcaaagaaagaaaagtggcagcacttatattagttttataacaggataaagtcttgtgtatagcaaagtagttgcatctgtttattttctatttattattgttacaataggtaatagttatagcaattatttattgatttgtaacaacttgtttttaaccaaactttgtagcatggaaaaaattttccatccacaaatacaaacatgaataaatacattcagaatgttggcaaaaaaaaaaaaaaaa

SEQ ID NO: 26225 - DNA, 1287 bp, Homo Sapiens
atgaagggcacagccgagggtacgtggatcgcggtgcggagactgaggttagaaggcacaggtggcgagatgagccgggtaccagcgttcctgagcgcggccgaggtggaggaacacctccgcagctccagcctcctcatcccgcctctagagacggccctggccaacttctccagcggtcccgaaggaggggtcatgcagcccgtgcgcaccgtggtgccggtgaccaagcacaggggctacctgggggtcatgcccgcctacagtgctgcagaggatgcactgaccaccaagttggtcaccttctacgaggaccgcggcatcacctcggtcgtcccttcccaccaggctactgtgctactctttgagcccagcaatggcaccctgctggcggtcatggatggaaatgtcataactgcaaagagaacagctgcagtttctgccattgccaccaagtttctgaaacctcccagcagtgaagtgctgtgcatccttggggctggggtccaggcctacagccattatgagatcttcacagagcagttctcctttaaggaggtgaggatatggaaccgcaccaaagaaaatgcagagaagtttgcagacacagtgcaaggagaggtacgggtctgttcttcggtccaggaggctgtggcaggtgcagatgtgatcatcacagtcaccctggcaacagagcccattttgtttggtgaatgggtgaagccaggggctcacatcaatgctgttggagccagcagacctgactggagagaactggatgatgagctcatgaaagaagctgtgctgtacgtggattcccaggaggctgccctgaaggagtctggagatgtcctgctgtcaggggccgagatctttgctgagctgggagaagtgattaagggagtgaaaccagcccactgtgagaagaccacggtgttcaagtctttgggaatggcagtggaagacacagttgcagccaaactcatctatgattcctggtcatctggtaaataaaacaaaggaacttgatgttgagatggatgcttgaggaatattgctgctggttctcataatttctagagtaaatgagggagtccagtccccagtgaactctccttttgtgcttatcatgttttaccttaaatgctgagatcctcatttatgtttgtagttggaaagcaaagctaggtagccatttcttctgttctaccaagttataatagcattcatttccctttatatttccctgaaataaagcacattccaattggaaaaaaaaaaaaaaaa

SEQ ID NO: 26226 - DNA, 1597 bp, Homo Sapiens
ggggaggtgggcaagatggcgcttgccgagtgattctcctcgaatacctcctgccggcgcggagacaccggggcgggggtcctgccgcaactacctcccttcctcctctcccccgcccccggagccttcatccttcccttccccccccacctcgaggggcgggcctggttcccgggacaccatgtcggactctgaggaggagagccaggaccggcaactgaaaatcgtcgtgctgggggacggcgcctccgggaagacctccttaactacgtgttttgctcaagaaacttttgggaaacagtacaaacaaactataggactggatttctttttgagaaggataacattgccaggaaacttgaatgttacccttcaaatttgggatataggagggcagacaataggaggcaaaatgttggataaatatatctatggagcacagttgatttggagcatatgcgaacaataaaacctgaaaaacacttacggttttgccaggaaaatggttttagtagccactttgtctcagccaagacaggagactctgtcttcctgtgctttcagaaagttgctgctgaaatccttgggatcaaattaaacaaagcagaaatagaacagtcacagagggtggtgaaggcagatattgtaaactacaaccaggaacctatgtcaaggactgttaaccctcctagaagctctatgtgtgcagttcagtgagcgcatttttcttttgtgttgatagttctggctgcccttcacctctgggtgggcccgaggacttctaggaacttgttttatcagtgaccatctctgtagttcagttaacactttactcccaacttgcttcatcattgctattgcctcacagtggcaggcagctccttggatttgaaagaattcaactttgggaccacacactttgaattcaaaatggaaaacccattccctggaattagactgcttcattgcaaaagaatgatgttgtttctttgtatgtccttgcttcttttttcattgatgtaaatttttttaacttaatatgaaaactctccaagtcttgatcatcatccaggattttgccacagcaatttcattctcttatcggaacttgtatgtgtcaaagtatacttcagagtgcaaacattaagcaagtaatatattttacctacagatacttatgaagacattctttcgctatcgtgagtaaaagtatataaagctgtttctaactgaaaatgcttgaaataagcctgtaatagaaatattttttcattttttaaaaaagggcctaaattgtttatattgtagtttgtaactcacaaagtaatatttgatattgtatttttattactgtatcgttgtcgttatgtattgtgtaatactcaggtttgaaggctttctgaattctgataaatgttcagctgatgctccacgtggaatttctcttgcaaactgcataagagtactcccgagaatgagttatgacattgtggatcagactgtacctgatgttcagatgtttttctttcacaaataaacttatttaaattaaaaaaaaaaaaaaaaaaaaaaaaaaaaaagaaaaaaaaaaaaaaaa

SEQ ID NO: 26227 - DNA, 1469 bp, Homo Sapiens
attgggacgctgcggcctggccttcaggccactggctaccgaaccccggggctcttcaccagtccagctcgtttccagcaccatgtcggtgcggacgctaccgctgctcttcttgaacttgggcggggagatgctttacatcctcgaccaacggctgcgggcccagaacatccggggagacaaggcccgcaaagttctgaatgacatcatctccaccatgttcaatagaaagtttatggaggaattattcaagcctcaagagctctactccaagaaggccctgaggactgtctatgagcgcctggctcatgcctccattatgaaacttaaccaggccagcatggataagctctatgacctgatgaccatggctttcaaatatcaagtattgctgtgtccccgacccaaggatgtgctgctggtcactttcaatcacttggataccatcaagggattcatccgagactccccaaccatcctgcagcaagtggacgagactttgcggcagctgacagaaatatatggtggtctctctgcaggggagttccagctgatccggcagacactcctcatcttcttccaagacctgcacatccgagtatccatgtttctaaaggacaaagttcagaataataacggtcgctttgtgttgccggtgtccgggcctgttccttggggaactgaagttccaggactcatcagaatgttcaacaacaaaggtgaagaagtgaagaggatagaattcaagcatggtggaaactatgtccctgcacccaaagaaggttcttttgaactttatggagaccgagtcctgaaactgggaactaacatgtacagcgtgaatcagcctgtggaaactcatgtgtctggatcatcaaagaacttagcctcatggacccaggaaagcattgctccaaaccctcttgctaaagaagagctgaatttcttggccaggctgatgggagggatggagattaagaaacccagtggccctgagcccggattccggttgaatctctttaccaccgatgaagaagaggaacaagcagcgctaaccaggccagaagagttatcctatgaagttatcaacatacaagccacccaggaccagcaacggagcgaggagctggctcgaatcatgggggagtttgagatcacggagcagccaaggctgagcaccggcaaaggggacgatttgctcgccatgatggatgagttatagctgttctgaccaggcgtcctctgcccccagggagaggctgctggatggtgacccctggggaatgccccatggcccagaatgatgctgctagttttctactgagtgaagccattacgtctatttcttatttatgttgtaaggaactgtgtgagtctcccttgaggagcactcactcttgaaggcacacacatacacatattttcagtgaaatatattctgacttttaaacttgaaaaaaaaaaaaaaa

SEQ ID NO: 26228 - DNA, 890 bp, Homo Sapiens
gagtggcgggttcgggcgcagctgtagggttggctgcgcgccgccgaggcgttttggactgggttataaacaacttgtgaaatgagtgatttggaagatgatgagacaccccagctttctgcccatgccttagcagctctccaggaattttatgctgagcaaaagcaacaaattgagccaggcgaggatgataaatataacattggaataatagaagagaattggcaactgagccagttttggtatagtcaggaaactgctctgcagctggcacaggaggcaattgcagctgtaggagaaggtggcagaatcgcatgtgtgagtgcccctagtgtttaccagaaactcagagagctgtgcagagaaaacttttcgatatacatctttgaatatgacaaaagatttgccatgtatggagaggagtttattttctatgattacaataatccattggacttacccgaaagaattgctgcacatagttttgacatcgtaatagcagatcctccctatctttcggaggaatgtctcagaaaaacatcggaaaccgtcaagtacctgacgcggggcaagattctgctgtgcacaggtgccatcatggaagaacaggcagcagaactccttggagtgaagatgtgcacgtttgttccaagacacacccggaacttggcaaatgagtttcgctgttatgtgaattatgattctgggctggactgtgggatctgattacagacggtgacataacacaggaaggaaccctgtcacattcctctttttgtattttcgtagtagatttaaaagttataatctcttcccctccccccaaactggagctgtccctggcctggttttcaaaataaagtgtgcgatctccaaaaaaaaaaaaaaaa

SEQ ID NO: 26229 - DNA, 1112 bp, Homo Sapiens
gcgcggggacgggcgcggtcagtgcctgagatccctgcgatcgctgggagatgacggtgaagacctgagatttaggcctgcgcggcgggtgacgacgccggtccgggtcttcactggaggacgctggccggggccttcaggtgttctcgtggcctgaggacgcgcgtccctgagaatgtgcgtgcccgcgccgcgcgggtcccacaggagcctgggcagccccgccgccgtatttccaccctgcggccgtatttccacccgctgggcgccaagcccgggatgactgcactctagggcgcgcgctcacactcagcattcaggcacaagcacgttctctttataaacagtttcgaatcttgtcgagtctttctagaaggttgaaatgccctggaggagcagcgtgaatagttttttccaattaggaaaaaagaatgtggggcggctggagggagagaggcaggccgagaaggccaggtgcgtccaggagccgcagccgccgtgcctcagtttcctcctagaaacatggaggtggcggtgcacgctacaggatttctgtaagaacaaatgagttaacgtgtgcaaaacatttaaaacagtgtctggtgtgtagcaagcaaatatgagtattagtcttttccttgttaaaatgtgtgcatctacatttggtgcacattacaggaagtgtatagtatggattcatattttggaaaagtaattttagaagttatttctgatgtgcttattgtaatagtgtttcttgaccacatgcttttagataatgtgaaggcaatgaagcaggcaatattgcttgcacatccccaatttaaacacctgtctgtccctccttccctctctcctttcttttcttccttaccctctctctttattccttccttcattcccttcaaggttgcggattattccattatataaatgtatcaatttattagaatagtttctatgatgtctatgatgggctttagattgtttgcaatagtttgccattataaataatgcccagtagtgctgtggtttgatttaacttgtgaaggtatatttccaaataaatcgctatgattggattgttgtgtaaaccaaaaaaaaaaaaaaaa

SEQ ID NO: 26230 - DNA, 3226 bp, Homo Sapiens
aacgccgcttcggggctcctagggagtcgggccccgggccgccaccgtcacctcggccgctgccgctgtcgccatcgccttgtttccccatcccccgccatggccgaggacctctctgcggccacgtcctacaccgaagatgatttctactgccccgtctgtcaggaggtgctcaaaacgcccgtgcggaccacggcctgtcagcacgttttctgtagaaaatgtttcctgactgcaatgagggaaagcggagcacattgtcccctatgtcgtggaaatgtgactagaagagagagagcatgtcctgaacgggccttagaccttgaaaatataatgaggaagttttctggtagctgcagatgctgtgcaaaacagattaaattctatcgcatgagacatcattacaaatcttgtaagaagtatcaggatgaatatggtgtttcttctatcattccaaactttcagatctctcaagattcagtagggaacagcaataggagtgaaacatccacatctgataacacagaaacttaccaagagaatacaagttcttctggtcatcctacttttaagtgtcccctgtgtcaagaatcaaattttaccagacagcgtttactggatcactgtaacagtaatcacctatttcagatagttcctgtgacatgtcctatttgtgtgtctcttccttggggagatcctagccagattaccagaaatttcgttagtcatctaaatcagagacatcaatttgattatggagaatttgtgaatcttcagctagatgaagaaacccaataccaaactgctgttgaagaatcttttcaagtaaacatctgaaggctgtagacatctctgcatctttgtacctgcaagtgccatctttaagggggaaactacatgaagtcaccgttacagtaacttgatgtgtatattaataaaagtaattcagtcattttagtttttgattgaaaataaaggtagggcttctaaaaacttcatcatcttgataagttaaaaaatgaaagttatgacattagctttaaaggtgtaaaaaagatgtttcactaatgtaacggtgaaagagaatccctgttgtactttatctttttgtaatattatttttgaatttttcattattatgttgcttttgaaatttgatgcattcctcccatttactttattattgtacacatttaacacacagtagcaaattttgaacgatgtgattgatataacctaacaaatctgagccagttattattagagttgcagaatagaaacttgaagtgctaaatggaataatccaaaggaaattttttaaatgcaggttctagctgaaaaattcaactataagaaaattgtatttatataacatttactatttttgaagactagtgagatttctgtaataattttaattctttaaaaagtgaaagcttgttgtaaagatattttctttttgttattagaaggaaatacaaagagaaaaatttctttctttcatgggcatttgataatttcagtctttgactgatttgtaagcctagaatatactaagctgaataacagctctttggcctcagaattttcagtagccagtatttctgattaactaagttgaaactcttattagaaactttcagttggtgatattgtattctagaagatataaatgagaggtttggcttcatctcagtttagaaatttattcaaagctaaagatgtatatatacatatacttttttgtgtatatatacacatatgtgtgtatgcagtttgtcaggttatatatagaatttctattaaggattttttaaatggacaagcaatagggggttgaagtgtttatctgatttgtttaaaattttgtatatcaccaaatttttaaaaagtgatagtcacagtgctaagttatctagttggctactattacaccttaaaaattgagtttacacacacacaattacctgtttatatggtgctcatttgttattctcaaatataatgtgtgaccgtgatatagtgagaaagattctaccaaccactgtttcactactttttagttaaaattgggtatgttcttaatattcattagtgagaatcacaaagtattttgtagaaggcccaaatcacagaataaaggactaagagtggatttgctgacattccatactaatatacattgtttatgctttctttaaaataactagaagaacataaaagaaagagaatctcagaagtagtttgctgctaatatatacatatattgtataaaaaggtatattttggttttgttaaaacccttgttgacttttctacactgaacattttttttaacttgatttaataaaaatgttaattttggaagtgcagttttgtaaaaacctttttcagtcaaacagtaaagactttatttatggattgtaataacaaccacaagaaaagccatacatcttaatgaacatacgcctttgttctgtcattttaaagagtggtgtttactatgtgtgtgcttgagcattttctttcagttacatgggtgtaatttaaaaaacagctcctttttaagacttttgaccatagtgttttccagtttaaagcaataactttcatagtttctttcaaagtttaatacatccaatatgtcaagttaaaccattctgggatttgcaaagtttaatacatccaatatgtcaagttaaaccattctgggatttgcaaagtttaatacatccaatatgtcaagttaaaccattctgggatttgggaacttctttaaaggaaaattgtagtagaggtcatcttgatggaattgtgttttaaagttttgtgaatgagttaaatatcattgatagtcttgtgtgtctcacatatcagctttttcataaggaaaatactttatttgcttttatctgagaatttctcagtatgaaaatgattgtttaaaatttcccctctttttgtcagtgcattgggaatagggatagactttacagatttatggaaattaaatttatggggaaaagtttatttttaatattacttatagctgagtcagaattaaaggagggaattgtattgatactccaatacctaaatttcacaataccacttaggaaagctatttcaacaaattacagttttattgttaaaacagagtcttatttgagatgtattgctttatttttcaattaaaagtggttttctcctaaaaaaaaaaaaaaaa

SEQ ID NO: 26231 - DNA, 2522 bp, Homo Sapiens
tggacaaggccctgctctgcagcgtgtgcaagatgacctgccacaagaagtgcgtgcacaagattcagagccactgctcctacacctacgggaggaagggcgagccaggcgttgagcctggccacttcggcgtgtgcgtagacagcctgaccagcgacaaggcctcggtgcccatcgtgctggagaagctcctggaacacgtggagatgcacggcctgtacaccgagggcctctaccgcaagtcgggtgctgccaaccgcactcgggagctccggcaggcgctgcagacagaccccgcagcagtcaagctggagaacttccccatccacgccatcacaggggtgctgaagcagtggctgcgggagctgcccgagcccctcatgaccttcgcacagtacggcgacttcctccgagccgtcgagctgccggagaagcaggagcagctggctgccatctatgccgtcctggagcaccttccagaagccaaccacaactccctggagagactcatcttccaccttgtcaaggtggccctgctcgaggatgtcaaccgcatgtcacctggggcgctggccattatcttcgcaccctgcctcctgcgctgccctgacaactcggacccgctgaccagcatgaaggacgtcctcaagatcaccacgtgcgtggagatgctgatcaaggagcagatgaggaaatacaaagtgaagatggaggagatcagccaactggaggctgcagagagtatcgccttccgcaggctttcgctcctgcgacaaaatgctccatggcctctcaaactggggttttcgtctccctatgagggggtcctgaacaagagccccaagacccgggacatccaggaggaggagctggaggtgctgctggaggaggaggcagccggcggcgatgaggaccgggaaaaggagattctcattgaacggatccagtccatcaaggaggagaaggaggacatcacctaccggctgccggagctggacccaaggggctcggacgaggagaacctggactcggagacgtcggccagcaccgagagcctgctggaggagcgggccgggcggggggcctcggaagggccccctgcgcctgctctcccttgccccggcgcgcccaccccgagccccctccccaccgtggccgcccctccacgacgaaggccgtcgtccttcgtaacggtcagagtgaagaccccccggcggacccccatcatgcccacggccaacatcaagctcccaccaggcctgccctcccacctgcctcgctgggcaccgggtgcccgggaggcggctgccccagtgcggcgccgggagccacctgcccgccgcccggaccagatacattccgtgtacatcacgcccggggcagacctgccagtgcagggcgccctggagcccctagaagaggatggccagccacctggggccaagcggaggtactcggatcccccaacgtactgcctgccccccgcctcgggccagaccaatggctgagagccacagctgacaaagtctgcatgtccgaggacggcccctgcactggagctgggcgccagagctgcagagctagtgttcggccctcagagaaggatccagaatcaaaagctcaagagtgacgtgaggtgggcaccggccccaagtgcagagtcaaggcagggagaggccggctggagccaggccccctcgcacgcagcccccaaatcatggacgcacctgtggggagcaccacatctccacctgcggcctcacatctccccactcccctttttgtacgtttaactgtttctttgtacgtggtttacgtaactttaaactgtaacagccttaatggaagaccaaatggttttttatatgtgtatgtacaaagttttctattaacgctgcccgtctcccttataacctggacgtgagctgtcagagcagaagccactaggccactgcgcgtctgaggctcagaccctgctgtggttggcttggggtggccaatgggctgggaccctccatgagagttttggacacttgggtcacctgacccgtgcctctctgacacatgtctccggggggcagccacctggccaatgtgcatttttgcacatgctggaaccttccatgggggtctgggctattggctggagccaggacatgagtcaggggcaccatggacctcacgtgccagggagacttgaatgtggctgtcactcttccggacgccaagggctgcaggaggctgcttttggcactacccaccccgtgtgacagaataggagccagcgactcaggactgctcacgggtcaggagggcaacgcctgaagtcagacctccctataggtcaacagggacaacctggggatctctggagcagggccctcctctctcaggcttggcccactcccccagacacctggacacgtggccacaaatctgggacaaggggcccccgcacagcatgaaataaaaagtgcctgagaagtgtgtgcaaaaaaaaaaaaaaaaaaaaaaaaaaaaaa

SEQ ID NO: 26232 - DNA, 3372 bp, Homo Sapiens
gggagcagtgcccgagcgcggtttctcttaaggttctgcagggcaaggctgtctgggacaggcttggccatggatccgctctcagagctgcaggatgatctgaccttggatgacaccagcgaggctctgaaccagctgaagctggcctccatcgatgagaagaactggccctcggatgaaatgcctgacttccccaagtcagatgactccaaaagcagctccccggaacttgtcacacacctgaagtgggatgacccatactatgacatcgcccggcaccagatcgtggaggtggcaggagatgacaagtatgggcggaagatcattgtgtttagtgcctgtcgaatgccccccagccaccagctcgaccacagcaagctcctggggtacctgaagcacaccctggaccagtacgtggagagtgactacacacttctgtatctgcaccacggcctgaccagcgacaacaagccctccctcagctggctccgtgatgcctaccgggagtttgaccgcaagtacaagaagaacatcaaggccttgtacatcgtgcatccaaccatgttcatcaaaactctgctcatcctcttcaagcccctcatcagcttcaagttcgggcagaagatcttctatgtgaattacctgagcgagctgagcgagcacgtgaagctggagcagctggggatccctcgccaagtgctcaaatatgacgacttcctgaaatccacacagaagagccccgcgacagcccccaagcccatgcccccacggccccccctgcccaaccagcagtttggagtctcgctgcagcacctccaggagaagaatccagagcaggagcccattcccattgtactcagggagactgttgcctacttacaggcccacgctctcaccaccgagggcatcttccggaggtcggccaacacccaagtggtccgggaagtgcagcagaagtacaacatggggctgcctgtggatttcgaccagtacaatgagctgcacctgccagcagtcatcctcaagaccttcctccgggagcttcctgagcccctgctcacctttgacctctacccccatgtggtgggcttcctcaacattgatgaaagccagagggtgccagcgacactgcaggtcctccagacgctgcccgaggagaactaccaggtgcttcgtttcctgactgctttcctggtgcagatttctgcacacagtgaccagaacaagatgaccaacactaacctggctgttgttttcggccctaacctgctgtgggccaaggatgcggccatcaccctcaaggccattaatcccatcaacaccttcaccaagttccttctggatcaccaaggggagctgttcccaagcccggaccccagcgggctctgaacctggcccctgccccaccagccccttctctggtagcccgggtttggactcttcctcctggcatcaggggccatgaagccccctggagagagatgttggagccacccatcaggcatgctctcccccacctctgtccagcccgcctcacggccctggcggcctcgctgttaccagaagacgtttttctctgccttacacttctcactgcctctctggacaccgggcttttgctgggctctccagagctgggcttggctcttccagctggagaaggactgagccccagtaacccctttcctgctttttcctgcctctgtttccctagcaagtgtggatgaatcaaatgactgccggctgggctggtagcaggggccagtcctcccctcttgattgctgggaatgagcagctgagctctttggtgtggacaccgccccaagctgaggtgcctccctatctggtaggctgccctgctttgcagaagccccactgcatgaaggcctgagtgcaagcacccttgctcctgtactgcccccagcagcgcagtctggggtatttcccctgctgaggagtgacagggctggagactgtgtctgctttctgcctcctcttccacacatcctgggtcagcctttcccaagtgatactgcccctggggtgtcctaaccccttggttgtgcagggactggtagcttggatgacatggctcagagtcccagcatccacttgaaacctccctctccacctccccgcccccgagagctacagcgtgtgatggaatcagtgaccggccaggttagcctctcccctcttggcctcctttcccacacgggcagatcatcagccttcatgttcttgtggacctgtctgttacggagtcacactggcccctgccccagccagaggtgactcagtgcctcaggatcttatggctccttcctccagctgggggactcttaaaggggctggggtagagactaagagtgcccgtaggaggggcagagattgtgctgataggtcagtccagataggtgggttctagcaatttccccaggggattaaggggctctagggccacctttttttttttttttctgagatggagtctcgctctgtcaccaggctggagtgcagtggcgcgatctcggcacacctccgccttctgggttcaagcaattctcctgcctcagcctcctgagtagctgggactataggtgcatgccaccatgcccagctaatttttgtatttttagtagagacggggtttcaccatgttggccaggatggtctcgatctcctgacctcatgatccacccacctcggcctcccaaagtgctgggattccaggcgtgagccactgcgcccggccagccctgttgtctttcaaagaacctcggccccagtgatggctgatctcactcccactgtctcgtagaattacactccttcctggggatccctcttcctgcagccttgtccttggggagtacagggaagtacctgcagtgaccctgcccccatgaccttggccaggcaggatgattccagagcccgtactgtggggatcctcactgaccagcccagccccatccgcaagccaggctgggcctgggcataacttcgctgggctctcccaagaccatcagcagtgcatccagccccctggggcctgggctgctgctggttcttcatcagtcccttggtctctagcctcggccagggctgctctgctctccgccctcctttgtgtatcaagtgtcgctcacagccccattcactggggagcctttcggatctatttggtctttctcatgtcccccactggtctgtaccccagggagcgggtgcttgtactgtgtgaatccagtgttcacattcacacttaatgacttccttggcaccaatcatgtatttcaccgtttgcactttttgtatttcaataaaaatgttgatgcaaaaaaaaaaaaaaaaaaaaaaaaaaaaaa

SEQ ID NO: 26233 - DNA, 3216 bp, Homo Sapiens
tcgcgggcgcttgggccgccatcttagatggcgggagtaagaggaaaacgattgtgaggcgggaacggctttctgctgccttttttgggccccgaaaagggtcagctggccgggctttggggcgcgtgccctgaggcgcggagcgcgtttgctacgatgcgggggctgctcggggctccgtcccctgggctggggacgcgccgaatgtgaccgcctcccgctccctcacccgccgcggggaggaggagcgggcgagaagctgccgccgaacgacaggacgttggggcggcctggctccctcaggtttaagaattgtttaagctgcatcaatggagcacatacagggagcttggaagacgatcagcaatggttttggattcaaagatgccgtgtttgatggctccagctgcatctctcctacaatagttcagcagtttggctatcagcgccgggcatcagatgatggcaaactcacagatccttctaagacaagcaacactatccgtgttttcttgccgaacaagcaaagaacagtggtcaatgtgcgaaatggaatgagcttgcatgactgccttatgaaagcactcaaggtgaggggcctgcaaccagagtgctgtgcagtgttcagacttctccacgaacacaaaggtaaaaaagcacgcttagattggaatactgatgctgcgtctttgattggagaagaacttcaagtagatttcctggatcatgttcccctcacaacacacaactttgctcggaagacgttcctgaagcttgccttctgtgacatctgtcagaaattcctgctcaatggatttcgatgtcagacttgtggctacaaatttcatgagcactgtagcaccaaagtacctactatgtgtgtggactggagtaacatcagacaactcttattgtttccaaattccactattggtgatagtggagtcccagcactaccttctttgactatgcgtcgtatgcgagagtctgtttccaggatgcctgttagttctcagcacagatattctacacctcacgccttcacctttaacacctccagtccctcatctgaaggttccctctcccagaggcagaggtcgacatccacacctaatgtccacatggtcagcaccaccctgcctgtggacagcaggatgattgaggatgcaattcgaagtcacagcgaatcagcctcaccttcagccctgtccagtagccccaacaatctgagcccaacaggctggtcacagccgaaaacccccgtgccagcacaaagagagcgggcaccagtatctgggacccaggagaaaaacaaaattaggcctcgtggacagagagattcaagctattattgggaaatagaagccagtgaagtgatgctgtccactcggattgggtcaggctcttttggaactgtttataagggtaaatggcacggagatgttgcagtaaagatcctaaaggttgtcgacccaaccccagagcaattccaggccttcaggaatgaggtggctgttctgcgcaaaacacggcatgtgaacattctgcttttcatggggtacatgacaaaggacaacctggcaattgtgacccagtggtgcgagggcagcagcctctacaaacacctgcatgtccaggagaccaagtttcagatgttccagctaattgacattgcccggcagacggctcagggaatggactatttgcatgcaaagaacatcatccatagagacatgaaatccaacaatatatttctccatgaaggcttaacagtgaaaattggagattttggtttggcaacagtaaagtcacgctggagtggttctcagcaggttgaacaacctactggctctgtcctctggatggccccagaggtgatccgaatgcaggataacaacccattcagtttccagtcggatgtctactcctatggcatcgtattgtatgaactgatgacgggggagcttccttattctcacatcaacaaccgagatcagatcatcttcatggtgggccgaggatatgcctccccagatcttagtaagctatataagaactgccccaaagcaatgaagaggctggtagctgactgtgtgaagaaagtaaaggaagagaggcctctttttccccagatcctgtcttccattgagctgctccaacactctctaccgaagatcaaccggagcgcttccgagccatccttgcatcgggcagcccacactgaggatatcaatgcttgcacgctgaccacgtccccgaggctgcctgtcttctagttgactttgcacctgtcttcaggctgccaggggaggaggagaagccagcaggcaccacttttctgctccctttctccagaggcagaacacatgttttcagagaagctgctgctaaggaccttctagactgctcacagggccttaacttcatgttgccttcttttctatccctttgggccctgggagaaggaagccatttgcagtgctggtgtgtcctgctccctccccacattccccatgctcaaggcccagccttctgtagatgcgcaagtggatgttgatggtagtacaaaaagcaggggcccagccccagctgttggctacatgagtatttagaggaagtaaggtagcaggcagtccagccctgatgtggagacacatgggattttggaaatcagcttctggaggaatgcatgtcacaggcgggactttcttcagagagtggtgcagcgccagacattttgcacataaggcaccaaacagcccaggactgccgagactctggccgcccgaaggagcctgctttggtactatggaacttttcttaggggacacgtcctcctttcacagcttctaaggtgtccagtgcattgggatggttttccaggcaaggcactcggccaatccgcatctcagccctctcagggagcagtcttccatcatgctgaattttgtcttccaggagctgcccctatggggcggggccgcagggccagccttgtttctctaacaaacaaacaaacaaacagccttgtttctctagtcacatcatgtgtatacaaggaagccaggaatacaggttttcttgatgatttgggttttaattttgtttttattgcacctgacaaaatacagttatctgatggtccctcaattatgttattttaataaaataaattaaatttaaaaaaaaaaaaaaaaaaaaaaaaaaaaaaaaaaa

SEQ ID NO: 26234 - DNA, 3574 bp, Homo Sapiens
cctgaaggagggcctgatgtcttcatcattctcaaattcttaggacggtcgggccctggaaggaacgctctcggaattggccgcggaaaccgatctgcccgttgtgtttgtgaaacagagaaagataggcggccatggtccaaccttgaaggcttatcaggagggcagacttcaaaagctactaaaaatgaacggccctgaagatcttcccaagtcctatgactatgaccttatcatcattggaggtggctcaggaggtctggcagctgctaaggaggcagcccaatatggcaagaaggtgatggtcctggactttgtcactcccacccctcttggaactagatggggtcttggaggaacatgtgtgaatgtgggttgcatacctaaaaaactgatgcatcaagcagctttgttaggacaagccctgcaagactctcgaaattatggatggaaagtcgaggagacagttaagcatgattgggacagaatgatagaagctgtacagaatcacattggctctttgaattggggctaccgagtagctctgcgggagaaaaaagtcgtctatgagaatgcttatgggcaatttattggtcctcacaggattaaggcaacaaataataaaggcaaagaaaaaatttattcagcagagagatttctcattgccactggtgaaagaccacgttacttgggcatccctggtgacaaagaatactgcatcagcagtgatgatcttttctccttgccttactgcccgggtaagaccctggttgttggagcatcctatgtcgctttggagtgcgctggatttcttgctggtattggtttagacgtcactgttatggttaggtccattcttcttagaggatttgaccaggacatggccaacaaaattggtgaacacatggaagaacatggcatcaagtttataagacagttcgtaccaattaaagttgaacaaattgaagcagggacaccaggccgactcagagtagtagctcagtccaccaatagtgaggaaatcattgaaggagaatataatacggtgatgctggcaataggaagagatgcttgcacaagaaaaattggcttagaaaccgtaggggtgaagataaatgaaaagactggaaaaatacctgtcacagatgaagaacagaccaatgtgccttacatctatgccattggcgatatattggaggataaggtggagctcaccccagttgcaatccaggcaggaagattgctggctcagaggctctatgcaggttccactgtcaagtgtgactatgaaaatgttccaaccactgtatttactcctttggaatatggtgcttgtggcctttctgaggagaaagctgtggagaagtttggggaagaaaatattgaggtttaccatagttacttttggccattggaatggacgattccgtcaagagataacaacaaatgttatgcaaaaataatctgtaatactaaagacaatgaacgtgttgtgggctttcacgtactgggtccaaatgctggagaagttacacaaggctttgcagctgcgctcaaatgtggactgaccaaaaagcagctggacagcacaattggaatccaccctgtctgtgcagaggtattcacaacattgtctgtgaccaagcgctctggggcaagcatcctccaggctggctgctgaggttaagccccagtgtggatgctgttgccaagactgcaaaccactggctcgtttccgtgcccaaatccaaggcgaagttttctagagggttcttgggctcttggcacctgcgtgtcttgtgcttaccaccgcccaaggcccccttggatctcttggataggagttggtgaatagaaggcaggcagcatcacactggggtcactgacagacttgaagctgacatttggcagggcatcgaagggatgcatccatgaagtcaccagtctcaagcccatgtggtaggcggtgatggaacaactgtcaaatcagttttagcatgacctttccttgtggattttcttattctcgttgtcaagttttctagggttgaatttttttcttttttctccatggtgttaatgatattagagatgaaaaacgttagcagttgatttttgtccaaaagcaagtcatggctagagtatccatgcaaggtgtcttgttgcatggaagggatagtttggctcccttggaggctatgtaggcttgtcccgggaaagagaactgtcctgcagctgaaatggactgttctttactgacctgctcagcagtttcttctctcatatattcccaaaacaagtacatctgcgatcaactctagccaaatttgcccctgtgtgctacatgatggatgattattattttaaggtctgtttaggaagggaaatggctacttggccagccattgcctggcatttggtagtatagtatgattctcaccattatttgtcatggaggcagacatacaccagaaatgggggagaaacagtacatatctttctgtctttagtttattgtgtgctggtctaagcaagctgagatcatttgcaatggaaaacacgtaacttgtttaaaagtttttctggtagctttagctttatgctaaaaaaaataatgacattgggtatctatttctttctaagactacattagtaggaaaataagtcttttcatgcttatgatttagctgttttgtggtaattgctttttaaaggaagttattaatatcataagttattattaatattttgaacacaggtggatgtgaaggattttcatttaaaaaccaagtggttttgactttttctgttgaatgaacaactgtgccttgtggaatttttgcagaagtgtttatgctttgttagcatttcaacttgcattattataaagaggtattaatgcctcagttatgtgtttgtcaatgtactggctgaggattctatctcagctgtcttttctaactgtgtaggttgagttttgaacacgtgcttgtggacatcaggcctcctgccagcagttcttgaagcttctttttcattcctgctactctacctgtatttctcagttgcagcactgagtggtcaaaatacatttctgggccacctcagggaacccatgcatctgcctggcatttaggcagcagagcccctgaccgtcccccacagggctctgcctcacgtcctcatctcatttggctgtgtaaagaaatgggaaaagggaaaaggagagagcaattgaggcagttgaccatattcagttttatttatttatttttaatttgtttttttctccaagtccaccagtctctgaaattagaacagtaggcggtatgagataatcaggcctaatcatgttgtgattctcttttcttagtggagtggaatgttctatccccacaagaaggattatatcttatagacttgtcttgttcagattctgtatttacccattttattgaaacatatactaagttccatgtatttttgttacaaatcttctgaaaaaaaacaaaacaatgtgaaacattaaaattaaaaggcattaataataaaaaaaaaaaaaaaaaaaaaaaaa

SEQ ID NO: 26235 - DNA, 3636 bp, Homo Sapiens
gttctgaatgatgactgacgcgggtttgggtgatacccctcacagcccctgtcattccggagtcataaggcacccgcgcgtctagccccagcgccagggcacgcgagcggcgccgcagggaggaaagcttccgcctgcgggccggacaaaagtcccgcctgcccacggctttttgcccgccgctcgtgaccgagacgcctcgccgcggccagctcgctgctctcgctggcggatggtgtgtggccgccgcaggacgcccgccgtgcccgggccatgaagtagcggctgctggcggcgccgctgcccaaccgccagccccagccccgcgctgcgctgcccggtcctctcccggcggggtcgtatcggcgtggacatggctggccgcgtccctagcctgctagttctccttgtttttccaagcagctgtttggctttccgaagcccactttctgtctttaagaggtttaaagaaactaccagaccattttccaatgaatgtcttggtaccaccagacccgtagttcctattgattcatcagattttgcattggatattcgcatgcctggggttacacctaaacagtccgatacatacttctgcatgtctatgcgaataccagtggatgaggaagccttcgtgattgacttcaagcctcgagccagcatggatactgtccatcacatgttactttttggatgcaatatgccttcatccactggaagttactggttttgtgatgaaggaacctgtacagataaagccaatattctgtatgcctgggcgagaaatgctccccctacccggctccccaaaggtgttggattcagagttggaggagagactggaagtaaatactttgtactacaggtacactatggggatattagtgcttttagagataataacaaggactgttctggtgtgtccttacacctcacacgtctgccacagcctttaattgctggcatgtaccttatgatgtctgttgacactgttatcccagcaggagaaaaagtggtgaattctgacatttcatgccattataaaaattatccaatgcatgtctttgcctatagagttcacactcaccatttaggtaaggtagtaagtggatacagagtaagaaatggacagtggacactgattggacggcagagccctcagctgccacaggctttctaccctgtggggcatccagttgatgtaagttttggtgacctactggctgcaagatgtgtattcactggtgaaggaaggacagaagccacacacattggtggcacgtctagtgatgaaatgtgcaacttatacattatgtattacatggaagccaagcatgcagtttctttcatgacctgtacccagaatgtagctccagatatgttcagaaccataccaccagaggccaacattccaattcccgtgaagtctgatatggttatgatgcatgaacatcataaagaaacagaatataaagataagattcctttactacagcagccaaaacgagaagaagaagaagtgttagaccaggatttccacatggaagaggcactggattggcctggagtatacttgttaccaggccaggtttctggggtggctctagaccctaagaataacctggtgattttccacagaggtgaccatgtctgggatggaaactcgtttgacagcaagtttgtttaccagcaaataggactcggaccaattgaagaagacactattcttgtcatagatccaaataatgctgcagtactccagtccagtggaaaaaatctgttttacttgccacatggcttgagtatagataaagatgggaattattgggtcacagacgtggctctccatcaggtgttcaaactggatccaaacaataaagaaggccctgtattaatcctgggaaggagcatgcaaccaggcagtgaccagaatcacttctgtcaacccactgatgtggctgtggatccaggcactggagccatttatgtatcagatggttactgcaacagcaggattgtgcagttttcaccaagtggaaagttcatcacacagtggggagaagagtcttcagggagcagtcctctgccaggccagttcactgttcctcacagcttggctcttgtgcctcttttgggccaattatgtgtggcagaccgggaaaatggtcggatccagtgttttaaaactgacaccaaagaatttgtgagagagattaagcattcatcatttggaagaaatgtatttgcaatttcatatataccaggcttgctctttgcagtgaatgggaagcctcattttggggaccaagaacctgtacaaggatttgtgatgaacttttccaatggggaaattatcgacatcttcaagccagtgcgcaagcactttgatatgcctcatgatattgttgcatctgaagatgggactgtgtacattggagatgctcataccaacaccgtgtggaagttcaccttgactgagaaattggaacatcgatcagttaaaaaggctggcattgaggtccaggaaatcaaagaagccgaggcagttgttgaaaccaaaatggagaacaaacccacctcctcagaattgcagaagatgcaagagaaacagaaactgatcaaagagccaggctcgggagtgcctgttgttctcattacaacccttctggttattccggtggttgtcctgctggccattgccatatttattcggtggaaaaaatcaagggcctttggagattctgaacacaaactcgagacgagttcaggaagagtactgggaagatttagaggaaagggaagtggaggcttaaaccttggtaatttctttgcaagccgtaagggctacagtcgaaaagggtttgaccggcttagcactgagggcagtgaccaagagaaagaggatgatggaagtgaatcagaagaggagtattcagcacctctgcctgcgctcgcaccttcctcctcctgaaaaccaagctttgatttagattgagtaagatttacccagaatgtcagattcctttccctttagcacgtttaaagttctgtgtatttaattgtaaactgtactagtctgtgtgggactgtacacactttatttacttcgttttggttaagttggcttctgtttctagttgaggagtttcctaaaagttcataacagtgccattgtctttatatgaacatagactagagaaaccgtcctctttttccatcataattctaatctaacaatggaagatttgcccatttacacttttgagactttttggtggatgtaaataaccccattctttgcttgaacacagtattttcccaatagcactttcattgccagtgtctttctttggtgcctttcctgttcagcattcttagcctgtggcagtaaagagaaactttgtgctacatgacgacaaagctgctaaatctcctatttttttaaaatcactaacattatattgcaatgaaggaaataaaaaagtctctatttaaattcttttttaaattttcttcagttggtgtgtttttgggatgtcttatttttagatggttacactgttagaacactattttcagaatctgaatgtaatttgtgtaataaagtgttttcagagcaaaaaaaaaaaaaaa

SEQ ID NO: 26236 - DNA, 3524 bp, Homo Sapiens
gagtcgcgggccttttgagggaggaggcagagcgcgccgggccggtggcatcttccttactttgtccatcctccggactcgcgatcttccttccggagccatgtcagaaggagtggacttgattgatatatatgctgacgaggagttcaaccaggacccagagttcaacaatacagatcagattgacctgtatgatgatgtgctgacagccacctcacagccctcagatgacagaagcagcagcactgaaccacctcctcctgttcgccaggagccatctcccaagcccaacaacaagacccctgcaattctgtatacctacagtggcctgcgtaatagacgagctgccgtttatgtgggcagcttctcctggtggaccacagaccagcagctgatccaggttattcgctctataggagtctatgatgtggtggagttgaaatttgcagagaatcgagcaaatggccagtccaaagggtatgctgaggtggtggtagcctctgaaaactctgtccacaaattgttggaactcctaccagggaaagttcttaatggagaaaaagtggacgtgaggccggccacccggcagaacctgtcacagtttgaggcacaggctcggaaacgtgagtgtgtccgagtcccaagagggggaatacctccacgggcccattcccgagattctagtgattctgctgatggacgggccacaccctctgagaaccttgtaccctcatctgctcgtgtggataagccccccagtgtgctgccctacttcaatcgtcctccttcggcccttcccctgatgggtctgcccccaccaccaattccacccccaccacctctctcctcaagctttggggtccctcctcctcctcctggtatccactaccagcatctcatgcccccacctcctcgattacctcctcatcttgctgtacctccccctggggccatcccacctgcccttcacctcaatccagccttcttccccccaccaaacgctacagtggggcctccaccagatacttacatgaaggcctctgccccctataaccaccatggcagccgagattcgggccctccaccctctacagtgagtgaagccgaatttgaagatatcatgaagcgaaacagagcaatttccagcagtgccatttccaaagcagtatctggagccagtgcaggggattacagtgacgcaattgagacgctgctcacagccattgcggttatcaaacagtcccgggttgccaatgatgagcgttgccgtgtcctcatctcctctcttaaggactgtcttcatggcattgaagccaagtcctacagtgtgggtgccagtgggagctcttccaggaaaagacatcgctcccgggaaaggtcacctagccggtcccgggagagcagcaggaggcaccgggatctgcttcataatgaagatcggcatgatgattatttccaagaaaggaaccgggagcatgagagacaccgggatagagaacgggaccggcaccactgagaaaggagtctggttggaagcaaatgtttttttaatggacttgcatctcctcaccttgatcaggactaaaggacggaggccgccccacccccttccctttcctccaaacccctaactccctccagacacccagggaataccctctgccccacaggattgaagactgcttggcagtcctcccaatcccacacctcctgtttgccaggggaaagaacctaaagacttcgtgtgattgggaggggtggcagacaggaagaaaacatgtccaggcccctggtctccatagagaatggtgctttgtccaagaaaacgtatgagtttctgattctccgggagccgttcaatggtgaggttgatgggaagacttccttcccaaagaaaatagatcctccatgcaggatctaggagagtgactgggtgtgccaaaatatgcccagggtcctgccctcagcactagatttaatggggccaagagggtccaaaccccttgctaacataccacttctttgtttaactcctttacctttccagccctttgaggagggaccatgagaacagaaattaccttatgaaaagctacttctgttcctgctttccctctcacgtattgacggtttatttctttgacctcccagagggctgaactctttcaactctgcgctgcccagccttctcagtggacttgcccctcctaagcagagaaggcctatgaggttgcttgctgctgggaagcctggcagagccaattaccaccctctgctgcttagtgcttgggtacctcttgcaataaccagctcttagttgttccctttccctggggcttttccatttaacacatggagcccttcccccagaaggctactttcttgttttagaggaaggtactgcccattgggagatggggacattgggacctcagcaatgaagaacccttgtgaagtaaccaggaggaatggggaaagaagcaagttgggcaggatatggcctacttccataggcttttcttttttcaggtttgatgtaagcatgggcttacatcccccaggtacatacttttacttattgtgggataacctggcactagtaggcaggtaaagtcacaaatttggtgtcttttcaccttttgactgttgacttaatagctcctctcactctgcctggagatacttcctgcctcagatgaggagccagaagaaacagagcccgacttgaatgaactcagctcagagttctaaggaccagcattctgggggccattttctctacaggcaaatggaattgcttttccataacatccaaattgtaatgtggttgctgctgaaggaggaggcagcagcgaggtcctgcggtacccatggggtgatgctacttctgcatgcatctacagggcatctgacacctaacatgagacgtggcatgtgagatgagacttggcatgtgagacatagggtcactagagacccttctgggtcagaggagagagactgaattggactaaacccgtcctctgttcccagcacgtttctcatatagccctcagtcactgagggagtcccccgcaggattggagaggcacattcccttgggacagaggctacaggttggagctttttttcccctgtcccccaaccccatccccacctccacttcagaacatggcaccccacccaactggccaagtgttaagtgatgtgcttattgagagcaactccgggtgtcttttaaaatgtagagaaaaggtgacagtttaaggaaaaatatatatagaataccagaaatgccgtttacccggagaatttttttctccccatttgttttgtttttactcaatgacaccatttttagttttatttcctgatagcaaaaggaaaaaaaacacccatccctcaaaaaggccaaggtcccgtccccctgttgtcggtgatttgtttgtctttctgataggttgaaaattgtgtaataaacttgatgacgctgtcaaaaaaaaaaaaaaaaaaaaaaaaaaaaa

SEQ ID NO: 26237 - DNA, 3572 bp, Homo Sapiens
ggcagcagaggaaccttttggaggaggaagaggacacagaggccctgtagccaggcaccaagatccctcccaggtggctgggtctgaggggaactccgagcagccctaggtcctcaaagtctggatttgtgtggaaaaggcagctctcacttggccttggcgaggcctcggttggttgataacctgaggaccatggatgctgatgagggtcaagacatgtcccaagtttcagggaaggaaagcccccctgtaagcgatactccagatgagggcgatgagcccatgccgatccccgaggacctctccaccacctcgggaggacagcaaagctccaagagtgacagagtcgtggccagtaatgttaaagtagagactcagagtgatgaagagaatgggcgtgcctgtgaaatgaatggggaagaatgtgcggaggatttacgaatgcttgatgcctcgggagagaaaatgaatggctcccacagggaccaaggcagctcggctttgtcgggagttggaggcattcgacttcctaacggaaaactaaagtgtgatatctgtgggatcatttgcatcgggcccaatgtgctcatggttcacaaaagaagccacactggagaacggcccttccagtgcaatcagtgcggggcctcattcacccagaagggcaacctgctccggcacatcaagctgcattccggggagaagcccttcaaatgccacctctgcaactacgcctgccgccggagggacgccctcactggccacctgaggacgcactccgtcattaaagaagaaactaatcacagtgaaatggcagaagacctgtgcaagataggatcagagagatctctcgtgctggacagactagcaagtaacgtcgccaaacgtaagagctctatgcctcagaaatttcttggggacaagggcctgtccgacacgccctacgacagcagcgccagctacgagaaggagaacgaaatgatgaagtcccacgtgatggaccaagccatcaacaacgccatcaactacctgggggccgagtccctgcgcccgctggtgcagacgcccccgggcggttccgaggtggtcccggtcatcagcccgatgtaccagctgcacaagccgctcgcggagggcaccccgcgctccaaccactcggcccaggacagcgccgtggagaacctgctgctgctctccaaggccaagttggtgccctcggagcgcgaggcgtccccgagcaacagctgccaagactccacggacaccgagagcaacaacgaggagcagcgcagcggtctcatctacctgaccaaccacatcgccccgcacgcgcgcaacgggctgtcgctcaaggaggagcaccgcgcctacgacctgctgcgcgccgcctccgagaactcgcaggacgcgctccgcgtggtcagcaccagcggggagcagatgaaggtgtacaagtgcgaacactgccgggtgctcttcctggatcacgtcatgtacaccatccacatgggctgccacggcttccgtgatccttttgagtgcaacatgtgcggctaccacagccaggaccggtacgagttctcgtcgcacataacgcgaggggagcaccgcttccacatgagctaaagccctcccgcgcccccaccccagaccccgagccaccccaggaaaagcacaaggactgccgccttctcgctcccgccagcagcatagactggactggaccagacaatgttgtgtttggatttgtaactgttttttgttttttgtttgagttggttgattggggtttgatttgcttttgaaaagatttttatttttagaggcagggctgcattgggagcatccagaactgctaccttcctagatgtttccccagaccgctggctgagattccctcacctgtcgcttcctagaatccccttctccaaacgattagtctaaattttcagagagaaatagataaaacacgccacagcctgggaaggagcgtgctctaccctgtgctaagcacggggttcgcgcaccaggtgtctttttccagtccccagaagcagagagcacagcccctgctgtgtgggtctgcaggtgagcagacaggacaggtgtgccgccacccaagtgccaagacacagcagggccaacaacctgtgcccaggccagcttcgagctacatgcatctagggcggagaggctgcacttgtgagagaaaatactatttcaagtcatattctgcgtaggaaaatgaattggttggggaaagtcgtgtctgtcagactgccctgggtggagggagacgccgggctagagcctttgggatcgtcctggattcactggctttgcggaggctgctcagatggcctgagcctcccgaggcttgctgccccgtaggaggagactgtcttcccgtgggcatatctggggagccctgttccccgctttttcactcccatacctttaatggcccccaaaatctgtcactacaatttaaacaccagtcccgaaatttggatcttctttctttttgaatctctcaaacggcaacattcctcagaaaccaaagctttatttcaaatctcttccttccctggctggttccatctagtaccagaggcctcttttcctgaagaaatccaatcctagccctcattttaattatgtacatctgtttgtagccacaagcctgaatttctcagtgttggtaagtttctttacctaccctcactatatattattctcgttttaaaacccataaaggagtgatttagaacagtcattaattttcaactcaatgaaatatgtgaagcccagcatctctgttgctaacacacagagctcacctgtttgaaaccaagctttcaaacatgttgaagctctttactgtaaaggcaagccagcatgtgtgtccacacatacataggatggctggctctgcacctgtaggatattggaatgcacagggcaattgagggactgagccagaccttcggagagtaatgccaccagatcccctaggaaagaggaggcaaatggcactgcaggtgagaaccccgcccatccgtgctatgacatggaggcactgaagcccgaggaaggtgtgtggagattctaatcccaacaagcaagggtctccttcaagattaatgctatcaatcattaaggtcattactctcaaccacctaggcaatgaagaatataccatttcaaatatttacagtacttgtcttcaccaacactgtcccaaggtgaaatgaagcaacagagaggaaattgtacataagtacctcagcatttaatccaaacaggggttcttagtctcagcactatgacattttgggctgactacttatttgttaggcaggagctctcctgtgcattgtaggataattagcagtatccctggtggctacccaatagacgccagtagcaccccgaattgacaacccaaactctccagacatcaccaactgtcccctgcgaggagaaatcactcctgggggagaaccactgacccaaatgaattctaaaccaatcaaatgtctgggaagccctccaagaaaaaaaaaaaaaaa

SEQ ID NO: 26238 - DNA, 1012 bp, Homo Sapiens
aaaccagccagtgaagttaactaaactcctaacgtgccagagtgctttctttagaacaaatatacctgtttacaagagagtagtgatctcgtcaagtgaacattgttgttatattttaaatctttagtatctgctggacaaaaagaggtatcagctgatgtggtttacacctcattgcttcctagtgaacgttacctggcagagacttttgtttctgagataggaaggaagaagctagagatcaccagtccctgaggcactgttttcaaatatgctgttaaccactggtcaggagtctgcagtgcagccacgctattggctgcttcttgacaatgtcatgtaaattatcagtgagcgcttctcagagtcaagccgtccaagagctttgcttcgtccccggtgcctaatagcagactataaagaagtcttatccctgagagagatttaccagcatggggaagaaagcttgcatttagatgccatgttccagttggaaaagtcctttcagatgcatcagtgcctggctgtaacttcacagtgactctgggcagagcccagggttcctatctctgttgtccaaatgggcagactgaggctggcccaaggtcatccacagctgctgatgagacccgaggcccttgatgtggacctgctggcccacagggcagtgtgcttgtcacgtggtggaatttcagattgcgttgcatggaacagagctcccacaagctggccgagggatgctggggagaacgcactcagggcaccagggctcctacgccactcagccagagctgctcttctcttacctgttttataggttaaaagcttttgacagaaactatcataaaggtttaaaaactgctgaccctggccaggcgtggtggctagtgcatgtaaccccagcactttgagaggccgaggcaggtggatcacctgaggtcaggagtttgagagcagcttggccaacatggtgaaaccccatctgtactaaaaatacaaaaaaaaaaaaaaa

SEQ ID NO: 26239 - DNA, 3519 bp, Homo Sapiens
ggcggcggcggcatggcggagccgagcggggccgagacgaggccccccattcgggtcaccgtcaagacccccaaggacaaggaggaaattgtgatctgcgatcgagcctcggtcaaggagttcaaagaggaaatctcccggaggtttaaggctcagcaggatcagctggtcctgatcttcgcaggcaagatcctcaaggatggggacacactgaaccagcacggaatcaaggacgggctcactgtccatctggtcatcaagacccctcagaaggctcaagatccagctgctgccactgcttcttccccctctacacctgaccctgcctcagcaccctccaccacgcctgcttcacccgccacccctgcccagccctccacctctggcagtgcctcttcagatgctggcagtggaagccggaggagcagtggtggggggccctctccgggggctggggagggatcccccagtgctactgcgtccatactctctggctttgggggcatcctggggctgggcagcctaggcctgggctctgccaacttcatggagctgcagcagcagatgcagcggcagctgatgtccaatcctgagatgctgtcacagatcatggagaaccccctggtccaggatatgatgtctaaccctgatctgatgcgtcacatgattatggccaacccccagatgcagcagttgatggagcggaaccctgagatcagccacatgctcaataaccctgaactcatgaggcagacaatggagcttgctcggaatccagccatgatgcaagagatgatgcggaaccaggaccgggccctgagcaaccttgagagcatccctggagggtataatgccctccgccgcatgtacacggacatccaggagcccatgttcagtgctgcccgggaacagtttggcaacaatcccttctcttccctggccgggaactccgacagctcatcctcccagcctctgcggactgagaatcgagagcccctccctaacccctggagcccctcgccccccacctcccaggcccccgggtccggtggggagggcaccggaggatcggggaccagccaggtgcacccgacagtctcgaacccctttgggatcaatgcggctagcctggggtcagggatgttcaatagcccagaaatgcaagccctcctccagcagatctctgagaacccccagctgatgcagaatgtgatctcagcaccctacatgcgcagcatgatgcagacgcttgcccagaaccccgactttgctgctcagatgatggtgaatgtgccgctcttcgcggggaacccccaactgcaggagcagctccgcctgcagctcccagtcttcctgcagcagatgcagaacccagagtcactctccatccttaccaatccccgagccatgcaggcattgctgcagatccagcagggactacagaccttgcagaccgaggcccctgggctggtacccagccttggctcctttgggatatcccggaccccagcaccctcagcaggcagcaacgcagggtctacgcccgaggcccccacttcctcaccagccacgccagccacatcttctccaacaggggcttccagcgcccagcagcaactcatgcagcagatgatccagcttttggctggaagtggaaactcacaggtgcagacgccagaagtgagatttcagcagcagctggagcagctcaactccatgggcttcatcaatcgtgaggctaacctgcaggccctgattgccacaggaggggacatcaacgcagctatcgagagactgctgggctcccagctctcctaatccctcggcccatgcctcctgcctctcccctccctcgatgtcagcattcggttcttctgtcaatccttaccctctgcagcttgtcctcccttccgtcttctccctcatcctttccaaacagcagggtgactttagaggcatgggctccaaccccttagctctgtctgagaattatggttttactgctacgtctctaacagactcttctctcctggtctccttgagcagtgctacttaaacagttttcacagtttcattgattgactctacctccttgccccacaccacttttgcaatctttaaactttcagtggctgtgcagagtcgagggaggaaccagctctctggtttactggaacatagtcttccatctataccactagggttttgtcttatgtttacttttggtaactctcttccttctttttctccctaccccccaacccctagcccaaccaatgctagaatttcttgctctgaaggaggagcaggtgaaacaggtggtaattttccttctcggcccctattctggttcattcagcactttttggtgggaactgttggaaattccagggtaaggaggaagatgcctgttctccctgtctgaagagggagatgagacagctctctggacaggaattaacaaacgctggagcagcccagaggaaattcgtgtgaaagaggagggaatgagattattcggaggaagggaatgggggagacagcctgagtaaaaggcttggaagttggaattagcagtggggagcagaagcactcatagctcttttaggcagaagaatccaggcccgagctggcagaagagacttagagatgctaatggaatttaaactgaaaaaaggagcccaatgaagctaagcgccacgccccacaaggggtcatattggctttagttcctcaagcatatgtgcttatatgcacacacacacacatttccatggacccaggtcttgcttgtgtccccaggcaccagtagtttgagcccccctcaaaagacatgaagggggttggggtctgtgtgagtagtggggaggtgcatgtgtatccacatgtgtgcatacactcttaagttgggtgggaagtggattccttgttggtttctggttcagagtgctctcccaccaccagagacaagtgggtaaaaaggtcagtccattgcaggaatatatatccgggagagctaggtcccttggggctctggatgctgggtaacccagaggtaatgtgggtaccctttctgaagctgtcagggctgtgactagcacccttatcacccctcactgccttgtgggaatagtagagggttttttttcctccagagcccctggcctttcagtttttaactatttccctccaggccagaaagttttctttgaggaaggagaggagagggtggcaatgatgcctttgatctggaattggacatttctctgtcagagcacagaggaggctcatatcacctcttccctctcctacttggcccagctgcttggaggaccgaccccatggctgagaatatgacggcaagaggaacagagtttgctccaagtgggaaagggtcccaagcagtccagagaagatgtctgtgtggctttccctccctgcctcccccagctcccacactggcctttgtaaataaatggcgtggtctttgtaaaaaaaaaaaaaaaaaaaaaaaaaaaa

SEQ ID NO: 26240 - DNA, 2647 bp, Homo Sapiens
ggggcccaggttgctgctctggccgccgagtgaggggcggggggggcccgggggcgcgcggcccgagacccccccggccgccctcctcctttctttgttcctgtggctgggggggtatcccctccctccacaacatggagccatctcctctgtctcccagtggggcagcacttcccctgccgctgtcgctggctccgcccccactacccctgccagcagctgcagtggtacatgtgtccttccctgaggtgaccagtgccctcttggagtccctcaatcagcagcgtctgcagggccagctctgcgatgtatctatcagagtgcagggccgggagttccgggctcatcgggctgtcctggctgcctcctccccttacttccatgatcaggtcctactcaaaggcatgacctccatctcgctgcccagtgtcatggacccaggcgcctttgagactgtcctagcctccgcttacactggccgcctcagcatggctgctgctgacattgtcaacttccttacagtggggtctgtgctccaaatgtggcacattgtggacaagtgcactgaactactccgagaaggccgggcctcagctaccaccaccatcactactgctgcagccacctctgtcactgtccctggtgctggggtgccatccgggagtgggggcactgtggcccctgctaccatgggctctgcgcgctcccatgcctccagccgggccagtgagaatcaatctcccagcagcagcaactacttcagccccagggagtccactgatttctcatcttcctcccaagaggcatttgcagcttctgcagtgggcagtggggagcgtcgaggaggtggccctgtattcccagcccctgtcgttggcagtggaggggccacatctggaaagctgctgctggaggcagatgagctgtgcgatgatggtggggatgggaggggggcagtggttcctggggctgggctccggagacccacctacacaccccctagcatcatgccacagaaacactgggtatacgtgaagcgaggtggtaattgcccagcgccagcacccctggttccccaagacccagatctggaggaggaagaggaggaggaagatctggtgttgacctgtgaggatgatgaagatgaagaactagggggtagctccagggttccagtggggggagggcctgaggctaccctcagcataagtgatgtccgtaccctgagtgagcccccagacaagggggaggagcaggtcaacttctgtgagtcctccaatgactttggcccatatgagggtgggggtcctgtggcaggtcttgatgactcaggggggccaactccctcttcctatgccccctcccaccctcctcgaccgctccttcccttggacatgcagggcaaccagatcctggtcttcccgtcgtcgtcttcatcctcatcctcacaggctcctggccaaccaccagggaaccaagcagaacacggggcagtgaccgtggggggcacgtcggtggggagcctgggtgtgccgggtagcgttggtggggtccctggagggactggcagtggggacgggaataagatctttctgtgccattgtgggaaggccttctcccacaagagcatgcgggaccggcacgtgaacatgcacctcaatctgcggccgtttgactgccccgtgtgcaacaaaaagttcaagatgaagcaccatctgactgagcacatgaagacgcacacaggtctcaagccctacgagtgcggagtctgcgccaagaagttcatgtggcgagacagcttcatgcgccaccgaggacactgtgagcgccggcaccgcctgggcggggtcggggccgtacctgggcctgggactcccacggggccatccttgccgtccaagagagagtctcccggagtgggcgggggcagcggcgacgaagcgagtgcggccacgcccccgtccagcagacgtgtctggtccccacccagagtccacaaggtggagatgggcttcggtggaggtggaggagcaaactgaaggggcaggctactggggtggggtagctttcgggaaagggaataaggagcacgatgcaagggcgctgtggcccccgggtgatctcccaccacacttactgtcttcctttatctctgtggacttgtatatattctggaaggggaaccacagtttcaccatcacccgcccattctactactcaacccctcccccccaaggtatttccagaactaaacccttcctttccctctgatgggtacactgaagcccctgctccacagagtagattgcacatggagggagggagagggggcgtgttgaacatcctgcagtcacagggtcaggggtcaggtggttgtagtctgtgcctgaagtctgtgtttgtgttgtcgtggagacaaggcctttgagccccacccttgtcctagaacctaccccctctcaaggatgcgctctttatttctaccctgtctctccccgccacccccgacttcccgtggaaattcccaactcggttctcatggaggagtgggtggagacaaggagggagtaagtcgtaggagtacaaggtttttattttttttaacagtgattaaaatatttattggtcatttaaaaaaaaaaaaaaa

SEQ ID NO: 26241 - DNA, 2075 bp, Homo Sapiens
gggagcactgctgggctggagacggcgggagccgctgctctccggctgagggaatcagagacagctccgtccctagtggagcgcaggggaggcagaagtcatgacaggcgaggtgggttctgaggttcacctagaaatcaatgacccaaacgtcatttcacaagaggaagcagatagtccttcagatagtggacagggcagctatgaaacaattggacccttgagtgaaggagattcagatgaagagatatttgtaagtaagaagttgaaaaacaggaaggttctacaagacagtgattccgaaacagaggacacaaatgcctctccagagaaaactacctatgacagtgccgaggaggaaaataaagagaatttatatgctgggaaaaatacaaaaatcaaaaggatttacaaaactgtggcagacagtgatgaaagttacatggaaaagtctttgtatcaggaaaatcttgaagcgcaagtgaaaccttgcttagagctgagtcttcagtctggaaactctacagactttaccactgacagaaagagttccaaaaagcacatacatgataaagaaggaactgcaggaaaagcaaaagtaaaatcaaaaagaagacttgagaaagaggagagaaaaatggaaaaaattagacagctaaaaaagaaggaaacaaaaaaccaggaagatgatgtagaacagccatttaatgacagtggctgtcttcttgtggataaagacctttttgaaactgggttggaggatgaaaataactctccattggaagatgaagagtcattagaatcaataagagcagctgtaaaaaacaaagtaaaaaagcacaagaaaaaagaaccatctttggagagtggggtccattcatttgaggaaggaagtgagttatcaaaaggaaccacgaggaaggaaagaaaggcagccagattaagtaaagaagcattaaaacaactgcatagtgagactcagcgccttattcgagagtctgcactgaaccttccatatcatatgcctgagaataaaaccattcatgatttcttcaaacgtaaaccccggcccacttgccacggaaatgccatggcactattgaagtcatctaaatatcagtcaagccatcacaaagaaatcatagacactgcaaatactactgaaatgaacagtgatcaccatagtaaaggttctgagcagacaacaggtgcagaaaatgaagtggaaactaatgcactccctgtagtttcaaaggaaacccagatcattactggatcagatgagtcttgcaggaaggatttggtaaaaaatgaagagctagaaattcaggagaaacagaagcagagtgacattagaccttcacctggggacagctcagtgttgcaacaggaatccaacttcctcgggaacaatcacagtgaggaatgtcaggttggagggcttgtagcatttgaacctcatgccctggagggtgaaggcccccaaaatccagaagaaacagatgagaaagtggaagagcctgagcagcaaaataaatcatcagcagttgggccacctgaaaaagtgagacggtttactctggatagacttaagcaactgggagtagatgtttccattaaaccacggctaggtgctgatgaagattcctttgtgatacttgaacctgaaaccagcagagaactggaagccttgaagcagcgtttctggaagcatgctaatccagcagccaaacccagggctggtcagacagtgaatgtgaacgtcatagtgaaagacatgggcactgatggaaaggaagagctaaaagcagatgtggtacctgtgactttagcacctaagaagttggatggagcaagccacacaaaaccaggtgaaaagcttcaggtgttaaaagctaaactgcaagaagcaatgaaactccgaaggtttgaggagcgccagaagcgccaagcactgtttaaattagataatgaagatgggtttgaggaagaggaggaggaagaggaagaaatgacagatgagtctgaggaagatggagaagagcaaaaaaaaaaaaaaaaaaaaaaaaaaaaaa

SEQ ID NO: 26242 - DNA, 1370 bp, Homo Sapiens
ggggacattgtttgggccaagatatatggcttcccttggtggccagcccgtattcttactataactgtgagccggaaagataacggccttttagtccgacaggaggcccgtatttcatggttgggtctccaacaacatctttccttgctctttcacaactctccccctttttagaaaacttccagtcacgctttaataagaagagaaagggcctgtatcgcaaggctatcacagaggcagctaaggctgccaagcagctgacccccgaagtgcgggctttgttgacacagtttgaaacgtgaacatgggcagtaaggtaggcaagaccattggaagtcaccacagattttctagtctagttaggaataatttctacaaaatagcgtggccagattggagagagaagttgcactcagttggctggctttttaatacttaccttatagccatttttagactgagagcttaaactgaacatataatcaaattttgtgttaaggaagtgagattttagcagtatttttcagttttgaagttcgaaaccatcccaaggcataggagccatagcctcaactgaaattgaatttgtagggactgttaattgccatttgtacctaatactgtatatatacatatatatacgtgtgtgtgtgtgtatatatatatatccgtgtatgtatatatacacacatatatatgtatatatacacatatatatatatgaaatacagcctgtcactgtgtgacacagattgcatatttgggattgcaataagggcttggtgagctgggggaatagtggatatttaatgactacttgtttttttaaataatgaacacttagcctttctatgcgcataatggtgtaaaagttagatggttaggtgtttgacaaacagatggttgcaattcagttacagactggggaaatagcccagtgtttgggattaaaactgtcaagactggataggtgttagtcatcactgtctttcgtccagtggggatttaataaatactttcaagcttctggtttgggagtttagataggtttgattttggatttgtaaatagtgattgctaaatttggtcagatttctcctgactggctgttcctaaactcttaggatatgtcccagtaaaattatactttgtgaattaattgtcatatgtgtaattgttgcattttggatgtacctaatttgataattaaaacaaaataatttccgtttaaggtatctgtttgcaggtcagaaaatgagaaaatgtaattgtgtaatgctctgaaatgtaaaaaaaaaaaaaaaaaccaaaaaaaagctgtaaataaaatcaactaaatccaaaaaaaaaaaaaaaaaaaaaaaaaaaaa

SEQ ID NO: 26243 - DNA, 3517 bp, Homo Sapiens
gcccagagcaccatgtcaatgagaaagaaggaggaatctgaagccttggacataaagtacatcgaggtgacctccgccagatcaaggtgccacgatggcccccagcactgctccagcccctctgtcaccccgcccttcggctcccttcgcagtggtggcctcctcctttccagagacgtcccccgagagacacgaagcagcagtgagagcctcatcttctctgggaaccagggcagggggcaccagcgccctctgcccccctcagagggtctctcccctcgacccccaaattcccccagcatctcaatcccttgcatggggagcaaggcctcgagcccccatggtttgggctccccgctggtggcttctccaagactggagaagcggctgggaggcctggccccacagcggggcagcaggatctctgtgctgtcagccagcccagtgtctgatgtcagctatatgtttggaagcagccagtccctcctgcactccagcaactccagccatcagtcatcttccagatccttggaaagtccagccaactcttcctccagcctccacagccttggctcagtgtccctgtgtacaagacccagtgacttccaggctcccagaaaccccaccctaaccatgggccaacccagaacaccccactctccaccactggccaaagaacatgccagcagctgccccccatccatcaccaactccatggtggacatacccattgtgctgatcaacggctgcccagaaccagggtcttctccaccccagcggaccccaggacaccagaactccgttcaacctggagctgcttctcccagcaacccctgtccagccaccaggagcaacagccagaccctgtcagatgccccctttaccacatgcccagagggtcccgccagggacatgcagcccaccatgaagttcgtgatggacacatctaaatactggtttaagccaaacatcacccgagagcaagcaatcgagctgctgaggaaggaggagccaggggcttttgtcataagggacagctcttcataccgaggctccttcggcctggccctgaaggtgcaggaggttcccgcgtctgctcagagtcgaccaggtgaggacagcaatgacctcatccgacacttcctcatcgagtcgtctgccaaaggagtgcatctcaaaggagcagatgaggagccctactttgggagcctctctgccttcgtgtgccagcattccatcatggccctggccctgccctgcaaactcaccatcccacagagagaactgggaggtgcagatggggcctcggactctacagacagcccagcctcctgccagaagaaatctgcgggctgccacaccctgtacctgagctcagtgagcgtggagaccctgactggagccctggccgtgcagaaagccatctccaccacctttgagagggacatcctccccacgcccaccgtggtccacttcaaagtcacagagcagggcatcactctgactgatgtccagaggaaggtgtttttccggcgccattacccactcaccaccctccgcttctgtggtatggaccctgagcaacggaagtggcagaagtactgcaaaccctcctggatctttgggtttgtggccaagagccagacagagcctcaggagaacgtatgccacctctttgcggagtatgacatggtccagccagcctcgcaggtcatcggcctggtgactgctctgctgcaggacgcagaaaggatgtaggggagagactgcctgtgcacctaaccaacacctccaggggctcgctaaggagcccccctccaccccctgaatgggtgtggcttgtggccatattgacagaccaatctatgggactagggggattggcatcaagttgacacccttgaacctgctatggccttcagcagtcaccatcatccagaccccccgggcctcagtttcctcaatcatagaagaagaccaatagacaagatcagctgttcttagatgctggtgggcatttgaacatgctcctccatgattctgaagcatgcacacctctgaagacccctgcatgaaaataacctccaaggaccctctgaccccatcgacctgggccctgcccacacaacagtctgagcaagagacctgcagcccctgtttcgtggcagacagcaggtgcctggcggtgacccacggggctcctggcttgcagctggtgatggtcaagaactgactacaaaacaggaatggatagactctatttccttccatatctgttcctctgttccttttcccactttctgggtggctttttgggtccacccagccaggatgctgcaggccaagctgggtgtggtatttagggcagctcagcagggggaacttgtccccatggtcagaggagacccagctgtcctgcacccccttgcagatgagtatcaccccatcttttctttccacttgttttttatttttatttttttttgagacagagtctcactgtcacccaggctgaactgcagtggtgtgatctaggctcactgcaacctccacctcccaggttcaagcaattatcctgcctcaggctcccaagtagctgggattacaggcatgtgcaactcacccagctaattttgtatttttagtagagacagggtttcaccatgttggccaggctggtcttgaactcctgaccgcaggtaatccacctgcttcggcctcccaaagtgctgggattacaggcgcaagccacccagcccagcttctttccattccttgataggcgagtattccaaagctggtatcgtagctgccctaatgttgcatattaggcggcgggggcagagataagggccatctctctgtgattctgcctcagctcctgtcttgctgagccctcccccaacccacgctccaacacacacacacacacacacacacacacacacacacacacacacacacgcccctctactgctatgtggcttcaaccagcctcacagccacacgggggaagcagagagtcaagaatgcaaagaggccgcttccctaagaggcttggaggagctgggctctatcccacacccacccccaccccacccccacccagcctccagaagctggaaccatttctcccgcaggcctgagttcctaaggaaaccaccctaccggggtggaagggagggtcagggaagaaacccactcttgctctacgaggagcaagtgcctgccccctcccagcagccagccctgccaaagttgcattatctttggccaaggctgggcctgacggttatgatttcagccctgggcctgcaggagaggctgagaccagcccacccagccagtggtcgagcactgccccgccgccaaagtctgcagaatgtgagatgaggttctcaaggtcacaggccccagtcccagcctgggggctggcagaggcccccatatactctgctacagctcctatcatgaaaaataaaatgtttgtctttgcaaaaaaaaaaaaaaaaaaaaa

SEQ ID NO: 26244 - DNA, 1341 bp, Homo Sapiens
gtaacaaggagggagcgcattcttccaccttctgggtgctgctgagtatctttctgggagcagtggccatgctgtgcaaagagcaagggatcactgtgctgggtttaaatgcggtatttgacatcttggtgataggcaaattcaatgttctggaaattgtccagaaggtactacataaggacaagtcattagagaatctcggcatgctcaggaacgggggcctcctcttcagaatgaccctgctcacctctggaggggctgggatgctctacgtgcgctggaggatcatgggcacgggcccgccggccttcaccgaggtggacaacccggcctcctttgctgacagcatgctggtgagggccgtaaactacaattactactattcattgaatgcctggctgctgctgtgtccctggtggctgtgttttgattggtcaatgggctgcatccccctcattaagtccatcagcgactggagggtaattgcacttgcagcactctggttctgcctaattggcctgatatgccaagccctgtgctctgaagacggccacaagagaaggatccttactctgggcctgggatttctcgttatcccatttctccccgcgagtaacctgttcttccgagtgggcttcgtggtcgcggagcgtgtcctctacctccccagcgttgggtactgtgtgctgctgacttttggattcggagccctgagcaaacataccaagaaaaagaaactcattgccgctgtcgtgctgggaatcttattcatcaacacgctgagatgtgtgctgcgcagcggcgagtggcggagtgaggaacagcttttcagaagtgctctgtctgtgtgtcccctcaatgctaaggttcactacaacattggcaaaaacctggctgataaaggcaaccagacagctgccatcagatactaccgggaagctgtaagattaaatcccaagtatgttcatgccatgaataatcttggaaatatcttaaaagaaaggaatgagctacaggaagctgaggagctgctgtctttggctgttcaaatacagccagactttgccgctgcgtggatgaatctaggcatagtgcagaatagcctgaaacggtttgaagcagcagagcaaagttaccggacagcaattaaacacagaaggaaatacccagactgttactacaacctcgggcgtctggtaagcgcggggtgccctgtgcctgtggaaggaaagatgggttatttttcttatttataataaaatgacatagtgacacccaaaaaaaaaaaaaaaaaaaaaaaaaaaaaaaaaaaaaaaaaaaaaaaaaaaaaaaaaaaaaaaa

SEQ ID NO: 26245 - DNA, 2150 bp, Homo Sapiens
ggctctttgtcgaagctagaggaccggcaggcggcagcagcaactacggcggcggcggcagaacccagcagtgatgtggaggtggagacccacaggagccccggacttcacctgagctacctcagtggtcaccaagagtggcaagataaagaaaaccctgagttgggcgggaccaggatgcctgaccgggacagctatgccaacggtaccgggagcagcggtggaggccctggaggtggtggcagcgaggaggccagtggggcaggggtaggcagtggcggggccagctcagatgccatctgtagagacttcttgaggaatgtgtgcaagcgaggcaagcgttgccgatatcgccacccagacatgagcgaggtgtccaacttgggggtgagcaaaaacgagttcatcttctgccatgacttccagaacaaggagtgtagccgcccaaattgccgtttcatccatggctccaaggaggatgaggatggctataagaagacaggagagcttcccccacggctgaggcagaaagtagcagctggccttggcctttcaccggctgacctaccaaatggcaaggaggaggtccctatctgccgtgactttctcaagggtgactgtcagagaggagccaagtgcaagttccgtcacctgcaacgggattttgagtttgatgctcggggtggaggaggcactggtgggggctcaacaggctcagtcctcccaggacgacgtcatgatctctatgatatctatgaccttcctgacaggggctttgaggaccatgagccaggcccaaaacgccggcgaggtggatgctgcccccctgatggccctcattttgagtcatatgaatatagtttggctccaccgcgaggggtggagtgcagactgctagaggaggagaatgccatgctcaggaagcgggtagaggagttaaagaagcaggtcagcaacctgctggccaccaatgaggtactactggaacaaaatgctcagttccgcaatcaggccaaggtcataaccctgagctccactgcaccagcgactgagcagactctggcccccactgtgggcactgttgccacttttaaccatggcattgcccagactcacactactctcagcagccaggctctacagcctcgtccagtgtcccagcaagaactggtggcccctgctggagctccagctgctcccccaactaatgctgcacctcctgctgctccaccacccccacccccacacttgaccccagagatcacgccactgtcagctgccctggctcaaacaattgcccagggaatggcacctccacctgtctccatggctcctgtggctgtatctgtggctcctgtggcccctgtggctgtatcgatggcccaacccttggcaggaatcacaatgagccacaccaccactcccatggtgacttaccctatcgcttcccagagcatgcgcatcacggccatgccacactgatggggctaatggacactcccctggtatagcctcgcagggctggggtcagggggcccttgcccactcacctagccttccccatccctgtctgaagggctcccttgagaactaggacaagagactacaaggagtatgtcctgaggaggggttgggatggtgtgttttctctcacctcccttttatgagggtcctcttgtccatcttcaagcctcacagtgggggcttgcagaggagtgcagactgaagccagcagagaggaaggactgactgaggggctgtgtcctcttatgggaatttgggaacatccctcgtcttgtcctctcttctgcacagcacaggttccagcactggttttagaagaaaaaaataccctgcccagagggaaagccaggaaagattgggaagtgggtggtcaggagagaaggcctgataggagccttcagacaatttgggtcctagttgcttgggttggacaatacaggaattgcttctgggccctgggaaagctgggaccatagtgctccagcccaaagactaggggagcattcattaccctagtttgacctgaaaatccatagggcagggcccactactttccaaagaaataaaagaacaattatttttaacaaaaaaaaaaaaaaaaaaaaaaaaaaaaaaaaaaaaaaaaa

SEQ ID NO: 26246 - DNA, 3768 bp, Homo Sapiens
gagaggctggcggcagtggtggctctcccggctgggttgtcagtcagtgagaggagggggaagatggctcaccgggacccgttctgctaggaagaaggggagcaggtggtgctgctactcgggaggaagcagagcagcctccgtcgctgtcgctgagagcctcacgagtcgaggtcctgcaggtggagctccggcagccgccctggttgaaggtttagaacagatgtggaaaaatgtttacttcagagaaaggggttgtggaggaatggttgtcagagtttaagacattaccagaaacatctttaccaaattatgccacaaatttgaaagacaagagttctttagtttcatctctctataaagttatccaggagccacaaagtgagttgctagaacctgtctgtcaccagctctttgaattctatcgcagtggagaggagcagttgcttcaatttacgctgcaatttctcccagaactaatttggtgctaccttgcagtctcagccagcagaaatgtgcatagcagtggatgcattgaagctcttcttctaggggtttacaatttggaaatagttgacaaacagggacataccaaagtattgagttttacgattccatctttatccaaaccatctgtataccatgaaccttccagcattgggtccatggctctgactgagagtgcactatcccagcatggtttgtcaaaagtggtatacagtggacctcatcctcaaagggagatgctgacagcacagaatcggtttgaagtgttgacattccttttgttgtgttacaatgctgccttaacttacatgcccagtgtttctcttcagtcactgtgtcaaatttgttcaagaatctgtgtttgtggatatcctcgacaacatgtaagaaaatataaaggtataagtagcaggataccagtttcttcaggattcatggtgcaaatgttaacagggatttattttgccttttataatggagaatgggatctagctcaaaaagcactggatgatattatatacagagcccagctagaattatatccagagccattgctggttgctaatgcaataaaggcttcattgcctcatggtcccatgaaatctaataaggaaggtacaaggtgtattcaagttgaaatcacaccaacttcctctcgaatatcaagaaatgcagtaaccagcatgtcaataaggggtcataggtggaaaagacatggaaatacagaattaacaggtcaagaagaactgatggagatatctgaagttgacgagggattttattccagggctgcgtctagtaccagccagtcgggtttatcaaacagtagtcacaattgtagtaacaagccaagtataggaaagaaccacagacggtcaggaggaagcaaaactggaggaaaagaaaaagaaactacaggggaatcttgcaaagatcactttgctcgaaaacaaactcagagagcccaaagtgagaatcttgagcttctctctttgaagagacttactttaacaaccagccaatccctacctaagcctagtagccatggtttggctaagaccgcagcgactgtatttagtaaatcctttgaacaagtcagtggtgtcacagtcccacataacccgtcatctgctgttggttgtggggctgggacagatgccaataggttttccgcttgtagtctccaagaagaaaagcttatttacgtttcagaaagaactgaacttccaatgaagcatcaatcaggtcagcagagacctcctagtattagcattactctgtccacagattaattagtaacatatttttctcccataacctagtgaacctggaaatacaactttgcttctttatgaaagtaccctgggtctttcatccgtattcctgacaggagccctgatgtcttaaattctgaaggctcccctgactttatgaagggaagattgtctaggttgcagtaagttgaaatatggttttgttatttcttgattaagattttttccccttggtttgagtcttttttttccctcctcttatttgttattgttgccctaagattgtcagtgacaataaattttgacaggttgtctaatcaagttggttatgtctcatgtgaggttgtaaggtggtttttcttgttttggtttggtttggttttttaatagctcctattttgatggctgtgtgtttggccttcagagtcaaagggagtctgcatgtatgggaactgttttatagagaatggggcagaggcacaactccaggaattctctagctcctggtcaggaagccaatctgaaaacaggcatgtggaaacacaaaaatgatgtgtatgaaaagcacctgatgaaaatatttgtaagcagatcatctttatgattagaacaatttgctcaaagccctggaaaatgcctggtaacccagtgcctagaatattatatgattccaggggatggctagaggcatttctgttgttatctctgaaacatttttatatcaaaaatcagattgctggtaggtgtgttgttttgaagtgttttatctggatttagcatgtgaagatccctttcaattattaaggtataataggctgtaaagctgatttaccctactgctggactttggaaatcctagttagtttggactcctataattcagagcatacgtcattggaagacttcctggaaatcagtgtaaatcttgcaacatagctctcaagataccactgtataatatgtaattgtttgtctgcaaatgcatttttcatctataaaatgtcatgaaagaaaataaaggtagtgaaatatggacaaaggacatttatatattaactaaagttgtttatgtttgtgttcttaaatttaaaacacgaagaaaaagaaatgtctttcttgttagtgaacaggcctgttttaaatatcttagtatgatatcaaaagaataatcaatttagttacctcccaactaaaaagtaaaaatgaaaaagacgacatggcagaagttgaaacaaacttgtatgtatctgtatgtgacctctagatggaaataaaagtttgatgtttgctagccgtggtccttttggctatggttgcggttcccctgtaaagcaaatgtacttaagtcatcattcagagtgagagagagaaagcacggctgaggctgagtcagttgaccgttgaggaagacctaaggagctgtccagttcttggctctttttcactgtgactgcacagcggtttccttcttcatagtcccttgctgtagtcaccaagagagcatgctagtgttttcctcttgttcctgcttatgcagagctcagatatatgaaaaatttgtatgctttgaaggctgccaaagcatttatactctggacatagttttaactgcaactgctttggctaccagtttaaaccgagttcttcaaaaagcatgaactcgttttcattcattagccctgtttacaatgtggattttgacataaatgaatttgattttcttttagctccagtaacagaatggaataagatctattgccataaattgtagttaagaactgtaaggcaatcgggcagtgaaacttgatattgtattaacttaataggaaccctgtgtacaatttaaaatatttgtaaaatatcactgtgaatttacagatgtctttttgtcattctttaacaatgaatttcccctgtgcatagttattaatagtattggtattattaaaaactaatttggcattttaaaaaaaaaaaaaaaaaaaaa

SEQ ID NO: 26247 - DNA, 2365 bp, Homo Sapiens
acaaggtgtattggacctgccgggaccacgcgctgcacggctgccggagccgggccatcacccagggacagcgggtgactgtgatgcgtgggcactgccaccagcccgatatggagggcctggaagcccggcggcagcaggagaaggccgtggagacgctgcaggctgggcaggacggccctgggagccaagtggacacgctgctccgaggcgtggatagtttgctctaccgcaggggtccgggtcccctgactctcaccaggcctcggcccagaaagcgagcaaaggtcgaagaccaggagctgccaacccagcccgaggccccagacgagcaccaggacatggacgcagacccgggaggccctgagttcctgaagacgcccctggggggcagcttcctggtgtacgagtccttcctctaccggcgggagaaggcggctggggagaaggtgtattggacctgccgggaccaggcccgcatgggctgccgcagccgcgccatcacccagggccgacgggtgactgtcatgcgtggtcactgccacccgcccgacctgggaggcctggaggccctgaggcagcgggagaaacgccccaacacggcgcagcgggggagcccaggaggccccgagttcctgaagacgcccctggggggcagcttcctggtgtacgagtccttcctctaccggcgggagaaggcggccggggagaaggtgtattggacctgccgggaccaggcccgcatgggctgccgcagccgcgccatcacccagggccggcgggtcatggtcatgcgcaggcactgccacccaccggacctgggcggcctggaggccctgcggcagcgggagcacttccccaacctggcgcagtgggacagcccagatcctctccggcccctggagttcctgaggacttccctggggggcaggttcctggtgcacgagtccttcctctacaggaaggagaaggcggctggggagaaggtgtactggatgtgccgggaccaggctcggctgggctgccgcagccgcgccataacccagggccaccgcatcatggtcatgcgcagccactgccatcagcctgacctggcaggcctggaggccttgaggcaacgggagcggctccccaccacggcccagcaggaggacccagaaaagattcaagttcagctgtgcttcaagacgtgttctcctgaaagccagcagatttatggggacatcaaagacgtcagactggatggcgagtcccagtgaggcgatgtgggcagaggagctccgagccgcccacccaaggtggcttcacatccacacaggcacttcccatccacctaggtttggcttagcagaaacttcttttcattcttccaaagcatcgatggtcttcgcgtctcctcaggaggtctcccaggaggaattcttggatggtgtcctcatgtcggcggagaacagtgctcagagctggcgcttgcagacgcagctgtcgtggggcagggcggtggcgccttcctgacctttggaagacatgacaaagctgcctggacacggacgcccctgctgtacggccacagcacccctgggtttgcagagcacgcagccttcctagggctttccacctggcgaggccccgctctgctcagcacggtgcaaagtgaatgctgctgtcttggagcctgggcacgtttggggaagttcctgcttcaaactgagctgccccgcataggccaggtcaacccacaccaatctcttctggacaggtgctgggtaggccttcctggtctctggccgcctgctgccagggtgtggccatccccagcaaccggagctggccaaaccagaggcctcgctccgcactccacactttcctttctgtgctccttccaagttaaattaaaccccctctccacgattcccacggcaggcgtcattcccgagatgggagccagtccaggggtcagcaggagccagcgctgggcacacgtgccctggctgaggccagcggcatcctgggtggcccaggtccatcctgggcagcaaaggcgtgtccccttctgtcagacagcttcacagagtgtggcttcaccagtcagagggagcagtccggagaggcaagatgaccccaccgggactgcagagcctcctccttactaacaaggacctgtccgcagccgcgaggtccttcactcccaccctgtaattgtggggggagtgccagcaacaggcctgtcccctggcaagttggccacggaacccaccatgcactgcaaggctgtgacagcctgggcacccctgcttctcctctgcttgtacggttcccccaataaatcctattttccatctcaaaaaaaaaaaaaaaaaaaaaa

SEQ ID NO: 26248 - DNA, 2590 bp, Homo Sapiens
atgtgtgctgcagccgtcagccggcccagctgagcagcagcaacggaccttgttaacggcgcggcagcctccaccgcctgctgttgccctcctctctcggtggtctgtccgcccagcgcacgtcaccatgggcaagagccggacgaagcgcttcaagcgacctcagttctcccctacgggcgactgtcaggccgaggcggctgcggcggcgaatgggaccggaggcgaggaggacgacgggccggcggcggagctgctggaaaagctccagcacccgagcgccgaggtccgcgagtgcgcctgcgcagggctggcccggctggtgcagcagcggccggcactcccgggcctggcgcgacgagacgccgtgcgccgcctcgggccgctgctgctagaccccagcctggccgtcagggagactgcagccggcgcgctgagaaatctcagtgcttgtggaggttttgaagtttgtgatgacatggtgactaaggatatcatgacccctctggttgcgctgctaaaagagtgtagtgctggactggattcaaatgagatgtctctgcaggagaaaaaagatcagaacagaaattctattgagaacatagccaatgagactgtgaacgtgctgtggaatatatgtgaatgcagtagtagagcagtgtctatattcaacaaagaagggtgtttggagattgtgttaaagtatttaagtaggttccctaccaatgttgacctggctatttcagtagcatattgtttgcagacagtgactgaggataacccagagctgctgaagtctttcagtgctacagcattgaacatgctggaatcagcactgctttctcctgtcagttccatggaatctcttctattgaagacattggtagcaggcacaatttggaatctaaaggacattattccatgcaagagtcaagcagaaatcataaatgccttactaaagatcttatctgaagttttgggaatggatgctggtgaaatggttattcaaatgaaagaggctgaaacgcaaaggttaaaaactgctgcagaggctgaggaaatattagagaacactaatggggatgatttgattgaagatgatgaaatggaaggaatttctcataaaagaagagtcagaaggaaaactttcgtttcagatttacttccgcccactgacaaggaactgagagagactatagcattgctgacagcccaacagactgctctggaaattattgtcaacatgtgctgcaatgaagatccctctgatgacgaatgggaagagctttctagcagtgatgaaagtgacgcatttatggagaattccttcagtgagtgcgggggacagctgttttctcccctctgcctctcccatgaagttcacacggctctcaccaactacctcatcccaaagaagatttttgagaaaactgcctttccaaacagcattgcagttgacctatgttctaggaaccctacttggaaacctttgattagaaaaatgaacactattcagtgcagagccctcttctgtctccagagtcttgtgtccctcctggatgtggagcacctgggaggagccgcagcccttcagacgcttgcacagcatctgtcacagctgcttttttctcaaccagattttgctaaacatgttgactttctagaagccataagtagtgctttgagggcccttttgcaaacaatggcctccaagaacatttcccagtgcatgactcctgatcagctgatgacattatgcaaagcaggcattcatagtagtaatgtcggggttagagtgaatgtcgttagcattttaggaatcactggcagcgtccttgccaaagaagatggtacacttgaaactcttaagaacattgggtgctttctgcttgaagttaccaccaaagatccttcccttgtggtagcaggagaagctttggatgccctctttgatgtttttgcagatggtaaagaagccgaaagagcctcgattcaaattaaattattatctgctttgaaagaattccagccggtctttaaaatgaagatacgtaaagaagggagaggtaactatagcacagatcagctgtgtgttcttgacaatgtgaaaatgaatttgcgaagatttattgcttatcaagaaactgttgagaaaagactgacttcttaaacaatccaaaaaagaaaccagttcttcccccaaagtattcaatgcttagaatactaaaaggttttctttgaatgtatatgtttctgaaagtcattttttaatgattacattctgtacattctgtaaaaacttcaaaacctggccaggcatggtggctcacgcctgtgatcccagcaccttgggagaccgaggcgggtggatcacttgaggtcaggagtttggggccagcctggccaacatggtgaaaccgcatgcataagcatggtggcacatgcctgtgatcccagctactcgggaggctgagggaggagaatcggttgagcctgggagacagaggttgcagtgagctgagatcacgctactgcactccagcctgggtgacagagggagaccctgtctccaaaaaaaaaaaaaaaaaaa

SEQ ID NO: 26249 - DNA, 1985 bp, Homo Sapiens
ggcagcggcggtgacaggccagcggcctgagaccgcggcggccgaggaggcctcgaggccgcagtgggcgccgccagaccactgccaggctcaggcggcggccgggctgggcgacggcgaggacgcaccggtgcgtccgctgtgcaagccccgcggcatctgctcgcgcgcctacttcctggtgctgatggtgttcgtgcacctgtacctgggtaacgtgctggcgctgctgctcttcgtgcactacagcaacggcgacgaaagcagcgatcccgggccccaacaccgtgcccagggccccgggcccgagcccaccttaggtcccctcacccggctggagggcatcaaggtgaggacctccctgccccgccgcgctccaggccctgcacggctgagcccgagaggaccggcgctcagcccgggtccccacgctgcccccggcgctgctctgcgtcggtcccgcgcgctcccactcactcgcctgctgtcgctctccgggccggggcgacttggcccttcttgggcagcgcggtctggcgccccagctgcccgctgtgcgccttttccttaggtggggcacgagcgtaaggtccagctggtcaccgacagggatcacttcatccgaaccctcagcctcaagccgctgctcttcggtaagtccgccagatactcctgggaagggccaggggctgcggtttggtggccaccttgaggctcgttgtgaccacgtgacctctattttgaaaatggctgcttcagagcagcccttccagaggattaccaaagtgaaggaccttccccgtcctcgaaatagggtaacactccctcttatcccaactccctgcagtccattcttccatcacagggctggcagggtgagcctgaggctggtgtctaaacgtttcattgcacctgtcttccgtgccaccattaattctgtcaccttctagaactgggaggaaggtgggagactgataaccagctttctgccgacctcaggacctctggggaaaatcccactgccgaagtgggccttgtggtctgatgagaagcaggccgtccaaatgtagataaactggtacccccccagcctcctccactggagtaccagtcagaggctcagcttttgctgccagcactctgagattcttcttaaggtgaagtctttgttcagccatcatgggcaaagctttctagggtgactccagttggagccacaacatagctcatcgtttctgagctctagttatgtgcttgccttcatatgattatttcatttaattcctgcaacccctctgtgaagtgggtgtagatcctactcaggccagtgagggggaaagttagggacagagagctgctgtggcttggccaggctgacacggttacttcagtggtgaagctaggattagaacccacatagcctgcctctaaggcctatgcagtaaagccacagtgcgagctgtgaagaccccagagtccttcaaagaccaccagtgtcaactgggtggggacccctagtcccatggacattgtccagggtgtttgtgtagcccagccctgggtacctggcctccgtgacaaacatatttgcaaacccagggccattcctgcctgccgggggatggaatgggttaggagctggggccaaagtagaacatctgagcacaagtcattacctccaaggcagagggtcctggttggggattatgcctagacctgtcagaatgatgtcatatgcatgctgtttgtagggaaatagattatgctgtcagtcctgttgtgggagaggcacccaaagctggttgttgttattattactattactattgagtaacgttgaagtctgtgccaggcactattttaggtgccaggaacacagcattgaactaaatataaacaatgaaacaaaaccctgaagctgacattcaaatgaagaggaaacagacaataaacaaacaaataaatataaaaaaaaaaaaaaaaaa

SEQ ID NO: 26250 - DNA, 1935 bp, Homo Sapiens
ggagccccgaggggccggagctcctggcggtgccggatcctgacggcggccttcccccgggtctgtctgccaaaatgtctgaaagatcagatctccttcacttcaagtttgaaaattatggagattcaatgttacaaaaaatgaacaaattaagagaagagaataaattttgtgatgttacagttctcatagatgatattgaggtacagggacataaaattgtgtttgctgcaggttcccccttcttaagagaccaatttttactgaatgattccagagaggtgaaaatctccatattacagagttccgaagtggggagacaattgctcttatcctgttatagtggtgtgctggaattccctgagatggaactggtaaattacttgactgctgcaagttttcttcagatgagccacattgtagaacggtgcacacaggccctgtggaagtttataaagccaaaacaaccaatggatagtaaagagggatgtgaaccacagagtgcttctccccagtcaaaagaacagcagggagatgccagaggctccccaaagcaggactcaccttgtattcatccatctgaagacagtatggatatggaggacagtgatattcagattgttaaggtagaatctattggggatgtatcagaggttagaagtaaaaaagatcagaaccagtttatttcttctgaacccactgctttacattcatcagagccccagcactccctgataaattcaactgtggaaaacagagtaagtgaaatagaacaaaaccatctccacaattatgccctttcttatacaggcagtgataacatcatcatggcctcaaaagatgtctttggccctaatattcgaggtgtagacaaaggcctacagtggcatcaccagtgcccaaagtgtaccagggtgtttcgtcacctggagaactacgccaaccatttaaaaatgcacaaactctttatgtgtctactctgcggcaagactttcactcagaaaggcaaccttcatcgacacatgcgtgtgcatgccggaattaaacctttccagtgtaaaatctgtgggaaaaccttttctcagaagtgttccttacaggatcatcttaaccttcacagtggagataagccccataaatgtaactattgtgatatggtttttgcacataaaccagttttgaggaaacaccttaaacagctgcatggcaaaaacagctttgataatgccaatgagagaaatgtacaagacctcacagtggattttgattcttttgcatgtacaacagtcacagactctaaagggtgtcagccacaacccgatgcaacacaggtcctggatgcaggtaaactggcccaagctgtcctgaacttaagaaatgatagtacttgtgtgaattgagtaggggcttcatgctcacaactcgaactgactgacaatgtggcaatagtcttagtctttttaggagtgattttgctagtttgacttctccaaagcctctgtgtaggtggtagggagtgagtcaaagcactaatagaccaggcaacttaccacttggagtggatttgccttacttttgccctctcccattttctgttttgagttatttatcttgtaaagtctgttttcctttcccaaggaataattccttttgtctacctaacattgacttatgtcttagactgacactgttttaggcttttcactaggcacattccgaaggtaccaacaagttaataacatcacctactctccactaatagatgctatgctaagagaagtgaataatctttctttggtagaaaataggctgagatataaggtgatattgctattgacctgaaaatgtgatagaacttctggttgcctattgattattcctccatgtctgataaatgaatctgcttcctaaaaaaaaaaaaaaaaaaaaaaaaaa

SEQ ID NO: 26251 - DNA, 1050 bp, Homo Sapiens
gaggctttcgactgagggctagcgaggggagcagggctggagcagggctggagcagggctggagcagggctggagcagggctgaagcagggccgcggaccccgcacgctcctgcgggccccgcggagccattgcggccgaggcctcggcaggcgccagcggagagctagccgcatcttcgggggcagcccggcagctgccggcggcgcggcgagagagcggctgacagaggggatgcgaggtcctccagcagcctgacctgagtgggttagtgatccagagaaaccagcaggccaacttggtcaggaaggttcgggaagctgttggagcagtgtggggaatttcccaccaggatgagtatgattggctgtgattttagatcgtaaagctgaaaattgaaatcatgaaagtagacaggactaaactgaagaagacacctactgaggctcctgcagactgcagagccttaatagacaaactcaaagtttgtaatgatgagcaacttctcttggaactgcagcagatcaaaacatggaacattggaaagtgcgagttatatcactgggtggacctgttggaccgcttcgatggaatactggcagatgctggacagacagtggagaatatgtcatggatgctcgtatgtgataggccagaaagagagcaactgaaaatgcttctcttggctgtgttgaacttcacagccttgctcattgagtacagcttttcccggcatctgtacagttccatagagcatttgacaactttattggcttcctctgatatgcaagtggtgctggcagtcctcaatctcctatatgtatttagcaaaagatcaaactacatcactcgtctgggatctgacaagaggaccccgctgctaactcggctacaacatttggcagagagctggggtggaaaggagaatggctttggacttgcagaatgttgcagagacttgcatatgatgaaatatccacccagtgcaactacactacactttgaattctatgcagatcctggggccgaggtcaaaaaaaaaaaaaaaaaa

SEQ ID NO: 26252 - DNA, 2220 bp, Homo Sapiens
gaaggcgcccggctccgagacgaaggctacccggcccggagcctggccgacgccggggacatcgacccccaggcctcggaagtggctgtcggcgagggcgcgcgtctcgcggtccatccagctcagcacgggtcgaaggaccctcctcctcacttccgccggagcggaaacggtgaggaccagcctcggaaccagaagacgcagggcgccgcgtttctgccccaccagcgcctggggctccgggcctgcacgcatgcgcgcggctcgccgcggtcttcactgcgcaggcgccgagcggccgaggcgccgcggtcggctctgggactcgtctggcgtccctcagaggcagaagaggcctggaccttggcgcacacagacccaggaacagatgagcagggatgtctgcatccacacctggccgtgcacctactacctggagcccaagaggcgatgggttactggacagctgtccttaacatcgctgtcgctcaggttcatgactgacagcactggagagattctggtcagcttccccctctccagcatagttgagatcaagaaggaggcttcacattttatcttcagctccatcaccatcctggagaagggccatgccaagcactggttcagctccctgcggccaagtcgaaatgtggtcttcagcatcatcgagcatttctggagggagctgctgctgtctcagcctggagccgtggcagacgcatctgtcccaaggacccggggcgaggagctgacgggactcatggctggatcccagaaacgcctggaggacacggcgagggtcctgcaccaccagggccagcagctggacagcgtcatgagaggcctggacaagatggagtcagacctggaggtggcggacagattgctgacagaactggaatctcctgcttggtggccctttagctccaagctttggaagacaccaccggaaacaaagcccagggaagatgtctccatgaccagttgtgaaccctttgggaaagaagggatactgataaaaattcctgctgttatttcccacagaacagagtctcacgttaaaccagggaggctcaccgtccttgtgtctgggttggaaatacatgactccagttctttgctcatgcacaggtttgaaagagaagacgtggacgacatcaaggtccactcaccttacgaaattagcatccgccagcggtttattggaaagccagacatggcctatcgtttgatatctgccaagatgccagaggttatccccattttagaagtgcagttcagcaagaagatggagctgttagaagatgcattggtgctcagaagcgcaagaacctcttcccccgcagagaagagctgctcagtctggcatgcagcatctgggctgatgggctgtaccctgcaccgtgagccacccgcaggagaccaggagggcacagcactgcacctgcagacaagcctgccagccctttctgaggcagatacccaggaactaacccagatcctgaggaggatgaaggggctggccctggaggccgagagtgagctggagagacaagacgaagccctggatggcgttgcagcagctgtggacagggcaaccttgaccatcgacaagcacaacaggcggatgaagaggctgacctaggggcagaacgtccctgcattcctgtctcaccctgcacatcccgctgagatggagggctgggcggcagtgccagggctgcagaggcctgtggccctccggagtggtcttcctctggatggggctgctactgtggggctgcttctgcaccaggggcctccccaggtgtgcaccatgcctgcctcccacttggctgtccctgctgctgggcaggacccggccacatgttctgcggatgctgcagaagtgtggaccatggcgggaccccaaggacacttggcacaggcctggaagaggccgccctcgtcttgtctcggctccctttcatggacagactggccttcttagctgtactataaatttgtgagtgaagttagagcccagctcacttagccagctcactttgagggcatcctataaacacccaactgttcttttatcgtctcggttttagccaaaagtgaaattagcatgactgcatctttcaaacaaaaatattgatttctgcttttagggccccgtttccatccagaaataaagggaaatgctggcttcaaaaaaaaaaaaaaaaaaaa

SEQ ID NO: 26253 - DNA, 3068 bp, Homo Sapiens
gacaggcaaagctgaaagcattggagagaggggtggtttcgaggtctctgcaagtctagaaagtttcttctagaaaagaaaggctcacggaaaatgtaagatgcagagagaacttgtttatgcaagaggagatggccctggggcccctcgccccggatctactgctcatccaccccatgcgattccaaattccccaccgtctactccagtgccccattccatgcccccctccccgtccagaattccttatgggggcacccgctccatggttgttcctggcaatgccaccatccccagggacagaatctccagcctgccagtctccagacccatctctccaagcccaagcgccattttagaaagaagagatgtcaagcctgatgaagacatgagtggcaaaaacattgcaatgtacagaaatgagggtttctatgctgatccttacctttatcacgagggacggatgagcatagcctcatcccatggtggacacccactggatgtccccgaccacatcattgcatatcaccgcaccgccatccggtcagcgagtgcttattgtaacccctcaatgcaagcggaaatgcatatggaacaatcactgtacagacagaaatcaaggaaatatccggatagccatttgcctacactgggctccaaaacaccccctgcctctcctcacagagtcagtgacctgaggatgatagacatgcacgctcactataatgcccacggcccccctcacaccatgcagccagaccgggcctctccgagccgccaggcctttaaaaaggagccaggcaccttggtgtatatagaaaagccacggagcgctgcaggattatccagccttgtagacctcggccctcctctaatggagaagcaagtttttgcctacagcacggcgacaatacccaaagacagagagaccagcgagaaaatgatgaaaaccacagccaacaggaaccacacagatagtgcaggaacgccccatgtgtctggtgggaagatgctcagtgctctggagtccacggtgcctcccagccagcctccacctgtgggcacctcagccatccacatgagcctgcttgagatgaggcggagcgtggcggaactcaggctccagctccagcagatgcggcagctccagctgcagaaccaggagttgctgagggcaatgatgaagaaggccgagctggaaatcagtggcaaagtgatggaaacaatgaagagactggaggatcccgtgcagcgacagcgcgtcctagtggagcaagagagacaaaaatatcttcatgaggaagagaagatcgtcaagaagttgtgcgagttggaagactttgttgaagacttgaagaaggactccacggcagccagccgattggttactctgaaagacgtggaagacggggctttcctcctgcgtcaagtgggagaggctgtagctaccctgaaaggagaatttccaaccttacaaaacaagatgcgagccatcctgcgcatagaagtggaggccgtgcggtttctgaaggaggagccacacaagctggacagtctcctgaagcgtgtgcgcagcatgacagacgtcctgaccatgctgcggagacatgtcactgatgggctcctgaaaggcacggacgcagcccaagccgcacagtacatggctatggaaaaggccacagccgcagaagtcctgaagagtcaggaggaggcagcccacacctccggccagcccttccacagcacaggtgcccctggcgatgcgaagtcggaagtggtgcctttgtccggcatgatggttcgccacgcgcagagctcccctgtggtcatccagccctcccagcactccgtggccctgctgaaccctgctcagaacttgcctcacgtggccagctccccagccgtcccccaggaagcaacctccactctgcagatgtcgcaggctccgcagtccccacagatacccatgaatgggtctgccatgcagagcttgttcattgaagaaatccacagtgtgagtgccaagaacagggcagtgtctatcgagaaagcagaaaagaaatgggaggaaaaaaggcaaaatctggatcactataatgggaaagagtttgagaagctcctagaagaagctcaggccaatatcatgaagtcaataccaaatctggagatgccgccagccacaggcccactgccaaggggagatgccccagtggacaaggtggaactttcagaagattctccaaattcggaacaggacttggaaaagctggggggaaagtcgccccctcctcctccgccacctcctcgtcgaagctacctgccaggatcgggactcaccaccacgaggtcaggcgatgtggtctacaccggcagaaaggagaacatcaccgctaaggcaagcagtgaagatgctggaccaagcccacagaccagagctacaaaatatccagcagaggagcctgcttcagcctggaccccatccccaccgcctgtcaccacctcctcctcaaaggatgaggaggaagaagaagaagaaggagacaaaataatggcagaactccaggcattccagaagtgttcctttatggatgtaaattcaaacagtcatgctgagccatcccgggctgacagtcacgttaaagacactaggtcgggcgccacagtgccacccaaggagaagaagaatttggaatttttccatgaagatgtacggaaatctgatgttgaatatgaaaatggcccccaaatggaattccaaaagggctccagcggggccccacagacgagcaggatgcctgtccccatgagtgccaagaacagacccggaaccctggacaaacccggcaagcagtccaaactgcaggatccccgccaatatcgtcaggtagttttaccttaaacccacttttggatggacgctatttcagttaagcaagtcactgacttagtttataccaaatattgtgctttctttgtaagataacggtttacatagacatcctggatctgggggcatgaagaaagtctaaataaacctttgttacactttaaaaaaaaaaaaaaaaaaa

SEQ ID NO: 26254 - DNA, 3250 bp, Homo Sapiens
attcagctgcgagtgcattcttggactgccttgtgagcatccccggtctgggcaggaccctctccttcccatctttctataccacccagcccagccatggcactgaaaggccgagccctctatgactttcacagtgagaacaaggaggaaatcagcatccagcaggatgaggacctggtcatctttagcgagacctcactggatggctggctgcagggccagaacagccgtggggagacagggctctttcctgcctcttatgtggagatcgtccgttctggcatcagcaccaaccatgctgactactccagcagccctgcaggctctcccggagcccaggtgagcttgtacaacagccccagtgtggccagcccagctaggagtggtgggggcagtggcttcctctcaaaccagggtagctttgaggaggatgatgatgatgactgggatgactgggacgacggatgcacagtggtggaggagccacgggctggtgggctgggcaccaacgggcaccctcccctcaacctctcctaccctggtgcctaccccagccagcacatggccttccggcccaagccaccactggagcggcaggacagcctggcatctgccaagcgaggcagtgtggtgggccgtaacctcaaccgtttctcatgctttgtgcgttctggagtggaggccttcatcctgggtgatgtgcccatgatggccaagatcgctgagacatactccattgaaatgggccctcgtggcccccagtggaaggccaatccccacccatttgcctgctctgtggaggaccccacaaaacagaccaaattcaagggcatcaaaagctacatctcctacaagctcacacccacccatgctgcctcacccgtctaccggcgctacaaacactttgactggctctataaccgcctgctacacaagttcactgtcatctcggtgccccacctgcctgagaagcaggccactggccgcttcgaggaggacttcatcgaaaagcggaagcggagactcatcctctggatggaccacatgaccagccaccctgtgctctcccagtacgaaggcttccagcatttcctcagctgcctggatgacaagcagtggaagatgggcaaacgccgggcggagaaggatgagatggtgggtgccagcttcctgctcaccttccagatccccaccgagcaccaggacttgcaggacgtggaagatcgcgtggacactttcaaggccttcagtaagaagatggacgacagcgtcctgcagctcagcactgtggcatcagagctggtgcgtaaacatgtggggggcttccgcaaggaattccagaagctgggcagtgccttccaggccatcagtcattccttccagatggacccccccttttgctctgaggccctcaacagtgccatttctcacacgggccgtacctatgaagccatcggggagatgtttgctgagcagcccaagaatgacctcttccagatgctggacacactgtctctctaccagggcctgctctccaacttccctgacatcatccatctacaaaaaggcgccttcgccaaggtgaaggagagccaacgcatgagtgacgagggccgcatggtgcaggacgaggcagacggcattcgcaggcgctgccgcgtggtgggtttcgccctgcaggccgagatgaaccacttccaccagcgccgtgagctcgacttcaagcacatgatgcagaactacttgcgccagcagatcctcttctaccagcgggtgggccagcagctggagaagaccctgcgcatgtatgacaacctctgaccgcgtgtgcctgggccccctccttcccctgggcctggtcactgcagtgtaccccactttcccgacctccctataccagcagtgactgggggaggggtcagcggtgggggagataagcggcctgtcctgcctcctgggagaaggagctttcaaggagtcatgggtgcccctgggaaattccccactccttagaagtggggcacagcaggggtgagaatagagtcaggagccctcgaggccaaggcctgggctgccggtcagtcagtgaaggtcaggccagggtctcagcctcccctagagcctattttgcttgctcacctggccactgctgccttatccattcagcagacaccgaggcctgctgcacccttgggtcggatgctgggcacccagggctgtgacatgcctgctcttcaggagtcctcagtgaaggtcggggtcagacacagacagagtcaatgcagtatgactgatgtttaagtgagggatttctggaagctcatagaagggaccacagcattccactggtcagggaagactccatagagtaggcaacatttgggcagtgttttgaagaatgacaagggcctgccagacagtacatgggggagaaggactttcaggggagaggaacagcatgggcaaagttatggaggcatgcaaacatctccctcttctctcccttactttccaagcaagttaggtacgctttccatggggattctggcctgtgtggtaggaagggatctcccttgctcccatgttgctggctgtccgtacatcaccctgtcccctgcaggagggggctacaggccatctccctcctgtaggcctctgactcccctccacttttgggccctcagcttatctcgggcaggggaccattgcagcatcctcccctcctcggactcaaggtgctgaggtataagccctgggccccagatccctggtgacaccttcctggagaagactctcaaaagtgactgtatatttgagttcaccagcaataactccccacactcgaagcaggtccaaacccaggatctcagggtccttgggctctgtggcactgtcttcccaagatccttcctgttgcacaatgggaaacctaagaggaaaaagacaggggcctgcttgcccagccatgcgagggattccatgcccacctgccctctgtctgcctcgctggaatgtgggcccctgctccccgtcaggttgtgctgtctctgacctatgtttacatccccgaggggtttctgcctcctccccacccaggtcagggtgtggtccagcagcttgctgtggggtgctgacatgtgtcaccactgccccccttgcccccgggggggtcatggtctcctcctggatgctgctccttgaatcttttttcttgataaaccttttacaattaaaaaaaaaaaaaaaaaaa

SEQ ID NO: 26255 - DNA, 1612 bp, Homo Sapiens
ggcacatagtctggcacgcgagggccccggcggggctgttagaggctcgtggtcatcctgaccatgtggtccagggcgccccggtcctctgggccccgcatggagcgcggcgtcagcgcggacagctcgcagtccctgagcctctgcaggcagttcttggagccctcgggcttttgcggcctctcggggagcggcggcagctcaagctggtactttttccccaacagctcccggcaggggcgctccaggagcctctgcatgaggcggacgtataagtggccactcctctggcgacatcccacggcgggggccctcgcgtggacacccgcccctgctagctcagggctccgatgcgatccgttcgaccctgcatggcggctttcaacccgaacgcgtccctccttcaagatcaagaccctgaacgtagttcaacaagtagttggtgatgatagcgtgccctgactgggccaggatagcctctttagtaaaacagccacgaaagtcatgaaacagatgctcagctcctttcttcattttcactttaattcggtgatgcctctgtgtctgtctgacgacatctctcctggggtctgtgattctgctgatggtcttcagtgcctactgagaagggttcctggacatcatcaggtatgaaaacctcaaagctctcggtcctcaacgtgagaaccctgggccagcggcatcagcctcaccaggaaacctgttcttctgctcattcttgggccccaccccaggcctattcaaagaaagactccaggggcagggcctggcagcctgtgtttccaccagatctgtgttaaagctcaaatgaaccagcccacgtgatgctgaccaggaagcacaaggctgagagccagtgtccaaggcaacggtgcccatggggccagaggcagctcctgcctgtgcagctgtatttagggctgcgttcccctccctgtcctgccagttgacgtcagtgtggggttactcagctaaggccaccacggtatatccacaaagccgtggtagcaggcgacattaaggctggtccagccattgtggtcagtctcctgcgccttctcaacgctcacccctcgccgcaccagcgtccgcagcagccccatgcctcctggacgccctcctccgggacgctctccaagccctcgacgccgtgctcctcctcgtcctggaaagggtacagagtcgtcccaggctatgctgcaggtgtggggccctggaactctttgtagtcagcgcggtcctcctcgacctgtgcgcctaggagtggggacggcggtggcggggtcatgcagcgctcccagccaccctgcggccgggtcccagccagcagcaccatgccagcggccggaggcgtgggctgggggccggggcaccgtcccggaaaaccgggcgcgccccaaggtccctgcttctcgcttccgcgtccccagagaagccgtagctcccgcccccagcccggcagaaacctcctttctttacattattaagtttgttttcattttaattttcttaggacattgataaaatcactttcggatttttgagattaaaaattaaataattttcatctttaaaaaaaaaaaaaaaaaaa

SEQ ID NO: 26256 - DNA, 4732 bp, Homo Sapiens; identical to SEQ ID NO: 25124

SEQ ID NO: 26257 - DNA, 1262 bp, Homo Sapiens
ccggatgatggcggccggcgcggccctagccctggccttgtggctactaatgccaccagtggaggtgggaggggcggggcccccgccaatccaggacggtgagttcacgttcctgttgccggcggggaggaagcagtgtttctaccagtccgcgccggccaacgcaagcctcgagaccgaataccaggtgatcggaggtgctggactggacgtggacttcacgctggagagccctcagggcgtgctgttggtcagcgagtcccgcaaggctgatggggtacacacggtggagccaacggaggccggggactacaagctgtgctttgacaactccttcagcaccatctccgagaagctggtgttctttgaactgatctttgacagcctccaggatgacgaggaggtcgaaggatgggcagaggctgtggagcccgaggagatgctggatgttaaaatggaggacatcaaggagtccattgagaccatgcggacccggctggagcgcagcatccagatgctcacgctactgcgggccttcgaggcacgtgaccgcaacctgcaagagggcaacttggagcgggtcaacttctggtcagctgtcaacgtggcggtgctgctgctggtggctgtgctgcaggtctgcacgctcaagcgcttcttccaggacaagcgcccggtgcccacgtagcccctgccatggaaggaagaacgggacaaaggaggggcagcagggtgtgtgcatatgagacttgggggtccctccccaattttagtttcctgccaaaacgggagtgtgcagtcagggcctgcggtctggccccatgagtctccttccgtcctcagcgggcagggaacacctctggcttgtagaagggacggctcagtggctgcaccgacggtcctggaaatctcacatggtgggcactgcagcgttggaacgtgagcctcggatttcctggcccctctactgtaaatgtgccttagcctaagcctcccatcctgtgttagcgttgcctggtgcggggcagggcctaacaaggaaacctgggccctccaagccaggttgaggtctggtaacagaatgccaggaagggggcctggaagaccacctgccccggcccctctcctgcaggggccccacacaggcatgagggatggcccggccaaagtctaggcagaagcctcctataacaaagggtggtgtggcctgggcattggagtcaataaattatggtcagaaaatcaaaaaaaaaaaaaaaaaa

SEQ ID NO: 26258 - DNA, 1872 bp, Homo Sapiens
cagggggctctggcccaggattcccaaccctggaaggcagctccaaggcaggaagagaattgggcatcgggtacgaacctggcagctcaggagtcggggctccactcaccccacacaaaaagatgaaaaagcgcaaagagctcaatgcattgattggtttggctggggacagccggagaaagaagcccaagaaaggcccaagcagtcaccgcctgcttcgcactgagcctcccgactcagactctgagtccagctccgaagaggaagaggaattcggtgtggttggaaatcgctctcgctttgccaagggagactatttacgatgctgcaagatctgttatccgctctgtggttttgtcatccttgctgcctgtgttgtggcctgtgttggcttggtgtggatgcaggttgctctcaaggaggatctggatgccctcaaggaaaaatttcgaacaatggaatctaatcagaaaagctcattccaagaaatccccaaacttaatgaagaactactcagcaagcaaaaacaacttgagaagattgaatctggagagatgggtttgaacaaagtctggataaacatcacagaaatgaataagcagatttctctgttgacttctgcagtgaaccacctcaaagccaatgttaagtcagctgcagacttgattagcctgcctaccactgtagagggacttcagaagagtgtagcttccattggcaatactttaaacagcgtccatcttgctgtggaagcactacagaaaactgtggatgaacacaagaaaacgatggaattactgcagagtgatatgaatcagcacttcttgaaggagactcctggaagcaaccagatcattccgtcaccttcagccacatcagaacttgacaataaaacccacagtgagaatttgaaacaggatatcctgtaccttcacaactctttagaggaggtaaacagtgccctagtggggtaccagagacagaatgatcttaaactcgagggaatgaacgagacagtcagtaatcttacccagagagtcaacctgatagaaagcgatgtggttgctatgagcaaggtagaaaagaaagcaaacctgtccttcagcatgatgggtgatagatctgccactctgaaaagacagtctttggatcaagtcaccaacagaacagatacagtaaaaatccaaagcataaagaaagaagatagttcaaattctcaggtatccaagctaagagagaaactccagctgatcagtgctcttacaaacaaacctgagagcaacaggcctccagagaccgccgatgaagagcaagtagagagtttcacatcaaagccatcagcattgccaaaattttcacagtttcttggagacccagttgagaaagctgcccaactaagacctatctccctaccaggagtttctagcactgaagatcttcaggatttattccgcaagactggccaggacgtggatgggaagctgacctaccaggaaatctggacctccctaggttctgctatgccagaaccagagagcttgagagcatttgattccgatggagatggaagatactcattcctggagctaagggtagctttaggtatctagcttcatcaggcatattttagaaatggactgcctaatatctatttacctaacaacaaaacaacccttacttacccatcagtcctctagtcctccaaactactgtagcagatactttgccaccttttaacttgtttgaagaagctatataaaagttatttttttaaagaagaagaccattttacttatgatgttcagaaatctatgatttcctacaaccagtaagatcttacattttaaaattgccaaaaaaaaaaaaaaaaaa

SEQ ID NO: 26259 - DNA, 3684 bp, Homo Sapiens
taaatttattctcacaacaaattacatttaaatgtgtaaaagtggtcaacaggaaaagggcataaaggaaaacaaagcgttctttcaggggaagtaagctgctctggaggccaggaactactgcttgcgttgacacggtgtgagtgggtatctttgccctgaagctgaagttaaactttctactggccgtgtggcacacacgttagatgtgtattaggttaagcctggccaactagagagcgaaggggcttattagttaaattgtgctaatatcagttaggaaaatgcttgtcatgttgtggtgaaatcttgagtttgtgttgcaatgcctgggacatgaacgggccatacaaacagaggaaagctctggggcttccaggcaatggccttgtgtcgagtcatcttacaagtgtccatcttgaaatcataaagtggatttaaaaagaagtagcagtgccacagtttatcaccaagaacttattttaatggaaatgggtctaatgtcccttcatgcaacaagacagatgaacaaaaaacaatggtcctaattagctatgagtgatcttgtatccaggtggaaacaaagggcatgtgtacatgtatatatctcttagatgaaatcacacatgttgtgaagggtagaaaaacgaagcaccaagcagtgctttagtctgcaaaggaaagtttttagccataggcatgttggctagtcgttccccttgatgttgccaaggagcagatgtatgaggtggcaagtctgtgtctatctagctgcttttaaaaaataaaaggaactttaagcattttgccttttcttctacatatcccaatagaaatgtgactacaaatcattacaaaaccactttttaggcaatgtatagttcactgagattacttagatctggatacactgggagataatatccaggaaagagaatacattaacacaataatgcagtatatttcagtaaaaatagaataaataaaataaaaatattttaagctgtatttaacaggttaattaaaaatatggtaagacatagaaggcatcgtgaacatggctgcctgtttaccgaatcacagatctaaagaatgcatagataactgaagtgtcactaagatatcaggtaaaacattggcatccttttacaaacaaatacacacatactttcatacatactttttggccatggcagaaagtgtctgaacatactctttaacataattttacaaaattaatttgcatttactatacaatgccattttcaaaacaaaacgtctgcaaagttttcaatatgtaaaggctatcattcatcttaatgcatcctataattgcacatataaatcagtttgctacttaaagctagctcagaattcttgatcttgaaaacaagcaaatgtatgccttaaaaaatgaagagggagttctggtagagatttccaatataaaagtgggtaatttgtttagaattttgaaatttatcacactaaaatgtttcactacagcgaccgagatgaaagatcactgtaaatgatttctgaacagcttttcaaagggcacagcaaggattttcttaatgcagtaatttcttatgatggcactggttacttcagatcagtagtatgtcaattggtgaaaaacagactgcgtttctaaagtagcatagttttgtcataacattggggtgctaagacaattccggtccccctgtcccccacccctcatgaattctgagggaatggcaggtagaaaagccacccactcattccatcatgatctctggtggctaagtaccatgagttaggaatgtctaccacaagtagcatctggaaaatctcgtagatggaacaggctgtgaatgtagaatcctgccctctacaacacttttgaggcacgctgtaggaaaacagtcctggacttagatagggcaccatcatgaataccactgcgtaaggaatttggacatctttctcccactcgtgtagggaattctaagattccctgacaatagatctttccatacctgctcttcttagtatatgcccagaatcattctggaaaggctcttcctgacggatatggaggcagcacaacacagcaagaacgggctttgggagccgtgggtcctagctggctcttctcggcgtgctgcggcggaacggctgttggtttctgctgggtgtaggtccttggctggtcgggcctccggtgttctgcttctccccgctgagctgctgcctggtgaagaggaagccatggcgctccgagtcaccaggaactcgaaaattaatgctgaaaataaggcgaagatcaacatggcaggcgcaaagcgcgttcctacggcccctgctgcaacctccaagcccggactgaggccaagaacagctcttggggacattggtaacaaagtcagtgaacaactgcaggccaaaatgcctatgaagaaggaagcaaaaccttcagctactggaaaagtcattgataaaaaactaccaaaacctcttgaaaaggtacctatgctggtgccagtgccagtgtctgagccagtgccagagccagaacctgagccagaacctgagcctgttaaagaagaaaaactttcgcctgagcctattttggttgatactgcctctccaagcccaatggaaacatctggatgtgcccctgcagaagaagacctgtgtcaggctttctctgatgtaattcttgcagtaaatgatgtggatgcagaagatggagctgatccaaacctttgtagtgaatatgtgaaagatatttatgcttatctgagacaacttgaggaagagcaagcagtcagaccaaaatacctactgggtcgggaagtcactggaaacatgagagccatcctaattgactggctagtacaggttcaaatgaaattcaggttgttgcaggagaccatgtacatgactgtctccattattgatcggttcatgcagaataattgtgtgcccaagaagatgctgcagctggttggtgtcactgccatgtttattgcaagcaaatatgaagaaatgtaccctccagaaattggtgactttgcttttgtgactgacaacacttatactaagcaccaaatcagacagatggaaatgaagattctaagagctttaaactttggtctgggtcggcctctacctttgcacttccttcggagagcatctaagattggagaggttgatgtcgagcaacatactttggccaaatacctgatggaactaactatgttggactatgacatggtgcactttcctccttctcaaattgcagcaggagctttttgcttagcactgaaaattctggataatggtgaatggacaccaactctacaacattacctgtcatatactgaagaatctcttcttccagttatgcagcacctggctaagaatgtagtcgtggtaaatcaaggacttacaaagcacatgactgtcaagaacaagtatgccacatcgaagcatgctaagatcagcactctaccacagctgaattctgcactagttcaagatttagccaaggctgtggcaaaggtgtaacttgtaaacttgagttggagtactatatttacaaataaaattggcaccatgtgccatctgtacatattactgttgcatttacttttaataaagcttgtggccccttttaaaaaaaaaaaaaaaaaa

SEQ ID NO: 26260 - DNA, 2459 bp, Homo Sapiens
agcgagcgcagagccccggccccgcgcggcccgagtgccacatcactgcgctggccgtccaaggtccgccgccccaccatgccgcccccgccgccgctgctgctccttacagtcctggtcgtcgccgctgcccggccggggtgcgagtttgagcggaaccccgccggtgaatgccacaggccaccagctgcagacagcggtacagtaccgggacctccctggcttctgttctgtaggagggctgcagcccccacactgtcagagcactttaggcagctgaatccgtgatttcagaagctctgattcctgcacagtagctgttgtcctggtcctcccctgccagaccgtgggtgcccctccctgcaggccctggccctgcgtggggtcccctacgtaaatgtctgacgcgtcacggtcagggccactgcgggagggactgacctgccgaccctgcctccccagccacctgcgtggacctgcagctcaggacctgcagcgatgccgcctacaaccacaccaccttccccaacctgcttcagcaccggtcgtgggaggtggtggaggccagctccgagtacatcctgctgagcgttctacaccagctcctggaaggccagtgcaacccggacctgcggctgctgggctgtgctgtgctggccccccggtgtgagggcggctgggtgcgcagaccctgccggcacatctgcgagggcctgcgggaggtctgccagcccgccttcgacgccattgacatggcctggccctacttccttgactgccaccgctacttcacgagagaggacgagggctgctatgacccgctggagaagcttcggggaggcctggaggctgacgaggcactgccctcagggctgccgcccaccttcatccgcttcagccaccactcctacgcccagatggtgcgtgtgctgaggcggatggcctcccgctgcgcccacgtggccaggacctacagcatcgggcgcagcttcgacggcagggagctgctggtcatcgagttctccagccgccccggccagcacgagctgatggagcccgaggtgaagctcatcggcaacattcatggcaacgaggtggcgggccgggagatgctcatctacctagcccagtacctgtgctctgagtacctgcttggtaacccccgcatccagcgcctgctcaacaccacccgcatccacctgctgccctccatgaaccctgacggctatgaggtggcagctgccgagggtgccggctacaacgggtggacgagcgggaggcagaacgcgcagaacctggatctgaaccgaaatttcccggacctgacgtccgagtactaccggctggcggagacccgcggcgcacgcagcgaccacatccccatcccccagcactactggtggggtaaggtggccccggagacaaaggcaatcatgaagtggatgcagaccataccctttgtgctctcagccagccttcatgggggcgacctggtggtgtcctaccccttcgacttctccaagcacccccaggaggagaagatgttttctcccacgcccgacgagaagatgttcaagctgctgtccagagcctacgctgacgtccaccccatgatgatggacaggtcggagaataggtgtggaggcaatttcctgaagagggggagcatcatcaacggggcggactggtacagcttcacgggaggcatgtccgacttcaactacctgcacaccaactgctttgagatcacggtagagctgggctgtgtgaagttcccccccgaggaggccctgtacacactctggcagcacaacaaggagtcactcctgaatttcgtggagacggtgcaccggggcatcaaaggtgtggtgacagataaattcggcaagccagtcaaaaacgcccggatctcagtcaaaggcattcgccacgacatcaccacagccccagatggtgactactggagactgctgcccccaggtatccacattgtcattgcccaagcccctggctacgccaaagtcatcaagaaagtcatcatccccgcccggatgaagagggctggccgtgtggacttcattctgcaacctctggggatgggacccaagaactttattcatgggctgcggaggactgggccccacgacccgctgggaggtgccagctctttgggggaggccacggagcccgacccgctccgggcgcgcaggcagccctcggccgacgggagtaagccctggtggtggtcctacttcacatcgctgagcacccacaggccacgctggctgctcaagtactagccccggccccagcacccgccaggatgtggagaccgaggcccgtctccgcatcccgggctcctggctcttgattttgtctgccacagacatcccacaaagccgctgccattttattaaagtgttttgatccacttaaaaaaaaaaaaaaaaaaaaaaaaa

SEQ ID NO: 26261 - DNA, 2698 bp, Homo Sapiens
ggttccgtttccggagtggagggcacgccagggtgtctgaagctgagaccccgggctcgcagtcgccccatgaatttcgagttccgcaactgacgctactgggcggggcttcatggccagggcctcgctcaggcctaagtttccccacctgtgctcaatgcacaggtgcggtgccgcctccagggccggccgagaagagaggccgcacccgcacggggactgcatctcccagagcgccccgcgagcggccgagcggcgggactccatgccctagagtgccccgcgggcggccgggcggcgggactccatgtcctagagtgccccgcgggcggccgggcggcgggactccatgtcctagagtgccccgcgggcggccgggcggcgggactccatgtcctagagtgccccgcgggcggccgggcggcggccgccgcaaccgacaggtccgggactgggcgctgcggcctcgtccgcgcgccggggcgggggcctagctcgacagcttcccggcggctgcgcgatggacagccccgaggtgaccttcactctcgcctatctggtgttcgccgtgtgcttcgtgttcacgcccaacgagttccacgcggcggggctcacggtgcagaacctgctgtcgggctggctgggcagcgaggacgccgccttcgtgcccttccacttgcgccgcacggccgccacgctgttgtgccactcgctgctgccgctcggctactacgtgggcatgtgccttgcggcttcagaaaagcggctccacgccctcagccaggcccctgaggcctggcggctcttcctgctgctggccgtgaccctcccctccatcgcctgcatcctgatctactactggtcccgtgaccggtgggcctgccacccactggcgcgcaccctggccctctacgccctcccacagtctggctggcaggctgttgcctcctctgtcaacactgagttccggcggattgacaagtttgccaccggtgcaccaggtgcccgtgtgattgtgacagacacgtgggtgatgaaggtaaccacctaccgagtgcacgtggcccagcagcaggacgtgcacctgactgtgacggagtctcggcagcatgagctctcgccagactcgaacttgcccgtgcagctcctcaccatccgtgtggccagcaccaaccctgctgtgcaggcctttgacatctggagctggaggcctgcataggctgcatgcagacacgtgccagcgtgaagctggtgaagacctgccaggaggcagccacaggcgagtgccagcagtgttactgccgccccatgtggtgcctcacctgcatgggcaagtggttcgccagccgccaggaccccctgcgccctgacacctggctggccagccgcgtgccctgccccacctgccgcgcacgcttctgcatcctggatgtgtgcaccgtgcgctgagtgggctggggccttgaggtgactctgtgtctccccgcaaagccacagggcagggaagggggtggctgggcctcctggctggcaaagggctctacttaaagcacatgatgtagagcaactcgcctctgccctgggtctgcagaaggctgaggacttttggttaaaagcaatcctcatgaaaacaccccaccctgcttggcagccagggtacaagtcctgggcacctcctctttgcctccctcctgcccctttcctgctggtgggggcagatcctgcacacacagacacagcgtctgcccccgagccattccctggagaccctgggtctaccccaggtggtcgtcatctgggccatttgccttacttctctggagcatacccaccctcagttacgtgccagacctggaccgcattctcctgccctgtcctggagctggcccctggctgcctggaggaccctgggtaggtcctgagggtgggatggagaagagggcactgctgtggtgtgggagcagtcctggggcttcctggtggctgtgaccagttgaggggctgttcctgggtggggtggcaatgggaggacaggtcagagcgccctcatttgtggggctgcccctccgggtttctcatcctgtccttggtgcctttttctgcccaacaagtccagggaaggccgaggtctcagactcctgggtaggggtgggggtttgagttgaggaccaaagtgccatagcgacatccagaacacaagcccaccaggggtccagcccaggctacccactcccctagggtctcccaggctcagaaggggatgcacgccccctgtggtcaagcctctggtgggcgtcttgcccagttcctgatggttcaaggggaggggggatgttggccaggccccagggcacagccctgacacaggtgtggctactggaggggccttcatacctgcggccccaaagcccctgggcttggctgtttgaggcagaggtgatggactccgggggcctgacacttgggatttgggaggcttcctagagcgctcagcaggtgaaggcagcaggggccatggccgggagccaggcctagctttgaactgagtttcaagggctgccaaagaggggcagtgggttggggttgtttttactacaaaataagttacttagttttataaagacaaaccgattgtagccaaatgacaccatatttaataaaatttagtctgaagtgaaaaaaaaaaaaaaaaaaaaaa

SEQ ID NO: 26262 - DNA, 4770 bp, Homo Sapiens
cccaaactgaggagcccggagctgccgctgggggatcggggccgggggcacccgggggagccgctgcccgggccgcccgccctttgtacaggccgcctcccttcccggtccggggaggaaacgagaggggggatgtgaacagctgtggaagtcggagtctcgggagccggagcgggcccccgcccaggccccccagcccagcccagcccgcgcgcccgcccgtcctcccgcccagccagcccgggcccgcgggattgttagatggaacacggctccatcatcacccaggcgcggagggaagacgccctggtgctcaccaagcaaggcctggtctccaagtcctctcctaagaagcctcgtggacgtaacatcttcaaggcccttttctgctgttttcgcgcccagcatgttggccagtcaagttcctccactgagctcgctgcgtataaggaggaagcaaacaccattgctaagtcggatctgctccagtgtctccagtaccagttctaccagatcccagggacctgcctgctcccagaggtgacagaggaagatcaaggaaggatctgtgtggtcattgacctcgatgaaacccttgtgcatagctcctttaagccaatcaacaatgctgacttcatagtgcctatagagattgaggggaccactcaccaggtgtatgtgctcaagaggccttatgtggatgagttcctgagacgcatgggggaactctttgaatgtgttctcttcactgccagcctggccaagtatgccgaccctgtgacagacctgctggaccggtgtggggtgttccgggcccgcctattccgtgagtcttgcgtgttccaccagggctgctacgtcaaggacctcagccgcctggggagggacctgagaaagaccctcatcctggacaactcgcctgcttcttacatattccaccccgagaatgcagtgcctgtgcagtcctggtttgatgacatggcagacactgagttgctgaacctgatcccaatctttgaggagctgagcggagcagaggacgtctacaccagccttgggcagctgcgggccccttagcctgccctgcttccaagcgacggccatcccagtaggggactttcccacactgtgcctttacgatcagcgtgacagagtagaagctggagtgcctcaccacacggcccggaaacagcgggaagtaactggaaagagctttaggacagcttagatgccgagtgggcgaatgccagaccaatgatacccagagctacctgccgccaacttgttgagatgtgtgtttgactgtgagagagtgtgtgtttgtgtgtgtgttttgccatgaactgtggccccagtgtatagtgtttcagtgggggagaagctgaaagaccaagactcttcccaagttagcttgtctcctctcctgtcaccctaagagccactgagttgtgtagggatgaagactattgaagactccattgccaaaccatggcctttcctcagtgttgtaaggcctatgccaaggataaaggaagggtatgcctttgggtactccaggcacacacctttctgaaatccttctccagccagctgctgcagacaaaagatcacatttctgggaagatgagaacttgtttccagaccagcatccagtggccatcaggtcttgtggcccaaaggctatgcttgcctccggctgagtgcctgggataggccttttctatgtctccccaaggctggggtgctgagcctgccttcctcaccacctagccatagtctcaaacctgtggggaaggaggttttctccctgcccgggaagaggacagataactgatttccgttcttttgactgtgttttaaaattctctttctaaacacagagtgttgggcctggtttgtttctgacaaagttacagtcctgggcctgtaatgaatgtcggcggcgctggggttgcagggaaaagacaaatcctcaaagcgtggacgtgtgtccccatggcttgtggatcagctaagctcgggatcatttccataagtctgcttttcagggattctctgctggtgctggtgcaaggacttctgttccaaaggctgggaaaaactaagctgtcccagcccctcccatttcttgggcagggctcttttcctgttgtgtcttcccccagggcctgtcctgtaccgagctctgtctgttccagccttcatccttcctggctgttgcttttcctcttaagggcctcagaactcttgctcttcctgggctgagggggaatgagtgttcttgccatttgccagcctaatgcgcatgctttctgcctctggtaacaggagtgagtgagcccctcagacctgcactctgggtgtctcctgctttcaaaggttcttaatagtgaatgctttaaaattaaagtcatcacgaaatggaagttttcccagggtggaaaataagaggaagtgctgctgtaattgggagcacaaggggcctcccaaaaaggagccccacctcagcatcactgccttaatcgtggcctccctggggtgggtggggttctctcctccctccctccctcctcctggggtgggagggcgctcctgttcccatctctgtgttccctggaggcaggtatcacaaagcatttgtgaattgctttaggtgcagggacaccacccactcaggactcttccccatcatcccttccattgccacaccctagatccagcctcaggaactaacaagttttgagaaaagcaggtggtagagcagcagcttcgtgctctcagcggtggctggctggcatttttctctagcgttgtggtgccaccttcccttcttgtcccaaggttataaggccttgtctttctctttggaatcataaagtggaacagagtccccagaactcatgtggccatttccgccagcatcactccccggtgcctatggggtcccggtgtacctaaagggagaaggaccccatgtgctagccagaaatatactgtctcttgaaggaaagcaggagctcagactcttagagccagctgtggcttcggacccaaggcctgacctaggctgctatcctaatattgcaggaggggcctctcttccaagccccaccctaagggttagcccttggccaaatcttttgccgtctaggcccagccaggcttttctgactaaataagcaataagaggctctaagctgactgagttgcaaggaccctttccgccctcccttggatctccatgtttttccagatggcggaagagcatgtgccaccccctttcctaacagacttgtccaagtgcttggcgtgggacccatgaccaaagcccaggatggcttggtgggagtgtccctgctgcatctgcatgaagcccctgctttttaggcctcactcccatcagaaccctgcctgcccacctgcaactcccccccaacaatgccattcccacttgccccagagaagctactcggccaaacctagccagggtctgttcttgtggaccagagccagcctagtcattatttgctgtcgggtttccagtttcaccgtgtgttagggtgagggatgattgtaaaatttgctcctcaaaggaatcaggccagactcaattttggagggcaagacagggaggaggccgcttcatcccagactctcttctagggcttcccaccatcagcccctcccacttgagactggtctttgggaggcaataggccaccatgcctggtcagcaccaattcaagccatgccaggaatctgcctacctgccaggttcagttcttttaaggtgcctcttcagggacacagtgtgtctctctgattgggcttctaaatcaaaagcctgatgttcgtgtccctctcatagggggagctttggacacaggaccagtttggaaaagggtcaggtaagggtttccactctgcacattgtagagggaacactctgtaggcccatgggtcccttactagagaggttgagtgaatttgccttcagttaacatgggaccttctgtttagcttcctcttgcttcccaaagattttaagcattttgtaaatgtataaactcacctctggtaacagtggcccagacgctgctttgtgctaaaagcatgggaaatgtaaaggcagtctttctctgggaaatggatgctattctattctgctgcccctacctgttcctgaggcctcatttagaaagaaaatcccctcagaaggctgtctggcacccagtgtcctagccaggccaagtatatgagaaaggtaagtccattttccccttcaggtcctcagtggattacttaaccactgctgtccctcggtccctttttcctaaacgggtttagttctgtcttttttctccttttttctaaatgctggtaaatatttacattcagccagggaagaggaggccagaggtcgggccagctgccccattcttttaacgttgtagggcctgcccatggagcggaccctcctctttgggcctcgtgagcttttttgcttatcatgttccatttcgtgccgctttcccccttcaagatgccatttggagggtaggggatctgcttcccactgtgactgggctatgggattctgactaccttgcttacagattcatggtttgataaatttgttgtattcaaaaacttgaaatgcaggacgccattaagtgtctgtttatatttttggaatatttgtattacttacaattaattaataaaagtgggtttaaaaaacctttccaggaaaaaaaaaaaaaaaaaaaa

SEQ ID NO: 26263 - DNA, 1659 bp, Homo Sapiens
gtgagcgctcgcaagaggacggcagaggcccggcagctcggagctccgggaccttgtggcgcatcaggacgcggctgtccctctgccgggacccagagccgccgccgccgctctgcctcctgcgtgttagcctcctctgcgcgctccgggcaggcggccgtgggagccgctggggcgaggacggcgcgaggctgctgctgctgcccccggcccgcgcggctggaaacggagaggccgagccaagcggcggcccctcttatgctgggaggatgctggagagtagcggctgcaaagcgctgaaggagggcgtgctggagaagcgcagcgacgggttgttgcagctctggaagaaaaagtgttgcatcctcaccgaggaagggctgctgcttatcccgcccaagcagctgcaacaccagcagcagcagcaacagcagcagcagcagcagcaacaacagcccgggcaggggccggccgagccgtcccaacccagtggccccgctgtcgccagcctcgagccgccggtcaagctcaaggaactgcacttctccaacatgaagaccgtggactgtgtggagcgcaagggcaagtacatgtacttcactgtggtgatggcagagggcaaggagatcgactttcggtgcccgcaagaccagggctggaacgccgagatcacgctgcagatggtgcagtacaagaatcgtcaggccatcctggcggtcaaatccacgcggcagaagcagcagcacctggtccagcagcagcccccctcgcagccgcagccgcagccgcagctccagccccaaccccagcctcagcctcagccgcaaccccagccccaatcacaaccccagcctcagccccaacccaagcctcagccccagcagctccacccgtatccgcatccacatccacatccacactctcatcctcactcgcacccacaccctcacccgcacccgcatccgcaccaaataccgcacccacacccacagccgcactcgcagccgcacgggcaccggcttctccgcagcacctccaactctgcctgaaaggggcagctcccgggcaagacaaggttttgaggacttgaggaagtgggacgagcacatttctattgtcttcacttggatcaaaagcaaaacagtctctccgccccgcaccagatcaagtagtttggacatcaccctactgaaaacttgcgattcttcttagttttctgcatacttttcatcacgatgcaggaaacgatttcgagtcaagaagacttttatttatgaacctttgaaaggatcgtcttgtatggtgaattttctaggagcgatgatgtactgtaattttattttaatgtattttgatttatgattatttattagttttttttaaatgcttgttctaagacatttctgaatgtagaccattttccaaaaaggaaactttattttcaaaaacctaatccgtagtaattcctaatcttggagaataaaaaagggcggtggaggggaaaacattaagaatttattcattatttctcgagtactttcagaaagtctgacactttcattgttgtgccagctggttgaaattaaaactctgatattaaaaaaaaaaaaaaaaaaaaaaaaaaaaaaaaaaaaaaaaaaaaaaaaaaaaaaaaaaaaa

SEQ ID NO: 26264 - DNA, 1835 bp, Homo Sapiens
ggcacgaggatcactcactgactactgctccatgtcctcctactcctcatccccaccccgccaggctgccaggtccccctcaagcctccccagctccccagcaagttcttccagtgtgcctttctccaccgactgcgaggactcagacatgctacatacgcccggtgctgcctccgacaggtctgagcatgacctgacccccatggacggggagaccttcagccagcacctgcaggccgtgaagatcctcgccgtcagagacctcatttgggtccccaggcgcggtggagatgttatcgtcattggcctggagaaggattctggcgcccagcggggccgagtcattgccgtcttaaaagcccgagagctgactccgcatggggtgctggtggatgctgccgtggtggcaaaggacactgttgtgtgcacctttgaaaatgaaaacacagagtggtgcctggccgtctggaggggctggggcgccagggagttcgacattttctaccagtcctacgaggagctgggccggctggaggcttgcactcgcaagagaaggtaattcctgtggaatgactgtcacacatcagagctggctggcccggggctgcagcctgacccctctgccatcggcctctagttctccaaggacctagaagacagatggagttctcccctgaactccttgctgctaagaagtgctgagaagttactcgcctggcggtggctccagggttctctggttctctggagcagagttctctgaataccccatcccccaactgctgattttacagccccagggaagacagtggtatcaggctgggagcggcctcctctggcctcccccatcagtttgcaggagcaggggtgcaggatcctgttctgagctgggtcaaacaaagcagggccgggccttcctgccatccccaggtctcagatggaattacactagaggccctccgctgggaagcacttgaggtagggcaggaggggggctgtgacccctgccctttccccgccagagacctcaggctctcagcacattccacaggctcctgagtccccgaggcctgggccagcttgggcaagccaagatcagatgtctctgtgttcgggaaggtctccgtgtgggaaagcccttgggggatcctgggtgaggagtgttgccccatccagagaatgaatgagttcctttaagtgccaccgccagcaagcccagaggcacacagtccgagtgcacccacttagcctttacattcctctccaccgacaaaaggaaggggaaactcaatcagcaggacttcagaaagggccttgtgtttatagctttgtcaagtaaatttggacgcagctggagcacaggccctgtttgtttgcacataataatcttgtttatcactttaaaaaattcagtaatatctcagcagtcaggcttctggttgtgaaatcacattgtatgggatttataccaaattatgtatttgctaaacattcactgcacacgtgtacagcggagtacgaaaaggaacgttgtccacaggggatttatggatacaacagcaaacattttataaactatgcacatgcattacacacatgcacacacatatgcacacacatgtgcaaacatagccacttttttgtcaagagttaccctttggggctccttaaaccagaatgggagtttgaaagagagatcatactccagctgaagtttgttgacccttttctaaaattaaaaagatcaaatttagtatttgctggatatgcagggagatgagactcttttaatctcaaaataaacagattctttcaagaaaaaaaaaaaaaaaaaa

SEQ ID NO: 26265 - DNA, 2265 bp, Homo Sapiens
gtacgacatggcgcgcgagctgcgggcgctgctgctgtggggccgccgcctgcggcctttgctgcgggcgccggcgctggcggccgtgccgggaggaaaaccaattctgtgtcctcggaggaccacagcccagttgggccccaggcgaaacccagcctggagcttgcaggcaggacgactgttcagcacgcagaccgccgaggacaaggaggaacccctgcactcgattatcagcagcacagagagcgtgcagggttccacttccaaacatgagttccaggccgagacaaagaagcttttggacattgttgcccggtccctgtactcagaaaaagaggtgtttatacgggagctgatctccaatgccagcgatgccttggaaaaactgcgtcacaaactggtgtctgacggccaagcactgccagaaatggagattcacttgcagaccaatgccgagaaaggcaccatcaccatccaggatactggtatcgggatgacacaggaagagctggtgtccaacctggggacgattgccagatcggggtcaaaggccttcctggatgctctgcagaaccaggctgaggccagcagcaagatcatcggccagtttggagtgggtttctactcagctttcatggtggctgacagagtggaggtctattcccgctcggcagccccggggagcctgggttaccagtggctttcagatggttctggagtgtttgaaatcgccgaagcttcgggagttagaaccgggacaaaaatcatcatccacctgaaatccgactgcaaggagttttccagcgaggcccgggtgcgagatgtggtaacgaagtacagcaacttcgtcagcttccccttgtacttgaatggaaggcggatgaacaccttgcaggccatctggatgatggaccccaaggatgtccgtgagtggcaacatgaggagttctaccgctacgtcgcgcaggctcacgacaagccccgctacaccctgcactataagacggacgcaccgctcaacatccgcagcatcttctacgtgcccgacatgaaaccgtccatgtttgatgtgagccgggagctgggctccagcgttgcactgtacagccgcaaagtcctcatccagaccaaggccacggacatcctgcccaagtggctgcgcttcatccgaggtgtggtggacagtgaggacattcccctgaacctcagccgggagctgctgcaggagagcgcactcatcaggaaactccgggacgttttacagcagaggctgatcaaattcttcattgaccagagtaaaaaagatgctgagaagtatgcaaagttttttgaagattacggcctgttcatgcgggagggcattgtgaccgccaccgagcaggaggtcaaggaggacatagcaaagctgctgcgctacgagtcctcggcgctgccctccgggcagctaaccagcctctcagaatacgccagccgcatgcgggccggcacccgcaacatctactacctgtgcgcccccaaccgtcacctggcagagcactcaccctactatgaggccatgaagaagaaagacacagaggttctcttctgctttgagcagtttgatgagctcaccctgctgcaccttcgtgagtttgacaagaagaagctgatctctgtggagacggacatagtcgtggatcactacaaggaggagaagtttgaggacaggtccccagccgccgagtgcctatcagagaaggagacggaggagctcatggcctggatgagaaatgtgctggggtcgcgtgtcaccaacgtgaaggtgaccctccgactggacacccaccctgccatggtcaccgtgctggagatgggggctgcccgccacttcctgcgcatgcagcagctggccaagacccaggaggagcgcgcacagctcctgcagcccacgctggagatcaaccccaggcacgcgctcatcaagaagctgaatcagctgcgcgcaagcgagcctggcctggctcagctgctggtggatcagatatacgagaacgccatgattgctgctggacttgttgacgaccctagggccatggtgggccgcttgaatgagctgcttgtcaaggccctggagcgacactgacagccagggggccagaaggactgacaccacagatgacagccccacctccttgagctttatttacctaaatttaaaggtatttcttaaaaaaaaaaaaaaaaaaaaaaaaaaaaaaaaaaaaaaaaaaaaaaaaaaaaaaaaaa

SEQ ID NO: 26266 - DNA, 2438 bp, Homo Sapiens
caccaagcgcagccgccgctgccgcactttccacttgtattgatcacctctcagccccgcgcagccggctcgcccgagcggaccgcggccagcgcgccagcccttggcagccccggagcagtcgggctccgggaggaaactccttgggagcgccctgtccggggtgccctctgcgctctgcagtgtctttctttctgcctgggaggaggaggaggaggaggaagaggaggaggaggaggaggaggaggaggaagaggaggaggaggaggaggacgtctggtcccggctgggaggtggagcagcggcagcagcagcagccgccgccgccgccgccgctgccgccgccgccggaaagggagaggcaggagagcccgagacttggaaaccccaaagtgtccgcgaccctgcacggcaggctcccttccagcttcatgggcaaagtgtggaaacagcagatgtaccctcagtacgccacctactattacccccagtatctgcaagccaagcagtctctggtcccagcccaccccatggcccctcccagtcccagcaccaccagcagtaataacaacagtagcagcagtagcaactcaggatgggatcagctcagcaaaacgaacctctatatccgaggactgcctccccacaccaccgaccaggacctggtgaagctctgtcaaccatatgggaaaatagtctccacaaaggcaattttggataagacaacgaacaaatgcaaaggttatggttttgtcgactttgacagccctgcagcagctcaaaaagctgtgtctgccctgaaggccagtggggttcaagctcaaatggcaaagcaacaggaacaagatcctaccaacctctacatttctaatttgccactctccatggatgagcaagaactagaaaatatgctcaaaccatttggacaagttatttctacaaggatactacgtgattccagtggtacaagtcgtggtgttggctttgctaggatggaatcaacagaaaaatgtgaagctgttattggtcattttaatggaaaatttattaagacaccaccaggagtttctgcccccacagaacctttattgtgtaagtttgctgatggaggacagaaaaagagacagaacccaaacaaatacatccctaatggaagaccatggcatagagaaggagaggtgagacttgctggaatgacacttacttacgacccaactacagctgctatacagaacggattttatccttcaccatacagtattgctacaaaccgaatgatcactcaaacttctattacaccctatattgcatctcctgtatctgcctaccaggtgcaaagtccttcgtggatgcaacctcaaccatatattctacagcaccctggtgccgtgttaactccctcaatggagcacaccatgtcactacagcccgcatcaatgatcagccctctggcccagcagatgagtcatctgtcactaggcagcaccggaacatacatgcctgcaacgtcagctatgcaaggagcctacttgccacagtatgcacatatgcagacgacagcggttcctgttgaggaggcaagtggtcaacagcaggtggctgtcgagacgtctaatgaccattctccatatacctttcaacctaataagtaactgtgagatgtacagaaaggtgttcttacatgaagaagggtgtgaaggctgaacaatcatggatttttctgatcaattgtgctttaggaaattattgacagttttgcacaggttcttgaaaacgttatttataatgaaatcaactaaaactatttttgctataagttctataaggtgcataaaacccttaaattcatctagtagctgttcccccgaacaggtttattttagtaaaaaaaaaaaaacaaaaaacaaaaacaaaagatttttatcaaatgttatgatgcaaaaaaagaaaaagaaaaaaaaaaagaaaagaaaacttcaattttctgggtatgcacaaagaccatgaagacttatccaagtgcatgaccggatttttgtggttttgttcattttgtgtttaatttgtgttttttttttccagctgtatgaaatgggctttctgaagtttaaatagtccgacttcacccatggtgttctgtgcttgcagtgcgagtgttgctgtaattcagtgttgccgtcagtgtctcttttcttagctttctgtctttctttcaacgtagtgtgaagtgtcttatccttttctatgaattccaatttgccttaactcttttgatgctgtagctgtttcagtaaaagttagttcaaactaatgatgtagaatgctttgaccaaatgagctggtctattatgccttgtaaaacagcagcatagggcttttaaaaggtagtcaataaaagttgctgaaattttggcttttttaaaaaaaaaaaaaaaaaa

SEQ ID NO: 26267 - DNA, 1759 bp, Homo Sapiens
ctcaggcctgacggtccgagtggagctgcgggacagcccgaacctccaggtcagccccgcggccctccatggcgctggtgcgcgcactcgtctgctgcctgctgactgcctggcactgccgctccggcctcgggctgcccgtggcgcccgcaggcggcaggaatcctcctccggcgataggacagttttggcatgtgactgacttacacttagaccctacttaccacatcacagatgaccacacaaaagtgtgtgcttcatctaaaggtgcaaatgcctccaaccctggcccttttggagatgttctgtgtgattctccatatcaacttattttgtcagcatttgattttattaaaaattctggacaagaagcatctttcatgatatggacaggggatagcccacctcatgttcctgtacctgaactctcaacagacactgttataaatgtgatcactaatatgacaaccaccatccagagtctctttccaaatctccaggttttccctgcgctgggtaatcatgactattggccacaggatcaactgcctgtagtcaccagtaaagtgtacaatgcagtagcaaacctctggaaaccatggctagatgaagaagctattagtactttaaggaaaggtggtttttattcacagaaagttacaactaatccaaaccttaggatcatcagtctaaacacaaacttgtactacggcccaaatataatgacactgaacaagactgacccagccaaccagtttgaatggctagaaagtacattgaacaactctcagcagaataaggagaaggtgtatatcatagcacatgttccagtggggtatctgccatcttcacagaacatcacagcaatgagagaatactataatgagaaattgatagatatttttcaaaaatacagtgatgtcattgcaggacaattttatggacacactcacagagacagcattatggttctttcagataaaaaaggaagtccagtaaattctttgtttgtggctcctgctgttacaccagtgaagagtgttttagaaaaacagaccaacaatcctggtatcagactgtttcagtatgatcctcgtgattataaattattggatatgttgcagtattacttgaatctgacagaggcgaatctaaagggagagtccatctggaagctggagtatatcctgacccagacctacgacattgaagatttgcagccggaaagtttatatggattagctaaacaatttacaatcctagacagtaagcagtttataaaatactacaattacttctttgtgagttatgacagcagtgtaacatgtgataagacatgtaaggcctttcagatttgtgcaattatgaatcttgataatatttcctatgcagattgcctcaaacagctttatataaagcacaattactagtatttcacagtttttgctaatagaaaatgctgattctgattctgagatcaatttgtgggaattttacataaatctttgttaattactgagtgggcaagtagacttcctgtctttgctttcttttttttttctttttgatgccttaatgtagatatctttatcattctgaattgtattatatatttaaagtgctcattaatagaatgatggatgtaaattggatgtaaatattcagtttatataattatatctaatttgtacccttgttgaaattgtcatttatacaataaagcgaattctttatctctaaaaaaaaaaaaaaaaaaaaa

SEQ ID NO: 26268 - DNA, 1850 bp, Homo Sapiens
tttgtgtctcttgtgaacccacttgtggagcgagagggaatttgggagggccaggggttagtctggcctctgtcttagctgtcattttggcggtttttttttttttttcttcaggggatttcagtctccacatagttttggagccggacttttgaagaatgattcgtgaatccggaatgggtgacagcgtcatcacggcattttattgacagaccatggattcttacagtgcaccagagtcaactcctagtgcatcctcaagacctgaagattactttataggtgccactcctctgcagaaacgattagaatcggtcaggaagcagagttcatttatcctgactccacctcgaaggaaaattccccagtgttcgcagttgcaggaagatgttgaccctcaaaaggttgcattccttctgcataaacagtggactttatatagtttaactcccttatataaattctcctatagtaatctcaaagagtattctagacttctcaatgcttttattgttgctgaaaagcaaaaaggacttgctgtggaagtgggagaagacttcaacatcaaagtgattttttctactctcctaggaatgaaaggaacacaaagggacccggaagcatttcttgtccagattgtgtcaaaatctcaattgccatctgagaatagagaaggtaaagtgctgtggactggctggttctgctgtgtatttggagacagtcttctggagactgtttcagaagatttcacctgtctgcccttattccttgcaaatggagcagagtctaacacagcaataattggaacttggtttcagaaaacctttgactgttatttcagtcctttagcaatcaatgcatttaatctttcctggatggctgccatgtggactgcatgcaaaatggaccattatgtggctactactgaatttctttggtctgtaccctgtagccctcaaagtctggacatttctttcgcaatacatccagaggatgcaaaagctctatgggacagtgtccacaaaacacctggggaggttacccaggaagaagttgacctattcatggattgcctttattcacatttccatagacatttcaaaattcatttatcagccacaagattagttcgtgtttcaacatctgtagcttcagcacatactgatggaaaaataaagattctgtgtcataaataccttattggagtgttagcatatttgacagaactggcaatttttcaaattgagtgaagccttatgtggactataagttatagattatatactcttattgataacttgcctaattgctatgctgaaagagactgcaggagaaataggcatctatctctgcatctgttttccccaccatgcctttggagttgccaagatggaagccaagaaggatctagaagaacaaagaatatggtagtagatgagccacagccaggtgcccatgtactaatcatgataacctgacatgccattctcaaaatgctgagttgttaatttcttgtcatctttaaatatatatatataggctgggcttggtggctcacacctgtaattccagcactttgggaggctgaggtgggtggatcatttgaggccaggaattcaagaccagcctggccaacatggtgaaaccccttctctactgaaaatacaataattagctgggcgtggtggcacatgcctgtgatcccagctactggggaggctgaggcaggagaatcgttttaacccagaagacaggctgcagtgagccaagactgcaccactgcactccagcctgggcaacaaagtgagactctgcctcaaaaaataaaaaaaaaaaaaaaaaaaaaaaaa

SEQ ID NO: 26269 - DNA, 2461 bp, Homo Sapiens
cctgaagctgccgggtctgctacggcaccgcggggctgcagaaacccgggggccaagggcgggctgcttgccgctatggctggcagtcaggacatattcgatgccatcgtgatggcggatgagaggtttcatggggaagggtatcgggaaggctatgaagaaggcagtagtttgggtgtgatggagggaaggcagcatggcacgctgcatggagccaaaatcgggtctgagatcgggtgctaccaaggttttgcttttgcatggaaatgtctactgcacagttgcaccactgagaaggacagcagaaagatgaaggtcttagaatcattgattggaatgatccagaaattcccttatgatgaccctacttacgataaactccatgaagacttagacaagatcagaggaaaatttaaacagttttgttcgttactcaatgttcagccagactttaaaattagtgcagaaggttccggactttcattttgaggaggatggatgaacagagaccgaacgtcgaggaacagatgtgtgtgtgacgtgtttagaaatgcggtgaagggccagacggtgctgggaaggcagttgttcattgggagggtgagggttccggttcggccgtgggagggcttccttccctggggttttctgcctgtgtcaccttggtgcccgtcttggggcctctccacacatgccctttgttgggctgaagccgtccctggcagagccctcgtgcattgacttgacagcctctccggcagcacaggcctagctggttctgggttggagttggctctggatagggttagtcaccaggcctggactgaaggcagttatttttattattattattatttgcaatgagagagatggttggccccgaatgaggctcatgggaggtttggacgggtgctgtgccgcatgtcgaggccgattgtgtgccaggcggtgcgggacgtgcctcccgtgtgttatttaatcccttcaggagcccacaagatgggtgttattctcattttacagaggagggaggggagacgcgaagggattgcctggtctaagggcacccagcagcagagctaggacttccgccctaaggctgtgcctcactgccaccaggcacagccgcctccggaatgcacaggcgagtccctgccctccctcccaggccgcacaggtcctgccaagcctcacggagcacgggggagtctgtggtggccagtttacctgggcatctggctgagaggaagaaaggccaacctgatcctgaggggacccagacatatcctttgcactgtccctagaggggcgatgagctttgcagcattaaaaaatggtgaaggggggaaatattttgaaccaaagaccaaatgttaggccgccgttatatttgcagaagctttgagaaccatgcgtatagcctcctgcattctcccctctcctaggagctcttttgtctctgtccttacgaggcgtcatacagaggcagtggggtgggcacagatgagcagagtggatggttcggtgggtccccacgaggcgagtggtggtcatatgtgatggcacgtgttcacacaccctcctgtgtacccccccagggtcaccgaagtccccacacgctggctctccacacccctcctgttccagaaagcatgtccgaaagcagtccaggagattattaaggggtcgccatgaatccactttggttttaaaaccattcccgaatgtcctagtggattgtgttgtgctgcctaagctgccggctgcaggagccagagaagtgacccccgcgggagcagcggcaggtggatctccacggtggctcgctttgtttttgttttgttttttcttttaagacggagtctcactctgtcgccgagtttggagtgtattggcgcgatctcggctcactgtaacctccgcctcctgaattcaagtgattctcctgcctcagcctccctagtagctgggattataggcgccccccaccacgcccaagtaacttttgtatttttagtagagatggggttttgccttgttggccaggctggtcttgaactcccagcctgaaatgatccacccacgtccacctaccaaagtgctggaattgcaggcatgagccaccactcccggcctgctttttgtttttgaagacaggacttaggtctcctcctcccgaactctaaacctgcgtgtgtggctgtgcaccgctcgtttgtagcgtcacctcaggtctggggaagtctgtgctggcatctcctcattgtgccttcatcagagctggtgccttcgggccagaaagactctcgttctttctagatggtgggatcaggggcctttgctgtgtttcccttggtggatttttgtgttttgtaagttgtctattttgataatgtattatttttataactgtaaaaaaagtaaatagcatattttaaagtgaaaaaaaaaaaaaaaaaaa

SEQ ID NO: 26270 - DNA, 2553 bp, Homo Sapiens
ggcacgagggcgcggcgggcgggacctggccgagctggagggcgccggggagcggggctcgggcggtccccgaggcccggcggagcgggcttctggggtgtctgcggcggcgccgggggaacgggctggggatggggcgcctagccgggcggtggccggggcctcggccatgttcgcggggctgcaggacctgggcgtggccaacggcgaggacctgaaggagaccctgaccaactgcacggagccgctcaaggccatcgagcagttccagacagagaatggtgtgctgctgccatctcttcagtcagccctccccttcttggacctgcacgggacgccgcggctggagttccaccagtcggtattcgatgagctgcgggacaagctgctggagcgagtgtcagccatcgcttcggaggggaaggctgaggaaaggtacaagaagctggaagaccttctggagaagagcttttctctggtgaagatgccgtccctgcagcccgtggtgatgtgcgtcatgaagcacctgcccaaggttccggagaaaaaactgaagctggttatggctgacaaggagctgtatcgagcctgcgccgtggaggtgaagcggcagatctggcaagacaaccaggccctcttcggggacgaggtttccccactcctgaagcagtacatcctggagaaggagagcgctctcttcagtacagagctctctgtcctgcacaactttttcagtccttcccccaagaccaggcgccagggcgaggtggtgcagcggctgacgcggatggtggggaagaacgtgaagctgtacgacatggtgctgcagtttctgcgcacgctcttcctgcgcacgcggaatgtgcactactgcacgctgcgggctgagctgctcatgtccctgcacgacctggacgtgggtgaaatctgcaccgtggacccgtgccacaagttcacctggtgcctggacgcctgcatccgagagcggttcgtggacagcaagagggcgcgggagctgcaggggtttctcgatggcgtcaagaagggccaggagcaggtgctgggggacctgtccatgatcctgtgtgaccccttcgccatcaacacgctggcactgagcacagtcaggcacctgcaggagctggtcggccaggagacactgcccagggacagccccgacctcctgctgctgctccggctgctggcgctgggccagggagcctgggacatgatcgacagccaggtcttcaaggagcccaagatggaggtagagctcatcaccaggttcctcccgatgctcatgtccttcctggtggatgactacactttcaatgtggatcagaaacttccggctgaggagaaagccccagtctcatatccaaacacacttcccgaaagcttcactaagtttctgcaggagcagcgcatggcctgcgaggtggggctgtactacgtcctgcacatcaccaagcagaggaacaagaacgcgctcctccgcctgctgcccgggctggtggagacctttggcgacttggcctttggcgacatcttcctccacctgctcacgggcaaccttgcgctgctggccgacgaatttgcccttgaggacttctgcagcagcctcttcgatggcttcttcctcaccgcctctccaaggaaggagaacgtgcaccggcacgcgctgcggctcctcattcacctgcaccccagggtggccccatctaagctggaggcgttgcagaaggccctggagcctacaggccagagcggagaggcagtgaaggagctttactcccagctcggcgagaagctggaacagctggatcaccggaagcccagcccggcacaggctgcggagacgccggccctggagctgcccctccccagcgtgcccgcccctgccccgctctgagggccctccagacctgctcgggtgctggggccatgccgagtcgcggccctgctcagccggaagaggctcccggacctggatgtacagggcagtctctcttcccggggctatggctgggcctgtcctgccgtcatggccccctgcttcctgctccttggagctggctcccggaccttgcccaccatccatgcagtggctcccagggcagagcctctccttgtactttggcagccatagaaagcgtgctcattttctgttttcctgtgttaggaaaaaaccacctgttttccaaggggagagggcggggcctgagggtgggggcggggcctcttcattggcccagcttggcgaaagcgaggcacactgcttactgccttggggttgtggagatggacccgtgacctcgtggaggccgtgtgggggcagcagcctggcctgtgccatggtgggtgtcctggggcctgtgcggagggagccacctcaccctgcagcccaggttgcaggtgtggccttgtttctccttgcccagcagtgctgccttcagcggccgtgacggggccagctggacacacggtgagattttctcgtatgtaaataaaaggcaatttggtaaaaaaaaaaaaaaaaaaaaaaaaaaaaaa

SEQ ID NO: 26271 - DNA, 1642 bp, Homo Sapiens
ctctccccggcccgatccgcccgccggctccccctcccccgatccctcgggtcccgggatgggggggcggtgaggcaggcacagccccccgcccccatggccgcccgtcggagccagaggcggagggggcgccggggggagccgggcaccgccctgctggtcccgctcgcgctgggcctgggcctggcgctggcctgcctcggcctcctgctggccgtggtcagtttggggagccgggcatcgctgtccgcccaggagcctgcccaggaggagctggtggcagaggaggaccaggacccgtcggaactgaatccccagacagaagaaagccaggatcctgcgcctttcctgaaccgactagttcggcctcgcagaagtgcacctaaaggccggaaaacacgggctcgaagagcgatcgcagcccattatgaagttcatccacgacctggacaggacggagcgcaggcagatggaggttacacaacttgtctgaggccatgagatactaagtggtggagccaagatttgaacccagctagaatgtgcctgtgtactggacatggtctgcatgaaaggcgaggtggctggtgcaggggtgaggggtccatgcaggggccacatccaaaaaggggagagggaagtttccagaaagaagagaggacacatctcccaccattaccagagggtcaaaggagaacaagagaccaggtgtggacgggacagtgagtggctgggaggaagccagaatcaacagctccagccctctgcgctacaaccgccagatcggggagtttatagtcacccgggctgggctctactacctgtactgtcaggtgcactttgatgaggggaaggctgtctacctgaagctggacttgctggtggatggtgtgctggccctgcgctgcctggaggaattctcagccactgcggcgagttccctcgggccccagctccgcctctgccaggtgtctgggctgttggccctgcggccagggtcctccctgcggatccgcaccctcccctgggcccatctcaaggctgcccccttcctcacctacttcggactcttccaggttcactgaggggccctggtctccccgcagtcgtcccaggctgccggctcccctcgacagctctctgggcacccggtcccctctgccccaccctcagccgctctttgctccagacctgcccctccctctagaggctgcctgggcctgttcacgtgttttccatcccacataaatacagtattcccactcttatcttacaactcccccaccgcccactctccacctcactagctccccaatccctgaccctttgaggcccccagtgatctcgactcccccctggccacagacccccagggcattgtgttcactgtactctgtgggcaaggatgggtccagaagaccccacttcaggcactaagaggggctggacctggcggcaggaagccaaagagactgggcctaggccaggagttcccaaatgtgaggggcgagaaacaagacaagctcctcccttgagaattccctgtggatttttaaaacagatattatttttattattattgtgacaaaatgttgataaatggatattaaatagaataagtcataaaaaaaaaaaaaaaaaa

SEQ ID NO: 26272 - DNA, 1370 bp, Homo Sapiens
ccagcaatgtctccaccactgctgctgctacccttgctgctgctgctgcctctgctgaatgtggagcctgctggggccacactgatccggatccctcttcgtcaagtccaccctggacgcaggaccctgaacctactgaggggatggggaaaaccagcagagctccccaagttgggggccccatcccctggggacaagcctgcctcggtacctctctccaaattcctggatgcccagtattttggggaaattgggctgggaacgcctccacaaaacttcactgttgcctttgacactggctcctccaatctctgggtcccgtccaggagatgccacttcttcagtgtgccctgctggttccaccaccgcttcaatcccaatgcctccagctccttcaagcccagtgggaccaagtttgccattcagtatggaactgggcgggtagatggaatcctgagtgaggacaagctgactattggtggaatcaagggtgcatccgtgattttcggggaagctctgtgggaatccagcctggtcttcactgtttcccgccccgatgggatattgggcctcggttttcccattctgtctgtggaaggagttcggcccccgctggatgtactggtggagcaggggctattggataagcctgtcttctccttttacttcaacagggaccctgaagtggctgatggaggagagctggtcctggggggctcagacccggcacactacatcccacccctcaccttcgtgccagtcacagtccccgcctactggcagatccacatggagcgtgtgaaggtgggctcacggctgactctctgtgcccagggctgtgctgccatcctggatacaggcacacctgtcatcgtaggacccactgaggagatccgggccctgcatgcagccattgggggaatccccttgctggctggggagtacatcatccggtgctcagaaatcccaaagctccccgcagtctcactcctcattgggggggtctggtttaatctcacggcccaggattacgtcatccagtttgctcagggtgacgtccgcctctgcttgtccggcttccgggccttggacatcgcttcgcctccagtacctgtgtggatcctcggcgacgttttcttgggggcgtatgtgaccgtcttcgaccgcggggacatgaagagcggcgcacgagtgggactggcgcgcgctcgccctcgcggagcggacctgggaaggcgcgagaccgcgcaggcgcagtaccgcgggtgccgcccaggtgatgcgcatgcgcaccgggtagcagagctagcgctactcagtaaaaatccaatatttccattgaaaaaaaaaaaaaaaaaaaaaaaaaaaaa

SEQ ID NO: 26273 - DNA, 1855 bp, Homo Sapiens
gccttgcggcctgcgggggaggctgcccggaggaggcagcggcggcggcagcgcgtcctcggtccccaggaccacggcttctttcctgccagatctatccatctggccatccatccgtgggggtctgcaatggccacctttagccgccaggaatttttccagcagctactgcaaggctgtctcctgcctactgcccagcagggccttgaccagatctggctgctccttgccatctgcctcgcctgccgcctcctctggaggctcgggttgccatcctacctgaagcatgcaagcaccgtggcaggcgggttcttcagcctctaccacttcttccagctgcacatggtttgggtcgtgctgctcagcctcctgtgctacctcgtgctgttcctctgccgacattcctcccatcgaggcgtcttcctatccgtcaccatcctcatctacctactcatgggtgagatgcacatggtagacaccgtgacatggcacaagatgcgaggggcacagatgattgtggccatgaaggcagtgtctctgggcttcgacctggaccggggcgaggtgggtacggtgccctcgccagtggagttcatgggctacctctacttcgtgggcaccatcgtcttcgggccctggatatccttccacagctacctacaagctgtccaaggccgcccactgagctgccggtggctgcagaaggtggcccggagcctggcactggccctgctgtgccttgtgctgtccacttgcgtgggcccctacctcttcccgtacttcatccccctcaacggtgaccgcctccttcgcaacaagaaacgcaaagccaggtggctgcgagcctacgagagtgctgtctccttccacttcagcaactattttgtgggctttctttccgaggccacggccacgttggcgggggctggctttaccgaggagaaggatcacctggaatgggacctgacggtgtccaagccactgaatgtggagctgcctcggtcaatggtggaagttgtcacaagctggaacctgcccatgtcttattggctaaataactatgttttcaagaatgctctccgcctggggaccttctcggctgtgctggtcacctatgcagccagcgccctcctacatggcttcagtttccacctggctgcggtcctgctgtccctggcttttatcacttacgtggagcatgtcctccggaagcgcctggctcggatcctcagtgcctgtgtcttgtcaaagcggtgcccgccagactgttcgcaccagcatcgcttgggcctgggggtgcgagccttaaacttgctctttggagctctggccatcttccacctggcctacctgggctccctgtttgatgtcgatgtggatgacaccacagaggagcagggctacggcatggcatacactgtccacaagtggtcagagctcagctgggccagtcactgggtcacttttggatgctggatcttctaccgtctcataggctgaggcacatctgtggaccctcataaccctcttaagacccctctcagggtgccactgatgggggatgagggaaggccctctctctactccttgaccccctccatccttgacccccaacacctcaacacacacacacacacacacacacaaaatcacaccattttcatgcctgtcaatccccaccccaccacaaggcaggaagggggtggtgcctgctggggcctagagggggatgcttggggaaacagagaaggggagatccagggcctccccgccttccttcttcctttttatatacaatttgttattgtcaaataaaagtaggaaatattcaaaaaaaaaaaaaaaaaaaaaaaaa

SEQ ID NO: 26274 - DNA, 3798 bp, Homo Sapiens
aaagaactcagcagagtcgaccagaggcatcgcgccagccagctccgaaagcagaagaaggaggcggttctggcagagaagagacagctgggtggcaaggatggccctcctcatcaggtactggtggtgcccctgcacagcagaatttccctgccagaggccatgcagctgcttcaagatagggacactggaacagtacacttgaatgaattgggaaacacccagaactttatgctgctgtgcccccgcttgaaacatcggtggtttttcacctcagcaaggccaggggatctgcacgtcgtgttagacatggctaaagtagctgataccatcctgttcctccttgatccactagaaggctgggacagcaccggtgattactgtctttcctgcctctttgctcagggccttccgacctatacactagctgtccaggggatttctggcctcccactgaagaaacaaatagataccaggaagaagctaagtaaagcagtggagaagcgctttccgcatgacaaactcctcttgttagacactcaacaggaggcagggatgctgcttaggcagttggctaaccagaagcaacagcatcttgcttttcgagatcggcgggcctacctatttgcccatgctgttgattttgttcctagtgaagagaataacttggtgggcaccttgaaaatttcaggctatgttcgagggcagactctgaatgtcaataggttgctgcatatcgttggatatggtgatttccagatgaaacagatagatgcccccggagaccctttccctttaaatcctagaggaattaaaccccaaaaggacccagacatggcaatggagatttgtgctacggatgctgtagatgatatggaagaaggtcttaaagtcctaatgaaggcagaccctggtagacaggaatccttgcaagcagaggttatcccagatccaatggagggagagcaaacctggcccactgaggaggagctgagcgaggcaaaggatttcttgaaggaaggttctaaggtggtaaagaaggtccccaaaggaacatccagttaccaagctgaatggattttggatggtggcagccaaagtggtggggaaggagatgaatatgaatatgatgatatggaacatgaggattttatggaggaggaatctcaggatgagagtagtgaagaagaggaagaatatgaaactatgactattggggagtctgtgcatgatgatctgtatgataagaaagtagatgaagaagctgaggcaaaaatgttggagaaatataaacaagaaagactggaagagatgtttccagatgaagtggacacgccccgtgatgtggctgctcgaattcgatttcagaaatacagaggccttaagagcttccggacatctccatgggatcctaaggaaaaccttcctcaagattatgctcgaatatttcagtttcagaactttactaacactaggaaaagcatctttaaagaggttgaagaaaaagaggttgaaggagctgaggttggctggtatgtcacacttcatgtctctgaagtccccgtctcagtggtcgagtgcttcaggcaaggaacacccttgattgcattttctttactacctcatgaacagaagatgtcagtattgaatatggtggtgaggcgtgaccctggcaacactgaacctgtgaaagccaaggaagagctcatatttcactgtggattcaggcgcttccgagcctcacctttattctctcagcacactgcagcggacaaacataaattgcagagattcctgactgctgacatggccctggtggcgacagtctatgcgccaatcacttttcctcctgcatctgtgctgcttttcaagcaaaaaagcaatggaatgcacagcctcattgctacaggccatcttatgtcagtagatccagacagaatggtcatcaagagagttgttctgagtggtcatcctttcaaaatttttactaagatggcagtagtacgttacatgttcttcaacagagaggatgtgctgtggtttaaaccagtggaactgagaacgaagtggggccggagaggacatatcaaggaacctttaggtacccatggccacatgaaatgcagctttgatgggaagctaaaatctcaagacacagtactgatgaacctgtataaacgagtcttccccaaatggacttatgatccatatgtaccagaaccagtaccctggctgaaaagtgagatttcttcaacagtgcctcaagggggcatggagtaatggattcaaagagattctgtcttaccggtgccagtcagtactccagggatgggaggcacaagttgtgattgggcaaagtttattttctatgtcagcctgtcagtccactgccccattttgcaagacttttttttagccttgacaaaatgtctcagttaagtataaaagtttttccactacttagtccaaaaaaaactattaaatcttaatgaaatagccactctccattaagaatctgataactaagagttgacaatactaggaaacaaaatgtcttcagtatctaaagacactgaattcccaccatttccttttctgtaaattaaacagaaacagactgataagaagctggcctttcagcctgcttcacccaagttatggaggaggttaagtctacatttccaccactgagcacaatacaaatgttctttacttctggggaaacagtttgaaaatgttgagacagcacagcagccactccaacaccagctgtaggttcaatgagtagtttcatcctctcccacaccagctgggttgcacactgttgatatggaagggagtaggaattagtgaaaggggagtctagttggtttacctataaagttcagatgagaatacgtgtccagtttgaattttcttatcactgtgtacacacgcttcccaaagcttttctttaattctgactctgcttctgtcaagagggttgtcattaatacatctagggtaccctcccatgtcatgaagttacctagtcaggttcccgtgggtcacttgctactcctaagggaagtttcttctgcctaagaagttacaccatgctttgctatttcttttcttgctggagcctcaccttaatttcatcctctgtgacagtgaagatatcatccacaaggtccctgataataggccaggtgttcaagccaatgctggatttgacaccatctgctatggtttctggaggataaagattgggcatcagtttccccttcagcttggactggtagcagtcatctgcatttgagggttcagcagcatataccttcacactaggtttcagagcctgggaagaggaatattaagacatcttaacaacaaaccacaacattgcctgcatgtctaaaagaaaatatgggcctggtgtggtggctcacacctgtaatcccaacactttgggagcccgaggcgggtggatcagctgaggtcaggagttcaagaccagcctggccaacctggtgaaatgcagtgtcaactaaaaataggaaaatcagccaggcgtggtggcagacccctgtaatcccagctactcaagaggctgaggtaggagaatcacttgaacttgggaggggtaggttgcagtgagctgagatcacaccaaaatggggtggggcgcagtggctcacgcctgtaatcccagcactttgggaggccgaggtgggcggatcacgaggtagggagatcaagaccatcctggctaacacggtgaaaccccgtctctactaaaaaaaaaaaaaaaaaaaa

SEQ ID NO: 26275 - DNA, 1218 bp, Homo Sapiens
gagagcgagagagagagcgagagcagaagaaattcctaaaagtcgatttatttttgtacaaaataataaaaaaaaaaacccaccacaaacgtagaatccacttctgttccccaaaaagcgagaaggggggttcaggaggaagccatcgcaggggacctgggagacgccccgaggtgtttgtgcttcacccccagacgtcagcctcgaaggcaggactgtggggtgttcgtgctgtgttccccccgctccccctttctgtccccttttttggttctgacgtgaagaggtcttagcgcccgcttctgtccacggggtctctccttcctcctccctagctcagggatgggccttccagccggagcaccccgatccccatccggcaccccccaatcccccaacacgcctgtccctcccgcatggccaccaaggagctggaccttggatgcgcctaccctgctgaggtgggtgacaggggccccccacctccagggccttagaaccaccgcccctctccccaccccaggcacccctctttttactcaaaggcactgactgtaatccagggggactgggacctgcctccccccaacctctggctcccacaaggcccggtgttgaccgagccacaggccacggacaggggccggggttggggagactatgtcgccagatgccaggacgccctcaccccgtttgcatatgcaatgctagcatgggaccccgaaaatagacgctctgctgcactgagacttcttgtcaatgcccaaccggcgggggggtgtctccctgcccccgacccccccatacccccttctctgtgacacacacatcttctcgtctctttttctttcattgttaaagggaagctttttaagaaggcaattttcatattgtttctacgggatggttttggttcccttcccttcccacccccccttaagcctgtcagccccctccaaatgtctcaggatcccccctctcccctggggctgggtgacagcaccccggctgcgttcacaccccagtgtcacagggcgagctgttctggagagaaaaccatctgtcgtggctgagcggggagcttgaacacccaggccagggacacccctccccagctcccagagaggccccctgaggggtgagccctctttccaccttcccctatccatgcaccccctcgcaataaaaccaactctaaaatcaaaaaaaaaaaaaaaa

SEQ ID NO: 26276 - DNA, 1079 bp, Homo Sapiens
ggcttaagaaaattattcaccactcataagtcatggagacatcctcaaaaggtctgcttacccaagttactcagttttggaacctcctagatgatctagctcagagtgaccctgagggctatgagaagtttattcagcagcagctgaaagaagggaaacagctctgtgctgccccagaaccacagctttgtctacagaccaggattctgaaaccaaaagaaaaaatactttttatcaacctgtgtcagtggacaaggatcccagctccccaatcaaccactcatccagtacctctaactgttggcaaaccagaagatacaactgagatatcagatgcttacacagtcattgatgttgcctacaatcctgatgttcttcatgcagcagaaaaggaccaagtgaaaaaaaatcagttaattcagatggccatgaaatgcattgaggagaaattccagttcaccctctcacactcttaccatattaccaaatttagaataaaaggaagcattcaaagaatgaaacaaaatctgatgggaatccaaactgattccatagatttaagagaaaaaatgagaagggaactaactcttggacagatacgaagcagtactatgagcaatccagatcactttcctcaactgttactgccaaaagaccaagtttcaggcaaagcagtgtgtctgatagaagagatttccagtactgaaatccaggtggagatgaagatgccagcctatgaactaaaaattgtgcatgatcacagtgagaaacctctgaaaattgagttgaaagttgaattacctggtattaattctgtctctctctgtgaccttagtgtttctgaggatgatttattgattgaagtatctgagaagtacagattacatctgaatcttccaaaacttattgatactgaaatgaccacagcaaaatttatcaaagaaaaatccacgctaatcatcacaatgcctttggtgtgaaagaagagcatcatatgttttgggttttcagtgctaaagtcatgtgaattaaaggaccttcattttggccaaaaaaaaaaaaaaaaaaaaaaaaaaaaa

SEQ ID NO: 26277 - DNA, 1311 bp, Homo Sapiens
gggggcgcggccggttactcgcttaccggaggcttcagtccccggcggcgcggcgacagctagggttcacggccactggggcagaggagccgcgagaagatgtgggtttttggttacgggtccctgatctggaaggtggatttcccctatcaggacaagctggtcggatacatcaccaactacagcaggcgcttctggcagggcagcacggaccaccgcggggtccccggcaagcctggaagagttgtgactcttgttgaagatcctgcgggatgtgtatggggtgttgcttacagattgccagtaggaaaggaagaagaagtaaaagcataccttgacttcagagaaaaaggaggctacagaaccacaacagtcattttttatccaaaagatcccacaacaaaaccattcagtgtattgctatatattggaacatgtgataatcctgattatcttggtcctgcacctctggaagacattgctgaacaaatttttaatgcagctggtccaagtggaagaaatacagaatatctttttgaacttgcaaattctattaggaaccttgtgccagaagaagcagatgagcatcttttcgctttggaaaaattagtaaaggaacgtttagaagggaaacagaacctcaattgcatataatttagtcttcagagaattaacttcagtgcacaatgacaatatgatttggaaatacgtttacttaaagatcttatttttaatgtagtgaggatattatttaaacttttattttaactggaaatgtcctgaaacacatatttaaaatattgggatacagtgaaagaaaaattcaaattttaataacataaagatttcctaactttatgttattgaacacttactcactagaagtgagttctttagaaaaatacagtgaaggactcagttcagtcttgtttttatcagagtgataatcatcctgtttcacatcccaatactattttgaaattctaaacaattaaaccaaaattccaataaatataaggttatgccttcaatatattcctatacaattctgtaaccatggtttaaaatacacaagcttaaaataacatgcttagaaatacacaataatatgaacagtatttcagccttaattgtgaatttccttgttattcaagtattaaatgaaatcttttgagtttttagccaaaaattggcatttttaaaatacgaaaatttccttggaattataatgtactgtacctcttcttttttaaataaaggcattttactatatggaaaactaaaaaaaaaaaaaaaaaaaaaaaaaaaaaa

SEQ ID NO: 26278 - DNA, 3100 bp, Homo Sapiens
ggtggatgcgtttgggttgtagctaggctttttcttttctttctcttttaaaacacatctagacaaggaaaaaacaagcctcggatctgatttttcactcctcgttcttgtgcttggttcttactgtgtttgtgtattttaaaggcgagaagacgaggggaacaaaaccagctggatccatccatcaccgtgggtggttttaatttttcgttttttctcgttatttttttttaaacaaccactcttcacaatgaacaaactgtatatcggaaacctcagcgagaacgccgccccctcggacctagaaagtatcttcaaggacgccaagatcccggtgtcgggacccttcctggtgaagactggctacgcgttcgtggactgcccggacgagagctgggccctcaaggccatcgaggcgctttcaggtaaaatagaactgcacgggaaacccatagaagttgagcactcggtcccaaaaaggcaaaggattcggaaacttcagatacgaaatatcccgcctcatttacagtgggaggaaatggggcagccttgaggtcagacttggaattatgtcctagctccactactttctcattgtgtgatctagttatgggatctctgaacagacagggacctgcggatgcggtgatgccgactgacggacgggacctgcggatgcagtgatgccgactgacggagggggacctgcggatgcggtgatgccgactgacggagggggacctgcggatgcggtgatgccggctgacggagggggacctgcggatgcggtgatgccgactgatggagggggacctggcgatgcggtgatgccgactgatggacgggacctgcggatgcggtgaagccgatgaacggggacctgcggatgtggtgatgctgactgacgtacagggacttggtgatgcggtgatgccgactgatgggtagggacctggtgatgcgttgatgccgactgacggacgggacctggtgttgcagtgaagccgactgacggacgggacctgctgatgtggtgaagctgactgacagacaggacctggtaatgcagtgaagccgactgacggacgggacctgctaatgtggtaaagccgactgacagatggggacctgcgggtggggtgatgctgactgacggatgggacctggtgatgcggtgataccaactgaaggacgggacctgcagatgcagtgatgctgactgacggatggggacctacggatgcagtgatgctgactgacggagagggacttgcagatgtggtgatgccgactgatggacagggacctgcggatgtggggatgccgactgacggacagggcctgctgatgtcgactgatggacgggacctgtgggtgtggggatgccgactgacagacgggcaagagcatgtcatctctatcccgactcctgctttctagtacccctctggtgccttctattggcagaaactaacaggtaacagctggcaaaggagagattagagtccatagtcctagacctggcatcacaaagctgagaagtacatttggaactgagagcttatttttctttgtttgccctaatgcctcatataccctgtcagtctgatggaactgagagctttaatatcaaggcaaacctctaaccttgaagtaagacaatctcctgccccaattctaggagtcatcttgtaagccagattctgtgaagtcactgaagaggtaacagaatctgggaccacagcagaaacgcttgtgacgtttggtgttttgtaagatctgtacctggagtgttacctttctgttactgttagatctttattatttatgttatctgtattccaccatatactactaaatgatcagaaggggattcctcaagttctctggaccgcatatcttacatgctgtgtcaagcagctttaaacagtttctaaccacttagttttagatgatgataaagcacttatgggtgggcactggattctgctaaatgtttatggcagatgaagatactgggagactaacttttttttttttttggagacagagtcttgctctgtcacccaggttggagtgcagtggcacaatctcggctcgctgcagcctctgcctcctgggttcaagtgattctcctgcttcagcctcctgagtggctgggactgcaggtgcgcgccaccatgcccggctggttttttgtatttttagtagagacggggtttcattgttggccgggatggtttcaatctcttgaccttgtgatctgcccgccttggcctcccacagtgctgggattacagactaactttctgaaggactcactgctagagaattaggtaggtttgttttctcccaaatatatggaatatagcaaagaaataagggaaaatggtggtttctcatccatcctgttttgcctgaggtacctgaagagtagactcagtgtgaccagactggaaggattcctccacagaaacagtcccagcagacaacgatgtggatgttcagatgccacaggggaagtgtacattagaaggaggatttgagagcccttccttaaatggataagggtagggctttgggagaaagccttagtggagtacttgacattaaacacctttagatattttttcttttgcctactcaatttctcaagtgggctccattttctaaatttaaggaatgtctttttgttgttgttttgtttttgagacggagtcttgctctttcatcgaggctggagtgcagtgatgcgacgacctcggctcactgcaacctccgcctcctgggttcaggcaattctcctgcctcagcctcctgagtagctgggattacaggtgcctgccaccacgcccggctgagttttgtatttttagtagagacagggctacaccatgttgaccaggctggtctcgaactcctgacctcaagtgatctgtacatctcagctactcaggaggttgagtcaggggaacctcttgaacccgggaggcggaggttgcagtgagccaagatcgcaccactgcactccagcctgggtgacaaagcaagactctgtctcaaaaaaaaaaaaaaaaaaaaaaaaaaaaaaaaaaaaaaa

SEQ ID NO: 26279 - DNA, 1758 bp, Homo Sapiens
cggtggtggccctcgcctgtggcccccgtgctgcttgcactcgaactcgtcgccatggaggagctccaggagcctctgagaggacagctccggctctgcttcacgcaagctgcccggactagcctcttactgctcaggctcaacgacgctgccctgcgggcgctgcaagagtgtcagcggcaacaggtacggccggtgattgctttccaaggccaccgagggtatctgagactcccaggccctggttggtcctgcctcttctccttcatagtgtcccagtgttgtcaggagggcgctggtggtagcttggaccttgtgtgccaacgcttcctcaggtctgggcctaacagcctccactgcctgggctcactcagggagcgcctcattatttgggcagccatggattctatcccagccccatcatcagttcagggacacaacctgactgaagatgccagacatcctgagagttggcagaacacaggaggctattctgaaggagatgcagtatcacagccacagatggcactagaggaggtgtcagtgtcagatccactggcaagcaaccaaggacagtcactcccaggatcctcaagggagcacatggcacagtgggaagtgagaagccagacccatgttccaaacagagaacctgttcaggcactgccttcctctgccagccggaaacgtctggacaagaaacgttcagtgcctgtagccactgtagaactggaagaaaagaggttcagaactctgcctttagtgccaagccccctacaaggcctgaccaatcaggatttacaagagggagaagattgggagcaagaagatgaggacatggaccccagattagaacacagttcctcagttcaagaagattctgaatccccaagtcctgaagatataccagactacctcctgcaatacagggccatccacagtgcagaacagcaacatgcctatgagcaggactttgagacagattatgctgaataccgcatcctgcatgcccgtgttgggactgcaagccaaaggttcatagagctgggagcagagattaaaagagttcggcgaggaactccagaatacaaggtcctggaagacaagataatccaggaatataaaaagttcaggaagcagtacccaagttacagagaagaaaagcgtcgctgtgagtaccttcaccagaaattgtcccacattaaaggtctcatcctggagtttgaggaaaagaacaggggcagctgaagttatcaagggaatttttgagcctctgcttagtgaaacacaaaggaacaaagcagctataaactaaatagaatgcaactatctgcttttcttatgctgaccactggagtccatggtggcaagtagagagctgctctaggttcttgaggtttggttttcattattaatttttagggtatgggcactgtgcaaagactccatagctgtgcctaggagtctaggaaaagtgacagaggcttggcttttttacctttagttcagccaagtcattttcaagtcctgagaaatgacatcatcttcaggataaaataatgaggacattagacaaaccaaactaagtgaattttagcctggtagcctctctaaggaaacagtaataataacttctgataagagttaaaagaacttgtagcatacctggatataatgggaaagggcctgggtgttacccatgtactgaaaatgaacttttaccaacatggctaaaaaattaaaaaaaaaaaaaaaaaa

SEQ ID NO: 26280 - DNA, 2372 bp, Homo Sapiens
cgaagctagggcggggcccgcgggctgaggcagcggctgtggcggcgacgctgggcgtgaggtggcggcggccgcgccctggttgggtccccactgctctcgggggcgccatggacgaggccgtgggcgacctgaagcaggcgcttccctgtgtggccgagtcgccaacggtccacgtggaggtgcatcagcgcggcagcagcactgcaaagaaagaagacataaacctgagtgttagaaagctactcaacagacataatattgtgtttggtgattacacatggactgagtttgatgaaccttttttgaccagaaatgtgcagtctgtgtctattattgacacagaattaaaggttaaagactcacagcccatcgatttgagtgcatgcactgttgcacttcacattttccagctgaatgaagatggccccagcagtgaaaatctggaggaagagacagaaaacataattgcagcaaatcactgggttctacctgcagctgaattccatgggctttgggacagcttggtatacgatgtggaagtcaaatcccatctcctcgattatgtgatgacaactttactgttttcagacaagaacgtcaacagcaacctcatcacctggaaccgggtggtgctgctccacggtcctcctggcactggaaaaacatccctgtgtaaagcgttagcccagaaattgacaattagactttcaagcaggtaccgatatggccaattaattgaaataaacagccacagcctcttttctaagtggttttcggaaagtggcaagctggtaaccaagatgtttcagaagattcaggatttgattgatgataaagacgccctggtgttcgtgctgattgatgaggtggagagtctcacagccgcccgaaatgcctgcagggcgggcaccgagccatcagatgccatccgcgtggtcaatgctgtcttgacccaaattgatcagattaaaaggcattccaatgttgtgattctgaccacttctaacatcaccgagaagatcgacgtggccttcgtggacagggctgacatcaagcagtacattgggccaccctctgcagcagccatcttcaaaatctacctctcttgtttggaagaactgatgaagtgtcagatcatataccctcgccagcagctgctgaccctccgagagctagagatgattggcttcattgaaaacaacgtgtcaaaattgagccttcttttgaatgacatttcaaggaagagcgagggcctcagcggccgggtcctgagaaaactcccctttctggctcatgcgctgtatgtccaggcccccaccgtcaccatagaggggttcctccaggccctgtctctggcagtggacaagcagtttgaagagagaaagaagcttgcagcttacatctgatcctgggcttccccatctggtgcttttcccatggagaacacacaaccagtaagtgaggttgccccacacagccgtctcccagggaatcccttctgcaaaccaaacgttacttagactgcaagctagaaagccaccaaggccaggctttgttaaaagaagtgtattctatttatgttgttttaaaatgcatactgagagacaaacatcttgtcattttcactgtttgtaaaagataattcagattgtttgtctccttgtgaagaaccatcgaaacctgtttgttcccagcccacccccagtggatgggatgcataatgccagcaagttttgtttaacagcaaaaaaggaagattaatgcaggtgttatagaagccagaagagaaactgtgtcaccctaaagaagcatataatcatagcattaaaaatgcacacattactccaggtggaaggtggcaattgctttctgatatcagctcgtttgatttagtgcaaaaatgttttcaagactatttaatggatgtaaaaaagcctatttctacattataccaactgagaaaaaaatggtcggtaaagtgttctttcataataaataatcagacatggtcccatttgcaggaaaagtgcagactctgagtgttccagggaaacacatgctggacatcccttgtaacccggtatgggcgcccctgcattgctgggatgtttctgcccacggttttgtttgtgcaataacgttatcacatttctaatgaggattcacattaatataatataaaataaataggtcagttactggtctctttctccgaatgttatgttttgcttttatctcacagtaaaataaatataattaatggtttgcatgtgaaattcacttttgaaagaacatgttaccttaccttttgttttagaagttttcaagtattaaaatattttttagaaaaaaaaaaaaaaaaaaaaaaa

SEQ ID NO: 26281 - DNA, 2684 bp, Homo Sapiens
ctttttcctttcctgattccttgtgtatgtgtggctgggccgcccctcttctcggctcagagtcacggagtgccttgaactaggcccacctcgccggggcggctggttctctgtttgtgggacgctggtgtctctggaggcccttcctgagaagccgtcgccagagttacgtcgcggttttcttaactttagagcctgggggccggagaccctgattgcactcgacctggctctgccctactctctgcgtgacttccactgttcatcaaagaaaaagggttcttttggtcacccaccactggccccatggctgccgtgcagatggatcctgagctagccaagcgcctcttctttgaaggggccactgtggtcatcctgaacatgcccaagggaacagagtttgggattgactataactcctgggaggtcgggcccaagttccggggcgtgaagatgatccctccaggcatccacttcctccactacagctctgtggacaaggctaatccgaaggaagtaggccctcgtatgggtttcttccttagcctgcaccagcgggggctgacagtgctgcgctggagcacactcagggaagaggtagacctgtccccagccccagagtctgaggtggaggccatgagggccaacctccaggagctggaccagttcctggggccttacccatatgccaccctgaagaagtggatctcactcaccaacttcatcagcgaagccacagtggagaagctacagcccgagaatcgacagatctgtgccttttccgatgtgctacctgtgctctccatgaagcacaccaaggaccgcgtggggcagaatctaccccgctgtggcattgagtgcaaaagctaccaagagggcctggcccggctaccagagatgaagcccagagccgggacagagatccgcttctcagagctgcccacgcagatgttcccagagggtgccacgccagctgagataaccaagcacagcatggacctgagctatgccctggagactgtgctcaacaagcagttccccagcagcccccaggatgtgcttggtgaactccagtttgcttttgtgtgcttcctgctggggaatgtgtacgaggcatttgagcattggaagcggctcctgaacctcctgtgccggtcagaagcagccatgatgaagcaccacaccctctacatcaacctcatctccatcctgtaccaccagcttggtgagatccccgctgacttcttcgtagacattgtctcccaagacaacttcctcaccagcaccttacaggttttcttttcctctgcctgcagcattgccgtggatgccaccctgagaaagaaagctgaaaagttccaagctcacctgaccaagaagttccggtgggactttgctgcggaacctgaggactgtgccccggtggtggtggagctccctgagggcatcgagatgggctaactcggggagcgctctcagctgcgaggggccccttcccacagggctgcagtcctggcctctccatttacttcttcccatcctgggacctgccagggcagcaatctctccaggtcctgcaaagatggagccagaattccctttttcactgataaatatatttcttcattgccaaagaggctgtacccatcctgaaggcacatttgtgggttccccatcagccaggccttggtgctaacctggctgaatttcacacaggctcttacacacacacgctcctaggagacatctgcctacacggcaaccatatttcctctgaatgagaaggaattgaaccaaaagtccaagaaagaactgattgcttgttccataggagcttaggaaacaagaaaccctggattgcccagggggtctgagaagttggttggtgactttttttgcggttaaatgaagggtgatggggagatcagcccgaattgccgcctgcctcttgctaaataggagcagaggacttggcctgcagctccttgggagcccttgattgggaagagagtttcaagggaggcagctggattcaatctagcaggtggtcagcttcagctttctccatcgaaatcccattctcctgtccagaggcccagtgggtcatctcccaaggtgggtgtggaccctggcctcagaggccttgctggtgctgtcacctcccacctgttccattccgaggcctcacccagaagtgggaccctccccttcctcaccagagccaccgtgactgtttctgatgacctggagagtcaacaacaaccagaaaggtttctgcccagagcaggcttcttaaggcctttacgaagttttgtgccttccaagtgctgaagaagacctggtcagcctaaatcttcccagtcccgctgtggagctgtcagtcaccggagtaatgagctcctggttcctcgggagtccttcgtgctgtgtggcagggttcctctctagacaagtacacaggccctgccaccctgacatcaaactgttgtactatgatcacagtccctgtgccatccttttccaagactggggctcacaccatgtttttgaatgagaatccctgctggttgagacttttgcttccacttgtttccttggagatgtttttccaagagcataatgtacattaaagtcttcgagttgagaccaaaaaaaaaaaaaaaaaaaaaaaaaaaaaaaaaaaa

SEQ ID NO: 26282 - DNA, 2447 bp, Homo Sapiens
ctggaactcgcgtctgagccgccgtcccggacccccggtgcccgccggtccgcagaccctgcaccgggcttggactcgcagccgggactgacgtgtagaacaatcgtttctgttggaagaagggtttttcccttccttttggggtttttgttgccttttttttttcttttttctttgtaaaattttggagaagggaagtcggaacacaaggaaggaccgctcacccgcggactcagggctggcggcgggactccaggaccctgggtccagcatggaggtggtggacccgcagcagctgggcatgttcacggagggcgagctgatgtcggtgggtatggacacgttcatccaccgcatcgactccaccgaggtcatctaccagccgcgccgcaagcgggccaagctcatcggcaagtacctgatgggggacctgctgggggaaggctcttacggcaaggtgaaggaggtgctggactcggagacgctgtgcaggagggccgtcaagatcctcaagaagaagaagttgcgaaggatccccaacggggaggccaacgtgaagaaggaaattcaactactgaggaggttacggcacaaaaatgtcatccagctggtggatgtgttatacaacgaagagaagcagaaaatgtatatggtgatggagtactgcgtgtgtggcatgcaggaaatgctggacagcgtgccggagaagcgtttcccagtgtgccaggcccacgggtacttctgtcagctgattgacggcctggagtacctgcatagccagggcattgtgcacaaggacatcaagccggggaacctgctgctcaccaccggtggcaccctcaaaatctccgacctgggcgtggccgaggcactgcacccgttcgcggcggacgacacctgccggaccagccagggctccccggctttccagccgcccgagattgccaacggcctggacaccttctccggcttcaaggtggacatctggtcggctggggtcaccctctacaacatcaccacgggtctgtaccccttcgaaggggacaacatctacaagttgtttgagaacatcgggaaggggagctacgccatcccgggcgactgtggccccccgctctctgacctgctgaaagggatgcttgagtacgaaccggccaagaggttctccatccggcagatccggcagcacagctggttccggaagaaacatcctccggctgaagcaccagtgcccatcccaccgagcccagacaccaaggaccggtggcgcagcatgactgtggtgccgtacttggaggacctgcacggcgcggacgaggacgaggacctcttcgacatcgaggatgacatcatctacactcaggacttcacggtgcccggacaggtcccagaagaggaggccagtcacaatggacagcgccggggcctccccaaggccgtgtgtatgaacggcacagaggcggcgcagctgagcaccaaatccagggcggagggccgggcccccaaccctgcccgcaaggcctgctccgccagcagcaagatccgccggctgtcggcctgcaagcagcagtgaggctggccgcctgcagcccgtgtccaggagccccgccaggtgcccgcgccaggccctcagtcttcctgccggttccgcccgccctcccggagaggtggccgccatgcttctgtgccgaccacgccccaggacctccggagcgccctgcagggccgggcagggggacagcagggaccgggcgcagccctcccccctcggccgcccggcagtgcacgcggcttgttgacttcgcagccccgggcggagccttcccgggcgggcgtgggaggagggaggcggcctccatgcactttatgtggagactactggccccgcccgtggcctcgtgctccgcagggcgcccagcgccgtccggcggccccgccgcagaccagctggcgggtgtggagaccaggctcctgaccccgccatgcatgcagcgccacctggaagccgcgcggccgctttggttttttgtttggttggttccattttctttttttctttttttttttaagaaaaaataaaaggtggatttgagctgtggctgtgaggggtgtttgggagctgctgggtggcaggggggctgtggggtcgggctcacgtcgcggccgcctttgcgctctcgggtcaccccgctttggcggcccggccggagggcaggaccctcacctctcccccaaggccactgcgctcttgggaccccagagaaaacccggagcaagcaggagtgtgcggtcaatatttatatcatccagaaaagaaaaacacgagaaacgccatcgcgggatggtgcagacgcggcggggactcggagggtgccgtgcgggcgaggccgcccaaatttggcaataaataaagcttgggaagcttgaaaaaaaaaaaaaaaaaaaaa

SEQ ID NO: 26283 - DNA, 2204 bp, Homo Sapiens
ccgaccctctcaggccttttccgcttctcttttacctccccaggtccgcccgtctgcgcccctcacaggaagccggagggtcgctctgatcccgaatctcccacaggcgtgaacctgctctgctgtgtatctttgcggggtggcctgcgctgaggcctgccgcgcgcggtgagtccgcgcagacctgaccctgcgtctcgcagctcggttgaggccgccgccgccttctcgggatgccgcggccggggtccgcgcagcgctgggcggccgtcgcgggccgttgggggtgcaggctgctcgcactgctgctactggtgcctggacccggcggcgcctctgagatcaccttcgagcttcctgacaacgccaagcagtgcttctacgaggacatcgctcagggcaccaagtgcaccctggagttccaggtgattactggtggtcactatgatgtagattgtcgattagaagatcctgatggtaaagtgttatacaaagagatgaagaaacagtatgatagttttaccttcacagcctccaaaaatgggacatacaaattttgcttcagcaatgaattttctactttcacacataaaactgtatattttgattttcaagttggagaagacccacctttgtttcctagtgagaaccgagtcagtgctcttacccagatggaatctgcctgtgtttcaattcacgaagctctgaagtctgtcatcgattatcagactcatttccgtttaagagaagctcaaggccgaagccgagcagaggatctaaatacaagagtggcctattggtcagtaggagaagccctcattcttctggtggttagcatagggcaggtatttcttttgaaaagctttttctcagataaaagaaccaccacaactcgtgttggatcataactacgttttgagaattgatgcaccattgccactgtaatattgctgtcctctaattaattttaggtactgaagaacttaatattggcaacatttttaaatccttactcatacacttgttgggagggatgtacaatgcatattcccaaactgtggaaaggacacctttttttatttgtaaaggtggaaaaactttggaactcattttgggctattcatgttaaatattcaacaccaatgatctactctgttcgcagttgtttatatctactcttcgcacactaaactttggtattttgattccttttaaccatttaagactacttttcttataggtagttgatattttaaaaactttagatttaatgtctacatgtgttagggaggaagaaaattgccttttaattgttaataagaaaaccaaatgtgatgaactgtagcccaagccctattctgcactgttcagttttatggaggaaaaataaatctaccataggaatgttagttaatattgatatatcatggtaaaattgatttctcactagcttagaaaatgtcagacttttgtttttggggtttataatttaaaccagctatgctattttttcataaaggcatttgtagtacacagaaaacagtagtttcagtagtgtaaaagagtttatacaggccttaaatatcagactttgtaacaggtagaaatattacagaataatttaagacactacaatgggggcaaatgaaataggaaaatttttagtgagttacacgtactcattacattttcagtgcttttacaaggaaaaaaggtgatatgtttaattttaaaattttaattggctagctcttgcccttatatgactttaatgtctgtgagtcattcccagcttaaattaacaattgttagtattagtctcacacataagtgccatacattttatcctcatggatgtgatgcactgaaaagttagttgctctccttttttcttttttttgtcgtgcatattttatttctgtagtttctggttagctaccctaaagtgatttaaaaatttagaatgctttgtgtttcctatttggtaatcttcattgacttttctttagttaatgagtattaaatagtgcatattctgtagactatagggtttacattgtgttgcatcttataacttgtatagattgagctgattgaaataagattttgttccaagtattatctgatagaatacaagatgattcaaaattatatagatatttaaagcttttaaaaaaaaaaaaaaaaaaaaaaaaaaaaaaaaa

SEQ ID NO: 26284 - DNA, 1682 bp, Homo Sapiens
gatccctttcccagtcctgcttcccagtgcctcgggccagggaatcctggcctccgcctgcggagccggcggaacccgcttcccgcctccacggggcagcgccagcggcctggtcctttcaccggcagctccgtgccgacgctctcaccgctcttcctatcgccgggagtggcgggccgaccagggggcggccgggctaccgtccgccattcccgtgtctctgcgcccgcgggggccgcccgagccggccaccatgccgctgggcctgaagcccacctgcagcgtatgcaagaccacgtcgtcctccatgtggaagaagggagcgcagggggagatcctctgccatcattgcactggccggggcggcgcgggcagcgggggcgcaggctcgggggcggctggagggactgggggcagcggcggcggcggcttcggcgcggcgaccttcgccagcacctccgccacccctccgcagagcaacgggggcgggggcggcaagcagagtaagcaggaaattcacaggaggtctgctcggctcagaaacactaaatacaaatctgctccggctgctgaaaagaaagtctccaccaaaggaaaagggagaagacatatatttaaattgaaaaatcccatcaaagctcctgagtcagtttccactataatcactgcagaatcaatcttctacaagggagtatattaccaaattggtgatgttgtttctgtgattgatgaacaagatggaaagccctactatgctcaaatcagaggttttatccaggaccagtattgcgagaagagtgcagcactgacgtggctcattcctaccctctctagccccagagaccaatttgatcccgcctcctatatcatagggccagaggaagatcttccaaggaagatggaatacttggaatttgtttgtcatgcaccttctgagtatttcaagtcacggtcatcaccatttcccacagttcccaccagaccagagaagggctacatatggactcatgttgggcctactcctgcaataacaattaaggaatcagttgccaaccatttgtagttcacaaattaaaactgggtttccaggcctggtgtggtggctcacgcctgtagccccagctattgcaccactgctctccaagctgggcaatggagtcagattctctttcttaaaaaaccacaaaaaaactggatttccagttctctaatattcttagtaccacaagatatgtcataggtatctttaaatgaaattcttagctggaaaagtgactaaaaagtttttctcctgctacctagtaataaacaaatcattgtttattactggtcacttagaaaattaaaagggatagggccaggcacagtggcttatgcctgtaattgcagcacttttagaggccgaggcaggcggatcacctgaggtcgggaagtggatcgcctgaggtcaggagttcgagaccagcctggccaacatggcgaaaccccgtcgctactaaaaatacaaaaattagccaggtgtggtggcatgtgcctgtaatcccagctatttgggaggctgaggcaggagaatcgcctaaacccaggaggtggaggttgtagtgagccaagattgcaccgctgtgctccagcctgggcaacagagtgagactcttgtctcggaaaaaaaaaaaaaaaaaaaa

SEQ ID NO: 26285 - DNA, 2445 bp, Homo Sapiens
gaatcaagctcatctatgatgctggtgtctccttcatcgtcgtcctcgtggtctgggccggctgctccgggctggttttcctcaactgcttctttaactggccccttgagcccttcccggggccggaggacatggactactcggtgaagatcaagttcagctggctgggctttgaccacaagatcacagggaagcagttctacaagcaggtgaccacggtgggccggcgcctgagtgtgggcagctccatgaggagtgccaaggagcaggtggcgctgcaggagggccacaagctgtgcctgtccaccgtcgacctggaggtgaagtgccagccggatgccgcagtggtcccctccttcatgcacagcgtgttcagccccatcctgctgctcagcctggtcaccatgtgcgtcacgcagctgcggctcatcttctacatgggggctatgaacaacatcctcaagttcctggtcagcggcgaccagaagacagttggcctctacacctccatcttcggcgtgctccagctgctgtgcctgctgacggcccccgtcattggctacatcatggactggaggctgaaggagtgtgaagacgcctccgaggagcccgaggagaaagacgccaaccaaggcgagaagaaaaagaagaagcgggaccggcagatccagaagatcactaatgccatgcgggccttcgccttcaccaacctgctgctggtgggctttggggtgacctgcctcattcccaacctgcctctccagatcctctccttcatcctgcacacaatcgtgcgaggattcatccactccgctgtcgggggcctgtacgctgccgtgtacccctccacccagttcggcagcctcacgggactgcagtctctgatcagcgcgctcttcgcccttctgcagcagccgctgtttctggccatgatgggtcctctccagggagaccctctgtgggtgaacgtggggctgctccttctcagcctgctgggcttctgcctcccgctctacctgatctgctaccggcgccagctggagcggcagctgcagcagaggcaggaggatgacaaactcttcctcaaaatcaacggctcgtccaaccaggaggccttcgtgtagtggctgccgcctcggaactgcggtctcctgcctgtgcttcagtgactgacccctgtcctgcccctccagagtaccccacgcacccccaggaccttcgccgtctccgtgccagcgttcacgctccctcccggggccctgcctcggagctctgtggtggaaggacgggagagggccccggacacgcgcgttttctcctgccgaacgcaggggctgccctgactttgctctgccgccccccggggacccggggcctggggtctctgtggtgcctgcagcaggagccaggaacgcccggcaggcaggcgctctcccgccagtgtctggattctgcctcttgccaaagcagagggggctgccatcccctgcctgccacctgcccctcggctgcatgcccacagccgtacctgcctgaggacaaaggcttgcactgtctcgcccgcgcctggcccccaccccctccccggccagcctgaggctgcctgaggaaggaaggacccgcttcctgttgtcggtgctaattcctttgtaattccagccccctgtcgcctgtccagggcctgcccacccgttggaggccggtggagaagccccacctggcttatgccctggagagggtttagcgggctgggtggacccctcgcctcctccccgagggccaatgccgcggacacgttttcactgtcaccctcgttctgtctgccacctgaagggaatttgaggaccgccgccagggcaccccgtacatacacacagctgcttttgtggaggtggacgaaaggctgtggccggcagacgtggaggtccaggccggggtggggacgtgggtgggtccgaggggtgtgtggggtcggggtgggctctaggagttagcccttatccccactgaccaggcgggagccgccaggcctgcagctgggccagtgcccaggagccatcctggcgtggggccaggagcttgtccaaggccacaggcccacagcaccccctgccggcgggctccgtggggccctggagctgatgacgggggaggcccgtccgcctggcccaccaacccgcccaccttgactgcccccagaagtgtgtcttgagacctcctgggcgtgcttagaggggtgagttgtgtttggatttttagttattttctcttcagttttattagacttcttttttataaagcaataaatccattttcctccgggtaaaaaaaaaaaaaaaaaaaaaaaaaaaaaaaaaaaaaaaaaaaaaaaaaaaaaaaaaaaaaaaaaaaaaaaaaaaaaaaaaaaaaaaaaaaaaaaaaaaaaaaaaaaaaaaaaaaaaaaaa

SEQ ID NO: 26286 - DNA, 894 bp, Homo Sapiens
gccagcgccagtcggagccagcgcgagccgccgccgccatcactgccgctgccaagtcctccacccgctgcccccgccatgtctgctaccgctgccacggccccccctgctgccccggctggggagggtggtccccctgcaccccctccaaacctcaccagtaacaggagactgcagcagacccaggcccaggtggatgaggtggtggacatcatgagggtgaacgtggacaaggtcctggagcgagaccagaagctgtcggagctggacgaccgtgcagatgcactccaggcgggggcctcccagtttgaaacaagcgcagccaagctcaagcgcaaatactggtggaaaaacctcaagatgatgatcatcttgggagtgatttgcgccatcatcctcatcatcatcatagtttacttcagcacttaaatccccgaggagtctgccctgcctagagaagggcctctcccccaaccctcagccgttcctccacctctcagccatatctttcagccccccctcccctggatccgtgtgtgtgtgtgtccgtgtgtgtgtccccctgtaaatagccagctgttatttatacatatataatattatatatatttggtctgtttgtagttttattactagatgatttttccggttgtccttaacaccccttcctgaggttcccttcacccctctctcttgccttccttccctttccctttcttcctgactagccccaagtcccttcatttgcatctgctatgcaatagtccctctcctttccttcttcttccctcagatttagctgatccttcctcccaccctggccttcctttcctctttcctcctcactctccccgtcatgctccctctgccccgccctcaaaaaaaaaaaaaaaa

SEQ ID NO: 26287 - DNA, 1178 bp, Homo Sapiens
cacctgtgggtttctgaaggctagaagcttccacaatgagccaggaaacaagttctgattggctgggaacagacctctgctccaagattcagggctggcagtattccttctgttctggtggctcgatcttcattgctttcctctggacttgtaagttattccaacaaaccccagctgctctgcagtgaaatgttccaaataattaatatttctgcaggaattaccttgtaaaagatatgtgcttttaagtatttggttattgtgcaaatgtttttgactaccttttgtggccaattttctccttcagcgggctcatgtataattttagataaaagtacaaggaaattatgattccataatcataagtctactttcagcaatacacgtatcttcagagaatctcagcctccctgcagcatcctcctggtgcacagaaaaactgctgaattctggcaagatactcaaaggattctgacgggtgaccatctcaggccggagatatgcccaaccaactggaaaagcagagacagccatggacagatctgctgacgctaaagtttatagacagctgaggtgcaacccatataatcacccagatgttattaggccatgatcattctgtagtaagctacctcccttctgtgtttcctctcacctgacagcctattgtgggcactttcaaggccccactgtgtccaaatcacaccaccaccaaagctcacagaagcacgctggtagatttctcctctttggtggtttcccatgaccagccaagggaaatacccaacaatcattctcagtgtgcacagatttaccttcagcttttttggttatattgtcattattattttctttgtccagtgggagagttaaggggcctgctatggactgaactctgtccccctcaaattcatatgttgaagccccaaccttcaacatgactatatttgaaaacagtccctttatggaggtaaagttaaatgagatcataagagtggggcccttgttcgatagaactggtgtccttacaagaagaggaagaggctgagtgcagtggctcaagcctataatcccagcactttgggaagctgaggcaggaggtacgcttgggcccaggagttcaagaccagcttgggcaacataacaagaccctatctctacagaaaaaaaaaaaaaaa

SEQ ID NO: 26288 - DNA, 1190 bp, Homo Sapiens
atcattgaaaaatggagagtgaagctggaagattctggtgtccacgtgatcattggggggcacgattctccctctcctagaggcgtcggatacgctaaaaatcaagcagttgcccagagctcagggtcttacctttgctttttggattcggatgacgtcatgatgccccagcgggtgaggctgcaacacgaggctgccgttcagcacccgtcgagcatcattggttgcagagtgaggagagatccccctaactccaccgaacgatacacacgttggatcaaccagctgacgccggagcagctcctaacccaggttttcacctcaaatggccccacggtgatcatgcccacctggttctgctcgcgagcgtggttctcccacgtgggcccctttaacgagggaggtcagggcgtcccggaggacctgctgttcttctacgagcacctcaggaagggcggcggcgtcatccgcgtggaccagagtctcctgctgtatcgccaccacccacaggcggccacgcactgcgtcctcgagacgaccatctggacccaccgcgtccgcttcctggaagagcaggccctgccccgctgggcggccttcaccatctggaacgctggcaagcaggggcgccggctgtaccgcagcttgactgccggcagccagcgcaaggtggtggcattctgtgacgtggacgagaacaagatcaggaaaggcttctattgccacgaggactctcaggaaagacccaagccccgaatccccatcctgcacttccgagccgcccggccacccttcgtcatctgcgtgaagctggacctcacagggggcgcctttgaggacaacctgaggtcactgcacttgcaggagggccaggacttccttcacttcagctgacggacccatggcagctgctcccagtgcatcccaggccagcaggagctttgtgagctgcaggcatggcgatggtgcgcctgttccacacccagcaggcgcaaccagagtctcgtgtgtgccgaccacaggagccaagccttttccactgtgtggactcatgtggccaaggctaggcctggtcacccaggaccctcaccacgtgaccccagccaatcgggacagttcaaggaggaggagacccctattacacaggttggaataaaatatttaaatctcgtaaaaaaaaaaaaaaaaaa

SEQ ID NO: 26289 - DNA, 1523 bp, Homo Sapiens
ccgagcggtgccaggccaggtgtgtgcgtccgtcggtctttccgtgcccacgccggagaccagccccggaggccgcctgggcctatccctgtgccaggcaccatgaagcaggagtctgcagccccgaacaccccgcccacctcgcagtcccctacgccgtccgctcagttcccccgaaacgacggcgaccctcaagcgctgtggattttcgggtacggctccctggtgtggaggcccgacttcgcctacagcgacagccgtgtgggcttcgtgcgcggctacagccgccgtttctggcagggagacaccttccatcggggcagcgacaagatgcctggccgtgtggtgacgctccttgaagatcatgagggctgcacttggggcgtggcataccaagtgcaaggggagcaggtaagcaaggccctgaagtacctgaatgtgcgagaggcagtgcttggtggctacgataccaaggaggtcaccttctatccccaagatgctcctgaccaaccactgaaggcattggcctatgtggccaccccacagaaccctggttacctgggccctgcgcctgaagaggccattgccacgcagatcctggcctgccggggcttctccggccacaaccttgaatacttgctgcgtctggcagacttcatgcagctctgtgggcctcaggcgcaggacgagcacctggcagccatcgtggacgctgtgggcaccatgttgccctgcttctgccccaccgagcaggctctggcgctggtgtgaggggctgagcccctgcggggagtgctcatgtggacatcagggccagacacccactccagtgcacaagacagacttgcgaccgcttgagcccactgagcagatatggtgggtggctggaggcttctctttctcagtccctgcctgtctgccagcctgcagctctcctgcttgacactgacttactacttgaaactttatttattgcaccatgttggtgtggtgggcaggtggagggcctgccctggacacaggggccctgctgagcagtggccccatcctggaacttgaccagattccccccagtgctgctgctaaccccacaccacccaggcctccacctccccagggagtctccaagagcctcgatcctctgctcactcagcccagccatccatagccctgggaattccacctgccaaggatcccagcaggctggatgagggatagtagggcatgaggagaaggagccctgtaaggactgaggccccggccagcccttctcctccaccagttccccagagcagagctggagctgatgcctggacacagctgctgagcctggcctgggcctcttacccacttggttgttttcttgtccctctgtctgtctgtctatctacttgtctgtctgggccactcctgcctgtgtgttggtctattcctgggaagctcatcactacaggccctggcaaccttcccagtctgtcccatactgttacccataaaactatctctttaaaaaaaaaaaaaaa

SEQ ID NO: 26290 - DNA, 1432 bp, Homo Sapiens
tgctgcggctccgcagcgggctgaggcactttcgggcaacacccaatactcggggctccgctcggcttcttcgcgccgagatgcctaagaaggctggtgcgacgaccaagggtaaaagccagagcaaggaaccagagagaccacttcctcccttaggtcctgtggcagttgatcctaaaggatgcgtcaccatagccatccatgcaaaacctggctccaaacaaaatgctgtaacagatttgacagcagaggctgtaaatgtagctattgcagcacctccatcagagggagaggctaatgctgagctctgtcggtatctttccaaggtcctagaactcaggaagagtgatgtggttttggataagggtggtaaatctcgtgaaaaggtggtgaagcttttggcttctacaactccagaagagatcttggagaaattaaaaaaggaagccaaaaaaacataaaagcaagaaatgaggccgggcgcagtggctcatgcctgtaatcccagcactttgggaggccgtggtgggcggatcacctgaggtcaggagttcgagaccagcctgaccaacatggtgaaaccccatctctacgaaaaatacaaaattagccagatgtgatggcgcatgcctgtaatcccagttactcaggaggctgaggcaggagaatcacttgaacctggggggcggaggttgcagtaagccgagatcgcgccgttgcactccagcctgggcaacaagagtgaaactctctccccccgaaaaaaaagaaataaaaaatacatccttgagaaacttttttattgctaatggtgaagaggctgttaaatagaaaaatatactacatgcacagaagaacatgggggacatatatatatgtatatattcgaataagactccaaaaagtagaaatttaaaaagtgctatacattgcatcaggttctaaaatcccaaaccccaaacagcctggaacatgttactctgatttcatggcgttgtaaaataacagagctgggaagaatattcaagatgacctgatttaacacctttcattctgttggggggcctttgatttcctatatccagaagttgagagacttactcaagattgtaccatgcaagctggcaactagaacccaaatccttggactacttgttgaatgcagtttttctagattgtaaattaaaaatcatatctccacaacggttctggaattctggggattgccttctaatccagtttacaagtgacagaaaacctgttatgctgctttgtagtcttaccttagatttttaaatgcttatttaaatgtaaaaaaaatttttttttacatcttttaaagactatatttaccattttgttgaaaaagtaaagaaaaatcatgacttgtaattaaatgtgaattataatttttgagaaaaaaaaaaaaaaa

SEQ ID NO: 26291 - DNA, 1560 bp, Homo Sapiens
ggccgacctccatgggctgcggggggctgcacccggacccctggggcgcggcgcgcccctgaatgcaccgtgggacgcaggagggtgccatggcctcccggctcctgcaccggctgcggcacgccttggccggcgacggccccggggaggcggcggccagtccagaggccgagcagtttccggagagctcagagctggaggacgacgacgccgagggcctgtcctcccgactcagcggcaccctcagcttcaccagcgccgaggacgacgaggacgacgaggacgaggacgacgaggaggctggccctgaccagctgcccctcggggatgggacgtcaggagaagacgcagaacggagccccccacctgatgggcagtggggcagtcagctcctggcgcggcagctgcaggatttctggaagaagtcccggaacaccttggcaccccagcggctgctcttcgaagtgaccagcgctaacgttgtcaaggacccgccctccaagtacgtgctctacaccctcaccgtgatcggcccaggaccgccagattgccagccagcccagatctctcgccgttactcggactttgagcggctgcaccgaaacctgcagcggcaattccggggcccaatggctgccatctccttcccccagtcccactaagttgccaggctggtctcaagcgcctgggttcaagggatcctcccgcctcagcctcctgagcagctgggattacaggcgcacatcaccatgcccaacctccaagtggacttcttgcaaagggtctggcccagggcagggctgccccacacaagggtgcactgagtgtcgtggctgctccaaatgccccttcatgagcttattatggaccgtcattgaggggtaactcctcccacaggaaccccagttgacagtttaaaagcactttcacacctctcctcgcttcctcaaaaagatcacagagggaggagctctgagaacagtctccttcaacagctcggccaagcagaactgctgtacctctgaccacttgtgttaggaaaactatcggctccctgtataataaatcaagccaggtcctccaagtggtaattcatgaaaaatatccccactaccaccaccaaggggaagaaaggactcagaagagaggacttgaggccatgaggtctggcctcttccctccccatctggagactctttctcccttgctggctttgggcccaagtttgatgtttatgaggatgattgctggtttcccttacacatagcagagctcactcagttctcacagtagccaaatgaagcagttatgtgttgtccagttttccagaccaggactgaaatccagagagggtcaggaatttggccccatgatgaagccaaatctgaacccatgtcctcacttcaaggttatcaatcttggattgtgatgctattggtacttgagaataccccttatctgagtataaagaatccttgagttttgtccttggtttatcaaaaaaaaaaaaaaaaaaaaaaaaaaaaaaaaaaaaaaaaaaaaaaaaaaaaaaaaaaaaaa

SEQ ID NO: 26292 - DNA, 999 bp, Homo Sapiens
ctctgctcgccttgggcgcgccgtggcgcgcggggccgtgctggcgctgcggctcctcggcctgctccgccgtctggtggccgccccgggctgactttgacttagcgatgcctttcctgatggaggaaacagtgacccagcaccacctaatgcccccaaaccaaagccagatccaaaccccaaccgacctggtttcactggtgacccagcaccacctaatccccgcaaaccaaagccagatccaaatcccaactgacctggtttcactgataagagcctctaaccctacggggtggtctctatgttgtttacctggcagtgatgtccgtgtcatctgagaagaggagatttcaggggctgactttgacttagcagatgcctttcgtgatggaggaaataacgacccagcacctcttaattcacccaagctgaagccaaatgcgaaccctgagcagcctggattcattggggatgactttgacttagcagatgccttacatgacaaaggaaactacgagccagcaccactgaacccacccaaaccaaagccaaatccaaaccccaagcagcctgattccaccggggatgactttgatttcacagatgtttcttcatggtgaacgaaacagggagttgcctcgattctgatgtgtttgcttcggtgctctgtgtattgtattcatcccactcttcaattcataaactctggagattcttcaattcactgggcaaaccatatgcctaagtctatcctctgatggaggctcgtacatgcaaaatccaatagcaacctgggaagatttcagtcaagacccaagaggaggctggcatcaggctctcggtcaccgatcttcacattcaggtttcctgatgcactttgcgactctttgggcaacctctggactccttgttcccagggtccacatttagttttatctttactgcattgcttttatgaaaaagaataaaattggatgaaacagaaaaaaaaaaaaaaaa

SEQ ID NO: 26293 - DNA, 1786 bp, Homo Sapiens
gacaaaccccattccgctttgccagaagaggtgcaagaattgtttatccgtgattatggagagatttttaatgtccagttaccggataaagaagaacggacaaaattttttgaagatttaattctaaaacaagctgctaagcctcctatatcaaaaaagaaagcagttttgcaggctttggaggtactcccagtagcaccaccacctgagccaagatcactgacagcagaagaagtgaaacgactagaagaacaagaagaagatacatttagagaactgaggattttcttaagaaatgttacacataggcttgctattgacaagcgattccgagtgtttactaagcctgttgaccctgatgaggttcctgattatgtcactgtaataaagcaaccaatggacctttcatctgtaatcagtaaaattgatctacacaagtatctgactgtgaaagactatttgagagatattgatctaatctgtagtaatgccttagaatacaatccagatagagatcctggagatcgtcttattaggcatagagcctgtgctttaagagatactgcctatgccataattaaagaagaacttgatgaagactttgagcagctctgtgaagaaattcaggaatctagaaagaaaagaggttgtagctcctccaaatatgccccgtcttactaccatgtgatgccaaagcaaaattccactcttgttggtgataaaagatcagacccagagcagaatgaaaagctaaagacaccgagtactcctgtggcttgcagcactcctgctcagttgaagaggaaaattcgcaaaaagtcaaactggtacttaggcaccataaaaaagcgaaggaagatttcacaggcaaaggatgatagccagaatgccatagatcacaaaattgagagtgatacagaggaaactcaagacacaagtgtagatcataatgagaccggaaacacaggagagtcttcggtggaagaaaatgaaaaacagcaaaatgcctctgaaagcaaactggaattgagaaataattcaaatacttgtaatatagagaatgagcttgaagactctaggaagactacagcatgtacagaattgagagacaagattgcttgtaatggagatgcttctagctctcagataatacatatttctgatgaaaatgaaggaaaagaaatgtgtgttctgcgaatgactcgagctagacgttcccaggtagaacagcagcagctcatcactgttgaaaaggctttggcaattctttctcagcctacaccctcacttgttgtggatcatgagcgattaaaaaatcttttgaagactgttgttaaaaaaagtcaaaactacaacatatttcagttggaaaatttgtatgcagtaatcagccaatgtatttatcggcatcgcaaggaccatgataaaacatcacttattcagaaaatggagcaagaggtagaaaacttcagttgttccagatgatgatgtcatggtatcgagtattctttatattcagttcctatttaagtcatttttgtcatgtccgcctaattgatgtagtatgaaaccctgcatctttaaggaaaagattaaaatagtaaaataaaagtatttaaactttcctgatatttatgtacatattaagataaatgtcatgtgtaagataactgataaatattggaactttgctagaacaagaccctgtagtaatagtaataatagttgaagtttggccaactcttaataaagttattttggtaactaaaaaaaaaaaaaaaaaaaa

SEQ ID NO: 26294 - DNA, 1127 bp, Homo Sapiens
cgactcctcgggcagcctcaacgagaactcggagggcaccggagttgctctaggtcgtaaccagcctttgaaaaaggagaaaccaaaatggaaaagcgattatcctatgacagatggacaactacgcagcaagagggatgaattttgggatacagcaccagcttttgaaggccggaaagagatttgggatgccttgaaggctgctgcacatgcttttgagagcaatgatcatgaactggcacaagcaatcattgatggtgcaaacataacattaccacatggtgcacttacagagtgctacgatgaactggggaacagatatcagcttccagtgtattgcttggcaccgccaatcaacatgatagaggaaaagagcgacatagagactctggatattcctgagccaccacccaattctggatatgaatgtcagcttcgtttgcgcctttccacaggcaaagacctcaagcttgtggttcgcagcacagacacagtattccacatgaagagacggttgcatgcagcagagggagtggaaccaggtagtcagcggtggtttttttctggcagacctctcactgacaaaatgaagttcgaagagctgaagatcccaaaggactatgttgtacaggttatagtgagccaacctgtgcagaacccaacaccagtggagaactgaactgagccctgttggccagctcccacatccctctgctcctttttatggttcttgttgtcatttcctactctgcggcgtgaaatctatttcactgctctaaattccctatgaatggatttagttctgaggaattaccagtgaaaaattccatctgtgatggagaccaacaaaaataataaaacacaaagagccaggctttgagactcatgtaattacaattcttaatttgaaaggcagttaagaaatagataaccatttattttagaacactcaacaactatgtaatggctatatttcagtgacttggactgtaaatgaaacattgcatccatgaaggacagcaccaagcacctttttgaatacagaatttttttagaaaaatatatcaaattatataatttccagaaaccataaataatggatataaaacttaaaaaaaaaaaaaaaa

SEQ ID NO: 26295 - DNA, 3046 bp, Homo Sapiens
ggggtggcactgaatcaacaagacaagcaactcaattgattaatgctttgatcaaggatccagacaaagaaattgatgaacttattccaaagaatcgtttgaaaagctcctcagcaaattccaaaatagggtcatcagcacctaccaccactgctgctaacacttccttaatgggaattaaaatgacaactgtagctctgtcatcaacatctcaaactgccacagcactcactgtgcctgcaatttcttctgcatccactcacaaaaccattaagaacccagtgaataatgtgaggcctggttttccagtttctcttccattagcatatcctcctccacagtttgcacatgctttgcttgctgctcagactttccagcagatccgtccaccaaggttgcccatgacccactttggaggtacttttccaccagctcaatccacttggggtccgtttcctgtcaggcctttgagccctgccagagctactaactcgcctaagcctcacatggtgcctcgccatagcaatcagaatagcagtggttctcaggtgaattcagcaggttctttaacttcaagcccaacaactacaaccagttcatcagcttcaacggtgcctggtacatctacaaatggcagtccaagttcaccttctgtccgaaggcagctttttgtcacagttgtgaagacatccaatgccaccacaacaacagtcacaaccacggcaagcaacaacaacactgcacccacaaatgccacatatcctatgcctactgccaaagaacactatccagtatcatccccatcttccccatcaccaccagcccagccaggaggggtttctagaaacagccctttggattgtggatcagcatctccaaataaagtggcatcttcctccgaacaggaagcaggtagtccaccagtagtagaaacaacaaacactagacctccaaacagcagcagttcttctgggagttcatcagctcattctaatcagcaacaacctccgggatctgtttctcaggaaccaagaccacctcttcagcagtctcaggttcctcccccggaagttagaatgactgttcctcctttagcaacaagttctgctccagtggcggtgccttctactgccccagtgacttaccctatgcctcagacaccaatgggatgcccccagcctactcctaaaatggaaacccctgctattagaccaccccctcatggcacaactgcccctcacaagaattcagcttcagtgcaaaattcatctgttgcagtcctcagtgtcaatcacattaaaagacctcacagtgttccctcttctgtccagctaccttcgaccttaagtacacaaagtgcttgtcagaattcagtacatccagcaaataagcctattgctcccaatttcagtgcccccttaccatttgggccctttagcacattgtttgaaaacagccctacttctgctcatgccttctggggaggatctgttgtttcatctcagtcaacaccagaatctatgctatcaggaaaatcctcatatttgccaaattcagatcctttacatcagtctgatacttccaaagctccaggttttagaccaccattacagagacctgctccaagtccctcaggtattgtcaatatggactcgccatatggttctgtaacaccttcttcaacacatttgggaaactttgcttcaaacatttcaggaggtcagatgtacggacctggggcaccccttggaggagcacccgcagctgctaactttaacagacaacatttttccccgcttagtttgttgactccgtgttcatcagcatcaaatgattcttctgcacagtcagtatcctcgggagttcgtgcaccatctcctgccccatcatcagtaccgttagggtcagaaaagcccagcaatgtgtctcaggacaggaaagttccagtccctattgggactgaacgttctgcacgtatcaggcaaactggaacgtcagctccatctgttattgggagcaatttgtctacatcagtaggacatagtggcatctggtcctttgaagggattggtggcaatcaagacaaagtagactggtgtaaccctgggatgggaaatcctatgatccacagaccgatgtctgacccaggagtattttcacaacatcaagcaatggagcgagatagtacaggaattgtaactccttctggtacattccatcagcatgttcctgcaggctacatggactttcctaaagttgggggtatgcctttttctgtgtatgggaatgcaatgattcctccagtagcacctatccctgatggtgctggaggacccatatttaatggccctcatgctgcagacccttcttggaactcactgataaagatggtttccagctccacggaaaataatggccctcaaacggtgtggactggaccctgggcacctcacatgaacagtgtgcatatgaaccagcttggctgatgaggatcagcttgttagcctgcagattccttttcatttggaggaaatcacaagtggccgaaaaaaaaaaattatgctcccaaatcattctactgatgtgcttgactgaagtgtgtaggctttttgcagaagatcttactaactgacctattttctgtgaacatttgtgactgcccattccccatcatcatccgttttaccttagttagcatttttcttatcatttttctttttttctttccctcttcccctttggacataactttctgttgaagctgttctttggctggttggttttagtactgtaaactgcttctgagcaaacacggaaatttagcaaaattatgtaaacttgatcctgaagttttagaatggcaaataaatgtacaattgtttacataacagaaaaggctaagcagaaagtaaatttcaatatgtcagtatagaggctctactttatgtagacttaaattaatgtgagatatgtaccttcatattcagaaatctggatgtttccttcatacattaaactattaataagcataaaaaaaaaaaaaaaa

SEQ ID NO: 26296 - DNA, 3486 bp, Homo Sapiens
ctcggaggggagggggcgttagccccgcgcagccgccggcgtcgccgccatggacctaggacccttgaacatctgtgaagaaatgactattctgcatggaggcttcttgctggccgagcagctgttccaccctaaggcactggcagaattaacaaagtctgactgggaacgtgttggacggcccatcgtggaggccttaagggagatctcctcggctgcagcacactcccagccctttgcctggaagaagaaagccctgatcatcatctgggccaaggttctgcagccgcaccccgtgaccccgtccgacacagagacacggtggcaggaagacctgttcttctcggtgggcaacatgatccccaccatcaaccacaccatcctcttcgagctgctcaaatccctggaagcttctggactctttatccagctcctgatggccctgcccaccaccatctgccatgcagaactagagcgctttctggaacatgtgaccgttgacacttctgccgaagacgtggccttcttcctggacgtctggtgggaggtgatgaagcacaagggtcacccgcaggaccccctgctctcccagtttagtgcaatggcccataagtacctgcctgccttagatgagttcccccatcctccaaagaggcttaggtcagacccagacgcgtgccccaccatgcccctgttggccatgctgctccgcgggctgacacagatccagagtcggatcctgggcccggggaggaagtgctgtgcgctggccaacctggctgacatgctgactgtgtttgcgctgacagaggacgacccccaggaggtgtctgcaaccgtgtatctggacaaactggccacggtgatctctgtgtggaactcggacacccagaatccctaccaccagcaggcgctggcagagaaggtgaaggaggcagaacgggatgtcagcctgacctcgctggccaaactccccagtgagaccattttcgtgggctgcgagttcctgcaccacctgctgcgggagtggggggaggagttgcaggccgtgctccgcagcagccaggggacaagttacgacagctaccggctgtgcgacagtctgacttccttcagccagaacgcgacgctctacctgaaccgcaccagcctgtccaaggaggacaggcaggtggtctctgagctggcggagtgtgtcagggacttcctgaggaaaacgagcacggtgctgaagaacagggccttggaggatatcacagcttccattgccatggccgtcatccagcagaagatggaccgccatatggaagtgtgctacatttttgcctctgagaagaagtgggccttctcggacgagtgggtagcctgcctggggagtaacagggccctcttccgagagccagacttggtgttgaggctgctggaaacagtgatagacgtcagcacagctgacagagccatccctgagtctcagatccggcaggtgatccacctgatcctggaatgttacgcagacctctccctgccaggtaaaaataaagtccttgcaggtatcctgcgttcctgggggcgaaagggcctctctgaaaagttgctggcttatgtggagggttttcaggaagacctcaatacaacttttaaccagctcactcagagtgcctccgaacagggcttggcaaaagctgtggcctccgtggcccgcctggtcatagtgcacccggaagtcacggtgaagaaaatgtgcagcctggctgtggtcaatctcggcacccacaagttcctgggccagattctcactgccttccctgcccttaggtttgtggaagagcagggtcccaattcatctgccactttcatggtgtcatgcctcaaagaaaccgtctggatgaagttctctacacccaaggaagaaaagcaatttttagagctcctgaactgcctgatgagtcccgtgaaaccccaagggattccagtggctgctcttcttgagccagacgaggtgctgaaggaatttgtcctgcctttcttgaggttagatgttgaagaggtagacctcagtctgaggatcttcatccagactctagaggcaaacgcgtgccgagaggaatactggctccagacctgctccccgtttccactcctcttcagcttgtgccagctcttggaccgcttcagcaaatactggcagcttcccaaggagaagcggtgcctctctttggataggaaggatctagcgatccatatcctggagctcctgtgtgagattgtatcagccaatgctgagaccttctccccggatgtctggatcaagtccctgtcctggctccaccgcaagttagaacagctagactggactgtgggcctgaggctgaagagcttcttcgaggggcacttcaagtgtgaagtgccagccacactttttgagatctgtaagctttcagaagacgagtggacctcccaggcccacccagggtacggggctggcacggggctcctggcctggatggagtgctgctgcgtctccagcggcatctcggagaggatgctgtctctcttggtggtggacgtgggcaatcctgaggaggtcagactgttcagcaaaggctttctggtggccctggtgcaagtcatgccttggtgcagccctcaggagtggcagcgccttcaccagctgaccaggagactgctggagaagcagctcctccatgtcccttatagcctggaatatattcagtttgttcccctgctcaacctgaagccctttgcccaggagttgcaactctccgtcctcttcctgaggactttccagtttctctgcagccatagctgtcgtaattggcttcctctggaaggctggaaccacgtggtcaaactcctctgtggcagtctgacccgcctcctggactcagtcagggcgatacaggcagctggcccttgggttcaaggaccagagcaggacctgacccaggaagccctgtttgtttacacccaggtgttctgccatgctctgcacatcatggccatgctccacccggaggtctgtgagccactctacgttttaagtattgaaaccctcacctgctatgagactttgagcaagaccaacccttctgtcagctccttgcgttcaagggcacacgagcagcgcttcttaaagtccattgctgagggcatcggccctgaagaacggcgccaaaccctgttgcagaagatgagcagcttctgacttggcgtggggagctgggccccaacatggcgggtctgcagaagatcagcagcttcttacctgtgcgggagcgaaaaagctgggcttcaacatggcaggtctgtaggggtcagacccgagcagcctggactttacagttatgtgaaactgtccacaaaacttcatggcaataatggtgtaaagaaaatagtttcttgggtatttgtaacgtacaaactatcataaaaattctcctctttcgcaaaaaaaaaaaaaaaaaa

SEQ ID NO: 26297 - DNA, 3105 bp, Homo Sapiens
cgcggcggcagcagcagcagcagcagcgagaggcagaggcggcggcggcggggaggacagcacggccgaggctgcccagcggcgcctcctccacaccccccgccgcagcagcaccggcgacagattttttaaaaaatggatttggccaaccatggacttattctactgcaacagttaaacgctcagcgagagtttggtttcctgtgtgactgcacggttgcaatcggcgatgtatacttcaaggcacacaaatcagttcttgcttcattctccaattactttaagatgttgtttgtccatcagaccagtgagtgtgtccgcttgaaaccaactgacatacagcccgacatcttcagctatctcttacacttgatgtacactgggaagatggcgcctcagctcatcgacccggttcgattagaacagggcatcaagtttctgcacgcctacccgctcattcaggaagccagcctcgccagccagggagccttttctcaccctgaccaagttttcccactggcttcttcattgtatggcattcagattgcagatcatcagttgagacaagccaccaagattgcttcagcacctgaaaaactcgggcgagatccacggccacagacctccaggataagccaggagcaggtccctgaggcctcacagctctcccagctgacttcaaatctggcccaggtgaatcggacaaatatgactccctcagaccccctgcagacctcgctgtctccagaacttgtttccactcctgttcctccccctcctcccggggaggagaccaatctggaagcatcttcctccgatgagcagcctgcgtccctcacaatagcccacgtcaagccaagcatcatgaagaggaatgggagctttccaaagtactatgcctgccacctgtgtggacggcgcttcactctccggagcagcttacgtgaacacctccagatccacacaggagtacctttcacatctagccaacagggagaaagtcgcgtccccctgactctctgtagcaatgcagctgacctcgggaaagatgccatggaagtgcctgaagccgggatgataagtgacagtgagctgcagcacatctctgattctcccatcatcgatgggcagcagcagtcggaaaccccacccccctcagacattgctgacattgacaacctggagcaggccgaccaggagagggaggtgaagaggcggaagtacgagtgcacaatatgtggacgcaaatttatccagaaaagccactggagggaacacatgtacatacacaccgggaagcctttcaagtgcagcacttgtgacaaaagcttttgcagggccaaccaggctgcccgccacgtgtgcctcaaccagagcatcgacacttacaccatggtggacaaacagactctggaactctgcacatttgaggaagggagtcagatggacaacatgctggtgcaaacaaacaaaccctacaaatgcaacttgtgtgacaaaacattctccactcccaatgaggttgttaaacattcatgccaaaaccagaactcggatgtttttgccctagacgaagggcgatccattctcctgggcagtggggactcggaagtaacggagcctgaccacccagtgttagcttccatcaaaaaggaacaagaaaccgtcttactagactgaatgtcacttatctttttaaaaaactctcatttttacaaagactatcttccctcccttccctgaattcagaactgtagttctccatggcatgatacaaacaggtccttgttctcttctcctcttccccttttccacatcccagccccacctctgtaaaggctttgtgcattataaacctggaatgtatcgactttctttcaggggatattggaaagataatggtcattatacttataaactcaaattttgagaggttttagattattcagaagcatacttggaactaatgaagggtatataataaaacaactggaatccaatttggtaagctaaaattatgactttccctgggtaaaaagtcttctcagaaaaacaatgtcagaaaataacagcgtgctgcttagaaatacggctgggctctgtactatgcaaaatctagaaagtgtggggaaactttaaacccaagaaaacgttcttagtattcatcctccaggtgtcttacttcagaatgcatcctttgagattatgtccacttaagagaaatcatcagttaagaaatctactttaacaaaacaaaaaggagaaaaagtaataatgtgatggcaatcttaatttttgggtacaacatgacaagctgtgagtttgtgtgtttgtaagagaaaaatgtgtgggtacttgctaataaacaggtgaattaatgcacatccttatctcattgctggcttctttccaagttgagcaacaacaaaatgctgtatttgagtttctgacaaatttgttttaaaaatcaaatttgaatgtactattctataaattgcctttctgaatagaacatgacatgccattttctagcagctgccagtgataatttgttttacactaacttttaaatcagtgtgtgtactgcagggaaaaggatataggaatactcatcttacaggggaatttgtgaccagaagatgtagtaacttcaatgactgaaagtcaatgctgatagtttactggcaacattaattgaagcatcaaaaataaatggcaaagagaaatcaggacaaaaaatctaattgctgtttgggaaaaaacttgattttgatgtttattctccaggtttttggttgtttttttttctttcttctttcttaatgcctgaaattttctccattggcccgaaagcagtaaaaattgttcattaatcttccgttaggccaataaaagaagggcctcacaagacaaaacaggagccagaagtaaggactgaaggagaaggggagaatagctaatagctatagtatatgtatatgttaaaaactgaatatcccatcatcctatttcatgtatagttgagttctcaaatttgtaagtttttatacatcctttcattgaataaacgtttaattaaatgagtaaaaaaaaaaaaaaaaaaaa

SEQ ID NO: 26298 - DNA, 1990 bp, Homo Sapiens
aacttggctgacctccgcagcttccgcccgactctggctaaagtcttggaggctactgccttgaagatgacctctagggaccagcccagacccaagggccccccgaaaagcacttcgccttgtcctgggatctcgaactctgagagctctccgacgctgaattatcagggcattctaaatcggctcaagcagttccccaggttttctcctcattttgctgcggagttggagagcatttactactcgctgcacaagatccagcaggatgtggcagaacatcacaagcagataggaaacgtcttacagattgtggagagctgcagccaactccagggtttccagtctgaggaggtctcacctgctgaaccagccagccctgggacgccccagcaggtgaaggacaagaccctgcaggagtcgagctttgaggacatcatggccaccaggtcctccgactggctccggcggcctttgggggaggacaatcagccggagacccagctgttctgggacaaggagccttggttttggcacgacactctgaccgagcaactctggcggatttttgccggcgtccacgatgagaaggcaaagcccagagacagacagcaggcaccaggcctggggcaggaaagcaaggcaccaggatcctgtgacccaggaacagacccatgtcctgaagatgcctccacccccaggccacctgaggcctcctccagtccccctgagggttcccaagacaggaacacaagttggggtgtggtccaggagcctcctggaagagcctctcggtttctacagtccatatcctgggaccctgaggactttgaagatgcatggaagaggccagatgccttgcccgggcagtcaaagagactcgccgtcccgtgcaaactggaaaagatgcggatcttggcacacggggagctcgtgctcgccacggccatcagcagcttcacgcggcacgtgttcacctgtggcagaagaggcatcaaggtgtggagcctgactggacaggtggctgaggacaggttccctgagagccacctgcctatacagacccctggggccttcctgcgcacctgcctgctgtcctcaaacagcaggagcctgctcaccggtggctacaacctggccagcgtgagcgtgtgggacctggcggcgccctccctgcatgtgaaggagcagttgccctgtgcaggtctcaactgccaggccctggatgccaacctggatgccaacctggccttcgccagcttcaccagtggtgtggtcaggatctgggacctgcgggatcagagtgtggtcagggacctcaagggttatcctgatggagtcaagagtatcgtggtcaagggctacaacatctggactgggggtccggatgcctgtctgcggtgctgggaccagaggaccatcatgaaacctctggagtaccaattcaagtctcagataatgagcctgtcccacagcccccaggaggactgggtgctgctgggcatggccaatggccagcagtggctgcaaagcaccagcgggagccagcggcacatggtggggcaaaaagacagcgtcatcctgagcgtcaagttctccccctttggccagtggtgggcaagcgttggaatggacgacttccttggcgtctacagcatgccggcggggacaaaagtgttcgaggtgcctgagatgtctccagtcacgtgctgtgacgtctcttccaacaaccgcctcgttgtcacaggctccggggagcacgcctccgtgtaccagatcacctactgaggggcctcgctgctgtcatcccactccggctcctcttttcatccccccccttccccccccccaacaagggggacatggtggagggaagcgggaaggctcttctgtggcatcgcacgatctagtctgtggtgtagactggtcgccatcacgtgtaataaagcacccgggaaaggcagagtgaaaaaaaaaaaaaaaaaaaaaaaaa

SEQ ID NO: 26299 - DNA, 3300 bp, Homo Sapiens
gggaggaggaggaatgtggaaggtggcggcgcgcgagctgacaggcggttcctcgggcgggctgcggcgacggcccgagcgcttctccttcgccgaggttgcgcgccccctcctcgccgtgccccgggcccgcgcgggatcgtgcgtcgtcccgccgcgtccctgaagggaaggaagcgaggcggcggcggcggcgcccgggagccggagccttcgcggcgtccacgtccctcccccgctgcaccccgccccggcgcgagaggagagcgcgagagccccagccgcgggcgggcgggcggcgaagatggcagaggcaccggcttccccggccccgctctctccgctcgaagtggagctggacccggagttcgagccccagagccgtccgcgatcctgtacgtggcccctgcaaaggccggagctccaagcgagccctgccaagccctcgggggagacggccgccgactccatgatccccgaggaggaggacgatgaagacgacgaggacggcgggggacgggccggctcggccatggcgatcggcggcggcggcgggagcggcacgctgggctccgggctgctccttgaggactcggcccgggtgctggcacccggagggcaagaccccgggtctgggccagccaccgcggcgggcgggctgagcgggggtacacaggcgctgctgcagcctcagcaaccgctgccaccgccgcagccgggggcggctgggggctccgggcagccgaggaaatgttcgtcgcggcggaacgcctggggaaacctgtcctacgcggacctgatcacccgcgccatcgagagctccccggacaaacggctcactctgtcccagatctacgagtggatggtgcgttgcgtgccctacttcaaggataagggcgacagcaacagctctgccggctggaagaactccatccggcacaacctgtcactgcatagtcgattcatgcgggtccagaatgagggaactggcaagagctcttggtggatcatcaaccctgatggggggaagagcggaaaagccccccggcggcgggctgtctccatggacaatagcaacaagtataccaagagccgtggccgcgcagccaagaagaaggcagccctgcagacagcccccgaatcagctgacgacagtccctcccagctctccaagtggcctggcagccccacgtcacgcagcagtgatgagctggatgcgtggacggacttccgttcacgcaccaattctaacgccagcacagtcagtggccgcctgtcgcccatcatggcaagcacagagttggatgaagtccaggacgatgatgcgcctctctcgcccatgctctacagcagctcagccagcctgtcaccttcagtaagcaagccgtgcacggtggaactgccacggctgactgatatggcaggcaccatgaatctgaatgatgggctgactgaaaacctcatggacgacctgctggataacatcacgctcccgccatcccagccatcgcccactgggggactcatgcagcggagctctagcttcccgtataccaccaagggctcgggcctgggctccccaaccagctcctttaacagcacggtgttcggaccttcatctctgaactccctacgccagtctcccatgcagaccatccaagagaacaagccagctaccttctcttccatgtcacactatggtaaccagacactccaggacctgctcacttcggactcacttagccacagcgatgtcatgatgacacagtcggaccccttgatgtctcaggccagcaccgctgtgtctgcccagaattcccgccggaacgtgatgcttcgcaatgatccgatgatgtcctttgctgcccagcctaaccagggaagtttggtcaatcagaacttgctccaccaccagcaccaaacccagggcgctcttggtggcagccgtgccttgtcgaattctgtcagcaacatgggcttgagtgagtccagcagccttgggtcagccaaacaccagcagcagtctcctgtcagccagtctatgcaaaccctctcggactctctctcaggctcctccttgtactcaactagtgcaaacctgcccgtcatgggccatgagaagttccccagcgacttggacctggacatgttcaatgggagcttggaatgtgacatggagtccattatccgtagtgaactcatggatgctgatgggttggattttaactttgattccctcatctccacacagaatgttgttggtttgaacgtggggaacttcactggtgctaagcaggcctcatctcagagctgggtgccaggctgaaggatcactgaggaaggggaagtgggcaaagcagaccctcaaactgacacaagacctacagagaaaaccctttgccaaatctgctctcagcaagtggacagtgataccgtttacagcttaacacctttgtgaatcccacgccattttcctaacccagcagagactgttaatggccccttaccctgggtgaagcacttacccttggaacagaactctaaaaagtatgcaaaatcttccttgtacagggtggtgagccgcctgccagtggaggacagcacccctcagcaccacccaccctcattcagagcacaccgtgagcccccgtcggccattctgtggtgttttaatattgcgatggtttatgggacgttttaagtgttgttcttgtgtttgttttcctttgactttctgagtttttcacatgcattaacttgcggtatttttctgttaaaatgttaaccgtccttcccctagcaaatttaaaaacagaaagaaaatgttgtaccagttaccattccgggttcgagcatcacaagcttttgagcgcatggaactccataaactaacaaattacataaactaaagggggattttctttcttcttttgtttggtagaaaattatccttttctaaaaactgaacaatggcacaattgtttgctatgtgcacccgtccaggacagaaccgtgcataggcaaaaggagtggagcacagcgtccggcccagtgtgtttccggttctgagtcagggtgatctgtggacgggaccccagcaccaagtctacgggtgccagatcagtagggcctgtgatttcctgtcagtgtcctcagctaatgtgaacagtgttggtctgctggttagaaactagaatattgatattttcaggaaagaaatcagctcagctctccactcattgccaaatgtcactaaagggtttagttttaaggagaaagaaaaaaaaaaaaaaaaaaaaa

SEQ ID NO: 26300 - DNA, 3925 bp, Homo Sapiens
acagcacagacagattgacctattggggtgtttcgcgagtgtgagagggaagcgccgcggcctgtatttctagacctgcccttcgcctggttcgtggcgccttgtgaccccgggcccctgccgcctgcaagtcggaaattgcgctgtgctcctgtgctacggcctgtggctggactgcctgctgctgcccaactggctggcaagatgaagctctccctggtggccgcgatgctgctgctgctcagcgcggcgcgggccgaggaggaggacaagaaggaggacgtgggcacggtggtcggcatcgacctggggaccacctactcctgcgtcggcgtgttcaagaacggccgcgtggagatcatcgccaacgatcagggcaaccgcatcacgccgtcctatgtcgccttcactcctgaaggggaacgtctgattggcgatgccgccaagaaccagctcacctccaaccccgagaacacggtctttgacgccaagcggctcatcggccgcacgtggaatgacccgtctgtgcagcaggacatcaagttcttgccgttcaaggtggttgaaaagaaaactaaaccatacattcaagttgatattggaggtgggcaaacaaagacatttgctcctgaagaaatttctgccatggttctcactaaaatgaaagaaaccgctgaggcttatttgggaaagaaggttacccatgcagttgttactgtaccagcctattttaatgatgcccaacgccaagcaaccaaagacgctggaactattgctggcctaaatgttatgaggatcatcaacgagcctacggcagctgctattgcttatggcctggataagagggagggggagaagaacatcctggtgtttgacctgggtggcggaaccttcgatgtgtctcttctcaccattgacaatggtgtcttcgaagttgtggccactaatggagatactcatctgggtggagaagactttgaccagcgtgtcatggaacacttcatcaaactgtacaaaaagaagacgggcaaagatgtcaggaaagacaatagagctgtgcagaaactccggcgcgaggtagaaaaggccaaacgggccctgtcttctcagcatcaagcaagaattgaaattgagtccttctatgaaggagaagacttttctgagaccctgactcgggccaaatttgaagagctcaacatggatctgttccggtctactatgaagcccgtccagaaagtgttggaagattctgatttgaagaagtctgatattgatgaaattgttcttgttggtggctcgactcgaattccaaagattcagcaactggttaaagagttcttcaatggcaaggaaccatcccgtggcataaacccagatgaagctgtagcgtatggtgctgctgtccaggctggtgtgctctctggtgatcaagatacaggtgacctggtactgcttgatgtatgtccccttacacttggtattgaaactgtgggaggtgtcatgaccaaactgattccaaggaacacagtggtgcctaccaagaagtctcagatcttttctacagcttctgataatcaaccaactgttacaatcaaggtctatgaaggtgaaagacccctgacaaaagacaatcatcttctgggtacatttgatctgactggaattcctcctgctcctcgtggggtcccacagattgaagtcacctttgagatagatgtgaatggtattcttcgagtgacagctgaagacaagggtacagggaacaaaaataagatcacaatcaccaatgaccagaatcgcctgacacctgaagaaatcgaaaggatggttaatgatgctgagaagtttgctgaggaagacaaaaagctcaaggagcgcattgatactagaaatgagttggaaagctatgcctattctctaaagaatcagattggagataaagaaaagctgggaggtaaactttcctctgaagataaggagaccatggaaaaagctgtagaagaaaagattgaatggctggaaagccaccaagatgctgacattgaagacttcaaagctaagaagaaggaactggaagaaattgttcaaccaattatcagcaaactctatggaagtgcaggccctcccccaactggtgaagaggatacagcagaaaaagatgagttgtagacactgatctgctagtgctgtaatattgtaaatactggactcaggaacttttgttaggaaaaaattgaaagaacttaagtctcgaatgtaattggaatcttcacctcagagtggagttgaaactgctatagcctaagcggctgtttactgcttttcattagcagttgctcacatgtctttgggtgggggggagaagaagaattggccatcttaaaaagcaggtaaaaaacctgggttagggtgtgtgttcaccttcaaaatgttctatttaacaactgggtcatgtgcatctggtgtaggaagttttttctaccataagtgacaccaataaatgtttgttatttacactggtctaatgtttgtgagaagcttctaattagatcaattacttattttaggaaatttaagactagatactcgtgtgtggggtgaggggagggagtatttggtatgttgggataaggaaacacttctatttaatgcttccagggattttttttttttttttttaaccctcctgggcccaagtgatccttccacctcagtctcccagctaattgagaccacaggcttgttaccaccatgctcggcttttgcattaatctaagaaaaggggagagaagttaatccacatctttactcaggcaaggggcatttcacagtgcccaagagtggggttttcttgaacatacttggtttcctatttccccttatctttctaaaactgcctttctggtggctttttttaaaattattactaatgatgcttttatagctgcttggattctctgagaaatgatggggagtgagtgatcactggtattaactttatacacttggatttcatttgtaactttaggatgtaaaggtatattgtgaaccctagctgtgtcagaatctccatccctgaaatttctcattagtggtactggggtgggatcttggatggtgacattgaaactacactaaatcccctcactatgaatgggttgttaaaggcaatggtttgtgtcaaaactggtttaggattacttagattgtgttcctgaagaaaagagtccaggtaaatggtatgatcaataaaggacaggctggtgctaacataaaatccaatattgtaatcctagcactttgggaggccaaggcgggtggatcacaaggtcaagagatagagaccatctttgccaacatggtgaaactccatctctactgaaaatacaaaaattagctgggcgtggtagtgcaagctgaaggctgaggcaggagaatcactcgaacccgggaggcagaggttgcagtgagccgagatcacaccactgtactccagcccggcactccagcctggcgacaagagtgagactccacctcaaaaaaaaaaaaaagaatccaatactgcccaaggataggtattttatagatgggcaactggctgaaaggttaattctctagggctagtagaactggatcccaacaccaaactcttaattagacctaggcctcagctgcactgcccgaaaagcatttgggcagaccctgagcagaatactggtctcaggccaagcccaatacagccattaaagatgacctacagtgctgtgtaccctggggcaatagggttaaatggtagttagcaactagggctagtcttcccttacctcaaaggctctcactaccgtggaccacctagtctgtaactctttctgaggagctgttactgaatattaaaaagatagacttcaaaaaaaaaaaaaaaaaa

SEQ ID NO: 26301 - DNA, 693 bp, Homo Sapiens
aaattatgtgatttgcataatttgtacatagttaggttcatttgttagtttgtattccttttggcttcccccatatcctcgttgactttttctttcttttgtaacttacatatgttatgaaatttatatgaggatatataattttcataaatgtttatggtttacatgtattagttgttaagatcaccctgggattgactggccaagcatttggtggaagatagcaataaataatacatcataaaagactttaatgtaaaaataaagccatgaaagtaccaagaaataaatcttctcattttaattacatcagcttgtctgtgatcatgtagcctaaggtaggccagagttaatttttgtgttatctatacacgttattgaagcgaattataaaatgttttagcatgttaattacttgtaaattaatatctacatataaaaatgtgagcatatattctatttagtatattaatccttcataaacaagtaatgcaagttagtattaatgatatcttaagacttaacattccttttttagtttgtgttgaataaatgaacatctaagagttcatgatgatgcttaaggaaagaagcctcatgtttacctttggaagttgtaaggcactgactcataaaaattggcaaataaaaggaaagaatcgggcaaaaaaaaaaaaaaaaaaaaaaaaaaaa

SEQ ID NO: 26302 - DNA, 1937 bp, Homo Sapiens
tccgcggacgcgtgggttttttttttttttaacataaaatagaaactaactttatttctctggaagaagcaggtactgaatgccggagcagcaacttcgccaacaggctggtgggaaaacatggaaccgcgtgggggaattgggtggaagaggaagcactgatgtccctccagggcggctgccccttggtctccttccagccctggggccttgggccctggtccccgccagagaatggtctggcaccctttctccgcttcctgagccacctcaggctatttccaggcacaagatcctgaggccagccaagtcccattcaagtccatggtaaggccacaagtcacattctgcccgacaccccagctgctgccaggggccccctggaagaaggcccagtcctaggaggtcccaccgggtgccggtccgcctctccctgtggccaacacatcccgcctgcccaggtccagcctggtttcctcccagtctgtcacccagggcagggcctgggggtactactccacccacaggccccgcccaggaccagggccagaggcaggtcatacccagagcctgctggggcagccctcaagcctgtcttcacccggccccttccacatcttggcaggggcaccgggactgaaccaaagtgtgcagggacagcgctggtgcaggagggatgggcagggcagggctcccagcctcccgcagccttggccttgctccatccccgggagcagcaggagcagcgggtcctccaggactggatgggggcatctccccactcctggtggacggacaggctcaggtgattccttcaggcaggccctctggctctccagacgcatctcagcgcttgtggtgggcagggccccaggagcccagaaggtggcagccggcctgctccaggttccagtcgaacatctccagcactttgtggcactcccctctgggccgcagacccagcccgaagagctgctccaccttcagatactgggcagccctctgcacgctccagccgtggcactgcagggccgcctggcactcctctgtggtcaccccatgcaccatggcctgcagcatctggatcttgtctgctggccggcccgcctctggcccatcgccagggcagcccctctgtggcagccgagcagtggccctcgggggtggtggccgggcccctgggttgctgttgttggtggagaagttggccttggggtccaaggcagcctggggcatcggccgcacggtggccgtgggggcggcgggggctggggtgctgggtgggggcagcagcagaggcacaggcaggggggtaggctcctcggggctctgggcctcacgcaggaagcgctggtagcgctccaggtaggatggtcgctcgggcagcaagtaatagtgggtgctgctgaccttcttgccatcccggacgatgggcaggatgcagggaccagcccgcgggccaggggcctggatcacctggggggtggcgtacttggggtctgaggcaaagctctgggtggtgggcatggtcttcccaggtgagcttgagagccggggtggcagcggggagctgccaggtggtaccagggggctgggtgtcctcgagccttgaggggacaggggctcccgcggaggcacccggggaggggaagcaggtccaggccactggctggtctcctcctcgcccgggggggctggagacagctggacgtgtgggcgcgtgggccgaggggggatgggtacccgaggaggcacctggggcttgtcgtcaccccccgggctgggagagggggccggggagccggccggagcctgcagttgcctcatgcactcctgctgtagcgcctggaagatctctgcggtctgtgcggagctgggcggcttgcccccaccctggggcgggaggaacaggttgtcctccaggggagggggcggcc

SEQ ID NO: 26303 - DNA, 1923 bp, Homo Sapiens
ttttttttttttttaacataaaatagaaactaactttatttctctggaagaagcaggtactgaatgccggagcagcaacttcgccaacaggctggtgggaaaacatggaaccgcgtgggggaattgggtggaagaggaagcactgatgtccctccagggcggctgccccttggtctccttccagccctggggccttgggccctggtccccgccagagaatggtctggcaccctttctccgcttcctgagccacctcaggctatttccaggcacaagatcctgaggccagccaagtcccattcaagtccatggtaaggccacaagtcacattctgcccgacaccccagctgctgccaggggccccctggaagaaggcccagtcctaggaggtcccaccgggtgccggtccgcctctccctgtggccaacacatcccgcctgcccaggtccagcctggtttcctcccagtctgtcacccagggcagggcctgggggtactactccacccacaggccccgcccaggaccagggccagaggcaggtcatacccagagcctgctggggcagccctcaagcctgtcttcacccggccccttccacatcttggcaggggcaccgggactgaaccaaagtgtgcagggacagcgctggtgcaggagggatgggcagggcagggctcccagcctcccgcagccttggccttgctccatccccgggagcagcaggagcagcgggtcctccaggactggatgggggcatctccccactcctggtggacggacaggctcaggtgattccttcaggcaggccctctggctctccagacgcatctcagcgcttgtggtgggcagggccccaggagcccagaaggtggcagccggcctgctccaggttccagtcgaacatctccagcactttgtggcactcccctctgggccgcagacccagcccgaagagctgctccaccttcagatactgggcagccctctgcacgctccagccgtggcactgcagggccgcctggcactcctctgtggtcaccccatgcaccatggcctgcagcatctggatcttgtctgctggccggcccgcctctggcccatcgccagggcagcccctctgtggcagccgagcagtggccctcgggggtggtggccgggcccctgggttgctgttgttggtggagaagttggccttggggtccaaggcagcctggggcatcggccgcacggtggccgtgggggcggcgggggctggggtgctgggtgggggcagcagcagaggcacaggcaggggggtaggctcctcggggctctgggcctcacgcaggaagcgctggtagcgctccaggtaggatggtcgctcgggcagcaagtaatagtgggtgctgctgaccttcttgccatcccggacgatgggcaggatgcagggaccagcccgcgggccaggggcctggatcacctggggggtggcgtacttggggtctgaggcaaagctctgggtggtgggcatggtcttcccaggtgagcttgagagccggggtggcagcggggagctgccaggtggtaccagggggctgggtgtcctcgagccttgaggggacaggggctcccgcggaggcacccggggaggggaagcaggtccaggccactggctggtctcctcctcgcccgggggggctggagacagctggacgtgtgggcgcgtgggccgaggggggatgggtacccgaggaggcacctggggcttgtcgtcaccccccgggctgggagagggggccggggagccggccggagcctgcagttgcctcatgcactcctgctgtagcgcctggaagatctctgcggtctgtgcggagctgggcggcttgcccccaccctggggcgggaggaacaggttgtcctccaggggagggggcggccgc

SEQ ID NO: 26304 - DNA, 1142 bp, Homo Sapiens
ctgaggaagcaaaggagcctgctgaagctgacatcactgagctctgccgggacatgttctccaaaatggccacttacctgactggggaactgacggccaccagtgaagactataagctcctggaaaatatgaataaactcaccagcttgaagtatcttgaaatgaaagatattgctataaacattagtaggaacttaaaggacttaaaccagaaatatgctggactgcagccttatctggatcagatcaatgtcattgaagagcaggtagcagctcttgagcaggcagcttacaagttggatgcatattcaaaaaaactggaagccaagtacaagaagctggagaagcgatgagaaacttatttctatgggacagagtcttttttttttaatgtggaagaatgtcttataaaacctgaatcctgaggctgatgaattgtgaaaattcctcaaaaggaaattatgctggtcatcacaggaacatctcaacgttcgagtaaactggaggactgtggctattcctgaaccttctttgagacagaatccctcagaatctcacacttataacttcctaccttttacttgaatgctttgccatattcaggacagagactctcacaaagttcagaaaacagctggacttaccagtaaaatcaaatgagaggacctattttctctggtagtggttgattactacattattttcttaagtggctggttttttagttactatgtaaatggtcgtttttctgttaatgatgctaatgtgttgtaaacaagattctaaatttaaaaaggaaaacaaaacaaacttgttctttgcagcttatcaccttgtgaatgtcggtaacttacttttccataatattgcaaataacataaaatcttaaaataattccaagctgagtcttctagattgagcagaaatggtgaaaggagtattgataacttggcgtatgtgatgggcccctcttgtttattttctatgtgagtcacattgacatgcgatcagtttgggaaatgtgatgaaaacaaagactagatgggtatgtgtgtttatgtgttgggtagggaggtgacgattgccactcataaaataaaggattttataaaataaaaaaaaaaaaaaaaaaaaaaaaaaaa

SEQ ID NO: 26305 - DNA, 2381 bp, Homo Sapiens
ggagtgcgctgcggcgcgagctgggccggcgggcgtggttcgagagcgcgcagagtccagactggcggcagggcccgaggggccgacccgcagcgtccctggtctctccagccctcactcggaaccgcactgacaataccctcccctcccttgggctggacccctctctacagctaggagccaatggcagaagacaaaaccaaaccgagtgagttggaccaagggaagtatgatgctgatgacaacgtgaagatcatctgcctgggagacagcgcagtgggcaaatccaaactcatggagagatttctcatggatggctttcagccacagcagctgtccacgtacgccctgaccctgtacaagcacacagccacggtagatggaaggaccatccttgtggacttttgggacacggcaggccaggagcggttccagagcatgcatgcctcctactaccacaaggcccacgcctgcatcatgtgactgcttcctgcatctgctgcatctccgtgggctcccctcagaccctcttctgaaggcctggggtgtctctcctgccaccatgcctgtgtctgcaggtgcctgccaccagccccagtctgctgcacgggccctggcgagtagaaagcacttgccttctgaccacacggggagctgagggtcagagacggaaccagggctcgaccctccaccttgaaaccttgagatggggatgctcctcattctagccagctcctcctcagctctcaaaacaaggaacagatgctcaggaaaccagacctggacaaaaggcatctgagcctggtgtgaggcagattccagaagtttagttacagacatcctttataaggagtcttcatcgggaattcaagacaacctggtgattcattgaaatttgcctgtgaaagagaatctacatagacttcctgccacctcttgagatgtgacagttgctgaccctcccgccaccacacagggcgagcccctagccctgagcttgaaccgtgttgcttgcacaaatagctgggtgatttagaagtgaggtcagctgtgccagcggttacagggtggtggttgtctgtaactttaatccactgactgttgtactagggcagtttgggctagacactttggaggagctcctgtgaagggcatgaaggctcactgtagcagcagctcagttgtctttcagagttctgcccttaagagctggtttgcagtgctcatccttcttgctgatattttaaaataggtagaaacaggctgggcgcggtgactcatgcctttaatcccagtactttgggaggcctaggcgggcagatcacctgaggtcaggagttcgagaccagcctgaccaacatgttgaaaccccgtctctactagaaatacaaaaattagccaggcgtggtggtgcgcacctgtaatccagctactcaggaggctgagacaggagaatcatttgaagacaggagaatcgtttgaacccaggaggtggaggttgcagtggcagtgagccaagataccgccactgcactctagcctgggcaacagagcaagactccatctcaaaataaatacataaataaataaaaataaaataggtaaaaacaaattataaagtaatacaattatgaactgcaaataataaaacataaaaattactttaaaaaaatttaaagaggccgggcacagtggcttatgcctgtaatcccagaaatttgggaggccgaggcaggaggatcacttgagcccgggagtccaagaccagcctcgttaatataatgagagcttatctctacaaaaaataaacaaaattagccaggcatggtggcatgtgcctgtagttccagctactcaggaggctgaggtaggatcaccggagcccagggggtggaggagcagtaagccaagattctgccactgcactccagcctggctgacagagtaagaccctatctcaaaaaacaaaaagcagaaagaacaaagaagtaaacagaagcttaaaagtaaatcagccaggtgcagtagctcatgcctgtaatcccagtactttgggaggcctaggcaggcagatcactgcaggtcaagagtttgagaccagcctggccaacatgatgaaaccctgtctctactaaaactacaaaaattagccaggcatggtggtgcgcacctgtaatcccagctactccggaggctgagacaagagaatcacttgaacctaggaagtggaggttgcagtggcagtgagccaagatagcgccactgcactccagcctgggcaacagagcaagactccatatatggagatcccttgagatcaagagttcgagaccagcctggccaacatggcaaaaccctgtctctacaaaaaaaaaaaaaaa

SEQ ID NO: 26306 - DNA, 2183 bp, Homo Sapiens
agggggccgagcggcgggccgggccgggccgggcagggccggggcgtgggccggcaggaagatggcgaacgtggggctgcagttccaggcgagcgcgggggactcggacccacagagccggcccctgctgctgctcgggcagctgcaccacctgcaccgcgtgccctggagccacgtccgcgggaagctgcagccccgggtcaccgaggagctctggcaggctgccctgagcacgctcaaccccaaccccacggacagctgtcccctctacctgaactacgccaccgtggctgccctgccctgcagggtgagccggcacaacagcccctcggccgcccacttcatcacgcggctggtgcggacctgcctgccgcccggagcgcatcgctgcattgtgatggtctgcgagcagccggaggtctttgcttccgcctgtgccctggcccgggccttcccgctgttcacccaccgctcaggtgcctctcggcgcttggagaagaagacggtcaccgtggagtttttcctggtgggacaagacaacgggccggtggaggtgtccacattgcagtgcttagcgaatgccacagacggcgtgcggctagcagcccgcatcgtggacacaccctgcaatgagatgaacaccgacaccttcctcgaggagattaacaaagttggaaaggagctggggatcatcccaaccatcatccgggatgaggaactgaagacgagaggatttggaggaatctatggggttggcaaagccgccctgcatcccccagccctggccgtcctcagccacaccccagatggagccacgcagaccatcgcctgggtgggcaaaggcatcgtctatgacactggaggcctcagcatcaaagggaagactaccatgccggggatgaagcgagactgcgggggtgctgcggccgtcctgggggccttcagagccgcaatcaagcagggtttcaaagacaacctccacgctgtgttctgcttggctgagaactcggtggggcccaatgcgacaaggccagatgacatccacctgctgtactcagggaagacggtggaaatcaacaacacggatgccgagggcaggctggtgctggcagatggcgtgtcctatgcttgcaaggacctgggggccgacatcatcctggacatggccaccctgaccggggctcagggcattgccacagggaagtaccacgccgcggtgctcaccaacagcgctgagtgggaggccgcctgtgtgaaggcgggcaggaagtgtggggacctggtgcacccgctggtctactgccccgagctgcacttcagcgagttcacctcagctgtggcggacatgaagaactcagtggcggaccgagacaacagccccagctcctgtgctggcctcttcatcgcctcacacatcggcttcgactggcccggagtctgggtccacctggacattgctgcaccggtgcatgctggtgagcgagccacaggcttcggtgtggccctcctgctggcgctcttcggccgtgcctctgaggaccctctgctgaacctggtgtccccactgggctgtgaggtggatgtcgaggagggggacctggggagggactccaagagacgcaggcttgtgtgagcctcctgcctcggccctgacaaacggggatcttttacctcactttgcactgattaattttaagcaattgaaagattgcccttcatatgggttttggtttgtctttctggtcgtcagcgtggtggtggaaacagctgaagttttaggagacagcttagggtttggtgcgggccacggggaggggaccgggaagcgctggggcttgtttctgtttgttacttacaggactgagacatcttctgtaaactgctacccctggggccttctgcaccccggggtgaggcctcctgcctgcctggtgccctgtcccagccccaggtcctgtgcagggcacctgcgtggctgacagccaggctcttactccagccggggctgccagcgcatccagccagcccagccctgtgaaagatggagctgacttgctgcaggggacctgatttatagggcaagagaagtcacactccggcctctcagaattcacttgaggttcaattaaatacagtcacaccgccccctcaaaaaaaaaaaaaaaaaaaaaaaaaaaaaaaaa

SEQ ID NO: 26307 - DNA, 1955 bp, Homo Sapiens
gtcagttttccctctgactcttctgtgttaaaacatgaaactataaatttagtaattatcatgccttgctctttttaatctatatgactgatgcaagcccctcttcttaaccgtttcttggctttgagcccagaaacacagctctccctgtctccaactccagtaagccctcctcagcctcaccttacgaatccaaagaactggggtttgttaggttctttctctaatgtagaggcccagatcccatcacaaagtttttcattcttccttgtccaccatgatcttcatcacagtctttgatatgtctgcatgcaaagtggaacagagttgggcggcaatgacagaagagcttccttggcctgactcggtgtgcggccacttcggcactgcttaatccagatattcttgttaactaagcattgtgcttcccaggtggtctgaagtcaggtactctctctctcaacacctgtagttgaatatgatttggtcagttgctcgttgtaacttggagaaattcctataaagtaagatctccttgcctcttccatccattgttggcacccccttgcaaaaggaaaagaacagcaaaagtcaggagcagtaatctgagaaagttaactccaggataggtaggtttctattgttatagctagatgtaaatctttagttccaagaagtgatagagtttctgctttaataatttgttgataagtttacataaacagaaataaaagatactatctttaccgtagtagttcaggccaagattatgcttagttttagttctccaggtagttacttttgccatgtcctattgatcagtgacactgccagaggcccataccggcaagaggaagaggacgtcattttgtaaagtttaacttcttagcgaactgatgtgccacccagtcacagagtggagttgtgaattcatgtagaggtggcaaacctctaccttgtgttgatgagagaataatcttgggcagtctgggaaaataaggaaggcatctccttcttactcatggagattcaactatagagagttgaaacctaaacccgccttccttttatagaagctggactagagacggactgaccatcagctctgaactgtggctttttttgttcacctatgatgccatgtaccaaattcagaagctatcgttaataatttgttttataattgagtagtacaagcgaggaaaaaatacggaggataaccactatttttgtgcaaatagtatgaaagtgaagtaaaagcaatagaagaaatttctataggatctgggtttagagtgtgtatcattaataaatatacctttgctcttttcagggaaaataacaaccacccttactgatagttgggaaaagaagattgggttattttgccatatcatttagctggaagtgacatttaaaagcaccctgcatcactagtaatagtgtattttgctattctgcccttgtaatcggtgtccctgtaaaacaatccccacagattactttcagaaatagatgtatttctctacgtaagggccaggtttattttctccttttttgagatttctagaaaaaatgctgcttgcacatgttggttcttgaaaccttagctagaagaatttcaggtcataccaacatgtggataggctatagctgttcagaggtctcctgggggagcttaaaacgggggaaacactggttttcacagatgctccacatggctgtctttaaaagactcaaaacttttttttgtcctctttgttatgcttggaagctcccccccccccaacagtgtgtcgagtctttgcaaagaaacctttagatgtggttcatagatatatgaatacgtatctgtgtaaaacagtgagtgtgcagtgtgtaaatactttaaattattatgctagaaaaataaagttacataccttgctgtggaaaaaaaaaaaaaaaaaaaaaaa

SEQ ID NO: 26308 - DNA, 4516 bp, Homo Sapiens
gaggagtggggcaggctcggcgccggtaggaagagtcagaggggtgaccagagagcccaacgcctggtgctcaagactttctccgagctatgaaacccacgtagtcgaacaccgtgatgcttctcctgcagggcgtgtgatgaggaggcgagcttggctttggagtgctgggaacctgaggaattgccaaggacccagagcccagccctgaccaccagagtgcccaaaacacaatgaacaaattgaattttcataacaacagagtcatgcaagaccgccgcagtgtgtgcattttccttcccaacgatgaatctctgaacatcatcataaatgttaagattctgtgtcaccagttgctggtccaggtttgtgacctgctcaggctaaaggactgccacctctttggactcagtgttatacaaaataatgaacatgtgtatatggagttgtcacaaaagctttacaaatattgtccaaaagaatggaagaaagaggccagcaagggtatcgaccaatttgggcctcctatgatcatccacttccgtgtgcagtactatgtggaaaatggcagattgatcagtgacagagcagcaagatactattattactggcacctgagaaaacaagttcttcattctcagtgtgtgctccgagaggaggcctacttcctgctggcagcctttgccctgcaggctgatcttgggaacttcaaaaggaataagcactatggaaaatacttcgagccagaggcttacttcccatcttgggttgtttccaagagggggaaggactacatcctgaagcacattccaaacatgcacaaagatcagtttgcactaacagcttccgaagctcatcttaaatatatcaaagaggctgtccgactggatgacgtcgctgttcattactacagattgtataaggataaaagggaaattgaagcatcgctgactcttggattgaccatgaggggaatacagatttttcagaatttagatgaagagaaacaattactttatgatttcccctggacaaatgttggaaaattggtgtttgtgggtaagaaatttgagattttgccagatggcttgccttctgcccggaagctcatatactacacggggtgccccatgcgctccagacacctcctgcaacttctgagcaacagccaccgcctctatatgaatctgcagcctgtcctgcgccatatccggaagctggaggaaaacgaagagaagaagcagtaccgggaatcttacatcagtgacaacctggacctcgacatggaccagctggaaaaacggtcgcgggccagcgggagcagtgcgggcagcatgaaacacaagcgcctgtcccgtcattccaccgccagccacagcagttcccacacctcgggcattgaggcagacaccaagccccgggacacggggccagaagacagctactccagcagtgccatccaccgcaagctgaaaacctgcagctcaatgaccagtcatggcagctcccacacctcaggggtggagagtggcggcaaagaccggctggaagaggacttacaggacgatgaaatagagatgttggttgatgacccccgggatctggagcagatgaatgaagagtctctggaagtcagcccagacatgtgcatctacatcacagaggacatgctcatgtcgcggaagctgaatggacactctgggttgattgtgaaagaaattgggtcttccacctcgagctcttcagaaacagttgttaagcttcgtggccagagtactgattctcttccacagactatatgtcggaaaccaaagacctccactgatcgacacagcttgagcctcgatgacatcagactttaccagaaagacttcctgcgcattgcaggtctgtgtcaggacactgctcagagttacacctttggatgtggccatgaactggatgaggaaggcctctattgcaacagttgcttggcccagcagtgcatcaacatccaagatgcttttccagtcaaaagaaccagcaaatacttttctctggatctcactcatgatgaagttccagagtttgttgtgtaaagtccgtctgtgtgcagctgtacaggcagcttactgtttgctagaggatgcgaaagtcataagttctttacatattacttgtgccatatcttcttcaccctaaacatagctctttctttataatatttgtgatgatggaaacaaaagccttggaacaattgcactttaagtattacacagaagtaaaagaactacagaaaatgtacagcaagacaagtgcccggaagttcactgatccttcagaaggaaatgcgctttactgattgcaaagccttcagaatattggagtgtggtgtgtttgctcatctgatgctttttagttcagttacatgtaacatcacattttttatcacgtgaaagatgttagatttgtttgcttataaattttttaccactcccacataaaatgctcatagtttgggagaggaaagagggaagattctctcttcttttaacagagagatgattgctctgtatacccattgcttcctccctgaggctgtcccaaagtgaacactgatggagtggtcaaaatcataaggttgtagcaagccaaagatacgtatgtgacagaagcacataagcaataagcagaaaaccagaagtgcatgctgtgatgcctgtgactccttcatcccgctcagtgccatgtcctcttttgtgatcttccagaaagctccaggattcatttgagttccacatccaagtaacagatgaattatattcatgttgtaatgcattttgtggagtttacaaaaccagtgtctgttaaaactttggaaaatgtcttagaaaacgttggtgcttggtgatgctttatttgtttaattatcaagaacaaattatggcaatgctagtttctgcttaaccaaaatactctgtgtatatattatacatatataaatacatgggattgtgtatgtctatatgtgtttaaagcttactatgtcttcattttggcttccatgactatcttttatacatggaattccttaagattgagaatatgtcactgagtgaatgatacctgcagacagtcagttgatatatgtagagttcagaatgactgttttctcatgtgcctttggccatgattctcaacactgattgtataacagaattttggggggagcttttaaaaaataatgactgagtctcccaccagaccgattacatcattctcttgtggcgggacccaagtagaattgccttttcttttaaagttctccagatggagctaatatgcaacaaagttgaaaaccactgatcctgggggtgtcttgttaattttgaagtaaaagtgtacagaagacgtagtgtatgagaaagggccatttttaagacagttacctgttgtgctgctgttacaatatataatgaaaccaagtcaggggagtgaatttatcaatcttttgatgtaaagtaaaaacgtagttcacacttcaggagagaacttcatagcacaatgtctttctataagatatttttaatgatttagtattttacaacatttgtttaccatattttgatataccatttttttctatctgcccagttttattaaaaaaactatatattattttctaaagaaacaatcatatttttatacaaaattatgttttcaggtaacgaaatagatgtagggtacagtggaacataagcagtgttacccctggctgggagtcagtattatacaacaaatggtgagctggaacatgccctgtctgtgctgtccctcctgtgctgggtcgcggatgtgtaggcaacattgccttatcacgctaggttcacctgacactttaaaaggaaaaaaagttccatagagttctgtggtcacaaaattgttttgcttttatcaaatactttaatagaaccaaagttgcagatattggaatgtatggaagtatctcagtctctgcataagaggattaaagtatgaaaggatcatttaatgactgttttacttataagtcattaagtaatccaccatttcttatggatgatgcttaagcctggtgaggtttgtactctaaggagcccagatcataatgcagtgcatttccttagcccttagagtttcttgcaaacatttaaaaaaagacatatttaagaaagaagataaagaaaaaacatatttaattactgtaaacaggtactgctttatgtttattttctctctacttcaaccaaaatcagatctttgaggttttgctgacattgttggtggttttgcacatgttctttctaattggatttatgaatagttctatgggttttcaaagatgaatcatgctaagaacacttctgctttttgatccactgtttgcagcagaattatatatatgtataggaaaaatccactttgaataatccatgttttgtatttggaaattgtttttaaaaataaaaaggaaaggaaatataaaaaaaaaaaaaaa

SEQ ID NO: 26309 - DNA, 3167 bp, Homo Sapiens
cctgagaggacgcctctggagccgcgactgcccggggttgtgccggccgccgctgccgcccaggccgcctcagctctcctctgcgccggcccgctcactccgcccggccccagccctagcgctggccgcgaccccggcgcctttgaaacttctgctggtgtgagtgccctcaggggttccccaggaatatcgatacaacaccaacaggagatcatgaatcagacagataaaaatcaacaagaaatcccatcataccttaatgatgaaccaccagaaggttcaatgaaagatcacccacagcagcagccaggcatgttgtcccgtgtgactgggggtatcttcagtgttacaaagggagctgttggtgccaccattggtggtgtggcttggattggtggaaagagtctggaagtgaccaaaacagctgttacaactgtgccttccatgggaatagggctggtgaaagggggtgtctctgctgtggctggaggtgttacagctgttgggtctgctgttgtaaacaaagtgcccttaacaggaaagaagaaagacaaatctgactgaaatatagagatacacttgcgctccacagcactgtaatgccagtggcattgaattgctaaattatggactacaaccaagtcaactgttttggacgtttatcttctaaactgctgtgttgaaagtattgatgactggctttcatctaaaaagaagagaccaatacgagcacagtatatgaaggtttctcatacttaagttccaggtttttatctggtaaaatgttacacttactcggttgtaactgaagatatggtatgtttgaatatttactataagtctttcagtttgactaaaaatgtgaaagttgaatttagtagatgatcttcacagttccatatgtataatgtgccaggtaactcacctgccccttaagaagggaaccttgaattacataagccgtacctttgatgtgcctaatagtttcagatgtcttagttttttataaccatagttgattaggccaagaggcattcatttcttatttaagctggcaaaattagcaggaattagagaagtttaaaaagataaatggttttatgataatgttaaccatcttttgttagtaaatatgcgttctattattttaatcattgatgccttacaaaagaaaacatcttttctaataccctgaatatgtgctgttcttagaatcatctatggattcttttaaaggttgtttgtgaaattagttttccctttttagaatctcaggagtagtggggtaaagacatttcctgctgtcagtggataagacagagcttgttaactgttttggcagtagttaaaatcaaattgtacacttctcagcctgggttcatgcttcatcattaatacacctcacagtgcctaaggaacatttacttactggtcagaaggtattttggaagagtttcatattaaggaggaacaaataataattttaagttcttaaaaattacctaaaacaccccaaatataaaaagaagccttcacacctattctgtctttaggatgtcttaaattattagcagtactccttttttaaaaacactgtaaaagtaaccacaaatatgtgaggacttactattttaaatggaatggaatgagctccatagattagttttgaatataaagtatataaaagtgcatcagtggtttatataggctttaaaaacatgttatcttacagtcctttaaagcagccatagagtttgtatcatttttcaagccaatttcagtcagggatttgaattgtttgattatggatgataaatgtgtcatatcttattaatatgtctcatgtctcgttccttcttaatatgatttagctggaattcattttcttttcgtttcatgtttaatttcataaaacgtttaacaattggcatatatacttggcattcctgtccaccaaggattgtaatccaagcctgggaaaatcttaaatttctttttacttaaatctggaaatttgtctccattctgccacctttttttttttttttttatagtggaggggaggaaaggggggtgataccttgcagtaagtaagtcgaaatagcatgcctgaaaatttgaaacagaccattctaacacccaaggcttgtttataaaatacttgagaattacattaatgtggaatcaacagatgcagaagaatataacataacttttaaaagctttcataaataccagcagcaattgtaagcaaatctacaaaggttcttgaacctttctattatatacaaaactgaaaagtcattaaggagttcaactaatcaggaattaaatggtcatttatttcatgcagtatgatttaaggtatttcttgagattctggtcaaatgtcataatcagcaaacgggattaaaaaaaaaactccaaaatcactaaataattatctaaataatggtattggagaacttgtttcctgctatttggaagagattgttgcttcattgctagtttgtatttctaacttctacagttatagactccactgtgctttgtgtctgaatttctcagtatagacattttgtttactgtatgcttgcatatttattttcaactttgtttgtctttaaaattgcttgaggaaaaatggttgtaattaatttctgctacagaaaagccacctggtacgttttgtctcatcaggattgttttaaattctaaactataagtttgttcagaggggcttttgcaatgatagcagaaaactgtacaaatgtacagttagttatagaggttcttgttgaaatgaacttaccatctgatgatatgtatgtacagctgtgtacttgagtcttttttagtttacttagaaagactagcagtttgacctgttaaacaggactagttcaagtcaagaaactaaggttgttgtatacacctggaggcatctgttattcagcttatcctttgagtgggtatttggcacaatgaggataaacttatgtgacccacttgaatggctgatctaataatgttgacattatgcattctgtacttagtgaaatgtcagatgaaaataactgatgaataatttttttgtattaaagggatgggaaaagaacacatgaatttgttaataaagcactatgatctgcaaaaaaaaaaaaaaa

SEQ ID NO: 26310 - DNA, 3473 bp, Homo Sapiens
cggaagaaaaaccagcaagaaggcggcgggggaagatggcggtcctggggtagagtttgcaagctttctgactaggctagtcgagtaactattcgggtcatggcgtcaaactcaactaagtctttcctggcagatgccggctatggcgaacaggaactggatgccaactctgcccttatggaattggacaaaggcctaagatctggcaaacttggtgaacagtgtgaagcagttgttcgctttcccagactttttcagaagtatccattccctattcttatcaattctgcattcctaaagttagctgatgttttcagagttggaaataatttcctgaggctatgtgttcttaaagttacccaacaaagtgagaaacatttggagaagattctaaatgtggatgaatttgtgaagagaattttttctgtgattcatagtaatgatcctgtggcaagagccatcaccctccggatgttgggaagtctggcatcaataattcctgagaggaagaatgctcatcatagtattcgtcagagtttagattcacatgataatgtagaagttgaagctgctgtttttgctgctgcaaacttctctgcacagtcaaaggattttgctgtaggaatctgtaacaaaatcagtgaaatgattcaaggtttagcgacaccagtagacttgaagctaaaattgatacccattctacagcacatgcaccatgatgcaatcttggcttccagtgctcgtcagcttttacaacagctggtcacatcctatccgtccaccaaaatggtgattgtgtctttgcacactttcactctgcttgcagcgtcatctttggttgatacacctaagcagattcagcttctgttgcagtatttgaagaatgatcccaggaaggcagtaaagagacttgctattcaagatctgaaattacttgctaataaaacaccacatacttggagtagggagaatattcaggcactttgtgagtgtgccctccagactccttatgacagcttaaaactagggatgttgtctgtcctttccacactatcagggaccatcgccatcaaacattacttcagtatagttccaggaaatgtgagttcttctcccagatcttctgatttagtcaaattagcccaagagtgctgttaccataataacaggggcattgcagctcatggagttagagtcctaactaatataactgtttcttgtcaagaaaaggatcttttggcactggaacaagatgctgtctttggcctggaatccctactggtactttgtagtcaagatgatagtccaggtgctcaggccactttaaagattgctctaaactgtatggtgaagttggccaagggcaggccccgtcttagccagtcagtagttgagaccttgttgactcaattgcacagtgctcaagacgctgcccggattttgatgtgccattgcctggcagccattgccatgcaactgccggtgctgggtgatgggatgcttggtgacctcatggagctgtacaaggtgattggacgatcagccacagacaagcaacaagaacttctggtgagtttggctactgtgatttttgttgcaagtcagaaggcattgtctgtggaaagtaaggcagtaattaagcagcagcttgaaagtgtctccaatggatggactgtataccgtattgccagacaggcttccagaatgggtaatcatgacatggccaaagagctttatcagagtttgctgactcaggttgcctcagaacatttctacttctggctaaatagtttgaaggagttttcacatgcagaacagtgtctcactgggttgcaagaggaaaattatagttcagcactttcttgcattgctgaatctttaaaattctatcacaaagggattgcttccttaacagcagctagtacaccactgaatcctttaagctttcagtgtgaatttgtaaaactcaggattgaccttttacaagccttctctcaacttatctgtacttgtaatagcctgaagacaagcccaccacctgcaattgccacaacaattgccatgaccttaggaaatgacctccagaggtgtggtcgcatctccaatcagatgaaacagtccatggaagaatttcgaagccttgcttctcgatatggagatctttaccaggcatcttttgatgctgactcagcaactttgaggaatgttgaactacagcagcagagctgtttactgatatctcatgcaatagaagccctgattttggatccagaatcagcaagtttccaggaatatggatctactggaacagcccatgctgatagtgaatatgaaagaagaatgatgtctgtatataatcatgtcttggaggagcacacagcatgcctctgcaatgccatcattgctttgctgaaagttcccctttctttccagagatattttttccagaaactacagtctaccagcatcaagcttgctctgtcaccatcgccccggaatcctgcagagcccattgctgtccagaataaccagcagctggcgctaaaggtagagggagtggttcagcacggatctaaaccaggactcttccgcaaaattcagtctgtctgtctgaatgtttcttccacactgcagagtaaatctggacaagactacaagatacccattgacaacatgaccaatgagatggagcaaagggttgaacctcataatgattacttcagtactcaatttctgttgaactttgctatccttggaacacacaacattacagtggaatcttctgtgaaagatgccaatggtatagtatggaagactggtcccagaactaccatatttgtaaaatccctggaagacccttattcccagcaaattcgcttacaacagcagcaagcccagcagccattacagcagcagcagcaacgcaatgcctacacacggttttaaccatggaatgaatgcactgcagactctcaagagatcaatcaaattgccagaaacagtttggtttttcatatggaataagtattaaagttacagtgtagttcatttattcattgatttttgtaatgtaatattctggaaaaaattttgttttcttaaaaattttgtctgacagctgggcgtggttgctcacgcctgtaatcccagcactttgggaggctgaggtgggcggctcacgaggagatcaagaccatcctggctaacacagtgaaaccccgtctccactaaaaaatacaaaaaaattagccgagcatggtggcaggcgcctgtagtcccagctacttgggaggctgaggcaggagaatggtgtgaacctgggaggcggagcttgcagtgagccgagactgtgctccagcctgggcgacagagcgagactccgtctcaaaaaaataaataaatacattttgtctgaaaaataaaaaaaaaaaaaaaaaaaaaaaaaaaaaaataaaaaaaaaaaaaaaaaaaaa

SEQ ID NO: 26311 - DNA, 3270 bp, Homo Sapiens
ctaagacaggtgcagacgtatgtcggctttggcgtatccatcaagctttatattgctttgattatgatttggaggaaagtggagaaattaaagatatgttacttgagtgcttcataaatattaattatatcaagaaagaagagggaagaagatttcttagttgtctcttcaactggaatatcaacttcatcaaaatgatccacgggaccattaaaaaccagttacagggattacaaaagtctttgatggtatacattgcagaaatttatttcagagcttggaaaaaggcttcagggaaaatactggaggcgattgaaaatgattgcatccaggacttcatgtttcacgggatacaccttccgaggaggtctccagtgcattccaaagtgcgggaggttctgagttactttcaccatcaaaagaaagttcggcagggagtggaagagatgctttatagattatataagcccatcctttggagaggattaaaggccagaaactctgaagttcgatcaaatgctgcattgttgtttgttgaagcatttcctattagggatccaaaccttcatgctattgaaatggatagtgaaatccagaaacagtttgaagagctctatagccttttagaagatccttacccgatggtccgttccacagggatccttggtgtttgtaaaataacttctaagtactgggaaatgatgcccccgaccattcttattgacctcctgaagaaggtgactggggaactggcatttgacacgagctcagctgatgttcgttgttctgtctttaagtgtctgccaatgattttggacaacaaactgagccacccattgttagagcagctccttccagctctcagatacagtctccacgacaattcggagaaagtgagggtagcttttgtggacatgctgttgaagatcaaagctgtgagggctgctaagttttggaaaatatgtcccatggagcacattctggttcgtctggaaactgattctcgacctgtgtctcggcgcctggtgagcctcatctttaattctttcctgcctgtgaatcagccggaggaggtctggtgcgagcgctgtgtcaccctggtgcagatgaaccacgccgctgccaggaggttctatcagtacgcccacgaacacaccgcctgcaccaacatagcaaagctgattcacgttattcgtcattgcttaaatgcctgtatccagagggcagtgagagagcctccagaggacgaggaggaagaggacggaagggagaaggagaatgtgactgttctggacaaaacactgtcagtaaacgatgttgcatgcatggcaggtttactagaaatcattgtgattctctggaaaagtattgacagaagtatggaaaataataaagaggccaaactttacacgattaacaagtttgcctctgtgcttccagagtatctgaaagtatttaaggatgatcgctgcaagatccctttattcatgctaatgtcctttatgccggcctctgctgtccccccattcagctgtggtgtgatttccacgctgagaagccgggaggagggcgctgtggacaagagctactgcactttgttggattgcctctgctcctgggggcaagtggggcacattctggagcttgttgacaactggctgcccacagagcatgcccaggccaagagcaacacagcttctaaaggtagggtgcagatccatgacacacgcccagtcaaacctgaattggcattggtctacattgagtatctgctgactcatccaaagaaccgcgagtgcttgctctctgctcctcggaagaaacttaaccatcttttgaaagcccttgaaacgtcaaaggcagatctggagtcacttctgcagacaccgggtgggaagcctcgtggcttcagtgaagcagctgccccgcgagcctttggtctccactgtcgcctgagcatccatcttcagcacaagttctgctcagaaggaaaggtgtatttgtccatgttggaagacactggcttttggttagaaagcaaaattttatcttttattcaagatcaagaagaagactacctgaagcttcatagggtcatttatcagcaaattatccagacctacctgactgtgtgtaaagatgttgttatggtaggccttggtgaccatcagtttcagatgcaactcttacagcggagtcttggaatcatgcaaacagtgaagggatttttttatgtttcattacttcttgacattctgaaagagataactggaagttccttgattcagaaaacagattcagatgaagaagttgcaatgctgttggacacagtccagaaagtatttcagaaaatgttggaatgtattgcacggagcttcaggaagcagccggaagaaggcctgcggctgctttattctgttcagaggcctcttcatgagttcattactgctgttcagtctcggcacacagacacccctgtgcaccggggtgtactttctactctgatcgctgggcctgtggttgagataagtcaccagctacggaaggtttctgacgtagaagagcttacccctccagagcatctttctgatcttccaccattttcaaggtgtttaataggaataataataaagtcttcgaatgtggtcaggtcatttttggatgaattaaaggcatgtgtggcttctaatgatattgaaggcattgtgtgcctcacggctgctgtgcatattatcctggttattaatgcaggtaaacataaaagctcaaaagtgagggaggttgcagccactgttcacagaaaactaaagacattcatggaaattactttggaagaggatagcattgaaagatttctctatgaatcatcatcaagaactctgggagaacttttgaattcataaccaagccaacatctccagacatgtaaaaatagggaaaagtgattcaaattgaaatgcctgtgtattttcctattgtttttaatgttaataacccatataatagggaaagggtgggatttttttgtgggaatgtgggaaggtgggggttatggaggagataactcaaaacttcttcaattttgcctagtgcctgcgtaaataatatatttaatataaaggactccaggtataaatggtgtagaaatccatgattccaagaaaaaacacttttctagcaaacctggttgtttttaaaatgacttttatatatgtaatattgcttggaaactatgagtaataaagcaatgacaacaaaaaaaaaaaaaaa

SEQ ID NO: 26312 - DNA, 3761 bp, Homo Sapiens
gcgaagactaaggcggcgccgggccccacagcagcagccgcagcccaagcgagcgcagcagcgcggcggcagccgcgggagcccctgggcaggcgtccgcccgcgcagccgccgccgccgcgggagcccgtcgccgggagcaggagcgggcggaagacaacggaggggccgagcgtccgagccactccgcggggaccgaacgagcagcccgaagcggcggcggccgaggacggggacagcgacgacgcggaggcagagaagggaacgcccggcccagccccgtagcacaggcggagtgcagcggaggcccctgccgctgccgtcatgccgttcccgtttgggaagtctcacaaatctccagcagacattgtgaagaatctgaaggagagcatggctgttctggaaaagcaagacatttctgataaaaaagcagaaaaggctacagaagaagtttccaaaaatctggttgccatgaaagaaattctgtatggcacaaatgaaaaagagcctcagacagaagcagtagctcaacttgctcaagaactctataatagtgggctccttagcaccctggtagctgatttacagctcattgactttgagggcaaaaaagacgtggctcaaattttcaacaatattctcagaagacaaattggtacgagaactcctactgttgaatacatctgcacccaacagaatattttgttcatgttattgaaagggtatgaatctccagaaatagctctaaattgtggaataatgttaagagaatgcatcagacatgaaccacttgcaaaaatcattttgtggtcggaacagttttatgatttcttcagatatgtcgaaatgtcaacatttgacatagcttcagatgcatttgccacattcaaggatttacttacaagacataaattgctcagtgcagaatttttggaacagcattatgatagatttttcagtgaatatgagaagttacttcattcagaaaattatgtgacaaaaagacagtcactgaagcttctcggtgaactactactagatagacacaacttcacaattatgacaaaatacatcagtaaacctgagaacctcaaattaatgatgaacctgctgcgagacaaaagtcgcaacatccagtttgaggcctttcacgtttttaaggtgtttgtagccaatcctaacaagacgcagcccatcctagacatcctcctcaagaaccaggccaaactcatagagttcctcagcaagtttcagaacgacaggacggaggatgagcagtttaacgacgagaagacctatttagttaaacagatcagggatttgaagagaccagctcagcaagaagcttaatctccaataaacatctatgttaaatccaaattcagcatttgctgttagctattcagcatcaggcactcttattgattcatgaggaacattactgctaatctgctgttaagtgaacggtttttcattttacccttttgtttttcagtccaggttggagatcgtagctgctgctgcttgcacactagggcacatgtgggctttctcttgatctttgtgtcatttcagaattcaaagactgtgctacgggagttctgaacatggctgggttcatgaaggcaaatgtatggatgagagtgtggtttaggaaagagggcactgatatcagattagacctatgtgtttgcacccatctttgttggcgatctgagtgcagtgtggcaagtgcacacctggcatccctgcgtcagatcgcgcaccttcaggtcgcgcaccttcgctgaaggaagatgacgcagagctttatctgaaatcagaggggaactatccaaaatgggagtttgggggcagctaaagttgacatgcgaataaattgatactgaaacttagcaacttcttaaaagtgtaaagaagcctcataagatcataaggaaaatgtatatatgcttttcacagctttctagaattttttgacatttgattttcttgagacttgtaaacctggatatgttgaagggtatttgttaattttacttttcaaagatactttaaaacagtagagctagcaatgacaccttgcatttcatttcaacactgcttcaaggtttcttttgtatataattcttagaatgctcatttcttttaaatggtttaatttgtacagcagaggaatgttattgtagtagtatgtaactattacctaatactgagtttttgcaaaaaacaatgaatgctcatatgtaattgaaatacttcagatcacatgaaaatgctgatttaacatttaagtatcacagcattaaaagaaaaagaaagtaaaccagtcctttgtattcagttacctaatggggtgccatcaataagctgcgatacagccctggagctcagtcagccacaccttcctgcatcctattggccttattcattttaaatgagttaatgaatctgccagatctgtgaatgatagagattatgctaaattaatgctgattctttgtgtgtgtgggaaatctctgtagagcaccttttctttcttagactaagtaacccagtacaatagttgtgaactgaataattaaaactttggcttctcttaggaaaagacgacttcctagtcataggtgtcctatggggaaatttattttttttaatgtcctgttccttaatgctgcaaattatcagtatttataaagtaactgattttgcaccacttttttgttactgtgaccacggcagaacaatgtcttctagactatatctatgtaaagttattagaatggtatctgttcattttagtgatatgaagatcacaactaacaactgacaaatcagagtttgccagttcaaattcagcatggctgcagctgattaagaaattgatatgattattctttgctagcctctcttactaatggaattatatactggccagtaaaatgggcctcccaattgctgtttcagcaggttttaaaccttcaggaacaccagttaggaaaatagctccagaaaatatagatatattttatttttattaaaatggcagtctacatcataattggcatttctcaagactgtctttaccagaatctgtgtgaaataaggcaatctagtctccttgaaaaaaaaatctcttggatgtttaggaaggaagacttggccgtgatgtggtgtcctggctttgtggtgtagtgctgtgtgtatggagttagtgtaaaaacatggattacaccaagtggaagaaacgtcttcttgccaagctcattcttagaacttacacatctagaacagcttccactttggcagtgaggtcgtagccttttaggtggaagaagtgagggtgcagcgtgtcagacacaacattcatgttactcttacattggaatctgaaggtagttcagacttcgtgggttttgtttttaagcaaaacaatgtgaaaacatttaagtttgaaatgttgcatttgaagttatgatcatttaatatattcatattaccaagactattatactggaagtggtttttgtgttataaaggtttaattttacataaggcagttacttaatgtgatttttaacccttaaaaaagtggagatgtatacatttgttaacaatgccatgaaagcattttctttctcctaaggaaaagtgaatttcttatcagaatatctggctggccctgtaatttaaattaaaataaaattttggagaaacaaaaaaaaaaaaaaaaaaaaaaaaaaaaaaaaaaaaaaaaaaaa

SEQ ID NO: 26313 - DNA, 4192 bp, Homo Sapiens
tgaagattgatgtctatttccttgagctctttaattttgttgccaatttggataaacatggcacaaatccagcagggaggtccagatgaaaaagaaaagactaccgcactgaaagatttattatctaggatagatttggatgaactaatgaaaaaagatgaaccgcctcttgattttcctgataccctggaaggatttgaatatgcttttaatgaaaagggacagttaagacacataaaaactggggaaccatttgtttttaactaccgggaagatttacacagatggaaccagaaaagatacgaggctctaggagagatcatcacgaagtatgtatatgagctcctggaaaaggattgtaatttgaaaaaagtatctattccagtagatgccactgagagtgaaccaaagagttttatctttatgagtgaggatgctttgacaaatccacagaaactgatggttttaattcatggtagtggtgttgtcagggcagggcagtgggctagaagacttattataaatgaagatctggacagtggcacacagataccgtttattaaaagagctgtggctgaaggatatggagtaatagtactaaatcccaatgaaaactatattgaagtagaaaagccgaagatacacgtacagtcatcatctgatagttcagatgaaccagcagaaaaacgggaaagaaaagataaagtttctaaagaaacaaagaagcgacgtgatttctatgagaagtatcgtaacccccaaagagaaaaagaaatgatgcaattgtatatcagagaaaatggttctcctgaagaacatgcaatctatgtttgggatcatttcatagctcaggctgctgctgagaatgtgtttttcgttgctcacagctatggaggacttgcttttgttgaactgatgattcaacgagaagccgatgtaaaaaataaggtaactgctgtggcattgacagactctgttcacaatgtgtggcatcaagaagctggcaaaacgattcgagaatggatgagagagaactgttgtaattgggtctctagctcagaaccattagacacatcagtggagtccatgctacctgattgcccccgggtctcagcaggcaccgaccgtcacgagctaacttcctggaagagctttccgtctattttcaaattctttaccgaagcctcagaggccaagaccagctccctgaagccggctgtgacgcgccgctcccaccgcatcaagcacgaagagctgtaagaggagcgagcgcgacgggggaggccgccctggcgcacccacccgcacgcctcctcactgcttgtgtcgagcggactcccagcccctcattagattgttttcttcccagagcccagggtcgtgatatatacatctaaatagcgttttgcattatttctagatgagtgcaactgtcaaagcaatatgggttcactggtcgtgcttcctgcgggctgagcgcgggctgagcgctgccagtcagcgctcacattaaggctgacagcgccctgcctggctcggccggcgaagctctaattgccctgaaggagaccgcgcgggcgctgcgggtccggcggcgtcggcgcggtcctagcgcccgccgtagcggagccgctgctgcttccccctccttaatcatgtccatctttccccgctctcaactggagcaaacttctattccagacttcagatttccattttcactaggtttttccctgagggcatcttattacccacctcttttttttttttttttaaggaagttccacacacactccaaagccgatttcaaattcagaacctgaatgccatgatgtaccatgtagtttggggaatgcaaattgttctctccctgttttcatttcgggaccagaaaaaaaaacaactctgcataaaaatctataaagtactgaatccgcattactgctgaaaatccttttgccagctaattgtgagagtttacacaagtctctgatttcagaagagactgttaaaaccaaaacaatgatgggcagctcttttaagtgtaggtgtgaaggtcccattttcaatggaatttccaactgttatcactgggattgactttactttttaaacacataatgtgtactgtgtggcattgtaatttagatataacacacttaagttttgctttttaaatctctctgtggagaaaggttgttgttaatcctttccagaatgatctattctgagctttcctggagttaggcccttctagggagagaatttttttattgtcatcaggaaacgaaacctttgtgctctgcagcctttttcttctgaaaggctaagtggggctaaaattatccttttagttttctgctttaacaagaagagaaggacttggtgtgaaagaatttcttctctcagtccaatggtataatttttagcactccgcttcctctgtagggtttagccctacagtttgaacaattattttaatccagctaagatgtggccaacactgtgaaatacaggagatgttaaggttttgctgacttttacattaaaatcttaaaatttcacattatattttaattacttgaaaagtttaattacctagtaaagattgtttctaatagatgagaacataaatttaatagttttcatccttttttaaagtgtgtgcaacaattaatatgcctgccttatttgaggacatgataaaatgtacccaaaatgacttcgaactgtctaatgcctcagaaaagtaacttaaaatcaaccacttcgtgcttaaatgtttttatattatgaaccgatttcaacaagttttaaagctgttaatatctcattgctgtgtttgacatacaagtacattcattggttctatagtcttaatgatgacaaattaaagatgttttttcagtgctcaggtatgcatatattttcgtgttacttaagcaaaatcaactatataggaggaaaaatcaaaatggcattttattcagctaccagatggcttaaaatgagtaaaccccaacaacatcaagcacatttgtctgtgatattgaccctttttatccaatcattactattttagaagtagtggtgaactgtgtaaaataatggtatcttcagcagtgttccggaatcttagttgagggacaaacattccttccagtgagagattcaagaattgatgtgaattgaatatatttttcaaggtattataaattgtgttgtgttttcagtataagaaaatgttgacaggaaacaattttatagcatttataaaaaaccaacacttgtgcaatgctaaattggcgaagcttctgcacctgaattagagcacaataaatatgctgtttataaaccaaatcactgctattccttctctgaaatcatctctcctctttttaaacctttacttatagctagaataaatcactatttaattgcctctaatactttaaaactactggatggttaggcctggtttaactatttatggagagctatttgcaaacttaagttgtgtaaatgtaatttctacttgtgaatctgagctgtagcagcccagagggagctaggcaaactattccagaccaccaactgataagtgatcagattctttgtaatgtaggattttttaacctgttgattatgggtttgttgatataaatgtaataatgttcacctcgattttcctggagtaacaaccagcgttggtagtagcccacctgcatgaggacggccagtgttaacaatatttttgttctgatcttcttccccatttttgtttcctcaaacaggtttttaggagagtggagatttaaagtcaggatgtggcctttttattttaattatatacttaattcttagaacaagtagaatgggaaaggagtgactgataaatctaagattcaaaatagtcccgtcgaaacttaaaggccagattattgctttggagctttctataggtactagccatcccgtcgttaaatgttttcatggatatttgaaaagaagaccatgtacctttaataactgttcttttctcgagtttctgcctcgtgctttgacctggattgcattattattgtttatgcgaagtaaaaaaaaaaaaggaaagcacaagcttttcctgtatattatatttccatttccattttaaaataaaaacaattttcccaacaaaaaaaaaaaaaaa

SEQ ID NO: 26314 - DNA, 2477 bp, Homo Sapiens
caacagggggaagcgagtagcattatctgatgatgagataaaggaaactgaaaacatgaggaaaaagaggagaagaatcaaacttcctgaatctgatagcagtgaagatgaagtctttccagactctcctggggcttatgaagctgagtcaccatccccacctcctcctccgtctccacctcttgaaccagtgccaaagactgagcctgaacctccttctgtcaagagctcaagtggagaaaacaaaagaaaacgaaaacgcgtactaaaatctaaaacttacctggatggggaaggctgcatagtgactgaaaaagtctacgagagtgaatcctgcacagatagtgaagaggagcttaacatgaagacatcctcagtacacagaccccctgccatgactgtgaaaaaagaacccagagaggaacgaaagggccccaagaaagggactgctgctctgggcaaagccaacagacaggtgtccattactggcttcttccagaggaaataaactgccatctctggtagatcagagacttggagtggtcaagggagaagaccaagaaatgtactcctcacttactatgtaagttcatctagatctccacctcacctgtatcaaaagactgttctttcatcctgtgaggtttatactatttctggtttttaaccaaaaggaaatcatctggaagcaggaggcaaaaagctgttaccttctaatgacatttaaaaagcacagtctttgacctgtccaggagaaggatttactccaaaattatactggaacagttttcagaattctcactgaagccatttagtggctaacccactgtgctccactcaccctatgccctggtccgcatatggcacaggaattattccttcttgttcctctgtattctaagaattcatgtgggtgtttcttatccttacattctgctggatacgtttacccctcttgtcttcctgcagtaccacacttctgtcccctaacctcctgaggctgttctctgtaagtcttttaagttttggttggactaaaggctgaagtgaaaatctccctgtaatcctcttcctccattatgcagtacacggacacctggctacagaccaggacgtggcttgtgttctgttcctttcacaaaagctctctgggaccttcacttgcaattagtggttagggaaaagcctcaggcagaacacaaatagaaatttaatgatgtgttcaactccaccagaaattacctcgagtcagcattgacgatattggaggagctgccgtgctgctgatacggggtgtgctttatgctgctctttgcggtttgttgatcccctcctcccccactctcaatacctagagagtgaaacccgtacaatgagataaagactaaaaagagaaatcccttcctatatacagtgtgctacatttacaaaaaatttctccttaagaaaacagaatattcaaaaacagcacttttccaggaagttagtgaggaagataaggcacacatttatttataaatggatgttgctcctttgtatttttagcttccctatttgcttaaaagtacaggctccctaagagaggatggagagggagagactgaattgttagtaggtctaaacatcaaagaaaacatttttattagttacttatggaaaatcatctattacaatgataaccttcaagtgacttccattatggctggacaggcggtgagctcagtggattgcagtggtgtgctggtgattttgcacagtgagctctgcggaaggggtcaggctcaactgctgatgtgtctcacacgtagcagacaaggggtgtctgactggcttcttttgcctcaagatggtgtatgtcgtaagtgatgcaatcagctgtctgctttttaaggttgggattgtgctgactttgggattaacatgagcttctttagcaaccaagcatgaacttgattaagaccagaagtttgggagatgagtcctggcattatgtctaggactaaagcagtggctttgtatagcaagctgagtaaaggttgacatattccaaaacccttctttttaaaatgaaaaaggatggagagaaggatggaaagcctggacttaaacctttagaaaaaacttctggagagaaatcccttttaaacagttacttttgtcattgcctctggtcatttgtctaaataggaatggaaaattaaaagaaaagcaacaatccaatcttttttctaaaaattatgctggggtctcgactaaaactgaatttgaattggaaaattctggtgttggttggagttccatcttgcaagggataatacaaatcctatgatctctatgcccaatatgctgcctcaactctgagctgtctgcaaggcttagtaagtattgagtggtgttttttttttctttttatacaataccatgttaaccacatgagttaaataaatttgagaagttgttttaaaaaaaaaaaaaaa

SEQ ID NO: 26315 - DNA, 1580 bp, Homo Sapiens
gagcggccgatccgagacgtggctccctgggcggcagaaccatgttggacttcgcgatcttcgccgttaccttcttgctggcgttggtgggagccgtgctctacctctatccggcttccagacaagctgcaggaattccagggattactccaactgaagaaaaagatggtaatcttccagatattgtgaatagtggaagtttgcatgagttcctggttaatttgcatgagagatatgggcctgtggtctccttctggtttggcaggcgcctcgtggttagtttgggcactgttgatgtactgaagcagcatatcaatcccaataagacattggacccttttgaaaccatgctgaagtcattattaaggtatcaatctggtggtggcagtgtgagtgaaaaccacatgagggaaaaattgtatgaaaatggtgtgactgattctctgaagagtaactttgccctcctcctaaagctttcagaagaattattagataaatggctctcctacccagagacccagcacgtgcccctcagccagcatatgcttggttttgctatgaagtctgttacacagatggtaatgggtagtacatttgaagatgatcaggaagtcattcgcttccagaagaatcatggcacagtttggtctgagattggaaaaggctttctagatgggtcacttgataaaaacatgactcggaaaaaacaatatgaagatgccctcatgcaactggagtctgttttaaggaacatcataaaagaacgaaaaggaaggaacttcagtcaacatattttcattgactccttagtacaagggaaccttaatgaccaacagatcctagaagacagtatgatattttctctggccagttgcataataactgcaaaattgtgtacctgggcaatctgttttttaaccacctctgaagaagttcaaaaaaaattatatgaagagataaaccaagtttttggaaatggtcctgttactccagagaaaattgagcagctcagatattgtcagcatgtgctttgtgaaactgttcgaactgccaaactgactccagtttctgcccagtttcaagatattgaaggaaaaattgaccgatttattattcctagagagaccctcgtcctttatgcccttggtgtggtacttcaggatcctaatacttggccatctccacacaagtttgatccagatcggtttgatgatgaattagtaatgaaaactttttcctcacttggattctcaggcacacaggagtgtccagagttgaggtttgcatatatggtgaccacagtacttcttagtgtattggtgaagagactgcacctactttctgtggagggacaggttattgaaacaaagtatgaactggtaacatcatcaagggaagaagcttggatcactgtctcaaagagatattaaaattttatacatttaaaatcattgttaaattgattgaggaaaacaaccatttaaaaaaaatctatgttgaatccttttataaaccagtatcactttgtaatataaacacctatttgtacccaaaaaaaaaaaaaaaaaaaaaaaaaaaaa

SEQ ID NO: 26316 - DNA, 950 bp, Homo Sapiens
cgcctccctcgctccacgcgcgcccggactcggcggccaggcttgcgcgcggttcccctcccggtgggcggattcctgggcaagatgaagtgggtgtgggcgctctttctgttggcggcgctgggcagcggccgcgcggagcgcgactgccgagtgagcagcttccgagtcaaggagaacttcgacaaggctcgcttctctgggacctggtacgccatggccaagaaggaccccgagggcctctttctgcaggacaacatcgtcgcggagttctccgtggacgagaccggccagatgagcgccacagccaagggccgagtccgtcttttgaataactgggacgtgtgcgcagacatggtgggcaccttcacagacaccgaggaccctgccaagttcaagatgaagtactggggcgtagcctcctttctccagaaaggaaatgatgaccactggatcgtcgacacagactacgacacgtatgccgtgcagtactcctgccgcctcctgaacctcgatggcacctgtgctgacagctactccttcgtgttttcccgggaccccaacggcctgcccccagaagcgcagaagattgtaaggcagcggcaggaggagctgtgcctggccaggcagtacaggctgatcgtccacaacggttactgcgatggcagatcagaaagaaaccttttgtagcaatatcaagaatctagtttcatctgagaacttctgattagctctcagtcttcagctctatttatcttaggagtttaatttgcccttctctccccatcttccctcagttcccataaaaccttcattacacataaagatacacgtgggggtcagtgaatctgcttgcctttcctgaaagtttctggggcttaagattccagactctgattcattaaactatagtcacccgcaaaaaaaaaaaaaaaaaaaaaaaaaaaaaa

SEQ ID NO: 26317 - DNA, 1157 bp, Homo Sapiens
agacgctcctgtcggcggcgcccgggagcggctcggctgcccgatgcttccgccccggctgccgcgggccgggctgtacgcttagtgcccggctcaggccccctgaagcgcccgcgggggtgagagcggcctccggccccgcggagacggagcggcttgaggacgaggcggcggccgcggggaggaggatgggggctaaccagttagtggtgctcaacgtgtacgacatggtgagtgcggcccctggcggccccgagccctggcccaggccggcttcctctcgcccgtggggctcggaccccggccccaggcgcttcctgcctggcgtctccgcctccagcctagttctcgggggaagccgggggtgaaggagggagtattgttattttttaatcctcgcactcgtcgacgctccggtgaacccagtcagcccgagggttttggccaaagctcgggtgggcttgaacctctcccatccgctcagcttggacccgaccccggctctgggcccgaccccttggccgacgtgcagtgtcctttcggcaaagcttccgttgcgtttccaaccccacttgccggcccccggggctgccccgggacccccgtcccgaccgcctgcgctcccagctcctctgcttctgccgaactgtccgtctctctccatggctacgtcttcagaaactcccaagcccctctaagtccagaaggtcacagctttcgggtgcctgtgctagaatctcttcaaaggtgaacaggagccaacacaccctttccttgtgtgttaaaggcaacctcgttaaaatatgaatgaggctaacatttctcaagaaaatagcccagctgaattatttagagatcctggtggtgctcctttcctacactctgaagaccactttccagattgggctgctgcggatcatttcttttcttccataactctgccgtatgcatgaaaataattctattgggggtcaccagtattaacttccttctcatggaagaagagtgtgatcctcagaaggttacttaattatgcatagtgttcctattgcttgctgccttatcagtgattatgttcctctgtgtactttggagtaatctaccaccaataaaaacgtcctggagcaaaaaaaaaaaaaaaaaaaaaaaaaaaaaaa

SEQ ID NO: 26318 - DNA, 856 bp, Homo Sapiens
gaccagcccagcatccacatagtctacacagagctccccttgctgcccagacaagctgaaggaccacaggaaaagccatggagacttcagcatcctcctcccagcctcaggacaacagtcaagtccacagagaaacagaagatgtagactatggagagacagatttccacaagcaagatgggaaggctggactcttttcccaagaacaatatgagagaaacaagtcttcttcctcctcctcctcttcctcctcatcctcctcatcttcttcatcctcctcctcctcaggtcctgggcatggggagcctgacgttttgaaggatgagcttcaactctatggagatgctcctggagaggtggtaccctctggggaatcaggactccgaaggagaggctctgacccagcaagtggagaagtggaggcctctcagttaagaagactgaatataaagaaagatgatgagtttttccatttcgtcctcctgtgctttgccatcggggccttgctggtgtgttatcactattacgcagactggttcatgtctcttggggtcggcctgctcaccttcgcctccctggaaaccgttggcatctacttcggactagtgtaccgtatccacagcgtcctccaaggcttcatccccctcttccagaagtttaggctgacagggttcaggaagactgactgaggccacttccaggtgggcagcagaggcaggccccagtgtgaccaccactgcgacccctgagcccacaagggcagagcagcattctgagagacgcacaggagaccaagccagaccaataaacagaacacttttccttcaaaaaaaaaaaaaaaaaaaaaaaaaaaaaa

SEQ ID NO: 26319 - DNA, 2313 bp, Homo Sapiens
ggatgccgaaggtgaaggcgctgcagtgcgccctggcgctggagatcagctcagtaacttgcccaggagtcgtgcctaaagacatagaggacatctatcttagcatctgtgtgtttggccaatacaaaaagacacaatgtgtcccagccacttttcccctggtcttcaatgccagaatggtgtttgaaaaggtgttcccggacgcagtagatcctggagatgtggttacacagcttgaatatgatacagcagtgttcgagttgatacagctagttccaccagtgggtgaaacactgtctacgtatgacgaaaatacacgagatttcatgtttccgggtccaaaccaaatgtctggacaccatgattcaaaccgccaggttaccatgaggaggatttctggccttcgaggaaatgctccaaggctggaattttctacgacttcagtgattactgaatgtctgataagttcaaggaaatgccacactcaggataaatttatttaccatttggctccagttgaaaaatcacatggcagactgcaaaacagaacatcaagatcacaaaagaaaaaatccaagtcacctgagagaagtaaatactgtataaatgcaaaaaactacgaacagcctacaatttcttcaaaatcacactctccatctccctacacaaaaagacgcatgtgtgagctatctgaagacaccaggcggcggctggcccatttaaatctgggaccctatgagttcaaaaaagaaacagataaacctccatttgtgattagacatgttgatcccccaagtcccagggctgatactttattgggatcttctggaagagactgtgaaagagatggatggtcaagggtgcacaatgatcattctcatcttggctgctgccgacccaaggattataaggttatcaggacaccccatgggagagacttcgatgactctttagaaaaatgtgaagagtatttgagcccaaggtcgtgtagtaagccccggcattcagcgaggaccttgctagtccattcagcaccctcaacaatgccaaagcattctccaagccctgtgttaaatagagcttctctcagggaaagatttcattctgattggtgttcaccttcaaactgcgatgagatccatgaccgggatgagagagacctagagaaagatgatgaactggaactgaaaagaagtcttttatgtagagactctgcctatgacagtgaccccgagtatagctcatgtcagcagccacgtggcactttccatttggatgacggtgaatactggtccaacagggcagcctcttataagggaaaatcccaccgacccatctttgagaacagcatggacaagatgtacaggaacttatacaaaaaggcctgtagttctgcttcacatacacaggaaagcttctgagaccatccatgataaacctcattagtgtccgtgtcaatttctcaatgaaaatgtttgatgtgatcaatatctgtattcctttttttaaaaaaaatgggattataactaagtacaatagttatacttgaataagttcattacttcaaatggtaaattatcataggcaagccttttaaaataattattacagaagagtctgctgtgttacaaacattagagctctgtcacacaatcacaacttccaatatgtgacaaggatattctgttacatgtacacctcatattccatctgcaaatccaagaatagttcctttctagaaatgttttttttgccttactcaccttgcaattttcttctcatctacttaactggttatcttgcctgtgtaagatttaattaatattgactaccttttcttggtgatgaacaaaatgatatcctatacagaaatgaatttcctaagggtttaaaccctgttttcactaacattttctactttttcctttttcagaacaggctattctatttcttagctcataggctttctttttaaagactatatgatcattcactcctttttctctggaagaactgtgtaagttgcttaaaatgcatagcagttagctagaaatatcagtgccatggatgatcaaaaatttgaataactaatttttaaagataaaattctttgcatgattttttttctagggccataccttttggtgcaaccagaatcagaaaatggcctctgttagtaagcttatagaaacctaaaaataataatggaattatattgtaatttgactgcttggaatttgtgtaagtaccatatggcccaaggcactattatagtatcctcacaaaaaaaaaaaaaaaaaaaaaaaaaaaaaa

SEQ ID NO: 26320 - DNA, 1289 bp, Homo Sapiens
agacacggtcgcctccacatccaggtctttgtgctcctcgcttgcctgttccttttccacgcattttccaggataactgtgactccaggcccgcaatggatgccctgcaactagcaaattcggcttttgccgttgatctgttcaaacaactatgtgaaaaggagccactgggcaatgtcctcttctctccaatctgtctctccacctctctgtcacttgctcaagtgggtgctaaaggtgacactgcaaatgaaattggacaggttcttcattttgaaaatgtcaaagatgtaccctttggatttcaaacagtaacatcggatgtaaacaaacttagttccttttactcactgaaactaatcaagcggctctacgtagacaaatctctgaatctttctacagagttcatcagctctacgaagagaccctatgcaaaggaattggaaactgttgacttcaaagataaattggaagaaacgaaaggtcagatcaacaactcaattaaggatctcacagatggccactttgagaacattttagctgacaacagtgtgaacgaccagaccaaaatccttgtggttaatgctgcctactttgttggcaagtggatgaagaaatttcctgaatcagaaacaaaagaatgtcctttcagagtcaacaaggtatgtggggcagcatgtagcagtaaaaggagcccaattatagatgtgaaaaatgacagggacagagtggggcataaatccattccaatgaggaacctgagggcacggccggcaaagtgcctttcctgagatgaacagctggaaggtaagtggtacaaaaagagccagaatccagaggccccccctcctcttttccataatgtcttcaaggatctgagctgagtgaaactttatagaatttgtaacccagcgaggaaagctaagtcaccggctgaaaaatagctacaaacatctgagaactttagcagaaaaggaaaagaccaaactctgttatcagaggactttggattatcatgaaaccttgacatctaggaatcttgttcctgattgattaacttctctaacatctcatttccttatcggttgatagcgaagtatattgttctgggattttaatttataatttataagatgctttgatggctgggcgtggtggcttatgcctgtagtcccatgactttgggaagccgaggagggcagatcacctgaggtcaggagttggagaccggcctggccaacatggtgaaaccctgtctctaccaaaaaaaaaaaaaaaaaaaaaaaaaa

SEQ ID NO: 26321 - DNA, 1501 bp, Homo Sapiens
aggtccacgccgtaaacagacaacatggcggccgcggtggcggcggcacctggggccttgggatccctgcatgctggcggcgcccgcctggtggccgcttgcagtgcgtggctctgcccggggttgaggctgcccggctcgttggcaggccggcgagcgggcccggcgatctgggcccagggctgggtacctgcggccgggggtcccgccccgaaaaggggctacagctctgagatgaagacggaggacgagctgcgggtgcggcacctggaggaggagaaccgaggaattgtggtgcttggaataaacagagcttatggcaaaaattcactcagtaaaaatcttataaaaatgctatcaaaagctgtggatgctttgaaatctgataagaaagtacggaccataataatcaggagtgaagtcccagggatattctgtgctgctaatcttccagtaccaacaattgcagcaatagatggactcgctttaggtggtggtcttgaactggctttagcctgtgatatacgagtagcagcttcctctgcaaaaatgggcctggttgaaacaaaattggcgattattcctggtggaggggggacacagcgattgccacgcgccattggaatgtccctggccaaggagctcatattctctgcgcgagtcctcgatggcaaagaagccaaagcagtgggcttaatcagccacgttctggaacagaaccaggagggagacgcggcctacaggaaggccttggacctggcgagagagtttttacctcagggacctgttgcaatgagagtggcaaaattagcaattaatcaagggatggaggtcgatttagtaacagggttagccatagaagaagcttgttatgctcagaccattccaacaaaagacagacttgaaggtcttcttgcttttaaagagaaaaggccccctcgctataaaggagaataaaaggaacagaaattcttaagatgccaatgtaataaatgtacttcctggaagtgtctttcggatccactatatgcctcagcacatggaaccttaatgaccaaagtgaagagcagattattcatacggtgtaataagcatctggaatggacccatccgtgtacttcattcaaatgtgtaaatgtcatattcattcagatttataaagctagtagtgtatagtcagaaacagaatcaaagttagatatacatttttaaatatttactgcatatgaggctttctgttaattttttaatgtgaataatttatatattgcacattctagggaataatattgattgtatgtctactgtgctgcattaagaaaataaaatttctatataccaaaaatgtgaagttataccaaataaagtttctaagtgattaatgcatacgaacagctacatatacatatatctaaacctgaaaaatgaattgatattctgagtgaaaactacctaatataaataaaattagaaaaaaaaaaaaaaaaaaaaaaaaaaaaaa

SEQ ID NO: 26322 - DNA, 1112 bp, Homo Sapiens
aacatgatgaaagctggaaaaattcttgacaaaatactacataaattatttcaaagagaaacatctgtgttaagttgctttcatcttttctttgccatgaatttatcagaaaaacatacttttaaaggtttttttctgaattttagccaattggtagctatctttagacaaggagtaaccttgaatttacatttttagctatttgggcaaaaaacatttaagcactgtattttaatattgctaacctgatttagagaattaatacttttaaattggtggtttaattttttaaaccatttaaacaaaaatgtctttattatgttttcagaattggttttataccctggaatgttgaaacagaagtccttcctctcatttcttctgtgttgccaagaactatttttccaacaagtaccatatctttcgaacattttggtaaagtttgtgaaatcattttctattttaaaaattattattattagtttcttccagtttcataaaaatgtgtgtttgatgacttagaaaagctgtaaagtaaggcatagtaacttgtaaatacgtctataaatatttggacaatgacttaactttagaattgcttcaactagagtgtatgtatatatagatagatagatacatagtctctccatatatctatatacacacacaatggaatattattctgccacaaaaagaaggaaatcttgtttgtgccaacgtggatgaacctggaggacattaggctaagtgaataaggcaggcacagaaaggcacataaccacatgatctcacttatatgtggaatctaaaaaagttgatctcgtagaactagattgtagattagggggtggggtaggtgtggtggggtggaggttgttggtcagaggatacagtttcagctggatagaataagttctaaagatcaattgtgaaacgtgatgactataataatacagttgacccttgaacaacataggttttaactgggtggcgacattatacatgaattttaaaaaataaatatatcggaaaatgtttggagatttgcaacactgaaaaaacagaaaaatcgcataacctataaaaaaaaaaaaaaaaaaaaaaaaaaaaaa

SEQ ID NO: 26323 - DNA, 1985 bp, Homo Sapiens
actgtggctaagtgtggggaccagacaggactcgtggagacatccaggtgctgaagccttcagctactgtctcagttttttgaagtttagcaatggcgtctttctctgctgagaccaattcaactgacctactctcacagccatggaatgagcccccagtaattctctccatggtcattctcagccttacttttttactgggattgccaggcaatgggctggtgctgtgggtggctggcctgaagatgcagcggacagtgaacacaatttggttcctccacctcaccttggcggacctcctctgctgcctctccttgcccttctcgctggctcacttggctctccagggacagtggccctacggcaggttcctatgcaagctcatcccctccatcattgtcctcaacatgtttgccagtgtcttcctgcttactgccattagcctggatcgctgtcttgtggtattcaagccaatctggtgtcagaatcatcgcaatgtagggatggcctgctctatctgtggatgtatctgggtggtggcttttgtgatgtgcattcctgtgttcgtgtaccgggaaatcttcactacagacaaccataatagatgtggctacaaatttggtctctccagctcattagattatccagacttttatggagatccactagaaaacaggtctcttgaaaacattgttcagccgcctggagaaatgaatgataggttagatccttcctctttccaaacaaatgatcatccttggacagtccccactgtcttccaacctcaaacatttcaaagaccttctgcagattcactccctaggggttctgctaggttaacaagtcaaaatctgtattctaatgtatttaaacctgctgatgtggtctcacctaaaatccccagtgggtttcctattgaagatcacgaaaccagcccactggataactctgatgcttttctctctactcatttaaagctgttccctagcgcttctagcaattccttctacgagtctgagctaccacaaggtttccaggattattacaatttaggccaattcacagatgacgatcaagtgccaacacccctcgtggcaataacgatcactaggctagtggtgggtttcctgctgccctctgttatcatgatagcctgttacagcttcattgtcttccgaatgcaaaggggccgcttcgccaagtctcagagcaaaacctttcgagtggccgtggtggtggtggctgtctttcttgtctgctggactccataccacatttttggagtcctgtcattgcttactgacccagaaactcccttggggaaaactctgatgtcctgggatcatgtatgcattgctctagcatctgccaatagttgctttaatcccttcctttatgccctcttggggaaagattttaggaagaaagcaaggcagtccattcagggaattctggaggcagccttcagtgaggagctcacacgttccacccactgtccctcaaacaatgtcatttcagaaagaaatagtacaactgtgtgaaaatgtggagcagccaacaagcaggggctcttaggcaatcacatagtgaaagtttataagaggatgaagtgatatggtgagcagcggacttcaaaaactgtcaaagaatcaatccagcggttctcaaacggtacacagactattgacatcagcatcacctagaaacttgttagaaatgcaaattctcaagccgcatcccagacttgctgaatcggaatctctgggggttgggacccagcaagggcacttaacaaaccctcgtttctgattaatgctaaatgtaagaatcattgtaaacattagttctatttctatcccaaactaagctatgtgaaataagagaagctactttgtttttaaatgatgttgaatatttgtcgatatttccatcattaaatttttccttagcattgtaaaaaaaaaaaaaaaaaaaaaaaaaaaaaa

SEQ ID NO: 26324 - DNA, 1365 bp, Homo Sapiens
ttaacttccttccaaaatgtcaccattcctgtatctggttctcttggtacttgggcttcatgctacaatccactgtgcatcacctgaaggcaaagtaacagcctgccattcatcccaaccaaatgccactctctacaagatgtcatccattaatgctgactttgcattcaatctgtaccggaggttcactgtggagaccccagataagaacatcttcttttcccctgtgagcatttctgcagctttggttatgctttcctttggggcctgctgcagcacccaaactgagattgtggagaccttggggttcaacctcacagacactccaatggtagagatccagcatggcttccagcatctgatctgttcactgaattttccaaagaaggaactggaattgcagataggaaatgccctcttcattggcaagcatctgaaaccactggcaaagttcttgaatgatgtcaagaccctctatgagactgaagtcttttctaccgacttctccaacatttctgcagccaagcaggagattaacagtcatgtggagatgcaaaccaaagggaaagttgtgggtctaattcaagacctcaagccaaacaccatcatggtcttagtgaactatattcactttaaagcccagtgggcaaatccttttgatccatccaagacagaagacagttccagcttcttaatagacaagaccaccactgttcaagtgcccatgatgcaccagatggaacaatactatcacctagtggatatggaattgaactgcacagttctgcaaatggactacagcaagaatgctctggcactctttgttcttcccaaggagggacagatggagtcagtggaagctgccatgtcatctaaaacactgaagaagtggaaccgcttactacagaagggatgggttgacttgtttgttccaaagttttccatttctgccacatatgaccttggagccacacttttgaagatgggcattcagcatgcctattctgaaaatgctgatttttctggactcacagaggacaatggtctgaaactttccaatgctgcccataaggctgtgctgcacattggtgaaaagggaactgaagctgcagctgtccctgaagttgaactttcggatcagcctgaaaacactttcctacaccctattatccaaattgatagatctttcatgttgttgattttggagagaagcacaaggagtattctctttctagggaaagttgtgaacccaacggaagcgtagttgggaaaaaggccattggctaattgcacgtgtgtattgcaatgggaaataaataaataatatagcctggtaaaaaaaaaaaaaaaaaaaaaaaaaaaaaa

SEQ ID NO: 26325 - DNA, 1710 bp, Homo Sapiens
acttcagtttggacaactactcacagctactacacagagacccgaacgagtcactgatatacacctggaccaccaccaatggatatacaaatggcaaacaattttactccgccctctgcaactcctcagggaaatgactgtgacctctatgcacatcacagcacggccaggatagtaatgcctctgcattacagcctcgtcttcatcattgggctcgtgggaaacttactagccttggtcgtcattgttcaaaacaggaaaaaaatcaactctaccaccctctattcaacaaatttggtgatttctgatatactttttaccaccgctttgcctacacgaatagcctactatgcaatgggctttgactggagaatcggagatgccttgtgtaggataactgcgctagtgttttacatcaacacatatgcaggtgtgaactttatgacctgcctgagtattgaccgcttcattgctgtggtgcaccctctacgctacaacaagataaaaaggattgaacatgcaaaaggcgtgtgcatatttgtctggattctagtatttgctcagacactcccactcctcatcaaccctatgtcaaagcaggaggctgaaaggattacatgcatggagtatccaaactttgaagaaactaaatctcttccctggattctgcttggggcatgtttcataggatatgtacttccacttataatcattctcatctgctattctcagatctgctgcaaactcttcagaactgccaaacaaaacccactcactgagaaatctggtgtaaacaaaaaggctctcaacacaattattcttattattgttgtgtttgttctctgtttcacaccttaccatgttgcaattattcaacatatgattaagaagcttcgtttctctaatttcctggaatgtagccaaagacattcgttccagatttctctgcactttacagtatgcctgatgaacttcaattgctgcatggacccttttatctacttctttgcatgtaaagggtataagagaaaggttatgaggatgctgaaacggcaagtcagtgtatcgatttctagtgctgtgaagtcagcccctgaagaaaattcacgtgaaatgacagaaacgcagatgatgatacattccaagtcttcaaatggaaagtgaaatggattgtattttggtttatagtgacgtaaactgtatgacaaactttgcaggacttcccttataaagcaaaataattgttcagcttccaattagtattcttttatatttctttcattgggcactttcccatctccaactcggaagtaagcccaagagaacaacataaagcaaacaacataaagcacaataaaaatgcaaataaatatttcatttttatttgtaaacgaatacaccaaaaggaggcgctcttaataactcccaatgtaaaaagttttgttttaataaaaaatttaattattatttcttgccaacaaatggctagaaaggactgaatagattatatattgccagatgttaatactgtaacatactttttaaataacatatttcttaaatccaaatttctctcaatgttagatttaattccctcaataacaccaatgttttgttttgtttcgttctgggtcataaaactttgttaaggaactcttttggaataaagagcaggatgctacaaaaaaaaaaaaaaaaaaaaaaaaaaaa

SEQ ID NO: 26326 - DNA, 1704 bp, Homo Sapiens
attgggtacatgcgcagtgccgctcgcgcgggccgcgccaatcctgcagcgccttcaacaggtttcgggcggcgaattccagttctccgggttttggggctccctgcgggaggcagtgctggatctgggaatctctaggaaaggaaagagcaaaggaggggaaagatggggggctgcaggaaatttggtgagcggcctccacctaaacgacttactagggaagctatgcgaaattatttaaaagagcgaggggatcaaacagtacttattcttcatgcaaaagttgcacagaagtcatatggaaatgaaaaaaggtttttttgcccacctccttgtgtatatcttatgggcagcggatggaagaaaaaaaaagaacaaatggaacgcgatggttgttctgaacaagagtctcaaccgtgtgcatttattgggataggaaatagtgaccaagaaatgcagcagctaaacttggaaggaaagaactattgcacagccaaaacattgtatatatctgactcagacaagcgaaagcacttcatgttgtctgtaaagatgttctatggcaacagtgatgacattggtgtgttcctcagcaagcggataaaagtcatctccaaaccttccaaaaagaagcagtcattgaaaaatgctgacttatgcattgcctcaggaacaaaggtggctctgtttaatcgactacgatcccagacagttagtaccagatacttgcatgtagaaggaggtaattttcatgccagttcacagcagtggggagccttttttattcatctcttggatgatgatgaatcagaaggagaagaattcacagtccgagatggctacatccattatggacaaacagtcaaacttgtgtgctcagttactggcatggcactcccaagattgataattaggaaagttgataagcagaccgcattattggatgcagatgatcctgtgtcacaactccataaatgtgcattttaccttaaggatacagaaagaatgtatttgtgcctttctcaagaaagaataattcaatttcaggccactccatgtccaaaagaaccaaataaagagatgataaatgatggcgcttcctggacaatcattagcacagataaggcagagtatacattttatgagggaatgggccctgtccttgccccagtcactcctgtgcctgtggtagagagccttcagttgaatggcggtggggacgtagcaatgcttgaacttacaggacagaatttcactccaaatttacgagtgtggtttggggatgtagaagctgaaactatgtacaggtgtggagagagtatgctctgtgtcgtcccagacatttctgcattccgagaaggttggagatgggtccggcaaccagtccaggttccagtaactttggtccgaaatgatggaatcatttattccaccagccttacctttacctacacaccagaaccagggccgcggccacattgcagtgcagcaggagcaatccttcgagccaattcaagccaggtgccccctaacgaatcaaacacaaacagcgagggaagttacacaaacgccagcacaaattcaaccagtgtcacatcatctacagccacagtggtatcctaactaccgtctttttgctaggacttaaactgacttgagtgtggcaaaaagttaacaaaaaaaaaaaaaaaaaaaaaaaaaaaa

SEQ ID NO: 26327 - DNA, 1292 bp, Homo Sapiens
ggacgtgactgggaggagcctgcccgccccggctcgctgcgccgcgcgcacagggcccgcgccagcgaccatggcggagcccacagtgtgctccttcctcaccaaggtgctgtgcgcccacggcggccgcatgttcctgaaggacctgcgcggccacgtggagctgtcggaggccaggctccgggacgtgctgcagcgcgccgggcccgagcgtttcctgctgcaggaggtggagacgcaggagggcctcggggacgcggaggccgaggcggcggccggcgcggtgggcggtggcggcacctccgcctggagggtggtggccgtgtccgggactataggtgcatgccaccatactcagctaatctttttaggtttttagtagagacaaggtctcactatgttgcccaggctggtcttgaactcctaagctcaagcagtcctcccgccttggcctctgaatgtgctgggattacaggcatgagccactatgcctaaccatattttttccaatattaaaaaatctttttttccccctaaggaatgtgttatataaggtcaacatgtttttagtgcttcagtttgacttgtctacatctaaagttaactctttaaggcttacatttatgattataattctttccatcgagggatttagtctccattattgtcatgtttcttgatttttttcattatacttggttcttctttttgtctaggttttatatataccttaattaattctttcttggctgttttatatctatgttgctgtcagcatgggaatctctattattagaaagctattaacttttaaaatatgtatcttttggtgattttctttgttctaacagttttagatggcctgtttgctctttctaaatataaaatcataggtatttctattttgtttttgtgtttcataaaattgtaataagtttttttgatattttttcattacatatgaagttaattgttggttttaaacaaatgttctttgttaggataacagaaataacatcttctattcttgtttgttggaagctaaaagcttgataaaaggaattggtgtcttttgatacaatcaaatttttatcacttaaattgcctaatatgattataataagggtttttgtaatattaaaacatccttaaattcctgagataaaactctacctggttatagtatatgttcttttaatgtattatctttcctatttgctgtacatctatacattcataaataaaattcatttatattttagaaaaaaaaaaaaaaaaaaaaaaaaaaaaaa

SEQ ID NO: 26328 - DNA, 1739 bp, Homo Sapiens
actggcggccgaggtagaggcagtggcgcttgagttggtcgggggcagcggcagatttgaggcttaagcaacttcttccggggaagagtgccagtgcagccactgttacaattcaagatcttgatctatatccatagattggaatattggtgggccagcaatcctcagacgcctcacttaggacaagctgtaaaaattaaaatgaacaaattacggcaaagttttaggagaaagaaggatgtttatgttccagaggccagtcgtccacatcagtggcagacagatgaagaaggcgttcgcaccggaaaatgtagcttcccggttaagtaccttggccatgtagaagttgatgaatcaagaggaatgcacatctgtgaagatgctgtaaaaagattgaaagctactggaaagaaagcagttaaagcagttctgtgggtctcagcagatggactcagagttgtggatgaaaaaactaaggacctcatagttgaccagacgatagagaaagtttctttctgtgccccagacaggaactttgatagagccttttcttacatatgccgtgatggcaccactcgtcgctggatctgtcactgcttcatggctgtcaaggacacaggtgaaaggttgagccatgcagtaggctgtgcttttgcagcctgtttagagcgcaagcagaagcgggagaaggaatgtggagtgactgctacttttgatgctagtcggaccacttttacaagagaaggatcattccgtgtcacaacagccactgaacaagcagaaagagaggagatcatgaaacaaatgcaagatgccaagaaaggtacaatctgttctacagtgtgtatttatggaatgcagtttttcccaacaaggtattattttgaagctaccaggggtaaattttctcataatcaaagagaacccttagcaatataaaaccttataacaaagttgaaaatcttaaaaaccgcttcctttagagtggctagtttaatggcttcaaaaatatttactccattatagtaagctatctgaggaatcagagtgcagttgaagaagctgcagagacatctcttacccccttcctcccatcctgaaatacctttttaattctgatgcatctgatctctttgagaagcaaatgaatcaagtacctgcatcttaaaggaagcagcagaggtcccagggcttaaggctgcaaagcatccacggactatgatgctagcagagagatttaacagtaatactgtttatatgatattattgctgttttttagtgctttctagtcacaaaagtctatagattttgagaggtaagcctataactcttttttctatagccctgttaatttaatttagtgtgtgattttatagagtgtgagttttatttaggtacacatggcatcacagcagaaatgcctgtacaaacattcaagttagttggcagtctataaatgtgagttgggtatattttacaactaaatgatagggcttgaaaatacttttgaattcttgtatataagtagggttaaaaccaacaagacaagcacaaacaattcaagttaactaatagacattaatataattttgaggccaggtatagtggcttacagctgtaatctcaatactttgggaggctgaggaggaaacatcacttgaggccaggagtttgtgaccagactgtgcaacatagactctatccctcaaaaaaaaaaaaaaaaaaaaaaaaaaaaaaa

SEQ ID NO: 26329 - DNA, 1668 bp, Homo Sapiens
agcactagtcaagtgactctaagaagggccattttcccttgttgtctttgaaaatacttcattttcttagcatttcaggagattataacatcctgtatttcagtttctgagagctttactgactgatttccctattcaaaacaatcctcatttcctacatttctgaagatctcaagatctggactactgttgaagaaattcccagtaaggctcacttatatctttagagatggcaaataactacaagaaaattgttctactgaaaggattagaggtcatcaatgattatcattttagaattgttaagtccttactgagtaacgatttaaaacttaatccaaaaatgaaagaagagtatgacaaaattcagattgctgacttgatggaggaaaagttcccaggtgatgccggtttgggcaaactaatagaattcttcaaagaaataccaacactgggagaccttgctgaaactcttaaaagagaaaagttaaaagttgcaaataaaattgaatccattccagtcaaaggaataatcccatctaaaaagacgaaacagaaagaagtgtatcctgctacacctgcatgcaccccaagcaaccgtctcacagctaaaggagcagaggagactcttggacctcagaaaagaaaaaaaccatctgaagaagagactggaaccaaaaggagtaagatgtccaaagagcagactcggccttcctgctctgcaggagccagcacgtccacagccatgggccgttccccacctccccagacctcatcatcagctccacccaacacttcctcaactgaggcatatttgatgaacttgacattatctctgactgcaggaagttttctgtcctgtgctgtttggggaagagacagagaactgcggaatctggaactttcagcaacagactcactgtctactgcccccatctattatacacccattccctttgctcactaatttgttcaagtttctctgacatacaccatgctcctttttcctttaggattttcacacaccatatttctttcacctttaaactcttacctggccaaccctatccaccctctggatcccaatattgagatcttatcctcagggaatcctcacttagacccctgtaacaggttaaatcttcatggtgttctgtttcctaggaacttctttcttttctactgtttatgacaactgaagttaataagtgtttatctttcccacctactcaaagtagttccaagattagggctagtttgtaattctgtggaccactgtaaacgagggcctagttcagtgtctgcctcatgggaagcttccaataaatacctttgctcaacgaaaaaatgaaaacccagtggctcacgcctgtaatcccagcactttgggaggccgaggcaggtggattgcctgaggtcaggagtttgagactagtctggccaacatggtgaaacactatctctactaaaaatacaaaaaaattagctgggtatggtggcttacgcctataatcccagctactcaggaggctgaggcaggggaattgcttgaaccagggaggtggaggttgcagtgagctgagatcgcaccactgcactccagcctgggtgacagagcgagactccatctcaaaacaaaaaaaaaaaaaaaaaaaaaaaaaaaaaaaa

SEQ ID NO: 26330 - DNA, 875 bp, Homo Sapiens
gcttctttcacacgggttgcttcggaggaatccgccgtgcaaatctgtccgcccccttggccactgatcccccgaagagcttctgtcgccgctctaggaatacagacattgaagtttgggacaagatatttatctaacttctgtgtcaaaattagcgacctgctatggcaatgaagaaagaaactgaatttgtcattttcacctgaagaaaaatgatagacaaaaatcaaacctgtggtgtaggacaggattctgtgccctatatgatttgtctgattcacatactcgaagaatggtttggtgtggagcagttggaggactatttgaattttgcaaactatctcttgtgggtttttacaccactaatacttttaatacttccttactttactatctttcttctctaccttactattattttcttacacatttataagagaaagaatgtattgaaagaagcctactctcataatttatgggatggtgcaaggaaaacagtggcaactctgtgggatggacatgcagccgtttggcatggtaagcaaggatactttcacctttgtgttgccattcatgtgtgctgcattggaactgtgttaccattccattttattgattgagaagatactgaaaaatataatagaagtgatatttactattccctgttacctgtttgcatgcattgtgcatatgtatgtgtctttcttaaaatgagttttcccatagacgttggtttccattaaacaaagaaccacgcagcactgtagactataagttgaaataagaaaatttatatttaaaacatctaaaagagtaagagactaaataaagctgtagaaaactgccaaaaaaaaaaaaaaaaaaaaaaaaaaaaa

SEQ ID NO: 26331 - DNA, 1706 bp, Homo Sapiens
cttccagcggacggcagcgcgcgagaccaggccaggcgtcaaagcaagtcacccatccgacctaaacccctctaagaccctggagtcacgtctccctccggggatcctcgtgaggtcttgggggtcccaccgccctgcgagccgcgcccgcgccccgccagacccggaactgcgtcgctagaacgtcgggacctggttccctctttaatcacacccccgggggcgcttcgtgtgaggttccacgggggaaggcgagaggcgcaggctgccacacacgcactgtttggaagaggggaagggctgcacttcctgctttcatccagaccaagttcggatcaagtgggagttcttcaaagagagagtttgcattgccccccctgcaccacctcaccaagatggctactttgggacacacattccccttctatgctggccccaagccaaccttcccgatggacaccactttggccagcatcatcatgatctttctgactgcactggccacgttcatcgtcatcctgcctggcattcggggaaagacgaggctgttctggctgcttcgggtggtgaccagcttattcatcggggctgcaatcctggggacccccgtgcagcagctgaatgagaccatcaattacaacgaggagttcacctggcgcctgggtgagaactatgctgaggagtatgcaaaggctctggagaaggggctgccagaccctgtgttgtacctagctgagaagttcactccaagaagcccatgtggcctataccgccagtaccgcctggcgggacactacacctcagccatgctatgggtggcattcctctgctggctgctggccaatgtgatgctctccatgcctgtgctggtatatggtggctacatgctattggccacgggcatcttccagctgttggctctgctcttcttctccatggccacatcactcacctcaccctgtcccctgcacctgggcgcttctgtgctgcatactcaccatgggcctgccttctggatcacattgaccacaggactgctgtgtgtgctgctgggcctggctatggcggtggcccacaggatgcagcctcacaggctgaaggctttcttcaaccagagtgtggatgaagaccccatgctggagtggagtcctgaggaaggtggactcctgagcccccgctaccggtccatggctgacagtcccaagtcccaggacattcccctgtcagaggcttcctccaccaaggcatactgtaaggaggcacaccccaaagatcctgattgtgctttataacattcctccccgtggaggccacctggacttccagtctggctccaaacctcattggcgccccataaaaccagcagaactgccctcagggtggctgttaccagacacccagcaccaatctacagacggagtagaaaaaggaggctctatatactgatgttaaaaaacaaaacaaaacaaaaagccctaagggactgaagagatgctgggcctgtccataaagcctgttgccatgataaggccaagcaggggctagcttatctgcacagcaacccagcctttccgtgctgccttgcctcttcaagatgctattcactgaaacctaacttcacccccataacaccagcagggtgggggttacatatgattctcctatggtttcctcgcaaaaaaaaaaaaaaaaaaaaaaaaaaaaaa

SEQ ID NO: 26332 - DNA, 1090 bp, Homo Sapiens
gttttcagtcatgttgtttctttaagttggtttagccttcctgtatacatgtgataatgatactgttttaaagaacaggtgtgaaagtctaagagtttaatccagactctgcacaagaagttaatctgccaaaccctaggattctccttctgaaagctcagaatatttcttccccttccctatacacacagggctcgaagggttagagaagaaaggcagacaacagcttctgagctttggactaatcacagcctctgttctcagcaggagccccaacactgagaccagaaaagatggtgctatgctttcctcttcttttactgctgctggttctatggggaccagtgtgtccacttcatgcttggcctaagcgtctcaccaaggctcactggtttgaaattcagcatatacagccaagtcctctccaatgcaacagggcaatgagtggcatcaacaattatacccagcactgtaagcatcaaaatacctttctgcatgactctttccagaatgtggctgctgtctgtgatttgctcagcattgtctgcaaaaatcgtcggcacaactgccaccagagctcaaagcctgtcaacatgactgactgcagactcacttcaggaaagtatccccagtgccgctatagtgctgctgcccagtacaaattcttcattgttgcctgtgacccccctcagaagagcgatcccccctacaagttggttcctgtacacttagatagtattctctaaggcatccactgcatttcctttcatttgacatagcttctgttacaattgcatccacgttttcttttcttttgttgattttcttgttcccgtagaagaaagaagaaaggtgtttggagaattcgagtgcctaggatgccagaccagagttgagacaaaaagaaataagattattttctgctttgtagttctgtacttttcgagagaagggaatagggaagacagcaaagaaagattcagatttctaaccctgcaacttttgccaagctttattgccctgtgttcacagcaataaaaccacttcctgctgcattctgaaaaaaaaaaaaaaaaaaaaaaaaaaaaaa

SEQ ID NO: 26333 - DNA, 1233 bp, Homo Sapiens
agggagagaactctggaggaacgctgagctgagcagcaccgaggacagcgcccggcagcgcccgcgcccaggtctccctccgcagccctgactcgcgcacacgctgagcttttgctcactccccctcgcgcggacacagacacacgcatattcacacacccagacacacaccccgctgtacaatggcagaatcccacctgcagtcatccctcatcacagcctcacagtttttcgagatctggctccatttcgacgctgacggaagtggttacctggaaggaaaggagctgcagaacttgatccaggagctccagcaggcgcgaaagaaggctggattggagttatcacctgaaatgaaaacttttgtggatcagtatgggcaaagagatgatggaaaaataggaattgtagagttggctcacgtattacccacagaagagaatttcctgctgctcttccgatgccagcagctgaagtcctgtgaggaattcatgaagacatggagaaaatatgatactgaccacagtggcttcatagaaactgaggagcttaagaactttctaaaggacctgctagaaaaagcaaacaagactgttgatgacacaaaattagccgagtatacagacctaatgctgaaactatttgattcaaataatgatgggaagctggaattaactgagatggccaggttactaccagtgcaggagaattttcttcttaaattccagggaatcaaaatgtgtgggaaagagttcaataaggcttttgagctgtatgatcaggacggcaatggatacatagatgaaaatgaactggatgctttactgaaggatctgtgcgagaagaataaacaggatctggatattaataatattacaacatacaagaagaacataatggctttgtcggatggagggaagctgtaccgaacggatcttgctcttattctctgtgctggggataactagagttggtggccgcaaccacttgctagtgatacactgtatctaaaaaataactgtgcactataagggagtaggctgtattttcttttatatctgtaaatttaactgcatatagataattatccaggatgtgtggctcattcttttcagcttgtttctatactgtttgtaatatacagtttttgtaaccatatgattgaaaagaagaaagtctatgcttaggccagtcagtacacccaaaaaaaaaaaaaaaaaaaaaaaaaaaaaa

SEQ ID NO: 26334 - DNA, 1435 bp, Homo Sapiens
gagaaaaaccaagatttcactttcaagatggaaagtccgtcaggctcagctgtggttttacctagcactcctcaggcctctgcgaatccatcatctccctatacaaatagttcccgaaaacaacctatgagtgcaacacttagagaaagattaaggaaaacaagattttcatttaattcctcttacaatgtggtgaaacgtcttaaagtagagagtgaagaaaatgatcagaccttttcagagaaaccagcatcttccacagaggaaaactgtttggaatttcaagaaagttttaaacatatagacagtgaatttgaagaaaatacaaatttgaaaaatactttgaagaatctcaatgtctgtgaatctcagtcacttgattctggatcatgcagtgctctccaaaatgagtttgtgagtgagaagcttcctaaacaaagattaaacgctgaaaaagccaaattggtgaagcaggttcaggagaaagaagaccttcttcggaggctaaaactagtcaaaatgtatagatcaaagaatgatctgtctcagttacagttgttaataaagaagtggagaagctgtagccagctcttgctttatgagttgcagtcagctgtgtctgaagagaacaagaaactaagccttactcaattgatagaccactatgggttagatgataaattactacactataacagaagtgaagaagaatttatagatgtttaattcctgatttttgctccagaatatctttgagaatgacaacttaatcaaaagatacttaggcacttttttttttttttgagactgagtttcgctcttgtcatcctggctggagtgtgatggtgcgatcttgactcactgcaacctctgcctctcgggttccagcaattctcctgcctcagcctcccgagtagctgagattacaggcgcccgccaccatgcccggctaatttttgcatttttagtagagactgggtttcaccacgttggccaggctggtctcgaactcctgacctcaggtgatccaccgcctaggcctcccaaaaccattagggctcagaggaaggtatcccgatgaatatcaattaagggcactttaatatataaattataaactaagttctaaaaggaaaattagtattttggatagatttgtcaaaacgacatttaagtcatgtttaaaaagtcatttgggcagttctggaaactagttttaatacatttgttttttatgacaaaaagttttattttaaatgttaaaaattgtccaatctggtgaatgtctaaccctaaagtttaaaaatttctgcctcctaagtttatgtaccttgtttccatccatttaccacatatttccatctgataatctagcaggtaattaaacttatatgtccaaaaccgtaaaaaaaaaaaaaaaaaaaaaaaaaaaaaa

SEQ ID NO: 26335 - DNA, 1340 bp, Homo Sapiens
aagtgtgcacagtaaacacaacaaggacaatggcatcacagggcgatggcatcagtccaagagtaccttgggaagagcaattctgtggatgaaccgcagtgcaggtgcacaggcttctaatggtctcgcctggcagacctagcgtcaccccagctagcctgaccataagactcacctgaacagttcattaaatacacaggttcctgaaggttatggtgaacttgcaactggtaggaaatgtccatatggaagagcccagaatcatagtccacacacaaagctgatccctccctaccctccaccaggccctgtactccccagttcatagaggccagaaatctatgttgttaacaagaatccctggcaagtctcattgggcaaggttagggaatactggcttagtgaagaatgatggcttgcacatctatagtgaagtattacaaaaacctcgcaccgtactgtctcccaatcaaaccagccaaactctccactctggccagatggttctcaactcgactgcacatggaataacctaaggagctttaaaaacactgacgctaaacacacagatcaatggaagagaattgagagtcaagaaataaaccacacagttatggctaatttcctcaatgaggaaagcataatcattgcaacaaatgatgctggaacaactggatatccacaggtgaaagaatgaagctgggccccttcctcacatcacacacaaaacttaacccaaaagagatcaaagtcatagctgtaagagctaaaactataaagttcactaaagaaaatacaggagtaaatattcattaccttgggctaggcaacggtttcttaaccatttcttaaatacaacaccaaaaggatggcaataagagacaaaataaataaattggacttcatcaaaattaaaatactttgtgcatcaaagtgcaccatcaagaaagtaaaaaaacaacctacaggattggagaaaagatctgcaagtcatatatctgataaaggtcaggcatctcaactatataaacaactcttacaactcaataataaaaagacaaataacctaattaaacgatgggagagtacaggcatggtacctcacacctgtaatcccaacagtttgggaggccaaggcaggcaaatcgcttggggcctggaattcaagaccagtctattacgacccccatctctacaaaaaaattgttttaaaattagccaggcatgatggcaggagcctgcagtcccagctactcgagctatgattgcaccactgcactcccacctgggcaacagagcaagactcactgaaaaaaaaaaaaaaaaaaaaaaaaaaaaaa

SEQ ID NO: 26336 - DNA, 952 bp, Homo Sapiens
ggtttccgcggtggccatgactgcggccgtgttcttcggctgcgccttcattgccttcgggcctgcgctcgccctttatgtcttcaccatcgccaccgagccgttgcgtatcatcttcctcatcgccggagctttcttctggttggtgtctctactgatttcgtcccttgtttggttcatggcaagagtcattattgacaacaaagatggaccaacacagaaatatctgctgatctttggagcgtttgtctctgtctatatccaagaaatgttccgatttgcatattataaactcttaaaaaaagccagtgaaggtttgaagagtataaacccaggtgagacagcaccctctatgcgactgctggcctatgtttctggcttgggctttggaatcatgagtggagtattttcctttgtgaataccctatctgactccttggggccaggcacagtgggcattcatggagattctcctcaattcttcctttattcagctttcatgacgctggtcattatcttgctgcatgtattctggggcattgtattttttgatggctgtgagaagaaaaagtggggcatcctccttatcgttctcctgacccacctgctggtgtcagcccagaccttcataagttcttattatggaataaacctggcgtcagcatttataatcctggtgctcatgggcacctgggcattcttagctgcgggaggcagctgccgaagcctgaaactctgcctgctctgccaagacaagaactttcttctttacaaccagcgctccagataacctcagggaaccagcacttcccaaaccgcagactacatctttagaggaagcacaactgtgcctttttctgaaaatccctttttctggtggaattgagaaagaaataaaactatgcagatatgcgttccatacaaaaaaaaaaaaaaaaaaaaaaaaaaaaaa

SEQ ID NO: 26337 - DNA, 3292 bp, Homo Sapiens
ccggccgctcggcccgggggcttcgggctgtcgggccggcgctcccttctctgccaggtggcgagtacacctgctcacgtaggcgtcatgaggtctccggttcgagacctggcccggaacgatggcgaggagagcacggaccgcacgcctcttctaccgggcgccccacgggccgaagccgctccagtgtgctgctctgctcgttacaacttagcaattttggccttttttggtttcttcattgtgtatgcattacgtgtgaatctgagtgttgcgttagtggatatggtagattcaaatacaactttagaagataatagaacttccaaggcatgtccagagcattctgctcccataaaagttcatcataatcaaacgggtaagaagtaccaatgggatgcagaaactcaaggatggattctcggttcctttttttatggctacatcatcacacagattcctggaggatatgttgccagcaaaataggggggaaaatgctgctaggatttgggatccttggcactgctgtcctcaccctgttcactcccattgctgcagatttaggagttggaccactcattgtactcagagcactagaaggactaggagagggtgttacatttccagccatgcatgccatgtggtcttcttgggctccccctcttgaaagaagcaaacttcttagcatttcatatgcaggagcacagcttgggacagtaatttctcttcctctttctggaataatttgctactatatgaattggacttatgtcttctacttttttggtactattggaatattttggtttcttttgtggatctggttagttagtgacacaccacaaaaacacaagagaatttcccattatgaaaaggaatacattctttcatcattaagaaatcagctttcttcacagaagtcagtgccgtgggtacccattttaaaatccctgccactttgggctatcgtagttgcacacttttcttacaactggactttttatactttattgacattattgcctacttatatgaaggagatcctaaggttcaatgttcaagagaatgggtttttatcttcattgccttatttaggctcttggttatgtatgatcctgtctggtcaagctgctgacaatttaagggcaaaatggaatttttcaactttatgtgttcgcagaatttttagccttataggaatgattggacctgcagtattcctggtagctgctggcttcattggctgtgattattctttggccgttgctttcctaactatatcaacaacactgggaggcttttgctcttctggatttagcatcaaccatctggatattgctccttcgtatgctggtatcctcctgggcatcacaaatacatttgccactattccaggaatggttgggcccgtcattgctaaaagtctgacccctgataacactgttggagaatggcaaaccgtgttctatattgctgctgctattaatgtttttggtgccattttctttacactattcgccaaaggtgaagtacaaaactgggctctcaatgatcaccatggacacagacactgaaggaaccaataaataatcctgcctctattaatgtatttttatttatcatgtaacctcaaagtgccttctgtattgtgtaagcattctatgtctttttttaattgtacttgtattagatttttaaggcctataatcatgaaatatcactagttgccagaataataaaatgaactgtgtttaattatgaataatatgtaagctaggacttctactttaggttcacatacctgcctgctagtcgggcaacatgaagtaggacagttctgttgattttttagggccatactaaagggaatgagctgaaacagacctcctgatacctttgcttaattaaactagatgataattctcaggtactgataaacacctgttgttgttcactttcctcataaaaattgtcagctctctctgacacttagacctcaaactttagcatctctgtggagctgccatccactgtataatttcgcctggcaactggactgaggggagtgtgcccaggcagctgccaagcactccctccctggcttcagggtcagagtgcccagcgtttatcagaggcagcatccaagcccagagccagtgtcgactcttcggctggtgcctttcctctgaggggctatcaatgtgtagataaagccctgagtaggcaagagcagtgagatccactgctatggtcttgatacatcctcaaactttcccttcccagcacagaggaatattggctggcatgcaacctgcaaaagaaaaatgcgaagcggccgggcacggtggctcatgcctgtagtcccagcactttggggggctgaggtgggcgaatcatgagatcaggagttcgagaccagcctggccagcatggtgaaaccccatctctactaaaaatacaaaaaattagctgggcgtggtgacgggcgcctgtaatcccagatactcaggaggctgaggtaggagaatcacttgaacctgggagatggaagttgcagtgaaccaagatcacgccactgcactccagcctgggcgatggagcgagactccaactcaaaaaaaaaaaaagaataaagaaagaaaagtgcgatgcccagtcaatcacaaataagatcatcctggtttaaatctactctcacatggatcacagtataaatttctatgtgctgtgttttgttcgtttgtattttgtagagatggggtctcgttttgtcgcccaggctggttttgaactcctggcttcaagcgatcctcctgtctcggcctcacaaagtgttgagactacaggcatgagccactgtgcccagcctgttctatgtttttaagctacacgagaattttttttttaattaattctcactgtttgttcagtctgtcttcatctaagtttgtgttgcagtttaaagttaaagtgacttttaaaggccacatcacctgagactagggtaatcatctttacttctggttcctgaaatcatatttttccagtggaccatcctccagtggctgtggttgttgagcatgctttcagaacacctatgtggcttaaaacttagtttatgttttgtgttcaacactacgtgtaatattttaaaactgtttaatgtgatgtgaatacatttatgtacatttatttttaaatttgtaaatagctttaaattgctatggcaatgtttcttttataaatcatcaaaataaacctttgtgaattgaaaaaaaaaaaaaaaaaaaa

SEQ ID NO: 26338 - DNA, 2874 bp, Homo Sapiens
atagtagttctggtaccagctatcatgaacaggcattgccagtggacctgagcaacagtggtatcagaagtcatggaagtggcagttttcatggagcatctgcatttgacccctgctgccctgtttcttcctcccgagctgcaatctttggccatcaggccgctgctgctgccccaagtcaacctttatcatcaatagatggctatggatcaagcatggttgcgcagccccagccccagccccctccacagccctctctctcatcatgtcgacattacatgccacccccttatgcctctttgacaaggccacttcatcatcaagcttctgcctgcccgcattctcatggaaacccccctcctcagactcagcctccgcctcaagtggattatgttattcctcatcctgtacatgctttccattctcaaatatcttctcatgcaacatctcatcctgtggcacccccaccaccaactcacttagccagtacagctgcaccaatccctcagcatcttcctcctacacaccagccaatttcgcaccatattccagccacagcacctccagcacagagactgcatcctcatgaagtgatgcagaggatggaagttcaaaggaggaggatgatgcagcatccaacgcgggcacatgaacgccccccaccccatccacataggatgcacccaaactatggtcatgggcatcatattcatgtgcctcagactatgtcctcacatcctcgacaggctccagagaggtctgcctgggaactgggaattgaagctggagtgactgcagctacttatacacctggtgcattgcatcctcacttggcccattatcacgcacctcctcgacttcatcacttacaattaggagctcttcctttaatggttcctgatatggcaggctatcctcacatccgttacatttcatcaggattggatggaacatcattcagaggtcctttcaggggcaattttgaggaactgattcatttggaagaaagattaggcaatgtcaatcgtggagcatcccaggggacaattgaaagatgtacatatccacataaatacaaaaaggtaacaactgattggttctcacagaggaaactgcactgcaaacaagatggggaagaagggactgaggaagacacagaggaaaaatgtactatctgtttgtctattttagaggaaggtgaagatgtgagacgtcttccatgtatgcaccttttccaccaagtgtgtgttgaccaatggttgattaccaataagaagtgccccatatgcagagtggacattgaggcccagctgccaagtgaaagttgacaccatgtttcagaactcttgccctccctctcattcccatccttcctggtactgcagtcaaccaaagatggcatgacttacctgcgcagatttggaagcattgaacttagagtgctggctctgctatatggtacaactaatgctagacctacagtttatgtatacagttgattttgatgtatttataaaagcttttttttctagatttgacatttttctgtatcattttactgtatttttgcatggttccttgtattgcatttctttgcacatattatgggcttgtgaccctaaacttgcaggcaaggttagctgctttagtaagtagaattttgtggtctttttgttttttacatagtaccaagccttgataattatgaattttttatccattactaacctttaatttaatcaatcatgtactttagtttaatgtataaagatcctctagaaaatgataatattgtgtattaagacattccttaattaggacaaaatggctgctgtatatttactatatggagttctgagttaaataccatccttaatactgggaacagaatacaacccatataaatcagatgcaggtggtagtcacatcaccagagtgatcagtataaattttcttggtgtatccttttcctttcaacacagtgcagataagagttgaatattgatatcatacatttagactgctgttctgattgcatttatctttttcctacatcatttagaattttatttccctgattcagtttttgctgctgtgaaacagctctgatgaacactaaatattaatttcaattagctagattgtacatacttgcagatttaacaaaattttagggaaattgaaaaagacatgtagaatttgttgtcttctgctaagcacgaaaagttaagatatctgcttacattgattttgtagacacattaagtcaagatttggaatttaagtcactggcaggtatctgtgcattcatagaacttataaaggtcccaggatcacttttaagggatttttattagtttaaaggtaaataaagtcagctgaatctacatgtctcttgttttatttctctctaaacttgaaaacagtaaatctgcagatactgtgaggcacaaattatactgtcaacctactgttgctatggttatatactcccacttcatacattaccaagagtcgatcactgatttaaaatttttaatttctatagttaagatttactgcataatatagaatataaagttaagttaacatactaacatttctcctttggaggaagttttaatctacttcaggatgcatattattatcaagatactttcatatacaggatagcctaattttatttgtttaaatatgcttaatatgccccagattgcaaatgcatccagtcagtaatatcactgtctgtatgtggaggacatgttcccatggatcatatgtgaagatgtcaataagcttgcattaagccacctgctttgtaagtggattgattaataaataacttatatttctattgtaaaaaaaaaaaaaaaa

SEQ ID NO: 26339 - DNA, 2209 bp, Homo Sapiens
ggcacgagggctggtgttggaggaccctccctgcttcagggtacagctcgcagaaagaagaaggtggtacatagaacagccacagctgatgacaaaaagcttcagagttctctaaaaaaactggctgtgaataatatagctggtattgaagaggtgaacatgattaaagatgatgggacagttattcatttcaacaatcccaaagtccaagcttccctttctgctaatacctttgcaattactggtcatgcagaagccaaaccaatcacagaaatgcttcctggaatattaagtcagcttggtgctgacagtttaacaagccttaggaagttagctgaacagttcccacggcaagtcttggacagtaaagcaccaaaaccagaagacattgatgaggaagatgatgatgttccagatcttgtagaaaattttgatgaggcatcaaagaatgaagctaactaaaagtttggtttttggaagctggcatggactagatttaacaaatcagctatgtggttccaaagttttacagacatggagaacatcacctgttactagttcagtaatataaatattttgtatattaataatgctgtttgttcagcatttttcggtcatttgattttgcattttgcacttcctcccaggatatttttttggtcaaaatatgaagtattggtgcagtttgagggtgttttggtttttgattcctggtttttttgttttttgtttggggtatttttggtgtatgtatgtttatgtatgtgtgtgggtatgtgtgtatacagtggagagcaaattggaaaacagttctatttatcctcctccctccccagtagaaataaaaaaaatctttacatttgttacttttcttttccccccgtaagacacagaattaatggaaagtgagtatcttggatttcaaatctgaagagatttttaccattagtggtttgattttaatttgcttggttaactatcatatttttcatacacttctctggatttaaaatatcttgaggtattttgccactggcttcatgctggagtaatgggtaacatatctttggtatggttgccttagattaacttacctagtcagacccagaagaacttcttttactagcttgcttcctaaatgccttttttcctctccttttggtctccaaatggcctggtcagcttttggtaatattcttcctcatcttccacctagcttgagaaggatgttctccatatagagtttagcgagtgcctaatccctccttttgtaagattttgttccctcagcttgaggaacaacttcatcttcaactttttatttctccctgatgttacagtttggtagatttcaaactggaatagctagcatgtgcttgctaaataattttatgccagccttatcctgtatcctagctgttcttaacagcaggtacaaaaatgcctgtttttcagcaaggttgaaattgggaatgtccttttgaatcagaagaaaataggccatagactcatctcccagcacaaatgggcattctatgaaatggtactggccctaggaggatttcctcaaccactctcctactcttggccttgaacctacctctgggttggatcttactattgtagctgctcactataccctcctgcatgcttagaataatgctttgaggggagcactggtaaaacacagtatttatttttttacctcctttaagaggacttggaggtaagttgcattcattcactcaagtttccctcttgctgtctaatagaagcttactttttgctatatcagcatttgttacagccaatatttaaggacaaaatttagaaaatatatcatttcctggcccatcatcaaactaatacagcttaaccttgcagctaccaacttttgtgtcaagctagatatctttatttgatatctaaggtgcaagaccaacaatatattaagagatctgtagacatgaaggcaaagctcttgtattttttttcatccaaacacctcaatttattttataaattcgttcatttttcctgttatgttttatataatatatggactaaacaaaataaaataacagtgcaaaagaggagaatatttcctcttgtgcttttcttgaaaaaaaaaaaaaaaaaactcgagttttttttttttttttttttttttttttttttttttttttttttttttttttttttttttttt

SEQ ID NO: 26340 - DNA, 2688 bp, Homo Sapiens
ggcacgaggtgtagatcagcgtcccccactttggcatcccggccggccggggacctcccagtctgcggccatgaacgcgagcagcgagggcgagagcttcgcgggctcggtgcaaattccaggtggcacaacggtgctggtggagctgactcccgacatccatatctgcggcatctgcaagcagcagtttaacaacctggatgcctttgtagctcacaagcaaagtggctgccagctgacaggcacatccgcagcagcccccagcacggtccagtttgtatcggaggaaacagtgcctgccacccagactcagaccaccaccagaaccatcacctcggagacccagacaatcacagtttcagctccagaatttgtttttgaacatggctatcaaacttacctgcccacggaaagtaatgaaaaccagacagccactgtcatctctctccctgccaagtcacgcaccaaaaagcccacaacaccacctgctcagaaaaggcttaactgttgctatccaggttgccaattcaagactgcttatggcatgaaggacatggagcggcatttaaaaattcacacgggagacaaaccccataagtgtgaagtctgtggcaagtgctttagccggaaagacaagctgaaaactcacatgcggtgccacacgggcgtgaagccctacaagtgtaagacgtgtgactacgccgctgccgacagcagcagcctcaacaagcacctgaggatccactcggacgagcggcccttcaaatgccagatctgcccctacgccagccgcaactccagccagctcactgtccacctgcgatcccacacggcttcagaacttgatgatgatgttccaaaagcaaactgcctctccactgaaagcactgacactccgaaggcccctgtcatcactcttccctcagaggcaagggaacaaatggccacccttggagagaggacgttcaactgttgctacccaggttgccacttcaaaactgtccatggcatgaaagacttggaccgccatctcagaatccacacgggagacaaaccgcacaagtgtgagttctgtgacaagtgcttcagccggaaggacaacctgaccatgcacatgcggtgccacaccagtgtgaagccacacaagtgtcacctgtgtgactacgctgccgtggacagcagtagcctcaagaagcacctgcggatccactctgatgagcggccgtacaaatgccagctctgcccctatgccagccgcaactccagccagctcaccgtccacctgcgatctcacacgggggatacccccttccagtgctggctctgtagcgccaagttcaaaatcagctcggacttgaaaaggcacatgatcgtgcactcgggggagaagcctttcaagtgcgagttctgcgacgtccgctgcaccatgaaggcgaatctcaaatcgcacatccgcatcaagcacaccttcaaatgtctgcactgtgccttccagggccgggaccgggctgacctcctggagcacagccggctgcaccaggccgaccacccggagaagtgtccagagtgcagctactcctgctccagcgcggccgccctgcgcgtgcacagcagagtccactgtaaggactgtcccttcaagtgtgacttctgcagcttcgacacgaagcggcccagcagcctggccaagcacgtcgacaaggtgcacagggacgaggccaagacggagaaccgggcccctctgggcaaggaagggctcagagagggcagctcccagcacgtggccaagatcgtgacgcagagggccttccgctgtgagacctgcggcgcctccttcgtcagggatgactctctgagatgccacaagaagcagcacagtgatcagagtgagaacaagaactcagacttggtcaccttcccaccggaaagcggtgcctcgggacagctcagcaccctggtctccgtggggcagctcgaggctcccctagagcccagccaagacctctagctcagccgaagagggtggtcagctgtcggaacttctgaccagtgctgttgcccagccctccagaggtgaggccactgagagacaggctttgggcaccacttctggggctggccgctccaacttcacaggccttcagaggcgatggctgggcgacagtgacgaaagcaaagcaaagcagggctgtggagacactcctcgcatttgtctcttccctccaaggattatctgagcaagtcgacttgttcattcaaaggcggggtctgccaagccctgctctatccaatggggatagcttctacgtaacggattccaattttaaaactgatccatctctgatggaattattaaacttagacgatatagaaaactaaaactaatctctagagtggaaagggttaaagtgaggaaggtgtacgtgaagggtctggggttgctggaaaacttctatttcataacctgggtgatcgttctaagagtgtttgccttatatgtttgtgtggtttcttttacctgttgtcttacaataaaaaaggcagactcatggtaaaaaaaaaaaaaaaaaaaaaaaaaaaaaaaaaaaaaaaaaaaaaaaaaaaaaaaaaaaaaaaaaaaaaaaaaaaaaaaaaaaaaaaaaaaaaaaaaaaaaaaaaaaaaaaaaaaaaaaaaaaaaaaaaaaaaaa

SEQ ID NO: 26341 - DNA, 2852 bp, Homo Sapiens
ctggtggggtcggaccaggccccgggccgggacaagaacatccccgccgggctgcagtccatgaaccaggcgttgcagaggcgcttcgccaagggggtgcagtacaacatgaagatagtgatccggggagacaggaacacgggcaagacagcgctgtggcaccgcctgcagggccggccgttcgtggaggagtacatccccacacaggagatccaggtcaccagcatccactggagctacaagaccacggatgacatcgtgaaggttgaagtctgggatgtagtagacaaaggaaaatgcaaaaagcgaggcgacggcttaaagatggagaacgacccccaggaggcggagtctgaaatggccctggatgctgagttcctggacgtgtacaagaactgcaacggggtggtcatgatgttcgacattaccaagcagtggaccttcaattacattctccgggagcttccaaaagtgcccacccacgtgccagtgtgcgtgctggggaactaccgggacatgggcgagcaccgagtcatcctgccggacgacgtgcgtgacttcatcgacaacctggacagacctccaggttcctcctacttccgctatgctgagtcttccatgaagaacagcttcggcctaaagtaccttcataagttcttcaatatcccatttttgcagcttcagagggagacgctgttgcggcagctggagacgaaccagctggacatggacgccacgctggaggagctgtcggtgcagcaggagacggaggaccagaactacggcatcttcctggagatgatggaggctcgcagccgtggccatgcgtccccactggcggccaacgggcagagcccatccccgggctcccagtcaccagtggtgcctgcaggcgctgtgtccacggggagctccagccccggcacaccccagcccgccccacagctgcccctcaatgccgccccaccatcctctgtgccccctgtaccaccctcagaggccctgcccccacctgcgtgcccctcagcccccgccccacggcgcagcatcatctctaggctgtttgggacgtcacctgccaccgaggcagcccctccacctccagagccagtcccggccgcagagggcccagcaacggtccagagtgtggaggactttgttcctgacgaccgcctggaccgcagcttcctggaagacacaacccccgccagggacgagaagaaggtgggggccaaggctgcccagcaggacagcgacagtgatggggaggccctgggcggcaacccgatggtggcagggttccaggacgatgtggacctcgaagaccagccacgtgggagtcccccgctgcctgcaggccccgtccccagtcaagacatcactctttcgagtgaggaggaagcagaagtggcagctcccacaaaaggccctgccccagctccccagcagtgctcagagccagagaccaagtggtcctccataccagcttcgaagccacggagggggacagctcccacgaggaccgcagcacccccctggccaggcggtgtctctgttcgcacaggtccggagaagcgcagcagcaccaggccccctgctgagatggagccggggaagggtgagcaggcctcctcgtcggagagtgaccccgagggacccattgctgcacaaatgctgtccttcgtcatggatgaccccgactttgagagcgagggatcagacacacagcgcagggcggatgactttcccgtgcgagatgacccctccgatgtgactgacgaggatgagggccctgccgagccgcccccaccccccaagctccctctccccgccttcagactgaagaatgactcggacctcttcgggctggggctggaggaggccggacccaaggagagcagtgaggaaggtaaggagggcaaaaccccctctaaggagaagaagaagaagaagaaaaaaggcaaagaggaagaagaaaaagctgccaagaagaagagcaaacacaagaagagcaaggacaaggaggagggcaaggaggagcggcgacggcggcagcagcggcccccgcgcagcagggagaggacggctgccgatgagctggaggctttcctggggggcggggccccgggcggccgccaccctgggggtggcgactacgaggagctctaggccggcgtgggcagtggccgccctggggcggggggcgtgcctgtcactgcctggggaggcatttgcctctgtaccatcgcctttgccgctgccccgtggctgccgtgtgcgcttctgagctggaagaggccgggcattggtggtccccaggctgggccctgcaggtgctgggccttcaggcccagtgtgagcctgctctgcaagaagggaggggacagctggcttcagccaggctcggtggacaccctggccctctcggggcagagccgccagtgtttctcagggatgtgactgaggcccaggagggacctgtgagggtctgtttacagaggctgggcaggggccgcttggctgtggggtgtgcgctgccccggcacctgcttgccctccgcgctcatctggggccgcagcatgcctatggttccgcttccggccgggagccctgaacacgggtgtgcagactcaccctaaagggcggcccaggccccacgctagaaggctggcgagaccgaaggcagcatgtgaggcctctcctgggagtgggggttgtgtttcccacagtggcctcagctgcgcccccgctcaggtgagcccgaaggcaggagccgggaggcactcctcccaaacactccactcagaccataaagcactcctgtttcactctgaaaaaaaaaaaaaaaaaa

SEQ ID NO: 26342 - DNA, 2866 bp, Homo Sapiens
attttctctggagtctccttctttctaacccggctctcccgatgtgaaccgagccgtcgtccgcccgccgccgccgccgccgccgccgccgcccgccccgcagcccaccatgtctcgccgcaagcaaggcaaaccccagcacttaagcaaacgggaattctcgcccgagcctcttgaagccattcttacagatgatgaaccagaccacggcccgttgggagctccagaaggggatcatgacctcctcacctgtgggcagtgccagatgaacttcccattgggggacattcttatttttatcgagcacaaacggaaacaatgcaatggcagcctctgcttagaaaaagctgtggataagccaccttccccttcaccaatcgagatgaaaaaagcatccaatcccgtggaggttggcatccaggtcacgccagaggatgacgattgtttatcaacgtcatctagaggaatttgccccaaacaggaacacatagcagataaacttctgcactggaggggcctctcctcccctcgttctgcacatggagctctaatccccacgcctgggatgagtgcagaatatgccccgcagggtatttgtaaagatgagcccagcagctacacatgtacaacttgcaaacagccattcaccagtgcatggtttctcttgcaacacgcacagaacactcatggattaagaatctacttagaaagcgaacacggaagtcccctgaccccgcgggttggtatcccttcaggactaggtgcagaatgtccttcccagccacctctccatgggattcatattgcagacaataacccctttaacctgctaagaataccaggatcagtatcgagagaggcttccggcctggcagaagggcgctttccacccactccccccctgtttagtccaccaccgagacatcacttggacccccaccgcatagagcgcctgggggcggaagagatggccctggccacccatcacccgagtgcctttgacagggtgctgcggttgaatccaatggctatggagcctcccgccatggatttctctaggagacttagagagctggcagggaacacgtctagcccaccgctgtccccaggccggcccagccctatgcaaaggttactgcaaccattccagccaggtagcaagccgcccttcctggcgacgccccccctccctcctctgcaatccgcccctcctccctcccagcccccggtcaagtccaagtcatgcgagttctgcggcaagacgttcaaatttcagagcaacctggtggtgcaccggcgcagccacacgggcgagaagccctacaagtgcaacctgtgcgaccacgcgtgcacccaggccagcaagctgaagcgccacatgaagacgcacatgcacaaatcgtcccccatgacggtcaagtccgacgacggtctctccaccgccagctccccggaacccggcaccagcgacttggtgggcagcgccagcagcgcgctcaagtccgtggtggccaagttcaagagcgagaacgaccccaacctgatcccggagaacggggacgaggaggaagaggaggacgacgaggaagaggaagaagaggaggaagaggaggaggaggagctgacggagagcgagagggtggactacggcttcgggctgagcctggaggcggcgcgccaccacgagaacagctcgcggggcgcggtcgtgggcgtgggcgacgagagccgcgccctgcccgacgtcatgcagggcatggtgctcagctccatgcagcacttcagcgaggccttccaccaggtcctgggcgagaagcataagcgcggccacctggccgaggccgagggccacagggacacttgcgacgaagactcggtggccggcgagtcggaccgcatagacgatggcactgttaatggccgcggctgctccccgggcgagtcggcctcggggggcctgtccaaaaagctgctgctgggcagccccagctcgctgagccccttctctaagcgcatcaagctcgagaaggagttcgacctgcccccggccgcgatgcccaacacggagaacgtgtactcgcagtggctcgccggctacgcggcctccaggcagctcaaagatcccttccttagcttcggagactccagacaatcgccttttgcctcctcgtcggagcactcctcggagaacgggagcttgcgcttctccacaccgcccggggagctggacggagggatctcggggcgcagcggcacgggaagtggagggagcacgccccatattagtggtccgggcccgggcaggcccagctcaaaagagggcagacgcagcgacacttgttcttcacacacccccattcggcgtagtacccagagagctcaagatgtgtggcagttttcggatggaagctcgagagcccttaagttctgagaaaatttgaagcccccaggggtggggtggacgcgtgccgcccagtcgacgtcagcgtggtctgtcatcctgctagtttgtgatgttttctgacagtagcctccaagaagccgttgtgcgaagacagagtcctgcagagtccttccagcctaggcctgcagcgccattttatttatattttttaataaaaagtaaaaacaaaaaaacagacccacattggaacagtgaatcagtcccatagagagggcccgtggaccatcgctgtcatgagtgatgccctggcccttctgaaaccagccaacctaattacctgtattgtggaaatgcgcatgagtccccaaccccttgtttctatacattctatgttgtcttttaaaaagtgtgcttaacattgacacaataaatgttggagctttaaaaaaaaaaaaaaaaaaa

SEQ ID NO: 26343 - DNA, 1410 bp, Homo Sapiens
gggcggggctcgggccggtccgcccgcgcgcaggtgagtgagccagggcggagcgcagctgcgccgggcttgggcgcctggggccgccgctccccaccgtcgttttccccaccgaggccgaggcgtcccggagtcatggccggcctgaactgcggggtctctatcgcactgctaggggttctgctgctgggtgcggcgcgcctgccgcgcggggcagaagcttttgagattgctctgccacgagaaagcaacattacagttctcataaagctggggaccccgactctgctggcaaaaccctgttacatcgtcatttctaaaagacatataaccatgttgtccatcaagtctggagaaagaatagtctttacctttagctgccagagtcctgagaatcactttgtcatagagatccagaaaaatattgactgtatgtcaggcccatgtccttttggggaggttcagcttcagccctcgacatcgttgttgcctaccctcaacagaactttcatctgggatgtcaaagctcataagagcatcggtttagagctgcagttttccatccctcgcctgaggcagatcggtccgggtgagagctgcccagacggagtcactcactccatcagcggccgaatcgatgccaccgtggtcaggatcggaaccttctgcagcaatggcactgtgtcccggatcaagatgcaagaaggagtgaaaatggccttacacctcccatggttccaccccagaaatgtctccggcttcagcattgcaaaccgctcatctataaaacgtctgtgcatcatcgagtctgtgtttgagggtgaaggctcagcaaccctgatgtctgccaactacccagaaggcttccctgaggatgagctcatgacgtggcagtttgtcgttcctgcacacctgcgggccagcgtctccttcctcaacttcaacctctccaactgtgagaggaaggaggagcgggttgaatactacatcccgggctccaccaccaaccccgaggtgttcaagctggaggacaagcagcctgggaacatggcggggaacttcaacctctctctgcaaggctgtgaccaagatgcccaaagtccagggatcctccggctgcagttccaagttttggtccaacatccacaaaatgaaagcagtgagtgagccccactttcctttttcttcctcctccagcaccttcgttgtttcctgggtagtctgcctgggtgaggctcccttcctgtttctcatctgtggcttctgaaacacttagactctggacccagcaagagtttcaggaagtgggttgctaggcagttagacaggcttgttggtgaacacccggtatgtagttccatttcagcacaataaaaagaaatcttgcattcaaaaaaaaaaaaaaaaaaa

SEQ ID NO: 26344 - DNA, 1313 bp, Homo Sapiens
catttgttgcatttccagtttccaataccaactcacctacaaagattttaccaaaaaccttaggaccaataaatgtgaatgttggaccccaaatgattataagcacaccacagagactaaccagttcaggaagtgttctgattgggagtccatatacccctgcaccagcaatggttactcagacacacatagcagaagctactggctgggtccctggtgatagaaaacgggctagaaaatttatagactctgatttttcagaaagtaaacgaagcaaaaaaggagataaaaatgggaaaggcttgagacacttttcaatgaaagtgtgtgagaaagttcaacgaaaaggtacaacatcgtacaatgaagtcgctgatgagctggtgtcagagttcaccaattcaaataaccatttggctgctgattcgcaggcttatgatcagaagaacattaggcgaagagtttatgatgctttaaatgtgctaatggcaatgaacataatttcaaaggaaaaaaaagaaatcaagtggattggcctgcctaccaattctgctcaggaatgtcagaatctggagatagagaagcagaggcggatagaacggataaagcagaagcgggcccagctgcaagaacttctcctacagcaaatcgctttcaaaaacctggtacagagaaatcgacaaaatgagcagcaaaaccagggcccgccggctctgaactctaccattcagctgccattcataatcatcaatacaagcagaaaaacagtcatagattgcagcatctccagtgacaagtttgagtatcttttcaattttgacaacacctttgagatccatgatgacatagaagtactaaagcggatgggaatgtcgtttggcctggagtcaggcaaatgctctctggaggatctgaaacttgcgaaatccctggtgccaaaggctttagaaggttatatcacagatatctccacaggaccttcttggttaaatcagggactacttctgaactctacccaatcagtttcaaatttagacctgaccactggtgccaccttaccccagtcaagtgtaaaccaagggttatgcttggatgcagaagtggccttagcaactgggcagttcctggccccaaacagtcaccagtccagcagtgcggcctctcactgctccgagtcccgaggcgagaccccctgttcgttcaatgatgaagatgaggaagatgatgaggaggattcctcctccccagaataaagacaagagaaagcctacgtttcaataaaaaaaaaaaaaaaaaaaaaaaaaaaaaaaaaa

SEQ ID NO: 26345 - DNA, 1928 bp, Homo Sapiens
ggtctcctctcctctgccccggggccgccaccgcccgggcgtcggacctggtcccgtgctcgcggtgccgccgccctctgggcctagcccgcccagctcggcgagcggcggcagtgggagccgcgtccgccgcatccgcctcgactcggtgccggcccctggccctcccctcatgactgcggcgcctctgctgccaccgcccgcccggccgccgctcgccgcaggatggatgcggaccgtgcggcgctaacccccgtggctcagctcccgaatcgcccgccttcgagccctcctcgtgagccgcagcagcctcggtgccagcccccgccgcagctgggcccagcggtccgcctgtccctcgttgcggcttgtcggtgctgagtgaggcgtcgtccgggtcggcgcgaacccgcccggccgcggtgccctgcagacctctgcgcgggcggctcggcccttcacgcccttttcgttcacgaatccgagcccgctcgcctctctccagcgaaccgaccatgtctggcggcgccgcagagaagcagagcagcactcccggttccctgttcctctcgccgccggctcctgcccccaagaatggctccagctccgattcctccgtgggggagaaactgggagccgcggccgccgacgctgtgaccggcaggaccgaggagtacaggcgccgccgccacactatggacaaggacagccgtggggcggccgcgaccactaccaccactgagcaccgcttcttccgccggagcgtcatctgcgactccaatgccactgcactggagcttcccggccttcctctttccctgccccagcccagcatccccgcggctgtcccgcagagtgctccaccggagccccaccgggaagagaccgtgaccgccaccgccacttcccaggtagcccagcagcctccagccgctgccgcccctggggaacaggccgtcgcgggccctgccccctcgactgtccccagcagtaccagcaaagaccgcccagtgtcccagcctagccttgtggggagcaaagaggagccgccgccggcgagaagtggcagcggcggcggcagcgccaaggagccacaggaggaacggagccagcagcaggatgatatcgaagagctggagaccaaggccgtgggaatgtctaacgatggccgctttctcaagtttgacatcgaaatcggcagaggctcctttaagacggtctacaaaggtctggacactgaaaccaccgtggaagtcgcctggtgtgaactgcaggatcgaaaattaacaaagtctgagaggcagagatttaaagaagaagctgaaatgttaaaaggtcttcagcatcccaatattgttagattttatgattcctgggaatccacagtaaaaggaaagaagtgcattgttttggtgactgaacttatgacgtctggaacacttaaaacgtatctgaaaaggtttaaagtgatgaagatcaaagttctaagaagctggtgccgtcagatccttaaaggtcttcagtttcttcatactcgaactccacctatcattcaccgcgatcttaaatgtgacaacatctttatcaccggccctactggctcagtcaagattggagacctcggtctggcaaccctgaagcgggcttcttttgccaagagtgtgataggtatgtttcaggtgtaccttggagcctgactggctttctgacattccttttatttagaatcctggctctgtcagagttttaagtgatataaaccttaagaaattcatagcttgaactcaggaggtgatccattgtacttatgagatataggattctctatatttgtgcttcttggaatcatcttagagactattggtaacattacgttacaagaaataaagtgaactttgttgataaaaaaaaaaaaaaaaaaaaaaaaa

SEQ ID NO: 26346 - DNA, 1005 bp, Homo Sapiens
gagagaggaaactaaattcagaggggtagtacccacttaaaggcatccatatgatgagtgctggggccagaagagactggaaccaatgagtcatagggtctcagggtcttcagacatcatatggggctgctacagggatcttttcagagcatccccttcaacagatgttcctcagcctccatgctaactctcaatgatggggcacctgagacaggcattccactgcttgcccctggtgatttccctcattctcacctctaagtaacatccaaaataaaaccagcccagccttgggccatgatatcctaacccacagcatgtgcacatgtacccacatctgcatatctgctctacctccagatcaaaatagcaaccagggagattggcagagcctggagtaccaggctgtcttcccagtttgggactggctgaggcactgtgacttcagtgagagtctgggcccatcctcagtctagaaaaagcttatgcaaggatgagggtagcctagagaaagtccagaaaaccacacaaatgaccacctgttgattccaaggcggagacagagcactttctccttttaaaaacagtatcctctcctctcactcaagcttagcctgctcaactgaacagccaggaaaagctgctggtgtttggtgatttgaagggaagggggtctgaacctcagaagcttgtcacttactggggaccctgatgagtttctctctgttgtcctgccttatccctaatctagctccctgatcatttgaatgtaaccctaattggacaagaattttctccctttcagtatggacaaaatcaacaaccatgaatcagagacttttagaggatgggtagtgaagtgggggaagaacagaacattgtagagtgaggggcagagaggcaggcagtgggcatgggtaggttctggttttgtgattagtaatattatctctttaattgaaaaaaataaactcatttcagattcgtaaaaaaaaaaaaaaaaaa

SEQ ID NO: 26347 - DNA, 4305 bp, Homo Sapiens
aagagttgtgcccattcagagcagacgctgagcctgacaccagcgaagcccatcagagtctctgacatttatcttagcaaagagcagatcaactcccagaccccaggcaacctcctccacctcttcttcaccaatgtccggccgccaaaaaaggtgctggaggatcagctcacccagatcctgaggaagtatggcgtgccaaagcccaagtttgacaagagcaagtacagcaaggccgggaaggagcagcaccccgtgaaggtggtgagcaccaagcggcctatcaccaagccgcccgccaaggacaaggctgtgctcaacagcgtcagcaggactgccttaagtgagaagaagccaactgtgaagccaaaatcaccagaaaagagcaaaccagatgaaaaggacccagaaaagtcacctaccaaaaaacaagaagtccctgaggaaaaatacctgacgctggaaggatttcacaaatttgttattgaccgagccaggcaagatatccgtagcgtctggagggcgatcttgtcctgtggttacgatcttcactttgagaggtgcgcatgcatcgatgtccgacatgcacagaaggcctcaagaaagtggaccctggagatggacgtggcacttgtgcagtacatcaaccagctatgccgccacctcgccatcacacccgcacggctccatccccatgaggtgtacctggaccccgcggatgctgctgaccccagagtggcctgtctcctgaacgtgcccatcgagagcctgcgcctgcgcttcgccttgctgcagtccctcaacaccacactggagaccttcttcctgcccctggtggagctgcgccagacacccatgtatacccacagcatcgccgccctgctgaaggaggccaaagggctgatcttctatgacacgaaggtgaccgtgatgaatcgagtgctgaatgccactgtgcagaggacagcggaccacgcggcccctgagatcaccttggacccactggaaattgtgggaggggaaatcagagcttctgaaaactcctacttctgtcaggctgccaggcagctggcctcagtgccgtcgtctcagctctgcgtcaagctggccagtggcggtgaccccacatatgccttcaacatccgcttcactggcgaggaggtccatggcaccagcggctctttccgccacttcctgtggcaggtgtgtaaggagctgcagagttcctcgctgtcgctgctgctgctgtgccccagctcagctgtcaataagaacaagggcaagtatatcctgaccccgagccccatcacctacggggaggagcagctgctgcacttcctggggcagctgctggggattgcaattcgggcagacgtcccgctgcccctggacctcctgccctccttctggaagacgctggtgggcgagcccttggaccctgagcaagacctgcaggaagcggatatcctcacctacaattacgtcaagaagtttgagagcatcaatgatgagaccgagctggaggccctgtgcgctgagatcgcctcccagcacctggccacggagagccctgacagccccaacaagccctgctgcaggttcacctacctgaccatgacgggcgaggaggtggagctgtgcagccggggccggcacatccttgtggcgtgggagaacaaggacatctacgcggcagccatccggagcctgcggctgcgggagctgcagaatgtggagtgcgtgacggccgtgcgggccggcctgggctccatcatccccctgcagctgctgaccatgctcagcccactggagatggagctgcgcacctgcggcctcccctacatcaacctcgagttcctcaaggcccacaccatgtaccaagtggggctgatggagacggaccagcacatcgagttcttctggggggccctggagatgttcacccaggaggagctgtgcaagttcatcaagtttgcctgcaaccaggagcgcatcccgttcacctgcccctgcaaagatgggggtcccgacactgcccatgtgcccccgtaccccatgaagatcgcccccccagatggcacagcaggttccccagactctcgctacatccgcgtggagacctgcatgttcatgatcaagcttccccagtactcctctctggaaatcatgctggagaaacttcgttgtgccattcactaccgtgaagaccccctcagtggctgatgggagggagccccagaattaggctgtcactgaggcacccactctgctggcttgggaagccaccactgcggcccgtccctccagggccctgcgtgaggagttggcaacattttgcttttccaaactttcgtccacattccagggcctcctggaagacttaaccttttgtctttgtacgtttcgtgatgggttggttcttttgctgcctgtttgtggtctatttgtaggatagtttagttcccagacagtttgtgtctaatttgatcttcttggacattgtccctcatggccaccagattctaatgccataaggccccagctggttccccatcacagaaccacccagcaggaagccgggggtacaatgacctcggccacacagagcgctcgtgctttcagcagagcgcctccacagacaagcctgtggccagccctgccctccagcctcgagctggagttgctccagaggcagccccagcaggcctccctccacatagaggtggctgggccaattgcccaaacacgtgagacacacagggagctttatgtgttcatcttcctgctttagaacttgctcccggtcttggtttttctgaggaaaagcccacagtggttcccctgcccctcccatacctccctatctgccgtctgtctctttgggccctggtctgacagttttcatctgaggcctcctcgggagcaggagacttaagggttcatcccgaccttagttcacagagcctagctgggtgcatcccagccgcagggggtgagaagacacccagagatgggggacaatgctcaggtgggggcctcctccgagactctggttgagaggaaagcacatgattcaagcctaccccacaaaaaaggagcacaaaatgctcagaaatggcccttcctccctgcagtgacgtaggacaagggaaagggccacacccattttcaaaagagtggactgaggtgctctgctcaatttggggtctgctttagtgacccagacactcaagtccagatggagactccaggggggtccttctgcccctctggccagccccacccagcactccccatcaccccatgtaagtgtgtatgccagggctgagctgcctccaggctcacccactgcatctttgccccaaataggtctttgtccagtggtactttgttcatgagcagcacaggccatcttgttggacactgtcactttgggccttgccaggtctcacagaatcacatcgctgtatttattgtataatattgtgaatattggaagttttgagtgagtgctgtctagaaggttttggagtgtggatgctggtccaagaaagaagatgtgccctggcctgctggaaagattgtgaattctagagatagagccgttagcatccatctcctccctgtaactcttaggaaatgcatcaaggaccattatagaaaggatcccctgacctaaggatgaaatcgacctagggttaatcatgacagctgcatcagttgtattggatgcaagtcaactctggaggtgagtgcccgcaagcagttcccctgctttgaaagaagatggtcagcccgctgcctccccagcggccacagctcctttgagtgtggggggtcacagccaggatgtattcctgacaataaggatccttttattttcatttctgcataatgaaagagcctttcgatttattagaagtggtttttcctccctacatctttaaattcttggttctctttagtcctcatcccttgaatggacttgtcagctacctccccaggaggagttcagaagcttctgttggccatcacttgagtagatgacaagctgtaaggtatctgctgctaacgtggctgcttctccgagagcacattgaggtccagacagatccaaaccttggccctaaaaaatgtgtgctgtaaagttacttgatgtatatttattataattatttatggttgcatttaacaaacttttcattcaatctgatgctatttacaccatgctgtgtaaaggaagctcactaaaggaaaaaagtcacaccaataaataaccttcatctaaaaaaaaaaaaaaaaaaa

SEQ ID NO: 26348 - DNA, 785 bp, Homo Sapiens
agcggaggggtgtgtccaccgagcacttggattcagcttcttcatttccaacatggaagaaacttacaccgactccctggaccctgagaagctattgcaatgcccctatgacaaaaaccatcaaatcagggcttgcaggtttccttatcatcttatcaagtgcagaaagaatcatcctgatgttgcaagcaaattggctacttgtcccttcaatgctcgccaccaggttcctcgagctgaaattagtcatcatatctcaagctgtgatgacagaagttgtattgagcaagatgttgtcaaccaaaccaggagccttagacaagagactctggctgagagcacttggcagtgccctccttgcgatgaagactgggataaagatttgtgggagcagaccagcaccccatttgcctggggcacaactcactactctgacaacaacagccctgcgagcaacatagttacagaacataagaataacctggcttcaggcatgcgagttcccaaatctctgccgtatgttctgccatggaaaaacaatggaaatgcacagtaactgaatacctatctcatcaaatgccagaccctagaagactgttgcttcttcttctaccagtgggttctcattttcctcctaatctaattatagaatagtaaactccctgtgactttccaaactgacaagcacacttttttcctccccccttgaatcctcatttaatgcaagaaccctcatactcagaagcttccaaataaacctttgatacagaaaaaaaaaaaaaaaa

SEQ ID NO: 26349 - DNA, 3884 bp, Homo Sapiens
ggcggggacagcggcggggacagcggcgggcggctgggacggcgggtgcggcggggccgagcccgcacgatgcctcacttcaccgtggtgccagtggacgggccgaggcgcggcgactatgacaacctcgaggggctcagttgggtggactacggggagcgcgccgagctggatgactcggacggacatggcaaccacagagagagcagcccttttctttcccccttggaggcttccagaggaattgactactatgacaggaacctggcactgtttgaggaagagctggacatccgcccaaaggtatcgtctcttctgggaaagctcgtcagctacaccaacctcacccagggcgccaaagagcatgaggaggccgagagtggggagggcacccgccggagggcagccgaggcacccagcatgggcaccctcatgggggtgtacctgccctgcctgcagaatatctttggggttatcctcttcctgcggctgacctggatggtgggcacagcaggtgtgctacaggccctcctcatcgtgcttatctgctgctgttgtaccctgctgacggccatctccatgagtgccatcgccaccaacggtgtggttccagctgggggctcctatttcatgatctctcgttcactggggccagaatttggaggtgctgtgggcctgtgcttctacctgggaacaacattcgcagcagccatgtacatcctgggggccatcgagatcttgctgacctacattgccccaccagctgccattttttacccatcgggtgctcatgacacgtcgaatgccactttgaacaatatgcgtgtgtatgggaccattttcctgaccttcatgaccctggtggtgtttgtgggggtcaagtatgtgaacaaatttgcctcgctcttcctggcctgtgtgatcatctccatcctctccatctatgctgggggcataaagtctatatttgaccctcccgtgtttccggtatgcatgctgggcaacaggaccctgtcccgggaccagtttgacatctgtgccaagacagctgtagtggacaatgagacagtggccacccagctatggagtttcttctgccacagccccaaccttacgaccgactcctgtgacccctacttcatgctcaacaatgtgaccgagatccctggcatccccggggcagctgctggtgtgctccaggaaaacctgtggagcgcctacctggagaagggtgacatcgtggagaagcatgggctgccctccgcagatgccccgagcctgaaggagagcctgcctctgtacgtggtcgctgacatcgccacatccttcaccgtgctggtcggcatcttcttcccttctgtaacaggcatcatggctggctcaaaccgctctggggaccttcgtgacgcccagaagtctatccctgtggggaccattctggccatcattacaacttccctcgtgtacttcagcagtgtggttctctttggtgcctgcattgagggtgtggttctccgggacaagtatggcgatggtgtcagcaggaacttggtggtgggcacactggcctggccttcaccctgggtcatcgtcatcggctccttcttttcaacgtgtggcgctggcctccagagcctcacaggggcaccacgcctattgcaggccattgccaaggacaacatcatccccttcctccgggtgtttggccacgggaaggtgaatggtgaacccacatgggcactcctcctgacggcactcatcgccgagctgggcatcctcatcgcctccctcgacatggtggcccccatcttatccatgttctttctgatgtgctacctgttcgtgaacctcgcctgtgcggtgcagacactcctgaggacccccaactggcggccccggttcaagtactatcactgggcgctgtccttcctgggcatgagtctctgcctggcccttatgtttgtctcctcctggtactatgccctggtggccatgctcatcgccggcatgatctacaaatacatcgagtaccaaggggctgagaaggagtggggtgacgggatccgaggcctgtccctgagcgctgcccgctacgcgctgttgcggctggaggaggggcctcctcacaccaagaactggcggccgcagctgctggtgctgctgaagctggacgaggacctccacgtgaagtacccgcggctcctcaccttcgcctcccagctcaaggctggcaagggcctgaccattgttggttctgtcatccaggggagcttcttggagagctatggcgaggctcaggccgccgagcagaccatcaagaacatgatggaaattgagaaggtgaagggcttctgccaggtggtggtggccagcaaggtgcgggaggggctggcccacctcatccagtcctgtggcctgggaggcatgcggcataactccgtggtgctgggctggccctacggctggcgacagagcgaggacccccgtgcctggaagaccttcattgacaccgtgcgctgcactacggctgcccacctggccctgctcgtgcccaagaacatcgccttctaccccagcaaccacgagcgctacctggagggccacatagacgtgtggtggatcgtgcacgatggtggcatgctcatgcttctgcccttcctgctgcgccagcataaggtctggaggaagtgccggatgcgcatcttcacagtggcccagatggatgacaacagcatccagatgaagaaggacctggctgtctttctgtaccatctgcgccttgaggccgaggtggaggtggtggagatgcataacagtgacatctctgcatacacctacgagcggacgctgatgatggagcagcggtcgcagatgctgcggcagatgagactgaccaagactgagcgggagcgagaagcccagctggtcaaggatcggcactcggccctgaggctggagagcctgtactcggacgaggaagatgagtctgcagtgggggctgacaagatccagatgacgtggaccagggacaagtacatgactgagacctgggaccccagccatgcccctgacaatttccgggagctggtgcacattaagccggaccaatccaatgtgcggcgcatgcacactgctgtgaagctcaatgaagtcattgtcacgcgctcccacgacgcccgcctggttctcctaaacatgcctggcccacccaggaacagtgagggcgacgagaactacatggagttcctcgaggtgctgaccgagggccttgagcgggtgctgttggtgcgcggtggtggccgtgaagtcatcaccatctactcctgagcccagtgtcatcttgtggcctggagtcgaggtcttggccaggacataacaagctgtggtctggggtaacagcctcttcccagcacccacctgccagccctgcttgcctggccctgtcctggacccagctttgctaggtctccttggaaaccaggcctgggcctcaaaatggagatggatcccaggtcttgtgggaccctgggatgtttggggactttactatctagcaccccagtaggcctgtcctggccagagaagactggtaggggccgagtggggtttgaaggcagccggcccggcccagcccaggagcgctatttattgcatatttattgtttggatgtcaccatcagagacgaagggaagggtagccagggagggagtccagcccagctgcctgcaggaagatctggctcagtctactatgggcagggccccccaccaagctgagccgaatggagacagctgagctgaggcctgactttttcaataaaacattgtgtagttctgggcaaaaaaaaaaaaaaaaaaaaaaaaaaaaaaaaaaaaaaaaaaaa

SEQ ID NO: 26350 - DNA, 2556 bp, Homo Sapiens
gcgggagctggaagcctcaagcagccggcgccgtctctgccccggggcgccctatggcttgaagagcctggccacccagtggctccaccgccctgatggatccactgaatctgtcctggtatgatgatgatctggagaggcagaactggagccggcccttcaacgggtcagacgggaaggcggacagaccccactacaactactatgccacactgctcaccctgctcatcgctgtcatcgtcttcggcaacgtgctggtgtgcatggctgtgtcccgcgagaaggcgctgcagaccaccaccaactacctgatcgtcagcctcgcagtggccgacctcctcgtcgccacactggtcatgccctgggttgtctacctggaggtggtaggtgagtggaaattcagcaggattcactgtgacatcttcgtcactctggacgtcatgatgtgcacggcgagcatcctgaacttgtgtgccatcagcatcgacaggtacacagctgtggccatgcccatgctgtacaatacgcgctacagctccaagcgccgggtcaccgtcatgatctccatcgtctgggtcctgtccttcaccatctcctgcccactcctcttcggactcaataacgcagaccagaacgagtgcatcattgccaacccggccttcgtggtctactcctccatcgtctccttctacgtgcccttcattgtcaccctgctggtctacatcaagatctacattgtcctccgcagacgccgcaagcgagtcaacaccaaacgcagcagccgagctttcagggcccacctgagggctccactaaagggcaactgtactcaccccgaggacatgaaactctgcaccgttatcatgaagtctaatgggagtttcccagtgaacaggcggagagtggaggctgcccggcgagcccaggagctggagatggagatgctctccagcaccagcccacccgagaggacccggtacagccccatcccacccagccaccaccagctgactctccccgacccgtcccaccatggtctccacagcactcccgacagccccgccaaaccagagaagaatgggcatgccaaagaccaccccaagattgccaagatctttgagatccagaccatgcccaatggcaaaacccggacctccctcaagaccatgagccgtaggaagctctcccagcagaaggagaagaaagccactcagatgctcgccattgttctcggcgtgttcatcatctgctggctgcccttcttcatcacacacatcctgaacatacactgtgactgcaacatcccgcctgtcctgtacagcgccttcacgtggctgggctatgtcaacagcgccgtgaaccccatcatctacaccaccttcaacattgagttccgcaaggccttcctgaagatcctccactgctgactctgctgcctgcccgcacagcagcctgcttcccacctccctgcccaggccggccagcctcacccttgcgaaccgtgagcaggaaggcctgggtggatcggcctcctcttcaccccggcaggccctgcagtgttcgcttggctccatgctcctcactgcccgcacaccctcactctgccagggcagtgctagtgagctgggcatggtaccagccctggggctgggccccccagctcaggggcagctcatagagtcccccctcccacctccagtccccctatccttggcaccaaagatgcagccgccttccttgaccttcctctggggctctagggttgctggagcctgagtcagggcccagaggctgagttttctctttgtggggcttggcgtggagcaggcggtggggagagatggacagttcacaccctgcaaggcccacaggaggcaagcaagctctcttgccgaggagccaggcaacttcagtcctgggagacccatgtaaataccagactgcaggttggaccccagagattcccaagccaaaaaccttagctccctcccgcaccccgatgtggacctctactttccaggctagtccggacccacctcaccccgttacagctccccaagtggtttccacatgctctgagaagaggagccctcatcttgaagggcccaggagggtctatggggagaggaactccttggcctagcccaccctgctgccttctgacggccctgcaatgtatcccttctcacagcacatgctggccagcctggggcctggcagggaggtcaggccctggaactctatctgggcctgggctaggggacatcagaggttctttgagggactgcctctgccacactctgacgcaaaaccactttccttttctattccttctggcctttcctctctcctgtttcccttcccttccactgcctctgccttagaggagcccacggctaagaggctgctgaaaaccatctggcctggcctggccctgccctgaggaaggaggggaagctgcagcttgggagagcccctggggcctagactctgtaacatcactatccatgcaccaaactaataaaactttgacgagtcaaaaaaaaaaaaaaaaaa

SEQ ID NO: 26351 - DNA, 1777 bp, Homo Sapiens
gccggctttcccgggtcttctccagctgccaccgctttactgcaaaactgacgggcgcaaaaacatgagtgactccgcgggagggcgcgctggtctccggcgttaccccaagctcccagtgtgggtggtggaggatcatcaggaggttctaccctttatataccgggccataggctcaaagcatcttcctgccagtaatgtaagttttttacatttcgactcacatccagacctccttattcctgtgaatatgccagcagacaccgtgtttgataaggaaacactctttggagaattaagtattgaaaattggattatgcctgcagtttatgctggccatttttcacatgtaatatggtttcatcccacatgggctcagcagatcagagagggcagacaccactttttagtaggcaaagacacttctaccacaacaatcagggttacaagtacagatcattatttcctaagtgatggtctgtatgtacctgaagaccagctagagaaccaaaaacctttacaattggatgtaattatggtaaaaccttataaactctgtaacaatcaagaagaaaacgatgcagtgtcttctgctaagaaaccaaagctagccctggaagattcggaaaacactgcctctactaactgtgactcttcttcagaaggactggaaaaggacacagcaacacagagaagtgaccagacttgcctagaaccatcatgttcatgttcttctgaaaatcaggaatgccagactgctgccagcactggggaaattctggaaattttgaagaaagggaaggcatttgttttagatattgacttggattttttttcagtcaagaatcccttcaaagaaatgttcactcaggaagagtacaaaatcttacaagagctgtaccaatttaagaaacctggcaccaacctaacagaggaagatttggtagatattgttgatactcgaattcatcaattagaggatttagaagccactttcgctgatttgtgtgatggtgatgatgaagaaacggtacagagatgggcttcaaaccctggaatggaatcactagttccccttgtacagagtttgaaaaaacggatggaagtaccagactatgaaatggttcaccaggctggtttaacctgcgattattcagaacttcctcaccatatcagcacagaacaagaaatagagtgtcttattcaatctgtgcattatttgctgaaaaatttaccaaatcctactcttgtgacaattgcaaggtcaagtctggatgattactgtccttctgaccaagttgacactattcaagaaaaggtcctcaatatgctacgtgccctctatggaaatctagacctccaagtgtatgcagcagagtctcctccatcttgaaacaaacaaaacattaggctcctgttgtatcttggtttagtaacaggcccttaattaacttatttgtacatgagtcttccagagaacactgttttatattaactttcagttgaaatctttcagatattttgaatctctgaacaaccattgtcagttgtgaatgatggtaaattttttggcatcaagtctcataaccccaactgatagaactgttgcttatctgtcttccttaagtattttttagggttttgtttttttttttgtttgtttgtttgtttgtcttcacttttcccccaggtctgttgagctgtatgagattcattcatacttcatttattcattcaactaatatttgttgaacacttaaaaaaaaaaaaaaaaaaa

SEQ ID NO: 26352 - DNA, 1573 bp, Homo Sapiens
cgggtgcgcgcgcagctgctgtggccctgcttggtgcgcccgctgtcaccgccatggctgccccgtgtttgctgcggcaaggacgagccggggcgctgaagactatgctccaggaagcccaggtgtttcgaggacttgcttctacggtttctttgtctgcggaatcagggaagagtgaaaagggtcagccacagaattccaagaagcaaagtccaccaaaaaatgtagtggaaccaaaggagaggggcaagctcctagccacccagacagcagctgaattgtctaaaaacttatcttcacccagttcttacccgccagctgtgaataagggcaggaaggtagctagtcccagtcccagtggcagcgtgctattcacagatgaaggggttccgaaatttttgtcaagaaagactttggtagagtttccacagaaagttctgtctccattcagaaaacagggctctgattcagaagctcgtcaggtgggtcggaaagtgacgtcgccttcgtcttcatcctcgtccagctcctctgattctgaatctgatgatgaggctgacgtttcagaggtcactcctcgagtggtgagcaaaggcagaggggggcttcgaaaaccagaggcctctcattcctttgaaaacagagccccccgagttacagtatcagcaaaagagaaaaccttgctgcagaagccgcatgtggacattactgatccagagaagccccaccagccaaagaagaaagggtcccctgctaagccatcagaaggcagggaaaatgcgagaccaaaaaccacaatgcccagatctcaagtagatgaagagtttttgaagcaaagtttaaaggaaaaacaattgcagaaaacatttagattaaatgaaatagataaagaaagccaaaagccatttgaagttaaaggacccttacctgtccacacaaaatcagggttgtctgcgccaccgaagggcagcccagcgcctgctgtgttggcagaagaggccagagcagaggggcagctgcaagccagtcctcctggggcggcagaggggcatctggaaaaacccgtgccagagccccagcgcaaggcggcccctcccctgcccagaaaggaaacctcagggacgcagggaatagaaggccacctgaagggtggacaggcaatcgtggaagatcagataccaccaagcaatttggagacagttcctgttgagaataaccacggtttccatgaaaagacagcagcgctgaagcttgaggccgagggcgaggccatggaagatgcagccgcgccagggaacgaccgaggcggcacacaggagccagccccagtgcctgctgagccgtttgacaacactacctacaagaacctgcagcatcatgactacagcacgtacaccttcttagacctcaacctcgaactctcaaaattcaggatgcctcagccctcctcaggccgggagtcacctcgacactgagggccctcggtgtgaagatgaaccttccaccgtcttcactgcatcctggagtgcaaaaataaaatccactcaagagtcacaaaaaaaaaaaaaaaaaa

SEQ ID NO: 26353 - DNA, 2231 bp, Homo Sapiens
gtggcattaggatgcacctctcggcggtgttcaacgccctcctggtgtcggtgctggcagcggtcctgtggaagcatgtgcggctgcgtgagcatgcagccacactggaggaggagctggccctcagccgacaggccacagagccagccccagcactgaggatcgactacccgaaggcactgcagatcctgatggagggcggcacacacatggtgtgcacgggccgcacgcacacagaccgcatctgccgcttcaagtggctctgctactccaacgaggctgaggagttcatcttcttccatggcaacacctctgtcatgctgcccaacctgggctcccggcgcttccagccagccctgctcgacctatccaccgtggaggaccacaacactcagtacttcaacttcgtggagctgcctgctgctgccctgcgcttcatgcccaagccggtgttcgtgccagacgtggccctcatcgccaaccgcttcaaccccgacaacctcatgcacgtctttcatgacgacctgctgccactcttctacaccctgcggcagtttcccggcctggcccacgaggcacggctcttcttcatggagggctggggcgagggtgcacacttcgacctctacaagctgctcagccccaagcagcctctcctgcgggcacagctgaagaccctgggccggctgctgtgcttctcccatgcttttgtgggcctctccaagatcactacctggtaccagtatggctttgtgcagccccagggcccgaaggccaacatcctcgtctcaggcaatgagatccggcagtttgcacggttcatgacagaaaagctgaacgtgagccacacaggagtccccctaggcgaggagtacattctggtctttagccgaacccagaacagactcattctgaatgaggcagagctgctgctggcactggcccaggagttccagatgaagacagtgacagtgtccctggaggaccacacctttgctgatgtcgtgcggctggtcagcaatgcctccatgctggtcagcatgcatggggcccagctggtcaccaccctcttcctgccccgtggggcaactgtggtagagctcttcccatatgctgtcaatcccgaccactacactccctataagacgctggccatgctgcctggcatggacctccagtatgtagcctggcggaacatgatgccagagaacacagtcacacaccctgagcggccctgggatcaggggggcatcacccatctggaccgggctgagcaagcccgtatcctgcaaagccgtgaggtcccacggcatctctgttgccggaaccccgagtggctcttccgaatctaccaggacaccaaggtggacatcccatccctcattcaaaccatacggcgcgtggtgaagggccggccaggaccacggaagcagaagtggacagtcggcctatatccaggcaaggtgcgggaggcacggtgccaggcgtcagtgcatggcgcctccgaggcccgcctcactgtctcctggcagatcccatggaaccttaaatacctgaaggtgagggaggtgaagtacgaggtgtggctgcaggagcagggggagaacacctacgtgccttacatcctggctctgcagaaccacaccttcactgagaacatcaagcccttcaccacctacctggtgtgggtccgctgcatcttcaacaagatcctcctgggaccctttgcagatgtgctggtgtgcaacacgtagcgagcaggccacagcctggcctcgggaaggtggctcctgcagttcagcgtccctgggcccattaatcccactgtggagacttctgggaactatttattgagcaggcctgtgcctccacatcatcttgttgtctctggggtgtggtgtcacagcactcctctttgccctagagataagggacctgacttccccttctcccatcctgaacatttgtacccctggagaagttccttagcagggaggaggaagaggagaggaggaagcaaagaatcacaaggaacctctggctaggtgatcctgatgtttcctactgagtttttctggtatccagatttctggaaaccgagtaatcatgtactgtttgattgggtggttcatctgcttccatcccagtgaaatttacctgtagcccagtgaagggtgtgtttggaacattcattaaatgattctaagcaaaaaaaaaaaaaaaaaaaaaaa

SEQ ID NO: 26354 - DNA, 3300 bp, Homo Sapiens; identical to SEQ ID NO: 26299

SEQ ID NO: 26355 - DNA, 976 bp, Homo Sapiens
gatgaaggccacggtgatcaggcacggggagaccctgcgccgcaccaaggaggagatcaacgagctgaaccgcatgatccagaggctgacggccgaggtggagaatgccaagtgccagaactccaagctggaggccgcggtggcccagtctgagcagcagggtgaggcggccctcagtgatgcccgctgcaagctggccgagctggagggcgccctgcagaaggccaagcaggacatggcctgcctgatcagggagtaccaggaggtgatgaactccaagctgggcctggacatcgagatcgccacctacaggcgcctgctggagggcgaggagcagaggctatgtgaaggcattggggctgtgaatgtctgtgtcagcagctcccggggcggggtcgtgtgcggggacctctgcgtgtcaggctcccggccagtgactggcagtgtctgcagcgctccgtgcaacgggaacgtggcggtgagcaccggcctgtgtgcgccctgcggccaattgaacaccacctgcggagggggttcctgcggcgtgggctcctgtggtatcagctccctgggtgtggggtcttgcggcagcagctgccggaaatgttaggcaccccaactcaagtcccaggccccaggcgtctttcctgccctgccttgcttggcccatccagtccaggcgcctggagcaagtgctcagctacttctcctccactttgaaagacccctcccactcctggcctcacatttctctgtgtgatcccccacttctgggctctgccaccccacagtgggaaaggccaccctagaaagaagtccgctggcacccataggaaggggcctcaggagcaggaagggccaggaccagaaccttgcccacggcaactgccttcctgcctctccccttcctcctctgctcttgatctgtgtttcaataaattaatgtagccaaaaaaaaaaaaaaaaaaaaaaaaaa

SEQ ID NO: 26356 - DNA, 2772 bp, Homo Sapiens
agaaacatcaacagcaccaaaaaaagagactggtgaactagagaatgctgagtctggaggagacggaggcaggagaggagggaagcaggataacgttgcctggtggaggcggatgcagaaggggggacttcccctgggatgacgaggatttccgcagtctggcccttttgggggcaggcgttgccatgggatttttctacctctattttcgagatcctggaagagaaatcacgtggaagcactttgtacagtattacctggccagaggtctggtggaccggctggaagtcgtgaacaaacaatctgtgcgtgttattcctgcccctgggacctcttctgaaacgtagctgggtgcgaagaatcaaattggaaattatggaatttgtgaatttcctgaagaatcccaagcagtatcaggacttaggagcaaaaattccaaagggagccatgctcactggtcctcctggtaccggcaagacccttcttgccaaagcaactgcaggggaggccactgtgcccttcatcactgtgaacgggtctgagttcctggaaatgtttattggcgttgggccagcaaggggttcaactctgccaccaacgtcgtggtgttggctggcaccaaccgccctgacgtcctggacccggccctcatgcggcctggccggtttcatcgccagatttacactggtcccccttacattaaaggcaggtcctccatctttaaggtccacctgcgcccactgaagctggacaagagcctcaataaggacaccctggcgaggaagctggcagtgctcaccccaggcttccctgatgtctgtttacataccaaagttaaaaagctggaatgttaccaagactgctttcttctgcccatagacggggatgactcagcactacccctcaacagagatgactttgatgactctgcccctcagcagggcttactaagcactaccccttaacagggatgactccgcactgcccctcaacagggatgactcagcagagatgactcagcactgtcccttagcagggatgacacagcaaggatgactcagcactgcccctcagcaaggatgactcagcactgccgctcaacagacatgactcagggatggcttagtactgcccctcagcagggatgactcagcaccgcctctcaacagggatgactcagcagggatgactcagcaccgcccctcaacaggcatgactctgcagagatgactcagcactgtcccttagcagggatgacacagcaaggatgactcagcactgcccctcagcaaggatgactcagcactgccgctcaacagggatgactcagggatggcttagtactgcccctcaacagggatgactcagcagggatgactcagcaccgcccctcaacaggcatgactctgcagagatgacttagtactgcccctcagcagggatgactcagtactgcccctcagcagggatgactcagcactgcccctcaacagggatgactcagcagggatgactcagcactgtcccttagcagtgatgacacagcaaggatgactcagcactgcccctcagcaaggatgactcagcactgccgctcaacagacatgactcagggatggcttagtactgcccctcagcagggatgactcagcaccgcccctcaacagggatgactcagcactgcccctcaacagggatgactcagcagggatgactcagcactgtcccttagcagcgatgacacagcaaggatgactcagcactgcccctcaccaaggatgactcagcactgccgctcaacagacatgactcagggatggcttagtactgcccctcagcagggatgactcagcagggatgactcagcaccacccctcaacagggatgactcagcagggatgactcagcactgcccctcaacagggatgactgcagggatgactcagcactgcccctcagcagggatgactcagcactgcccctcagcagggatgactcagcagggatgactcagcaccgcccctcaacaggcatgactctgcagagatgactcagcactgcccctcagcagggatggctcagcagggatgactcagcattgcccctcaacagggatgactcagcagactcagcagggatgactcagcactgcccctcaacagacatgactcagcagggatgactcagcaccacccctcagcaaggatgactcagcagggatgattcagcagagataactcggggatgactctgattgtccttcagcagggatgagtctgttttgctccgatggaagcatctgtagtgtccatcagcaggtgaatggccaaagtggtatatactgtagtcacattcagctataaaaaggaataaagtatcgatgcatgccacaacatgggtgaacctagaaaatactgatctaaatgcaagaagccaggcacaaaaggccacatagtatatgttcccatttatgtgaaatgtgcagaataataataaaaatgtatagaatagcaaatctgtagggacagacatgaggtgagtggttgccagaagtggaaatgggagttaactataaattgcacagggtaccttacagagatgatggaaatgtcctaaaactagattatggcaatagttgcactacgtgatcagtttattaaaaatcgttgatgtgtgtgtgtaaaatgggtggattttatggtttataaattataccttaataaaggttaacaaaaaatgtggctaaaaaaaaaaaaaaaaaaaaaaaaaaaa

SEQ ID NO: 26357 - DNA, 3268 bp, Homo Sapiens
atgcagcctaatgcaagcagggggcatatttcagcccttttggtgttacagcaactcttttagccacgccgttcagcagatcccgagttcttgtcctgcaaccaggaagaatgaggtacgcagacaagtggagggtgagcaagatgaagaggtgctgtattgagcaatggaacagctcagagaagactcacagtgccagggcgtcccagtgagtgttcagcccctagcaggaaggatagctcctctctgcagtgatagactggagtgatgttagaaaacacaaatatggtcacctatcagagtctgcatcccaatatcaagaagctgctgacatcctggatctaggtcattttacctgggacaaatacctaaaagaaacatgttcagtcccagcgcctgtccattgcttcaagcagtcctacacacctccaagcaacgagttcaagatcagtatgaaattggaagcacaggaccccaggaacaccacatccacctgtattgccacagtagttggactgacaggtgcccgccttcgcctgcgccttgatgggagcgacaacaaaaatgacttctggcggctggttgactcagctgaaatccagcctattgggaactgtgaaaagaatgggggtatgctacagccacctcttggatttcggctgaatgcgtcttcttggcccatgttccttttgaagacgctaaatggagcagagatggctcccatcaggattttccacaaggagccaccatcgccttcccacaacttcttcaaaatgggaatgaagctagaagctgtggacaggaagaaccctcatttcatttgcccagccactattggggaggttcggggctcagaggtgcttgtcacttttgatgggtggcgaggggcctttgactactggtgccgcttcgactcccgagacatcttccctgtgggctggtgttccttgactggagacaacctgcagcctcctggcaccaaagttgtgattccaaagaatccctatcctgcctccgatgtgaatactgagaagcccagcatccacagcagcaccaaaactgtcttggaacatcaaccagggcagagggggcgtaaaccaggaaagaagcggggccggacacccaagaccctaatttcccatcccatctctgccccatccaagacagctgaacctttgaaattcccaaagaagagaggtcccaaacctggcagcaagaggaaacctcggactttgctgaacccaccacctgcctcaccaacaaccagcactcctgaaccggataccagcactgtaccccaggatgctgccaccatccccagctcagccatgcaggccccaacagtttgtatctacttgaacaagaatggcagcacaggcccccacttagataagaagaaggtccagcaactccctgaccattttggaccagcccgtgcctctgtggtgttgcagcaggctgtccaggcctgtatcgactgtgcttatcaccagaaaaccgtcttcagcttcctcaagcaaggccatggtggtgaggttatctcagccgtgtttgaccgggaacagcataccctcaacctcccagcagtcaacagcatcacctacgtcctccgcttcctggagaaactctgccacaaccttcgtagtgacaatctgtttggcaaccagccctttacacagactcacttgtcactcactgccatagagtacagccacagccacgacaggtacctaccaggtgaaacctttgtcctggggaatagtctggcccgctccttggaaccacactcagactcaatggactctgcctcaaatcccaccaaccttgtcagcacctcccaaaggcaccggcccttgctttcatcctgtggcctcccaccaagcactgcctcagctgtgcgcaggctatgctccaggggagtgttaaaaggatcaaatgaaagaagggatatggaatcattttggaaactaaatcgttccccagggtcggaccgatacctggagagccgcgatgcctctcgactgagtggccgggacccctcctcatggacagtcgaggatgtgatgcagtttgtccgggaagctgatcctcagcttggaccccacgctgacctgtttcgcaaacacgagatcgatggcaaggccctgctgctgctgcgcagtgacatgatgatgaagtacatgggcctgaagctggggcctgcactcaagctctcctaccacattgaccggctgaagcagggcaagttctgaaccaggagaggcagcctagacaaccaagtggcagcaggtgggggcattcttctaggaatgaggggcatcagcccaccccaggcacctcagtggggttccgggccacctcaggactccaagaggctgtgtggagccaccactcctagccacagctgccatgataagtccttccatgaaggactgaggagggagagtgggggtccagggctggtgctgctcttccctcagctctgccggggctctaaggtccctctatttatttctcaaccctggctggcctctcaccaggagtttaggctgaatgccttccacgtgatggaggaaaaggccaactctgtcctggtcttgctgtggcaccccatcgccccacagctcgtaccttctcaccagattcccctgaatccaaactcgtggtgcaaacctctaccttttttacaaaaagatcttattgttaatttattgtttctggcacttgggcaaaccctgtagttaatactcctcccacactagacactgggtttcaggaggagggagactgccctgctttggtcccagagaggccctctgcagataggcgtggcccctcttcagaggacactaccctagggcactttctctttgaggtggagagacccataaagccttgaccacatcactccatatggggaggagaaggatccctgtcaccttctcctctcttcacggggcccttttgcagccctaggcctcatctgtgggaagggagtccctggcttatactgcccccaccacagctccttgccctggccagaactgctgtcgaagaaaatcaggccggaaggccaagaaggcgctaagggggatgggagggcaggttttccaggctggagtcggttccacccactcgcctgtccacaggcttccttgtaagcaagtcagcagcacagctactcacgctgccatctggacttattttatgtcaatctgtttataaataaaaaccaatatagataaaaaaaaaaaaaaaaaaaaaaaaa

SEQ ID NO: 26358 - DNA, 3264 bp, Homo Sapiens
gggcgtcagcgagccgtgagatgcgtggtccaccatcggtgacctcaccgcctcggttcgccctcagccgccccgattggccatctgcaagcttcccttctccgtggagagcaggaagacagtcatgggacctcagggagccaggagacaggctttcttggcatttggggatgtcactgtggatttcacccagaaggaatggaggctgctgagccctgctcagagggccctgtacagggaggtgacactggagaactacagccacctggtctcactaggaattctccattctaaaccagaactcatcaggcggctagagcaaggggaagtgccctggggagaagagagaagacgccggccaggcccctgtgcaggaatatatgcagaacatgtcctgcggcccaagaatcttggacttgcacatcagaggcaacagcaactacaattttctgatcaaagcttccagagtgacacagctgaaggtcaagagaaagaaaaaagcactaagcccatggcattttccagcccacccctaagacatgcagtaagctcaaggaggaggaacagtgtagtggaaatagagtctagtcaaggccagagggaaaatcctacagaaatagacaaagtattgaaaggaatagaaaattcaagatggggagcattcaagtgtgcagagcgtgggcaagacttcagccggaagatgatggtaatcatacacaaaaaagcacattccaggcagaaactttttacatgcagggagtgtcaccagggctttagagatgagtcagcattgctcttgcaccagaacacacacacaggagagaagtcctatgtgtgcagtgtgtgtgggcgaggcttcagcctcaaggccaacctcctcagacaccagaggacacactcaggagagaagccttttctgtgcaaggtgtgtggacgaggctataccagtaagtcatacctcactgtgcatgagagaacacacacaggagagaagccttatgaatgccaggagtgtgggcgaaggtttaacgataagtcctcatacaacaagcacttgaaggcgcattcaggggagaagccttttgtgtgcaaggagtgtgggcgaggctatactaataagtcatacttcgttgtgcacaagagaatacactcaggagagaagccttacagatgccaggagtgtggccgaggctttagcaataagtcacaccttatcacacaccagaggacacactcaggggagaagccctttgcgtgcaggcagtgtaagcaaagttttagcgtgaaaggaagtctcctcagacaccagagaacacactcaggggagaagccttttgtgtgcaaggattgtgagcgaagctttagccaaaagtcaactcttgtctaccaccagagaacacactcaggggagaaaccttttgtttgtagagaatgtgggcaaggatttattcagaagtcaacccttgtgaaacatcagatcacacactcagaggagaagccttttgtgtgcaaggactgtggacgaggctttatccaaaagtcaaccttcactttacaccagaggacacactcagaggagaagccttatggatgtcgggagtgtgggcgaaggtttcgggataagtcctcctataacaagcacctgagggcacacttgggtgagaaacgttttttctgcagggattgtgggcgaggctttaccttgaagccaaatctcaccatacatcagaggacacactcaggagagaagcccttcatgtgcaagcagtgtgagaaaagttttagtttgaaggcaaatcttcttagacatcagtggacacactcgggggaaaggccatttaattgcaaggattgcgggcgaggcttcatcctaaaatcaactctcctcttccaccagaagacacactcaggggagaagcctttcatctgtagtgaatgtgggcaaggatttatctggaagtcaaatcttgtgaaacaccagcttgcacattctggcaagcagccttttgtatgcaaggagtgtgggcgaggcttcaactggaagggaaatctcctcacacaccagaggacacactcaggggagaagcccttcgtgtgtaatgtgtgtgggcaaggcttcagctggaagagaagtctcaccagacaccactggcggatacactcaaaggagaagccttttgtttgccaggagtgtaagcgaggctataccagtaagtcagacctcactgtgcatgaaagaatacacacaggagagaggccttatgaatgccaagagtgtggacgaaagtttagcaataagtcatactacagtaagcacttaaagagacacttacgtgagaagcgtttttgtacagggagtgtgggtgaggcttcatcttgaagttatatctcaccatccatcagaggacacactcaggagagtaactttgctttgttacaagctttagttgaggctgcataacttgttcgtgaagatataacagaggcagacagaatccagagggctacagagaacctgaattcaacccatgtgtccccaagagattcagagaaaagaggtcaatgtttagggaacagagatgccagttgaggggagggcattacctgggctattggggaaatgtggtctctttcctactgagcacatattcttgttgtatttgtgccaggctgtgctttctaaggactgctcttagccagtgactgcagagcagggataccaaggcaggcctgttacactctccccaacctccttggactgcaaacaatctaggacacctccaccaaacctcctcttgcactttccctctggcttccctcccagccttccttggtttggatgttttgtcccctccttaatttatgttgaaactctacataaactgtttactgttgaaacagtgtaagtattaggaggtgggacctttgggaagtgattaagtcaagtcacgaagatagagctttgcgaatgggatcaggtgcccttatgaaaaggcttgatagagggagtttgtcctgtggcccttctattttctgctctgtgaggacacaatgctcctcccttccaaaagatgcagcatgaaggcatcatcttggaaacagacatgagccctcaacagacaactgcacctactgatgttttgatgttgaacttcccagcctccagaactctgggaaaataaagtcctctttatacaaaaaaaaaaaaaaaaaaaaaaaaaaaaaaaaaaaaaaaaaaaaaaaaaaaaaaaaaaaaaaaaaaaa

SEQ ID NO: 26359 - DNA, 1933 bp, Homo Sapiens
gacttcctcccagcacattcctgcactctgccgtgtccacactgccccacagacccagtcctccaagcctgctgccagctccctgcaagcccctcaggttgggccttgccacggtgccagcaggcagccctgggctgggggtaggggactccctacaggcacgcagccctgagacctcagagggccaccccttgagggtggccaggcccccagtggccaacctgagtgctgcctctgccaccagccctgctggcccctggttccgctggccccccagatgcctggctgagacacgccagtggcctcagctgcccacacctcttcccggcccctgaagttggcactgcagcagacagctccctgggcaccaggcagctaacagacacagccgccagcccaaacagcagcggcatgggcagcgccagcccgggtctgagcagcgtatcccccagccacctcctgctgccccccgacacggtgtcgcggacaggcttggagaaggcggcagcgggggcagtgggtctcgagagacgggactggagtcccagtccacccgccacgcccgagcagggcctgtccgccttctacctctcctactttgacatgctgtaccctgaggacagcagctgggcagccaaggcccctggggccagcagtcgggaggagccacctgaggagcctgagcagtgcccggtcattgacagccaagccccagcgggcagcctggacttggtgcccggcgggctgaccttggaggagcactcgctggagcaggtgcagtccatggtggtgggcgaagtgctcaaggacatcgagacggcctgcaagctgctcaacatcaccgcagatcccatggactggagccccagcaatgtgcagaagtggctcctgtggacagagcaccaataccggctgccccccatgggcaaggccttccaggagctggcgggcaaggagctgtgcgccatgtcggaggagcagttccgccagcgctcgcccctgggtggggatgtgctgcacgcccacctggacatctggaagtcagcggcctggatgaaagagcggacttcacctggggcgattcactactgtgcctcgaccagtgaggagagctggaccgacagcgaggtggactcatcatgctccgggcagcccatccacctgtggcagttcctcaaggagttgctactcaagccccacagctatggccgcttcattaggtggctcaacaaggagaagggcatcttcaaaattgaggactcagcccaggtggcccggctgtggggcatccgcaagaaccgtcccgccatgaactacgacaagctgagccgctccatccgccagtattacaagaagggcatcatccggaagccagacatctcccagcgcctcgtctaccagttcgtgcaccccatctgagtgcctggcccagggcctgaaacccgccctcaggggcctctctcctgcctgccctgcctcagccaggccctgagatgggggaaaacgggcagtctgctctgctgctctgaccttccagagcccaaggtcagggaggggcaaccaactgccccagggggatatgggtcctctggggccttcgggaccctggggcaggggtgcttcctcctcaggcccagctgctcccctggaggacagagggagacagggctgctccccaacacctgcctctgaccccagcatttccagagcagagcctacagaagggcagtgactcgacaaaggccacaggcagtccaggcctctctctgctccatccccctgcctcccattctgcaccacacctggcatggtgcagggagacatctgcacccctgagttgggcagccaggagtgcccccgggaatggataataaagatactagagaactgaaaaaaaaaaaaaaaaaaaaaaaacaaaaaaaaaaaaaaaaaa

SEQ ID NO: 26360 - DNA, 2596 bp, Homo Sapiens
gcgacgccgacgcgagtctggcggctgctgcttgcgactgcggaggccgggcgaggccggtgaggacgcggcgggcgagcgagaggccgaggtgttttcttcactcatggtgaagaatgggggagatagaaggaacatacagagtcctgcagactgcagggatgcgcttgggtgcccagacccctgtgggagttagcacccttgagcctgggcagactctcttgcccagaatgcaagagaagcacctgcacctcagagtaaagctgctggacaacaccatggaaatatttgacattgagcctaaatgcgatggccaggtattactgacacaagtgtggaagcgtttaaacctggtagaatgtgactacttcgggatggagtttcaaaatactcagtcctactggatttggcttgaacctatgaaacccatcattaggcaaatacgaaggccaaagaatgtggtgcttcgcctagctgtaaaattttttccacctgatcctggtcagctacaagaagaatatacaagatacttgtttgccttgcaacttaagagagacctgctggaagagcgtttgacctgtgctgacaccacagcggcccttctcacgtcccatctcctgcagtcggaaataggagattacgatgaaacgctggaccgagagcacctcaaagtgaacgagtatttgcctggccagcagcactgccttgagaagatactagaattccatcagaagcacgtgggccagacacctgctgagtcggatttccaggtgctcgaaattgctcgaaagttggaaatgtacggcatcagatttcacatggcttctgacagggaaggaaccaagattcaactggcagtttcccacatgggtgtactcgtgttccagggcaccaccaaaatcaacactttcaactggtccaaggtccgtaaactaagcttcaagaggaaaagatttcttatcaaacttcatccagaggttcatggaccttaccaggacacattagaatttttgttgggtagtagagatgaatgtaagaacttctggaagatttgtgtggagtatcacaccttttttagacttttggaccaacctaagccaaaagcaaaagccgtcttcttcagccggggctcctccttcagatacagtggaagaactcagaaacaactagtagattatttcaaagacagtggaatgaagagaattccatatgaaagaaggcacagcaagacccacacgtccgttcgagctctgactgcagacctaccaaaacagagcatctcattccccgagggattgaggactcctgcctccccatcttcagcgaatgccttttactcgctctctccctccactctggtcccctctggcctgccagagtttaaggacagcagcagctccctcacagatccccaggtttcctacgtcaagagtccagctgcagagaggcgcagtggagcagtggctggaggccccgacacaccatcggcccagcccctcgggccccccgcactccagcctggtccaggcctttccacgaagagtcctcagccttctccctccagccggaagagccccctgagtctgagccctgcatttcaggtgcctttgggcccagctgaacagggctcatccccactcctgagccctgtcctcagtgatgctggcggagccgggatggactgcgaggagcccagacacaagcgcgtgcctgcagacgaggcctacttcatagtcaaagagattctcgctacagaacgaacatacctcaaggatttagaagttattaccgtgtggttccgcagcgcagtggtgaaggaggacgccatgcctgcgactctgatgacgctgctcttctccaacatcgatcccatctatgagttccacagaggcttcctgcgcgaggtggagcagaggctggcactctgggaagggccctccaaagcccacacaaaaggcagtcatcaacgaatcggggacatcctgctcaggaacatgcgccagttaaaggtgttccagctccacgaagggcatgtagcaggggtcacaaaaatggagtagacttttggataggcaggggcagcactgggggaagtgagatttctcttcaataggagcaacggtacaggtgttcacatgtggacaacagtgcaggtcgtgcattgactgttcaggggtctcactcttgcttaacgtgcctggaacagttctccctccctctcaggctgctcatgagttcaccacgtgaccgcccaaggtgtggagctctgcataacaccatgaagctgagccacagtgacgacgacgactcaagctccccctcctccatccctcgcctgtcccaccttctacccaatcctgcgagactctggccactcctcacacctagagttcccaagggactataggttttgctgttctgtgttgagatagccccacttgaagaactgcattcagcctaggtgcccttttcctgcctcgacggaagctgagtcaggttgttaatgagaaagttctacttatcccaaaggcagttgcactaatttaaaattgaaatatacacaaatctgtttgatccagaaaaaaaaaaaaaaaaa

SEQ ID NO: 26361 - DNA, 1792 bp, Homo Sapiens
gcttccctgcttgatctgtgtaccctgctctttctccttcattccgcagcctcctttgccctgtgacctgcaggtactggacggtccctagagaggataccgggacgctcctgaagccgcgagatgatttcaagcagatgcagcctgaccattagggccaaggccaaattgcaaaaaaaaaaagaagtttgcctttattctactccatccacatctaaactttggaggtcaaggctgtggacagatcagaagacatagttccctccttctggggctccacatccttcattcactgatctctgggaaggaggatgggtggcaggatgggtcttccatgatactgaagggagagccacatgttgatgcccaggaccagctgcctccttggtctgaaaggcctgatcgaggccaggattggctatgagagctgggaaatgggaccatctttgaagccatgggagagggtgagagccaccatcactcatgttcttgaatgggaactgcctggagaccctgaagaagaaggagcctgaaggaggaaggaggaggctgagccatcccgggaacatgggctggatgaggccaagccaggagacgacaccaccagatagaagtcaccattcaggatttggacttttctgtggagatcctggccccgagatcgaacccttctccctgtgggtgttcccgcaggagatggtgctggagatccaccagctgttcatggaccatgaatacccatgtcaccacatcacttctcactgcacctgggtggcagcacactggaccacgtctcagagctgcgcagcatggcagggctgcaggcgggcttgctgctccacgtggtggaagagccctgcacaatgcacaaggcccacggtgatgagtgccacatttgagactgctcaggagcctggacccagctgatgcagctccttgtccttcctgagcgtcttcactgacagtggcctgagagacggcaggagcagaaagacttggagatggaccccaccgactgcacaccacccaagtacatcctgctagggaccctggaacagccactgtgtcccctgcaaccccagaacggtgactaaaagcccctgaaagtgctcaccgtgagcggctggtacctgtcccctgggaactgcaagatgcacaggaccttgtgtacctgtttgtgatcacagccgaggaccagcgaggtagcattaccacatccacacagggcttttaccataaccgccccagtactggaacgaggagctgcagatgatgagggacctacccaacaagaaccaacctgagcagctgcttcaagaaaaagccatgttcaaggtgcctgaatcccctggtaagtgagtgacagcctcacagcctcaggcccacctggctcctgctggaaggttttcttgtgctcgggagagaagtgagggaagccggcagtcccagccctgtcaggtgccctgaaggcccgtcaggtttgccctgcaaggccttctagcattctgcttcctgggagaccatcccccacctttctccggcctctgagactttgagtccttgggaggagaaggccctccttgctatctgggctgagtggccagggccatccagcttcccaccctccactgactgccatggggccctcccctgagcacatggtgcccaactgtagcccttctagggcaggggctcattggcagcacttgcagcttgctggcacttaaaagtcattagtgcggttactgagagaaatgaggaaaaaataattgttaaaaaaaaaaaaaaaaaa

SEQ ID NO: 26362 - DNA, 2365 bp, Homo Sapiens
cacactcagcagcagctccacgtccgactgtgccatctgtctggagaagtacattgatggagaggagctgcgggtcatcccctgtactcaccggtttcacaggaagtgcgtggacccctggctgctgcagcaccacacctgcccccactgtcggcacaacatcatagaacaaaagggaaacccaagcgcggtgtgtgtggagaccagcaacctctcacgtggtcggcagcagagggtgaccctgccggtgcattaccccggccgcgtgcacaggaccaacgccatcccagcctaccctacgaggacaagcatggactcccacggcaaccccgtcaccttgctgaccatggaccggcacggggagcagagcctctattccccgcagacccccgcctacatccgcagctacccacccctccacctggaccacagcctggccgctcaccgctgcggcctggagcaccgggcctactccccagcccaccccttccgcaggcccaagttgagtggccgcagcttctccaaggcagcttgcttctcccagtatgagaccatgtaccagcactactacttccagggcctcagctacccggagcaggaggggcagtccccacctagcctcgcaccccggggcccggcccgtgcctttcctccgagcggcagtggcagcctgctcttccccaccgtggtgcacgtggccccgccctcccacctggagagcggcagcacgtccagcttcagctgctatcacggccaccgctcggtgtgcagtggctacctggccgactgcccaggcagcgacagcagcagcagcagcagctccggccagtgccactgttcctccagtgactctgtggtagactgcactgaggtcagcaaccagggcgtgtacgggagctgctccaccttccgcagctccctcagcagcgactatgaccccttcatctaccgcagccggagcccctgtcgtgccagtgaggcggggggctcgggcagctcgggccggggacctgccctgtgcttcgagggctccccgcctcccgaggagctcccggcggtgcacagtcatggtgctgggcggggcgagccttggccgggccctgcctctccctcgggggatcaggtgtccacctgcagcctggagatgaactacagcagcaactcctccctggagcacagggggcccaatagctctacctcagaagtggggctcgaggcttctcctggggccgcccctgacctcaggaggacctggaaggggggccacgagttgccgtcgtgtgcctgctgctgcgagccccagccctccccagccgggcctagcgccggagcagctggcagcagcaccttgttcctggggccccacctctacgagggctctggcccggcgggtggggagccccagtcaggaagctcccagggcttgtacggccttcaccccgaccatttgcccaggacagatggggtgaaatacgagggtctgccctgctgcttctatgaagagaagcaggtggcccgcgggggcggagggggcagcggctgctacactgaggactactcggtgagtgtgcagtacacgctcaccgaggaacccccgcccggctgctaccccggggcccgggacctgagccagcgcatccccatcattccagaggatgtggactgtgatctgggcctgccctcggactgccaagggacccacagcctcggctcctggggtgggacgcgaggcccggataccccacggccccacaggggcctgggagcaacccgggaagaggagcgggctctgtgctgccaggctagggccctactgcggcctggctgccctccggaggaggcgggtgctgtcagggccaacttccctagtgccctccaggacactcaggagtccagcaccactgccactgaggctgcaggaccgagatctcactcagcagacagcagcagcccgggagcctgagctcaggaggaactcttacctggaaattgggaactgtatggagactccaaactgacttctttcaaaaaacaaaaacaaaaaatttttttagctttgacaaacacacaaaagtggtaataaagagagccctccttgtcaacccaaaatgtgagccccctgtggcaaaaccaccccctaccccattaacaaatcaacagacaaaattctccgagtcctttgcctcttttgataacatgttgttctgttttgtaaagtgtgtgtgcttggggttccgaggtgtgggattgagttctctgctttgtttttttttaagatattgtatgtaaatgtaaaaagttatttaaatatatattttaaagaaccctaactgccaacttttgctgaaaaaaaaaaaaaaaaaaa

SEQ ID NO: 26363 - DNA, 5621 bp, Homo Sapiens
gtggctggagtccgggcagagcttgagggcagttggtgcggtcgggttggttcttacaccccggcgggagcgcccagacaagccgagctgactggacttctccggccggccccattcccgaggctgcggcagcttcggttccgagaccgaccggagaggagcccgagtcccggcctctgggggattcgctctctgcagaccagtgggaccccgaaacttgaacgcaatctccagcccccttttttgccttcctttgtcacttgcccgggtttctcccaacgtgttcttttttttcctcttcattctccctccttcgaaggacacaaaagtggcttccgcggaaagatttggaggcggtgggagcttttctccccggagagcgactgtgtagaaaggatttttgggaagccgctttttaacacctctgctctccgtcccccaagcctctgtgtaatcctctgaggagaaaagcccatagcttgaaagttcgggggcattttgttgtgttctgtaggagagagggggaggaccctgttcgggtagtttggccggactggtactggccgttggaaaacccgaagtacatttccgtgtggaacttttgcagatatatatttttagatttttaaataccagataaaaaatatatgccttctatatatctcctggcgacctgcccctgacagcgcgatgtacaatacggtgtggagtatggaccgcgatgacgcagactggagggaggtgatgatgccctattcgacagaactgatattttatattgaaatggatcctccagctcttccaccaaagccacctaagccaatgacttcagcagttccaaatggaatgaaggacagttctgtttctcttcaggatgcagaatggtactggggggatatttcaagggaggaggtaaatgacaaattgcgggatatgccagatgggaccttcttggtccgagatgcctcaacaaaaatgcagggagattatactttgactttgcggaagggaggcaataataagttaataaagatctatcaccgggatggtaaatatggcttttctgatcctctgacatttaattccgtggtggagctcattaaccactatcaccatgaatctcttgctcagtacaatcccaaacttgatgtgaagctgatgtacccagtgtccagataccaacaggatcagttggtaaaagaagataatattgatgcagtaggtaaaaaactgcaagaataccactctcagtatcaggagaagagtaaagagtatgataggctgtatgaagaatatactagaacatcccaggaaatacagatgaagaggactgcaatagaagcttttaatgaaacaattaaaatatttgaagagcagtgtcacacacaagaacaacatagcaaagaatatattgagcgatttcgcagagaggggaatgaaaaggagattgaacgaattatgatgaattatgataaattgaaatcacgtctgggtgagattcatgatagcaaaatgcgtctagagcaggatttgaagaatcaagctttggacaaccgagaaatagataaaaaaatgaatagcatcaaacctgacctgatccagctgcgaaagatccgagatcaacaccttgtatggctcaatcacaaaggagtgagacagaaacgcctgaatgtctggctgggaattaagaatgaggatgctgctgagaactattttatcaatgaggaagatgaaaacctgccccattatgatgagaaaacctggtttgttgaggatatcaatcgagtacaagcagaggacttgctttatgggaaacctgatggtgcattcttaattcgtgagagtagcaagaaaggatgctatgcttgctctgtggtggccgatggggaagtgaagcactgtgtgatctacagcactgctcggggctatggctttgcagagccctacaacctgtacagctctctgaaggagctagtgctccattaccagcagacatccttggttcagcacaacgactccctcaacgtcaggcttgcctaccctgttcatgcacagatgccctcgctttgcagataaagaggaagtgggaagagaggtggttctctggcatttttttctacagtttttattagactacgatgagggcattctttctacatagactgcttgttttgcacaagaagtgattttgtgaatgtgaagtggagaggccgagcagcagccggccgggatgggggcattagaggcctgaggttctctaggactcagccatgccgctgcactgacatactaagctggaagcagatgttttttttgaaagtctgtttcattggggtttttgttttgtttagccagacaccctcaacagaatattaggcttgatggttatagcgggtggggttgtatttggaagcctctgaagagaccatgtctttttaaaatctaactcttgagagtgcagcaggggcatggctctgctgggagttgtgttttgctttggcagtctctcttccccccacgaagaaggctgtttaggttttgtgatagaatgggatttgatgaaaaagacaaccaaaggaaaatggggaggcttgggatttcatttaaataatctaagccaagatgataaaaaaaaccttcaactgaaggtattttgtttcttaccaacataatttaggcttcagcatctcaccagcccctccctctgaagaagtattatgttcagaagccaacaaaacagtttgttgccagaccaatgtttgatgggaaaacgtggcactcatagttgaatgtatacttctgtaccaaaacttgaacataaaaagactagaatttgtgagttttagcaaacgctaaaattgatcactgtaactaaccccttctgtccttcctgcctgtttctctgagatgaggaatagcattctttttgtggggatggtgagctttgaatcataaaatgaagttggtgcttgtatggtgtttccttagcctaaagaatgatctgttgtttgaaacctttgtaacttgtttgtatgagtaaagaaaaggtgcaatgcagtgcttttagatggcttgatataccaaataacaatatagaacaacattattatatgtgcttccccaagtttaaaggccctgcagaaatagtaaacatggtttaatttcccttcatttccccctcctttgctggatggggttttgggagctataggttgctaaggaggggagtcagattgtggtcaggtgcctcagtaaatcacagacccaggggccctgtggtccagggtgagagtcacaccacattacacatgtgcttccatacagtggtttctgaagcttttgcagggagagaagatggcttagtgtttagactgttagtagaagccatctggaagcttttctctttgcctttttttgtgatcctgccattaaggctatgtgcagtctgccctcctgctccagtggccttgattttaggccaggaatcttctgctccatgtggcttaagccttccagctgagtgaagctaggcaaatggagtgggggcaggcatctattcctgcccccatcatgccccacacccatcagtcaacactcatttgacaaatagagtccagctgcctctgagccaatcctgggaccataataggctcagagtgagtcagctgtttgaacccaaagctgtgcagtcaggcaccctggctgagctagagaagccagtacctgcatcttggtttataaggcttacagctaggaaagctctagttctgggggtgaaagaaaaatattagtttacctgagcacttatttccatgacagggtctaaaatatggaccatgatgtagacacagatttttaattttggaaaaacctccagttactagtgacgaggatagaaagggaagtgcttctctttggctttttcttggttacactgcagtttcaggattgggtgagacagagacaaatgaacccccctctaaagtcatttaactaatagccagcacatcccttccccaaactgtcaattgaaatcttaactgaaagttttactgaataataccaagctaattgctgttgggcacacctggatggctttgcacctggtgttgaacctgctgaagcaggtggatgctcaagattacgtgcaaggaatccctcccatctggtactaaaatttcagtgtgttctgagtgtcttttaaaccaaaatggaaatacagatacagggctgtagtattcagtaatgtgtctgctccttgttgggcagacaccagcggtgtgcagggagagaccaagtaccatctttatctacacttgggctggcttgtggagaagggctgcttttttcagtcctacattccttcattttttttttcattcttgaattcattgttttgtgggatctaagacccaggggtcatttgagaggtttgacagtatcttttctgaccagttgccacatgacttgcttgaccctgagcctgtggaaatggcatagggaccagtctactacccactgggcctggtgtgtagagggggagagggtagcaaggtgcttctctacgcccatgacttgggagcaggtcttggcctccttcatgagagtctagtgccatgtcctgtcccatgatctggaccctgggactgtcttggcatcttaactgcagtttcaatgaggcagagggcaaagagagaccaagatcagaggggttcattatacccctggctagagaacccagctactgacatgcaagcagcttggggctggctggacacaggtactaggcccattgtttccaggtgaagctttcatcacagaacagtgttgtctccacctggccttagatggcacgccatgattcgggcctggatagactgcctgcgtccttaccactgatctggccaagaatgaggccctcccaacactttcactccctctccaagccttgatgggacctccacttatttaggcctcatgtgctttgaagaagctttgagagccaatgtgtcttccacgggtctcttttttgctacaagtaatcagccccatgtgttctcttaaactgagaattgcacctgggcaattcctgttttctaaggtggtctctgctgctatttaacaacccagagtaggcctctgtgaggcttcagtggcctcagaaaccagagggtccagatagggggcctgcttgggccctctgctgccaactgctcaaacctgctttagctccagccacttgtggcaaacaacctcgtttccttacaaattccagcatgtgactttggtgccgttacttgtgaaaaatctattctgttgtctttgatgtgtccaagaaaattcgtgtagtttacgtaaaaatatctgactcacaagaaagccaactgtatgtcttgtgatgggacagttcataatgtagttgctagaccactttacaaattgttcttgtcaccagatgtgttcagacattgctgtgcaattgttggggagggtagggggaaaggcgagaggagatacttattggtctttttgtttaataccttccccaagaggggacagtctggccaacttgctccagtaatgcaataaagacattgcaataaagtaaaaaaaaaaaaaaa

SEQ ID NO: 26364 - DNA, 2108 bp, Homo Sapiens
ggggcactagcaggagggcctaaatcgtctgagccctccttggctcttacaatgctcacttgttttcacaatgcagcaaaatgaaatgccttagaaaaagagtaacattccagaaaacggtgtaatttatttttcttccttaattgccccatctgtggaggatttctttgctgaacaccacatcaaagggatcttctgcatttaaaatagaagaggcatcatgctgaagagggaggggaaggtccaaccttacactaaaaccctggatgggggatggggatggatgattgtgattcattttttcctggtgaatgtgtttgtgatggggatgaccaagacttttgcaattttctttgtggtctttcaagaagagtttgaaggcacctcagagcaaattggttggattggatccatcatgtcatctcttcgtttttgtgcaggtcccctggttgctattatttgtgacatacttggagagaaaactacctccattcttggggctttcgttgttactggtggatatctgatcagcagctgggccacaagtattccttttctttgtgtgactatgggacttctacccggtttgggttctgctttcttataccaagtggctgctgtggtaactaccaaatacttcaaaaaacgattggctctttctacagctattgcccgttctgggatgggactgacttttcttttggcaccctttacaaaattcctgatagatctgtatgactggacaggtatccttgagacggtcagtcagattatttctggatgggttgctgatcaaaactggattaagaagtatcattaccacaagtcttacctcatcctctgcggcatcactaacctgcttgctcctttagccaccacatttccactacttatgacctacaccatctgctttgccatctttgctggtggttacctggcattgatactgcctgtactggttgatctgtgtaggaattctacagtaaacaggtttttgggacttgccagtttctttgctgggatggctgtcctttctggaccacctatagcaggctggttatatgattatacccagacatacaatggctctttctacttctctggcatatgctatctcctctcttcagtttcctttttttttgtaccattggccgaaagatggaaaaacagtctgacctgaaagaaagaagactgcaatcaagtgagagctaaacaaaagaaaacctaaactaatgtcattggaaacaaaagcttgaaagaaacacatcgcatctacatttgtaacatgagaaggaaaacaattttttttttttttttttgagacggagtctcgctctttcgcccaggctggagtgcagtggcgcaatctcggctcactgtaatctccgcctcctgggttcaagggattctcctgcctcagcctcccaagtagctgggactacaggcacacgccaccacacccagctaattttttgtatttttagtagaggcggggtttcaccatgttagccaggatggtctccatctcctgacctcgtgatccgcccgccttgtcctccaaagtgctgggattacaggcatgagccactgggcgcggccagataagtttttaaggttccttcttgctttagcattctgagaaatgtctaattggtagtaagacaagagtaatagcaacctgtattgttagtatttaaccaaataggctaaaattttaatcaggtaccttatgtattaaatagaaatcggaatgtaccataataaatccaaactctcaattacgccatggtaattcagtcactaaaatatgtaaagatagaaaattttttaatttaaagaagtgtgaaacatagccattgattgatcagaattctggaatctgaatattaaaaccttacttagtgactggaatggtatatgctccctccaaaagtttatctttgtttattgattaaaggtaatccttactttctttgtattacttaggttcttaattaaaggtaatccttactttctttgtattacttaggttcttaaatttctatgataaacatgtattgctaaataataaaaagtatatgaaaaaaaaaaaaaaaaaaaaaaaaaaa

SEQ ID NO: 26365 - DNA, 1391 bp, Homo Sapiens
ggggacagaaacctttccattgccatactgagaaagtgcagcaggcagtgtgcctacaggtctacaaagaaacttcagatcatcttcttgagggaaagaagctgaagtgctacataagatgcttgtgcttcataactctcagaagctgcagattctgtataaatccttagaaaagagcatccctgaatccataaaggtatatggcgccattttcaacataaaagataaaaaccctttcaacatggaggtgctggtagatgcctggccagattaccagatcgtcattacccggcctcagaaacaggagatgaaagatgaccaggatcattataccaacacttaccacatcttcaccaaagctcctgacaaattagaggaagtcctgtcatactccaatgtaatcagctgggagcaaactttgcagatccaaggttgccaagagggcttggatgaagcaataagaaaggttgcaacttcaaaatcagtgcaggtagattacatgaaaaccatcctctttataccggaattaccaaagaaacacaagacctcaagtaatgacaagatggagttatttgaagtggatgatgataacaaggaaggaaacttttcaaacatgttcttagatgcttcacatgcaggtcttgtgaatgaacactgggcctttgggaaaaatgagaggagcttgaaatatattgaacgctgcctccaggattttctaggatttggtgtgctgggtccagagggccagcttgtctcttggattgtgatggaacagtcctgtgagttgagaatgggttatactgtccccaaatacagacaccaaggcaacatgttgcaaattggttatcatcttgaaaagtatctttctcagaaagaaatcccattttatttccatgtggcagataataatgagaaaagcctacaggcactgaacaatttggggtttaagatttgtccttgtggctggcatcagtggaaatgcacccccaagaaatattgttgattgattccactgtccatttcaaatctttcttatcagtaaaaaaacattaattcaaacacaagcattgtgatctacattagcacaaaatgcaactgattatctaggatctgtgtattacttaagctcacccttaacagttttaccttccttctcctctgtattcttacagaaaattagaagctcaattttatggtctcataatttcctttatgacagacatctcagaattaaaatcacccaaagccaatcattagtgccaagataaccctttaacggcaacactttcttaaatgaagactatttctttcatgaaaaaattcacttttatgactttcttgttaaaataaaaagtctgctttcaaaaaaaaaaaaaaaaaaaaaaaaaaaa

SEQ ID NO: 26366 - DNA, 3521 bp, Homo Sapiens
agcggaggcttcttcggtgcccgagagggagcgggtgcccaagggggtggtccctgtggcaggtcccggggtgggggcgcggcgctccgggaagagccttccgcaggtccccgccccgtcacgtgggcgccggccccggccgctgcggtcggtccgctggttggtcgggcgcttggtccggcagttggtcggtgggccagtggcccgtcgctcgcttctgggctctcatgtttgaaggtgggagggacacgggagcggcccgcacacctgagccgcccggagaggagcctcggccccgtacccagtaagaagaggaggaggccaggcaggcaaaaggagtcatggcttctgatgctagtcatgcgctggaagctgccctggagcaaatggacgggatcattgcaggcactaaaacaggtgcagatcttagtgatggtacttgtgagcctggactggcttccccggcctcctacatgaaccccttcccggtgctccatctcatcgaggacttgaggctggccttggagatgctggagcttcctcaggagagagcagccctcctgagccagatccctggcccaacagctgcctacataaaggaatggtttgaagagagcttgtcccaggtaaaccaccacagtgctgctagtaatgaaacctaccaggaacgcttggcacgtctagaaggggataaggagtccctcatattgcaggtgagtgtcatcacagaccaagtagaagcccagggagaaaagattcgagacctggaagtgtgtctggaaggacaccaggtgaaactcaatgctgctgaagagatgcttcaacaggagctgctaagccgcacatctcttgagacccagaagctcgatctgatgactgaagtgtctgagctgaagctcaagctggttggcatggagaaggagcagagagagcaggaggagaagcagagaaaagcagaggagttactgcaagagctcaggcacctcaaaatcaaagtggaagagttggaaaatgaaaggaatcagtatgaatggaagctaaaggccactaaggctgaagtcgcccagctgcaagaacaggtggccctgaaagatgcagaaattgagcgtctgcacagccagctctcccggacagcagctctccacagtgagagtcacacagagagagaccaagaaattcaacgtctgaaaatggggatggaaactttgctgcttgccaatgaagataaggaccgtcggatagaggagcttacggggctgttaaaccagtaccggaaggtaaaggagattgtgatggtcactcaagggccttcggagagaactctctcaatcaatgaagaagaaccggagggaggtttcagcaagtggaacgctacaaataaggaccctgaagaattatttaaacaagagatgcctccaagatgtagctctcctacagtggggccacctccattgccacagaaatcactggaaaccagggctcagaaaaagctctcttgtagtctagaagacttgagaagtgaatctgtggataagtgtatggatgggaaccagcccttcccggtgttagaacccaaggacagccctttcttggcggagcacaaatatcccactttacctgggaagctttcaggagccacgcccaatggagaggctgccaaatctcctcccaccatctgccagcctgacgccacggggagcagcctgctgaggctgagagacacagaaagtggctgggatgacactgctgtggtcaatgacctctcatccacatcatcgggcactgaatcaggtcctcagtctcctctgacaccagatggtaaacggaatcccaaaggcattaagaagttctggggaaaaatccgaagaactcagtcaggaaatttctacactgacacgctggggatggcagagtttcgacgaggtgggctccgggcaaccgcagggccaagactctctaggaccagggactccaagggacagaaaagtgacgccaatgccccctttgcccagtggagcacagagcgtgtgtgtgcatggctggaggactttggcctggctcagtatgtgatctttgccaggcagtgggtatcttctggccacaccttattgacagccacccctcaggacatggaaaaggagctaggaattaagcacccactccacaggaagaagcttgttttagcagtgaaagccatcaacaccaaacaggaggagaagtctgcactgctagaccacatttgggtgacaaggtggcttgatgatattggcttaccccagtacaaagaccagtttcatgaatctagagttgacggacgaatgctgcaatacctaactgtgaacgatttactcttcttaaaagtcaccagccaactacatcatctcagcatcaaatgtgccattcacgtgctgcatgtcaacaagttcaacccccactgcctgcaccggcggccagctgatgagagtaacctttctccttcagaagttgtacagtggtccaaccacagggtgatggagtggttacgatctgtggacctggcagagtatgcacccaatcttcgagggagtggagtccatggaggcctcattatcctggagccacgcttcactggggacaccctggctatgcttctcaacatccccccacaaaagacgctcctcaggcgccacctgaccaccaagttcaatgccttgattggtccggaggctgaacaggaaaagcgagagaaaatggcctcaccagcttacacaccactgaccaccacagccaaagtccggccaaggaaactaggattttcacacttcggaaacataagaaaaaagaagttcgatgaatcgacggactacatttgcccaatggagcccagtgacggtgtcagtgatagtcacagggtctacagtggctaccggggcctcagcccccttgatgcccctgaactggatgggctggaccaggtgggacagattagctgatgcccttgtcacctgccctctgtgcaccctgagagctcacagtaacactgtgtgtgtcaccatataactgcacctcacccccgcacgtgtgcatgactcgcagagaatattccagcaattgtgtacccctgggccagtctctttgaaccctgagggtggccaggatctggagctgcatctctaaggggccaggctttggggaccattgccaaaggtggactcaggaggaaagacacttaaagacacttttacatgtctagtaattcttgatgttcatcttcagcaccagtggaaacacatgaacttcgatgcaggtccagagaccatggacactcccacgaggctcagctctcaggcaccccctacacttcagttgagggaaaagctcaagtgccttaggcccgtggaccacagtcttggctgagatcaaagggatgagcaacagggacttctgccacagtgacaatggaattgtgttgtgccttacttcagaggtggtctcttctttcttgtaataaaagcaatatttatgcaaaaaaaaaaaaaaaa

SEQ ID NO: 26367 - DNA, 1550 bp, Homo Sapiens
agtcccacccttcggcgcagggctccggccaacacagccctccaggccgcctactctccagccagccggctccacggacccacgaaagggcaagggggcggcgtcggggcggcgggacagttgtcggagggcgccctccaggcccaagccgccttctccggcccccgccatggcccggggcggcagtcagagctggagctccggggaatcagacgggcagccaaaggagcagacgcccgagaagcccagacacaagatggtgaaggagacccagtactatgacatcctgggcgtgaagcccagcgcgtccccggaggagatcaagaaggcctatcggaagctggcgctcaagtaccacccggacaagaacccggatgagggcgagaagtttaaactcatatcccaggcatatgaagtgctttcagatccaaagaaaagggatgtttatgaccaaggcggagagcaggcaattaaagaaggaggctcaggcagccccagcttctcttcacccatggacatctttgacatgttctttggtggtggtggacggatggctagagagagaagaggcaagaatgttgtacaccagttatctgtaactcttgaagatttatataatggagtcacgaagaaattggccctccagaaaaatgtaatttgtgagaaatgtgaaggtgttggtgggaagaagggatcggtggagaagtgcccgctgtgcaaggggcgggggatgcagatccacatccagcagatcgggccgggcatggtacagcagatccagaccgtgtgcatcgagtgcaagggccagggtgagcgcatcaaccccaaggaccgctgcgagagctgcagcggggccaaggtgatccgtgagaagaagattatcgaggtacatgttgaaaaaggtatgaaagatgggcaaaagatactatttcatggagaaggagatcaggagcctgagctggagcctggtgatgtcataattgtgcttgatcagaaggatcatagtgtctttcagagacgaggccatgacttgatcatgaaaatgaaaattcagctttctgaagctctttgtggcttcaagaagacgataaaaacattggacaatcgaattcttgttattacatccaaagcaggtgaggtgataaagcacggggacctgagatgcgtgcgcgatgaaggaatgcccatctacaaagcacccctggaaaaagggattctgatcatacagtttttagtaatctttcctgaaaaacactggctttctctggaaaagcttcctcagctggaagctttactccctcctcgacagaaagtgaggattacagatgacatggatcaggtggagctgaaggagttttgtcccaatgagcagaactggcgtcagcacagggaggcctacgaggaggacgaagacgggccccaggctggagtgcagtgccagacggcatgacgtggtgcggggcagcgtggccccaccggactagcacatgatgaatgtaaagttggcacaatgaaaatgacatcgctttaatggcaaaaaaaaaaaaaaa

SEQ ID NO: 26368 - DNA, 1285 bp, Homo Sapiens
agcggcttctcctcctcctctcacccaggatcacttccaaaaccacttggccttcagcccctgcctcggccagaggtttcatttttaactgaatatttacgaaagctgaaagcgtgcgaggggggtggggtggaaatagcggctgcttcttttccaaggatttatttaatggggatgtgttcaaggcaagaccgaattcagaaggatatcgacgtcgtgatccagaagtccagagctgaggactgcctgtttgcagggcccgcctggcaggacgactgagcaagtccttggaaaaccagagatattagagcggtgaatcgcgctggtcacgttggacacctgcgcgttaggagattctggagccagagggagagaccccagaaactccccggtcggcgacccagcccgagacgcctggggtcccaagggaagctgaacgcccggtgggctcccgggatggttcttccggttctttgtgccgccttcacccagtgaaggagcctgtatccaccctgcccagtcgctgttgggctgctgcggagcttccgctgccatcttcggatcctgtgttccgcccggggctccaccagggcagggatggtggtgagggtcgctcgtgggtcccctggcagggagcagggtctggcactcacaagggcgcacgactaggacttgtcgaatgaatcctttgtcgcctttagcttttagtcctttgaagagaggtgagagtggaaatcaagagatttttttccacggggaagttctttttacaaagcgttgatttctcggcaccccgcggggcgggcaactgacacggcctccggtgcaccttctgcgctgtggagcctctggggctcagctgggcggtggtcgggtcgtggggcggtagggcgggagcgggggaagggaaaagcaaaagctggaaaagaagcaggggagttgtgaaccagacatccagacctcctgaagggctcgtgcagacgtacaggcgggatcttctggaagtgagaattgtttttgtttgtttatctattgtagcagaatggggaaatggagagagaacctgaaagagccccaaactcgaggacctattgctccccaagaataacatcttccagaactagacagaaaactaggcgtctgggaaccctgaaatccttggaggagtagatcatcatgaccctctgtgttccttttggcaaatgacttgcttccattgtttgtttgttcaattgtctgtttgttaaataaataaaacccttttcatgcaaaaaaaaaaaaaaaa

SEQ ID NO: 26369 - DNA, 977 bp, Homo Sapiens
ccggctacctgttggtgtgtatgcagagcatccctgtgccccgcggatatagactggcgcgcctctgttgcgcaggcgcagaactacaacttcagggttttccccaacggcctctttttgcacgttaggagaaactacatttcccataatcctttgttccagggctggagcggctctgggctccggaatcgcccgcagccggtactgcgggacccactgcggatatggctgtcttggctggatccctgttgggccccacgagtaggtcggcagcgttgctgggtggcaggtggctccagccccgggcctggctggggttcccagacgcctggggcctccccaccccgcagcaggcccggggcaaggctcgcgggaatgagtatcagccgagcaacatcaaacgcaagaacaagcacggctgggtccggcgcctgagcacgccggccggcgtgcaggtcatccttcgccgaatgctcaagggccgcaagtcgctgagccattgaggatcgcgacgcagtcggcgggaccctcatggaagcatcgccctcgcctcggaccttgcctggcgctatttttgcagggagctggggagcaggaacgcctcggacctgagtgctctccatattgtggggttgaagtctggatgggagcttgccaagtccctttttaggctttttaattaggaagcatttcgaacctgcgcaacagaccaaagaacagtacaaagaacatccgtgtacccagtaccctgactaccgactacctacaacccgtccctgccccatcctgagttcttttgaagctgatctcaggcatcggattatttcttctgtaaatatttcagaatgtatctctccaagatgagagctcattaaaagataattacaaagcttatcacatccaaaagaattatcaataattttgaaatattattaaacgtgtaataaatgttcaaagttcaaaaaaaaaaaaaaaaa

SEQ ID NO: 26370 - DNA, 1668 bp, Homo Sapiens
gattggtgctgtgattgggattaaaacctcaggccagctgtggtttttagcagttgttaaatgaaatcttttaaaaagactttggaaccactagtattatgttttttggaaaggcctgtgagaagtaagccagatttgaagctaatgactgaccaaaaataagatacaacttcagtattaaaggaggaacatgttacaacctttgaagatgaaggatcctatataattcaagaacagcaggaatctcttgtgtgtcaaggaattcttgatttagaagaaactgaaatgccagagcctctagctcctgaaagttaccccgagtcagtctgtgaagaggatgttaccttagctctgaaagagctagatgaaagatgtgaagaagaagaagcggatttctccggactgtctagtcaagatgaagaagagcaagatggttttccagaagtacagacgtcgcctctgccgtcaccatttctttctgccatcatagccgcctttcagcccgtggcatatgatgatgaagaggaagcctggcgctgccacgtcaatcagatgctgtctgacaccgacgggtcctctgcagtgtttacttttcatgtgttttctaggctgtttcagacaattcaaagaaagtttggagaaataactaatgaggcagtcagctttcttggtgatagtctgcaacgcattggtaccaaatttaaaagttccttggaagtgatgatgctgtgttcagaatgcccaacagtctttgtggatgctgaaacactgatgtcatgtggtttgctggaaacactcaagtttggtgttttggagttgcaagaacacctggatacatacaatgtgaaaagagaagccgctgagcagtggctagatgattgtaagaggacatttggtgccaaagaagacatgtataggataaacacagatgcacaagaattggagctctgccgaagattatacaaattgcattttcaattgctgcttctgttccaggcctactgtaaacttatcaaccaagtaaatacgataaaaaatgaagcagaggtcatcaacatgtcagaggaacttgcccaactggaaagtatcctcaaagaagctgagtccgcttccgaaaacgaagaaattgacatttccaaagctgcacaaactactatagaaactgccattcattctttaattgaaactttgaaaaataaagaatttatatcagctgtagcacaagtcaaagctttcagatctctctggcccagtgatatctttggcagttgtgaagatgaccctgtacagacactgttacatatatatttccatcatcagacgctgggccagacaggaagctttgcagttataggctctaacctggacatgtcagaagccaactacaaactgatggaacttaatctggaaataagagagtctctacgcatggtgcaatcataccaacttctagcacaggccaaaccaatgggaaatatggtgagcactggattctgagacacttcaggcctttaggaaagaaactaaactgaagatgatgaagaatattaaccaagcaccttttatggacccttgcattcactgataactttctggcagcatctactttttagtgtaactaatgtcaaactgtatcatcaaaaacaaagatctgaaaaaaaaaaaaaa

SEQ ID NO: 26371 - DNA, 1324 bp, Homo Sapiens
cgtggagctgggggtgggcgccgtgtacctaagctggaggctggcgctctccctcagcacaggtgggtcagtggccagcaggcccatctggagtgggagtgggcacttccaccccgcccacaggccatccggctgtgcaggccagcccctaggagcaggtcccgggtgactggcagttttcacggtctagggccgagacgatggcatggggcctagagcatgaggtagagcagaatgcagaccacgccgctggatgccgagagaccctgctctccgagggaggcatctgtgtcatgctgtgagggctgaggacggggccctagtctctggttttctggtcttaacatccttatctgtgtccgccacggaggtgactgagctgctagcgagttgtcctgtcccaggtacttgagttttggaaaagctgactcacgcccatccatctcacagcccttccctggggacagtcgcttccgccttgacacctcactctcagttgaataactcaagcttggtcatcttcagactcgaattcttgagtagacccagacggcttagcccaagtctagttgcagctgcctcggcaagtccccatttgctcaggcagccctgaatgggcctgtttacaggaatggtaaattgggattggaaggaatatagcttccagcttcataggctagggtgaccacggcttaggaaacagggaaagaaagcaaggcccttttcctgcctttcccgggatctgtctactccacctccacgggggaggccagtggggaagggctgtcacctcttccccatctgcatgagttctggaactctgtcctgttggctgcttgcttccagctccccccaatctccatcgcagcgggttcctcctgtcttttctacagtgtcataaaacatcctgcccctaccctctcccaaaggtcaattttaattctcaccaagttttgcacatctctgtatgtcgcttgatgtcttagacgcgagccctttcctaaactgttcagcgctctcttttcctttgggtggttgttgcaagggtgatgacatgactgtccccaggcctgtctccctgaagcgtctgtgctgtcaggacagccctgggcagagatgaggcaggggtgaggcgtgcgtgtgcttttcctccttgttggatgtcttccatatcatctgtttccatagctacaatccatcccttggccttaactttggaatttggagattatatgcaaacatgtgtaaaggctcatgaatatggatgacactggaattttataaattctaaaataaaacccgaaaccagaaaaaaaaaaaaaaa

SEQ ID NO: 26372 - DNA, 2398 bp, Homo Sapiens
atccccagaagtgggatggctaggttggaactgatgcacgtacagtctgggtagatttgccaagcttcccacctcaggccatgccagcctgggctggcactacattcccaagaaggtccatttccccacagtctcaccaggctgcaggattcttcctgtcaggtaagaagcctgtcttggggcaattgttaagtttgcttttctgttacagagtgagtttgagcgtgttttcaaaagctgaagatcatttacacagcctttcctgcaaacactgtttttttcctttgcctgtttttcttatcagtttataggttccttgtatatgtgaaggaggttggttccttgtctgtgatgatttgcaaatatttttccatgcatcttttatttttgtttatgggcttttgccacatggaggctttgtgtttttctgtagttgagtagtctttttgtggcttctggtttggaaagcacatagagacaccaggacttgatgattgtaacagtcaggggcagctacattccttggcctttcactgcggctcacggtctggtatgggccccctgtacgtcctctccccattgtacagaggagaaaactgaggctcagtcacttgcccagagcacaccgccaaagtcacagatagtctctgccactcccctgcctccaccaccgtgggggaatttggcacctgctccctagtgggctctcctccccaggatatgcagtcagatgaaatgtggccaagtcaggattcgtgctgggcccactcccacctgctgcctgcacacctacaggctcagcattcagcaccccattaaagcccagtgggggctctgttcaaacactgcctgagtcctgcagtatggcgtcgtggcagagcatggacagatggccttgcctggtcccggctccaccgcttccaagtccatcacacaggggtccctggaggtttggggtaaggattgagtgtcccagtgcatgtggagcacagagatcagagcttgcacaagagaagcacacacaggtgtctgtgttcttggctgcagcccgcatgggccaaggagttcagatccagtgccccccacctcccctttcctgccgccatgctctgtaggcttggcccctcctgctgtgatcctgatcacagccttccaccctagagaattaatcacagatccaggccaaggttctcccacaaaaacaagcatcatgtcggttacaagagcaagaaactggcctcaacttggcgagcttcaacgggggtccagcagcggcccagagcagcttccaggagtacgtggggggagtgcgtggtgctctgccttgttctgcggctgtctgaacagtctcctgcctctgcactcagttcagcctccaaacactgagtgcccactctgcacaagatactttgttgaggcagtgagataacacaggacccacttcctgcctctaagtctaatgggggagcaggaggagggcaaggacctgggcaggatgaggcagagagatgaatggaatggagccgcatctcaggcagttgcaattcctgcaggccaggggagagaccaggaggaaagggcaggttatgccagaatcagggccaggtgtggaggtgtgccccaagtgatcctcccacctctcaagcctcaggagacaggaggatggcttgagccctagaggttgaggctgcagtgagctatgttcatgacactgcactccagccttggcaacagagtgagaccctgtcttcaaaaaacaaaaacaagccccagaatcagtgggtagaagactcggggcaggggagaagaccacccacctgctgctccttcagctggaaaagctggactgccccaggctgggaggaactctgtaaggactcactagaagcttctgaagtgatcaggccactggaggacaagttgagggctgggtcacaaaagtgagtccaggagggcagtgagagtcactcaaggtcacaggtcacgctggcacgcctggcaggcagcctgggagagataggagtcccggctctgcaggtggagacatcgcagagggccttgggcatccaggaggatggcagtgccataggcgacgctgctgcggcctggccgtgtggagcactgcactcctaggaagcaggaaatggctgttcacaggaacccacaggccaccggctccagctttgacctgggaagctgtttcaggcaggtggagaggatgaggtttgaggagcagagggaagagctgctgagggggtgggcgctgggcagtcgggaggcgaaggcaggagatggcttgagccctagaggtcgaggctgcagtgagctatgttcatgacactgcactccagccttggcaacaaagcaagaccctgtctccaaaaaaaaaaaaaaaaaa

SEQ ID NO: 26373 - DNA, 2508 bp, Homo Sapiens
ggaaacaccgcgagggccggggtgggccaggctgtggggacgacgggctgcgacgatggccgcagcggcgggcggcggcgggccggggacagcggtaggcgccacgggctcggggattgcggcggcagccgcaggcctagctgtttatcgacggaaggatgggggcccggccaccaagttttgggagagcccggagacggtgtcccagctggattcggtgcgggtctggctgggcaagcactacaagaagtatgttcatgcggatgctcctaccaataaaacactggctgggctggtggtgcagcttcttcagttccaggaagatgcctttgggaagcatgtcaccaacccggccttcaccaaactccctgcaaagtgtttcatggatttcaaagctggaggcgccttatgtcacattcttggggctgcttacaagtataaaaatgaacagggatggcggaggtttgacctacagaacccatctcgaatggatcgtaatgtggaaatgtttatgaacattgaaaaaacattggtgcagaacaattgtttgaccagacccaacatctacctcattccagacattgatctgaagttggctaacaaattgaaagatatcatcaaacgacatcagggaacatttacggatgagaagtcaaaagcttcccaccacatttacccatattcttcctcacaagacgatgaagaatggttgagaccggtgatgagaaaagagaagcaagtgttagtgcattggggcttttacccagacagctatgatacttgggtccatagtaatgatgttgatgctgaaattgaagatccaccaattccagaaaaaccatggaaggttcatgtgaaatggattttggacactgatattttcaatgaatggatgaatgaggaggattatgaggtggatgaaaataggaagcctgtgagttttcgtcagcggatttcaaccaagaatgaagagccagtcagaagtccagaaagaagagatagaaaagcatcagctaatgctcgaaagaggaaacattcgccttcgcctccccctccgacaccaacagaatcacggaagaagagtgggaagaaaggccaagctagcctttatgggaagcgcagaagtcagaaagaggaagatgagcaagaagatctaaccaaggatatggaagacccaacacctgtacccaatatagaagaagtagtacttcccaaaaatgtgaacctaaagaaagatagtgaaaatacacctgttaaaggaggaactgtagcggatctagatgagcaggatgaagaaacagtcacagcaggaggaaaggaagatgaagatcctgccaaaggtgatcagagtcgatcagttgaccttggggaagataatgtgacagagcagaccaatcacattattattcctagttatgcatcatggtttgattataactgtattcatgtgattgaacggcgtgctcttcctgagttcttcaatggaaaaaacaaatccaagactccagaaatatacttggcatatcgaaattttatgattgacacgtatcgtctaaacccccaagagtatttaactagcactgcttgtcggaggaacttgactggagatgtgtgtgctgtgatgagggtccatgcctttttagagcagtggggactcgttaattaccaagttgacccggaaagtagacccatggcaatgggacctcctcctactcctcattttaatgtattagctgataccccctctgggcttgtgcctctgcatcttcgatcacctcaggttcctgctgctcaacagatgctaaattttcctgagaaaaacaaggaaaaaccagttgatttgcagaactttggtctccgtactgacatttactccaagaaaacattagcaaagagtaaaggtgctagtgctggaagagaatggactgaacaggagacccttctactcctggaggccctggagatgtacaaggatgattggaacaaagtgtcggaacatgttggaagtcgtactcaggatgaatgcatcctccactttttgagacttcccattgaggacccataccttgagaattcagatgcttcccttgggcctttggcctaccagcctgtccccttcagtcagtcaggaaatccagttatgagtactgttgcttttttggcatctgtggtggaccctcgcgtggcatctgctgcagcaaaagcggctttggaggagttttctcgggtccgggaggaggtaccactggaattggttgaagctcatgtcaagaaagtacaagaagcagcacgagcctctgggaaagtggatcccacctacggtctggagagcagctgcattgcaggcacagggcccgatgagccagagaagcttgaaggagctgaagaggaaaaaatggaagccgaccctgatggtcagcagcctgaaaaggcagaaaataaagtggaaaatgaaacggatgaaggtgataaagcacaagatggagaaaatgaaaaaaaaaaaaaaaa

SEQ ID NO: 26374 - DNA, 2840 bp, Homo Sapiens
ggtggggttgcgctcacaaggggcgaccgtcgccacggtggcggccactgcatcgcgtcccacctccgcggccctgggcgccgtggtgtcgacgggccccgagcctatgacgggccagggccagtcggcgtccgggtcgtcggcgtggagcacggtattccgccacgtccggtatgagaacctgatagcgggcgtgagcggcggcgtcttatccaaccttgcgctgcatccgctcgacctcgtgaagatccgcttcgccgtgagtgatggattggaactgagaccgaaatataatggaattttacattgcttgactaccatttggaaacttgatggactacggggactttatcaaggagtaaccccaaatatatggggtgcaggtttatcctggggactctactttttcttttacaatgccatcaagtcatataaaacagaaggaagagctgaacgtttagaggcaacagaataccttgtctcagctgctgaagctggagccatgaccctctgcattacaaacccattatgggtaacaaaaactcgccttatgttacagtatgatgctgttgttaactccccacaccgacaatataaaggaatgtttgatacacttgtgaaaatatataagtatgaaggtgtgcgtggattatataagggatttgttcctgggctgtttggaacatcgcatggtgcccttcagtttatggcatatgaattgctgaagttgaagtacaaccagcatatcaatagattaccagaagcccagttgagcacagtagaatatatatctgttgcagcactatccaaaatatttgctgtcgcagcaacatacccatatcaagtcgtaagagctcgtcttcaggatcaacacatgttttacagtggtgtaatagatgtaatcacaaagacatggaggaaagaaggcgtcggtggattttacaagggaattgctcctaatttgattagagtgactccagcctgctgtattacctttgtggtatatgaaaacgtctcacattttttacttgaccttagagaaaagagaaagtaagctcaaagaggacaattccagtatatctgcccaaggcagcaacaagctcttttgtgtttaaggcataaaagaagaattctgcatagaaacatggctcatattcgaaattgctctatagtcattagaagccagagaactgctaagtctcctgcaatgtttttctgctttttgccttccccatatatatggaacttggctacctctgcctgaaatggctgccatcaacacaatgttaaaactgacacgaaggatagagtttcacagatttctacgttttattggtggaagctgatttgcaacatttgctaaatggattagatgaatgtacttctttttgtgagcttacttgcctggattgctttaaaattaacctttgtgcaataccaagaaaatagctctttaaaagaatgtctttgtatgtctcaaggtaaattaaggatttactgaataaggtgttgaccaaatccagaccattttattttatttttttatttatttattttttgagatggagtcttgctttgtcgcccaggctggagtgcagtggcgtgatctcagctcactgcaacctccacctcccgggttcacgccattctcctgcctcagcctcctgagtagctgggactacaggcacctgccaccacgcctggctaacttttttttatattttgagtagaaatggggtttcaccatgttagccaggatggtctcaatctcctgaccttgtgatccgcctgccttggcctcccaaagtgctgggattacaggcgtgagccactgcgcctggccagaccattttagaattgggaaattttagtgagaaaaaatgcactgtaaatatgctttagttttaattcagttgggatgcactacctagcgaaaattgagaaactatatacttctcagagaaatatctgacatctattgtcattccattgctattttttttccccagagacttccataatttaaaataaaatcctagatccagttcttgttttttggcataaatacttaatctattttaaatttataaaatctgagcttctaggatccagctgtgtcaacctttatttagcatatataactataaatcacttattacagatgctaaatagatcaccttttacagatgctgaaatgtttgggatatgtttgttgacaaggtaaatggaaatgagaaactttatacttcagttttcagatatatggatctagatcccaaataaatgattaatcttcattggtttctcaaattcaggttgaaatacaaattaatagcctttattgattttacttttatgagtcattgtagacatctataaatataaaagggcctgtacccaaaggatgccagaatactagtatttttatttatcgtaaacatccacgagtgctgttgcactaccatctatttgttgtaaataaaagtgttgttttcaaagccatctttaaatagttctttaaaaataggtcttttttttatattttggaaaaggcattgtttttaaagtaaagataaaatggtaagtacctaattgtatttactgtaatatcttataacatgcagatgaatgctttataagttaaatatgatgtattttttcatacttctggattatactataattcatatgaaatcttgatattagtccccacacggaaaaagtgaactgcagttgatatttggtgtttaagatagcaccattgtttaaataccgcctatgtactcccaaatgaataaaacataattcttgtcctctgagagcataaaaaaaaaaaaaaa

SEQ ID NO: 26375 - DNA, 2326 bp, Homo Sapiens
cacctgtcagccgcaccggctccagcgctcgcctctcgccctcgcttctccagcgctccttgctcgcaaggcgggggaggcggcggcccagccacgatgatacatttcatattgctcttcagtcgacaagggaaattacggctacagaaatggtacatcactctccctgataaagagaggaagaagatcacccgggaaattgttcagattattctctcccgtggtcacaggacaagcagttttgttgactggaaggagctaaaacttgtttataaaaggtatgctagtttatatttttgctgtgcaatagaaaatcaggacaatgagctcttgacgctagagattgtgcatcgttacgtggagctgctggacaaatattttggaaatacttggccttttgcaagagcctgaagaagtttccttgaggtctgtgagctggatattatctttaattttgaaaaggcttatttcatcctggatgagtttataataggtggggaaattcaggaaacatccaagaaaattgctgtcaaagccattgaagactctgatatgttacaggagacaatggaagaatacatgaacaagcctacattttaactggaaatctacttgaagactccagcactacatgttatgaagctgtaaataagcaacgcctcccatccggttttttgatggagcctcaggcaccatgccaaaaataatttaaagggattctttgttaactaacaaagttaaagttgtttaacatatttataattactatgtgtctgtattattaaaaaaaattatgtgtctgtgttatactgtataggtacttgtagctctaaatgtttaaagtaactaccacctaacccaacagacaatatttgtaatgtattaactccatgttatgtttttaagctggtttagatacattagctgcaattttttttgcatttgacacaatattgtaataatccatgattttgaatgtaaagtatatatgatgtcattaatactttttctaaatgtttagttttctaaattgtataataattcaaaattatgttaatagtgcagagtttatatgtaatgctagacatttttcatacacttaatagtactgtaactgcaattcacatacaaaatgtctgattttaatgtgctgaattcatttattttttttagaattgggattatgaaaataaccaaagagtatagaacttaataagtgtttttgatgccttagaagctgctatcttgactgaggttttaatttatcttttaattgaatataagggacattccaataaggttttctatgaactatatatttattaaggtttatagagacctagagatacagcatctatgacttcctttattattctaaaatagtatgataagaattaatagcaataataattattgctactattttttaaaattcacgttccaagcactcttagatgctggaaatttcatttcaaatatgttttaatgtatctctaatgcatttgaagacttattacatggcttacttagagcatttaagattatcacagcctatatggtagattcctttccttcttttttcttttcttaccctttcctccccaaagaaaagatttgctgctgaccattattactgtaagtatatcacatttgtgcttcctggaatgaaaattctgtataaccaggtcctaacagtgatcagacatattacagggaaatagcttgtaggccgggagtggtggcttacacctgtgatcccagcactttgggaggccgaggcaggtggatcacttgaggtcaggagttcgagagcagcctggccaatatgatgaaaccccatctctactaaaaatacaaaaattaggccgggtacagtggctcatgcctataattccagcactttgggaggcagaggtgggcggatcacaaggtcaagagatcaagaccatcctcgccaacagggtgaaaccccacctctattaaaaatacaaaaattagccgggagtggtggtgcgtgcctgtagtcccagctacttgggaggctgaggcaggagaatcgcttgaacctgggaggcagaagttgcagtgagctgagattgtgccactgcactccagcctgggcgacagagcgagacttcgtctcaaacaaacaaaaaaattagccgggcatggtggcaggtgcctgtaatcccagctactcagggggctgaggcaggggaatggcttgaacccaggaggcagaggttgcagtgagccaaggtcataccagtgcactccaggcgggtgacagagcaagactgcgtctcaagaaaaaaaaaaaaaaaaa

SEQ ID NO: 26376 - DNA, 2383 bp, Homo Sapiens
aaaacagctaagccaggcgcgcaaggagttggagaccctgcgggagcgcttcagcgaatcgaccgccatgggcgcctccaggcgtcccccagagcctgagaaagcgcctcccgctgccccgacgcggccctcggccctggagctgaaggtggaggagctggaggagaaggggttaatccgtattctgcgggggccgggggatgctgtctccatcgagatcctccccgtcgctgtggcaactccgagcggcggtgatgctccgactccgggggtgccgaccggctcccccagcccagatctcgcacctgcagcagagccggctcccggagcagcgccaccgccgccgcccccactgcccggcctcccctccccgcaggaagccccgccctctgcgcccccacaggccccgcctctccctggcagcccggagcccccgcctgcgccgccgctgcccggagacctgccgcccccacccccgccaccgccaccacctccgggcactgacgggccggtgcctccgccgccgccgccgccgccgcctcccggaggtcctcctgatgccctaggaagacgcgactcagaattgggcccaggagtgaaggccaagaagcccatccagactaagttccgaatgccactcttgaactgggtggcactgaaacccagccagatcaccggcactgtcttcacagagctcaatgatgagaaggtgctgcaggagctagacatgagtgattttgaggaacagttcaagaccaagtcccaaggccccagcctggacctcagcgctctcaagagtaaggcagcccagaaggcccccagcaaggcgacactcattgaggccaaccgggccaagaacttggccatcaccctgcggaagggcaacctgggggccgagcgcatctgccaagccattgaggcgtacgacctgcaggctctgggcctggacttcctggagctgctgatgcgcttcctgcccacagagtatgagcgcagcctcatcacccgctttgagcgggagcagcggccaatggaggagctgtcagaggaggaccgcttcatgctatgcttcagccgcatcccgcgcctgccggagcgcatgaccacactcaccttcctgggcaacttcccggacacagcccagctgctcatgccgcaactgaatgccatcattgcagcctcaatgtccatcaagtcctctgacaaactccgccagatcctggagattgtcctggcctttggcaactacatgaacagtagcaagcgtggggcagcctatggcttccggctccagagcctggatgcgctgttggagatgaagtcgactgatcgcaagcagacgctgctgcactacctggtgaaggtcattgctgagaagtacccgcaactcacaggcttccacagcgacctgcacttcctggacaaggcgggctcagtgtccctggacagtgtcctggcggacgtgcgctccctgcagcgaggcctagagttgacacagagagagtttgtgcggcaggatgactgcatggtgctcaaggagttcctgagggccaactcgcccaccatggacaagctgctggcagacagcaagacggctcaggaggcctttgagtctgtggtggagtacttcggagagaaccccaagaccacatccccaggcctgttcttctccctctttagccgcttcattaaggcctacaagaaagctgagcaggaggtggaacagtggaaaaaagaagccgctgcccaggaggcaggcgctgataccccgggcaaaggggagcccccagcacccaagtcaccgccaaaggcccggcggccacagatggacctcatctctgagctgaaacggaggcagcagaaggagccactcatttatgagagcgaccgtgatggggccattgaagacatcatcacagatctgcggaaccagccctacatccgcgcagacacaggccgccgcagtgcccgtcggcgtcccccgggccccccactgcaggtcacctccgaagtctcgctgtagccgctatttctgcagctggattctgcaggggtgtggggccgtggacaggctgaggctcaaggaaggtggtcctcagctcggctggccgggcagcccctcctccgctgtggcccgcctcaaacgggctggtgcatcctcctcttggccacagagggcagcatcgcccgccccttcccccaaatgctgcttgcagcacccaccctaaagccccctccaaatagccatacttagcctcagcaggagcctggcctgtaacttataaagtgcacctcgcccccgcaagccccagccccgaggaccgtccatggaccttatttttatatgagattaataaagatgtttgcaaaaaaaaaaaaaaaa

SEQ ID NO: 26377 - DNA, 3898 bp, Homo Sapiens
cgagtgcgtgaagtgaaggcgattgagaggggctgagggaattgtcctctgtggaagggactttcttttggccctaggccccttcctgcccctgtcgtcagcagagtctctacaaggaagataacggactgtaaaattctataaagcaaagctacacatcacttgacaccatacaccatcttggttacataatgaagagagatggaaaacttgatgactagctccaccctaccgcccctttttgcagatgaagacggttccaaggagagtaatgatctggctaccactgggttaaatcacccagaggttccatacagtagtggcgccacatcatccaccaacaatccagaatttgtggaggatctctctcaaggtcagttgcttcagagtgagtcttcaaatgcagcagaaggcaatgaacagaggcatgaagatgagcaacgaagtaaacgaggaggttggtccaaaggaagaaagaggaagaaacctcttcgagacagcaatgcacccaaatccccccttacaggatatgttcggttcatgaatgagcgtcgagaacaacttcgagcaaagagaccagaagtcccatttccagaaatcacaaggatgttaggcaatgaatggagtaaactgcctcctgaggaaaaacagcgctaccttgatgaagcagacagagataaggagcgttacatgaaggaactggaacagtatcagaaaacagaggcctacaaggtcttcagtaggaaaacccaggaccgtcagaaaggcaaatctcataggcaagatgcagcccggcaggccactcatgatcatgagaaagaaacagaggtaaaggaacggtctgtttttgacatccctatatttacagaggaattcttgaaccatagcaaagctcgggaagcagagctccgccagcttcgcaaatccaacatggagtttgaggagaggaatgcagccctgcaaaagcacgtggagagcatgcgcacagcagtggagaagctggaggtggatgtgatccaggagcggagccgcaacacagtcttacagcagcacctggagaccctgcggcaggtgctgaccagcagctttgccagcatgcccttgcctggaagtggagagacacctacagtggacaccattgactcatatatgaacagactgcacagtattattttagctaatccccaagacaatgaaaacttcatagctacagttcgagaagttgtgaacagactcgatcgttagggaatggtcttagaactccaagatgttccataagtgtttttacttgtgaggaatgagaagccatccatggaaatttgaactgagtgggggcagagaaagagtgcagatccctttgcttgtgaaagaattatcagtgagtgaaaggccatcaccccaggaagccaaatgagggagcagcaacatgtatatgagcttcctatggaattgtccttatgtgaagctttgaaggtgtacagccactctcccgggtcttcaggttcctaccatttccatttctgttaaagtggatctgcatatcttcagcttactaggtgacccggatgctgacatctgctgctgcagaaaggaagacttttcattgtaatttcgcttagacccttttatcagtggagctccagttttcttacctagctgtcacttttttaaatgcctctgggggttatttttgctttccttggcccccaccaatttatacatctccattttctgacctctggactaactggttgctcagcaaggttctgaaggagagtttcttgcattggacaggcccagtcttctcccatcattgccctgctgtgactccaaagaaaggagcttcttgctgacagtgccctgtggagcaaggctgtgtttcctaccccacacggtgctcagtgggtgccagccctcagtgtggctttgtgattgctgccctaaaggagaatgctctttccttcctcactggtactgcctgctgttttctaagcattgctcctgcacagacatggagtcccagccccagcaaggctcttctgttcccatctgttgacaatgtcttgtggagcatttttgctgaggaaaaggtcacttgtaaacagaggagaaagggaaagagtacaaagccctaagtttattgtaagtgaaaactgagggaattcctgtcttctttaggagtaatgattcatagatctagataggtggaaatatcattcaaaatagtcacttgagctcacaaaaaaagcaaggaagaattctcatgtcctttgtcttccttctgtagccattaactgctgaatccatgtgaggaagacaggcttcccttccttccccctccttagtgattttttctttaacagcataagtaaagaggactttctggttcatttttgtttgttttgttttgttttgttttgtttacagatgaggtcttgctgtgttgcccaggctggagtgcggtggctattcacagatgctatcatagcacactacagcctccaactcttgggctcaagcatcacgcctagcagtttctggttcctttaacagcaaaaggaaagagaggttctgattcttacctcagggttttttggttgttcattgtttttgtttttgtttttgttttgacactgcagagcacaaggctaaaggttacagctgagatctttggaaccaaaggcagagcaagcagagcccgttgtctgggccccacaccactgcaggcaggtggatagaagtgcggcccctctcatagtatgcccataagtcagggcatagggcagaactacctgtcatgttgctacaccatcctgtcttctcagcatctccttgcctgttttctttattagtccaaaggaaaacaacagcaacaaaatctgtttttaaaatgtcttatatgaacatatatcaaatatccatgcgctgaaacccacataccatcacttggcaattttttagaataagaccccattattatctattgctataaacctagccagttctcttgctcttctgtattttcctatttccctgccatcatctgctatttctgccacttctcttagactccttgtctgcaaagcccaagctagaactcactgtctatggcagaaggacatccagagcccattctggagttttgttttttccttctgccagatgctttgtgtcctgtcttccttcctcctcatatttctgtttctcatttgtgttcagttttgtgcagcattgctagcactgcttttgtgaccagaaaaggccataacatggtccaggatcatcattcttctgactctagatgggacacttgacagtgacttgaaacatttgcatattcaggaatgcatgagatttcaagagagcctacagtatgaaatcattttcacaaaataagcagcttgcttctgaaatgctgtctttcccagtagctactcacctgcctctggtggctgggattcagatgccacaaaactgtcagtatctatagaccaggtctgtgccacctcctctctcctctgtgctcagtgaggaggcagtaaatgaagttacaggctagcacaatacctaattcatgtttcccagtacacctgtagatattactgtacttttatgttctcaagaaataagttgttgcctattcagtgttacagatttctttgtttctttttaattaaaatacaagaagcagctgaggaaagggagacaaggtattttatttctgactgattttagaaaaaacttgtgtacatgtgtttggaactgttgaaatgccaagttttctgtataagtgtttttgtaattaaactttcagattttctttgttttttaagaagttgatgtgcttgtttgacatttgtctcattaaaacttttctacgttgaaaaaaaaaaaaaaa

SEQ ID NO: 26378 - DNA, 1584 bp, Homo Sapiens
gcagctcgggtttccgagcttctgcctcaggcatctccgcgatctcctctcccctccaatcctatccgtgatggacgatgcccacgagtcgccctccgacaaaggtggagagacaggggagtcggatgagacggccgctgtgcccggggacccgggggctaccgacaccgatggaatcccagaggaaactgacggagacgcagatgtggacttgaaagaagctgcagcggaggaaggcgagctcgagagtcaggatgtctcagatttaacaacagttgaaagggaagactcatcattacttaatcctgcagccaaaaaactgaaaatagataccaaagaaaagaaagagaaaaagcagaaagtagatgaagatgagattcagaagatgcaaatcctggtttcttctttttctgaggagcagctgaaccgttatgaaatgtatcgccgctcagctttccctaaggcagccatcaaaaggctgatccagtccatcactggcacctctgtgtctcagaatgttgttattgctatgtctggtatttccaaggttttcgtcggggaggtggtagaagaagcactggatgtgtgtgagaagtggggagaaatgccaccactacaacccaaacatatgagggaagccgttagaaggttaaagtcaaaaggacagatccctaactcgaagcacaaaaaaatcatcttcttctagaccaaagtctagaaaggcctatgttactgacggaagaagtattggttccagacttcctataagactgtctgcattggtgctttagtatctcaggcctccaaggattccatgatgattttaatgtctttctcaaaactctgatatttgtcacacctagaaagtatgtagcctgattgatacttgccttgactaaattttgggacctcttggggcattttgaagtatttaactgtcttgaccagttggaagaagatacgtgggccataagcatcttctggacaggggaactgctttcagagagaaaacctttccaagagagttttgttttgttttggtttcgttttgtttgagatagggtcttgctctatcacctaggctggagtgcagcggcatgactgcagccttgaactcctgggcttaagtgaccctcccacctcagtctcctgagtagctaggactacaggcacacactactgtgcccagctaacttatttttattttttatggagatggggtcttgctttgttgcccaggctggtcgtgaactcctggcttcaagcagtcctcctgcctcagcctcctaaagtgctgagggctttaatggtttcacattgaagcctgaagttgctaagacttaggttgtttcttatatctggttttaagtagatgaaacaaccagaaacttttacttgtgatactctaccatgaaggatgcggtaatggcaggaatagcagaataattggtgcttgtaaacatttaagattctcctgtggattttggtgagtgatcattaaactgttttccaacttgaaaaaaaaaaaaaaaaaaaaaaaaaaaaaaaaaaaaaaaaaaaaaaaaaaaaaaaaaaaaaaaaaaa

SEQ ID NO: 26379 - DNA, 1098 bp, Homo Sapiens
tgtccttgccccccaccccacacccatgcccctgtttccttacagattttgatattgttctaatgtgtaatagaaccagccgagtccccttttatcagaagggtctgaaaagcagcagcacagagtaggtgaacacaggcctgcaagtgcgaccacctcagacccagtacgtgtgcccacagtggacacactcacacctccaacacacccacgcgcaggcatgtgtacacgcatgtacacacgcatgcatgcacagccagatggccactcagcacagatgtggcagagggaatggtctgatcctgctgaaagccattaaggagaaacgaatttcccagtgcccgggctgcaagagagccttataggggccctgtttcctgggcatgcgcttcctctgccagccaacccccacttgcccaagtcactggtgcaataacttttctgccttcctcagagcagagaaattgggaattgtgttaggtgggtgtgggcagctctgctgagccaagcagacacggatgtcccctcttctgggaggagggtagtgctcccaggcctcaggagtccagacagagacccccaaagcctgactgccaacagaaaccctctcctagtgaggggcaggtgggtgtgccccaggtccccacacccacagggaggcttcacacactgcccagtaccggggatgccaggaggcaggcccctctgctgctgccactgctgccaacactgcccagcttgtgaggccaggaggagcccctgtcccactcggtgctgctgctcttctgacccctgctgtgaggaatgggattcttggtcgaaaaaattggttttccttttttgtataaatgaaaagaatccaggagaagctgccaccctcccctcccagcgtgatgcgctaccttgcttcggcgtcttgtcgccccttccgcctttggtccagggacagcccagcagatcctcctggttctgacctggggggtgtttgcatcacccccttttacttgtattaaaaaaaaatgatgggttgaaaatgtactgaggattaaaaatgtacttttttataaataaagtgtttaaaacaaaaaaaaaaaaaaa

SEQ ID NO: 26380 - DNA, 1262 bp, Homo Sapiens
gggctctatgtagtgccaagtaggcaaaagctcactcatgttcttattgcagcaattattggagctgtacagattgccatcatagtagcaattgtaatgtgcataacaagaaaatgccccaaaaacaatagaggacgtcgacagaagcaaaacctaggtcattttacttcagatacgtcatccagaatggtttaaactgatgacttttatatgtacactgaccatgtgatgtacatttattatgtctttttttaaagaatggaaatatttatttcagaggccttatttttggacatttttagtgtagtactgttggctcgtatttagaatattcagctacgacagttttggactgtttagtagtctttgttttatgtttttaaatacaaaaattgctttcacaaatttgtaccacatggtaattctaagacttgttctttacccatggaatgtaatatttttgcaaagatggactacttcacaaatggttataaagtcatatccacttcttccacaatgaccacagcaaatgaccaagcatgaactaaaggtaaagatgtttacagattacttttcttacaaaaaaaatctagaagacactgtgtttaaatagatatttaaatgtttttgagatttagtaactgattttttagacactgcctatcgcatgaactgtaaagctgtgtgtattaggtgtaaaatatttataagatatatggactggggaatttgattattcctccctttgaaaaaatagtcctaataatttgaacaaatatgttagtaatgatggaacagatcaatgaaaagtagatatagatattgtgaaaataggctgtttaacaaacagattggaataaagcctattctaccagttaaactactttaatacacattcatttttaaagaaaatgtttgttttaacataaataaacaaatcgtatcagtgtttgtgaataaaatacaaaaatgattgttaatgattggtgctcttaaagtgagcttaaaatttatccaagacgtatatccaaatttgtcctgtagtaatagattaatattcatagattgttggtgtttaaagatctgaagtgtgagtagaatgtattcagctgtttaacatgtagtttagatattcaaaagtatgcatgtagaatttaaagaatatgttaaaaattattaattttaatattttgtttggaaaagcatgttataatataatgttttcactacaaaaaaaaaaaaaaaaaaaaaaaaaaaaaaaa

SEQ ID NO: 26381 - DNA, 2152 bp, Homo Sapiens
gtcgagagcggagtcttcgccggcgcagtcaccgcgcagggcggccgcccggaggtagctaccacggcctgtgtcaacgactaaagctccagtacagcggcgccctcagacagctgggagggtggctctggccgggagcggcggccggtgagctaccgcgaggaggagcggcggaggcgacctcggcccggccctgcactggccgcccggcaggcgcgacatgagcctggtctggcatccgcgggatgctccttaagccccttctccggctgttaacctccggggaacggttgtgaccacaccgacacgtattttacagataaatcattcttgcggcggcgggtcgaacacgtttatttattttttattttctcaacaagcttttacccagcacctgtccagtgaaacaacttgataatcgtttcgaggggcgtccgccgggttaggaagccactgcctggcagcttgtggaagcctcatttgcaaagccacccctcagatgttttgaagatcgtgacgtcttgtaactagcagtgtgtgcacagaatcctactcaaggaacgtcttggcccagcgatgcaaagaactgaagtttcaagctggaagagcctgtattgtcctcacaatagtatagaagaattcaagagaggagagagagacagcaccgaatgaagactgtaaaagaaaagaaggaatgccagagattgagaaaatctgccaagactaggagggtaacccagaggaaaccgtcttcagggcctgtttgctggctatgccttcgagaacctggggatcccgaaaaattaggggaatttcttcagaaagacaatatcagcgtgcattatttctgtcttatcttatctagtaagctgcctcagaggggccagtccaacagaggtttccatggatttctgcctgaagacatcaaaaaggaggcagcccgggcttctaggaagatctgctttgtgtgcaagaaaaagggagctgctatcaactgccagaaggatcagtgcctcagaaacttccatctgccttgtggccaagaaaggggttgcctttcacaattttttggagagtacaaatcattttgtgacaaacatcgcccaacacagaacatccaacatgggcatgtgggggaggaaagctgcatcttatgttgtgaagacttatcccaacagagtgttgagaacatccagagcccgtgttgtagtcaagccatctaccaccgcaagtgcatacagaaatatgcccacacatcagcaaagcatttcttcaaatgtccacagtgtaacaatcgaaaagagtttcctcaagaaatgctgagaatgggaattcatattccagacagagatgctgcctgggaactcgagccaggggctttctcagacttatatcagcgctatcagcactgtgatgcccccatctgtctgtatgaacaaggcagagacagctttgaggatgaagggaggtggtgcctcattctgtgtgctacatgcggatcccacggaacccacagggactgctcctctcttagatctaacagtaagaaatgggagtgtgaggagtgttcacctgctgcagccacagactacatacctgaaaactcaggggacatcccttgctgcagcagcaccttccaccctgaggaacatttctgcagagacaacaccttggaagagaatccgggcctttcttggactgattggccagaaccttccttattagaaaagccagagtcctctcgtggcaggaggagctactcctggaggtccaagggtgtcagaatcactaacagctgcaaaaaatccaagtaacaccttctgagtagctgctgtcccacacaatagggtatgaagctgcgctcctccatcgggtttggggagggagcactctgggactgtgagacaaggaagcagggccagcagtgagactatgagccaagcaaagagaagtctcagtggagcatgaggagggagcagtccagatgccaacaaggaaatgcgtttatggctacaagagtgcctctgctttctcctcctctcctcccaccaaggattcttccaccttaatcttgttttcatatgcctcttcttacttcacccatgtttgttgttatgcaaataaaggttttctctccaaaaaaaaaaaaaaa

SEQ ID NO: 26382 - DNA, 2229 bp, Homo Sapiens
agcggggcgcgctgcattgtggggtggcggcggcggccgcgctagcgacgcggggccgggcggctgagcgttcgcggggccgaggccatggctttctgggcggggggttcgcccagcgtcgtggactatttccctagcgaggacttctaccgctgcggctactgcaagaacgagtcgggcagccgctccaatggcatgtgggcacattccatgacagtacaggattatcaggatctcatagaccgaggatggcgaagaagtggaaaatatgtgtacaaacctgtcatgaatcaaacatgttgtcctcagtacacaataaggtgccgacctttacaatttcagccttcaaaatctcacaagaaggttttgaaaaaaatgttgaaatttctggctaaaggggaggttcccaaaggaagttgtgaggatgagcccatggattccacaatggatgatgctgttgcgggtgactttgcattgataaataaactggatatacagtgtgatcttaaaacactcagtgatgacatcaaagagagtttagagagtgaaggaaaaaattcaaagaaagaagaacctcaggaattacttcagtcacaagatttcgtaggagagaagttgggctctggtgaaccgtcacattcagttaaagttcacacagttcctaagccaggcaaaggggctgatttgagtaagcctccatgtcgaaaagcaaaggaaatccggaaagaaaggaaaaggttaaaactaatgcagcagaacccagctggagaacttgagggtttccaggctcaaggtcacccaccatctttgtttccaccaaaggctaaatccaaccagccaaaatcactcgaagatttaatttttgagtctttaccagagaatgcatcacacaagttagaggtgaggttagtacctgtctcctttgaggacccagagttcaagtcgtctttcagccagtccttttctttgtatgtcaagtatcaagtggccatacaccaggatccacccgatgaatgtgggaagactgagttcacaagattcctttgcagttcacccttggaggcagagactccccctaatgggccagattgtggctatggctcctttcaccagcagtactggcttgacggaaagatcattgctgtgggggtgattgacatcctcccaaactgtgtatcatctgtgtatttgtactacgatcctgattattcgtttttgtctttgggcgtctactctgcactacgagaaattgcttttactaggcagcttcatgagaaaacttctcaactcagctattattatatgggtttctacattcattcgtgtcccaagatgaaatataagggtcagtatagaccttctgatttgctgtgccctgagacatatgtttgggtacccattgagcaatgcctgccttcacttgaaaactccaagtactgccgtttcaaccaggacccagaagcagtggatgaggatcgcagtacggaacctgaccgattgcaggtgtttcacaagagagccatcatgccttacggtgtttataagaaacagcagaaagacccaagtgaggaggctgctgttctgcagtacgccagcctggtggggcagaagtgctccgagcggatgctgctgttcagaaactgacctgttcacctctgccgggaagttcctgtgttgtgctgatgatttgtgccaggatacatattcagtacctgtggggaaataactgtcaccacccacaaattagacattttttattttgactatctatggcttttaaaaaatattttgtggcaatgtatctgtgagaatctcatagttaatataaagattttaaaactgcattatgacctagcccccataattgggatttatcattttggaggattctttctagagcaagatatgctcaaattctcctgtttgtattttgtaaaatgaagaagtgaatctaagtaacttaatcacagttgtgcattttttttggttctgttagagaaattaaaacagactgtttcctcaggcccattttaaactgaacttatgctaggaaaccttaagtatggggaaggtagaaagttcatttcatcacttagaaaatatgtcttctcaagaacaaaactgtgctgttacaactcagtgttcaatgtgaaattgctgccaaatgttatgtagtttaatagagaacttgaaaaaataaaacattaaaatggaaaaaaaaaaaaaaaa

SEQ ID NO: 26383 - DNA, 2584 bp, Homo Sapiens
atagggaggtcgggtagaggctcccgggacctgcgtgctgccgagagaggaagcgaagggcaccatctttgtattttgtgtcatgacttctcaagagaagacagaagagtatccttttgcagatatatttgatgaagatgaaactgaaaggaattttttgttgtccaaacctgtttgctttgttgtatttgggaaaccaggtgttgggaaaacaacattagcccgttacataacacaggcatggaaatgtattcgtgttgaagctttgccaattttagaagaacagattgctgctgaaaccgaatcaggagttatgttgcaatcaatgttgatcagcggtcaaagcattccagatgaacttgtcataaagctaatgttggagaagctcaactccccagaagtctgtcactttggttatattatcactgaaataccatcactttcacaggatgccatgactaccttacagcaaatagaattaattaaaaacttaaacctgaaacctgatgttataatcaatataaagtgtcctgactatgatttgtgccagagaatttctgggcaaagacagcacaataatacgggatacatatacagtagagaccagtgggatcctgaagtcattgagaatcataggaaaaagaagaaagaagcccaaaaggacggaaaaggagaagaggaagaagaggaagaagagcaagaagaagaagaggcatttattgccgaaatgcagatggtggctgaaattcttcatcatctagtccagaggcctgaagattatttggaaaatgttgaaaacattgttaagctttataaggaaacaattctccaaactttagaagaagtaatggctgaacacaatccccagtatctcattgagctaaatggaaataaaccagcagaggagctctttatgattgttatggatcgacttaaatatctgaacctaaaaagagcagctattctaaccaaacttcagggtgcagaggaagaaattaatgacacaatggaaaatgatgagctatttcgtactcttgcatcttataaacttattgcaccaagatacagatggcaaagaagtaaatggggacgtacatgtcctgtgaatttaaaagatggtaacatttattcaggattaccagattattctgtgagttttctaggtaaaatctactgtctttcatcagaagaagcattaaaaccatttttgttgaacccacgtccctatctgcttccacctatgccaggaccaccatgtaaagtattcatacttggacctcaatattcagggaaaacaacactttgcaatatgcttgcagaaaattacaaaggaaaggtgactaactaactatctgtctatctatctatctatctatctatctatctatctatctatctatgtctatctgtcatgtatctatactcgattataatttgtaggattttatttgtactcagtttttaaaatttcatgttttaattgaataattgttccactgggcttggggtagggtaggcattctttttgttgtttattgctgcttccagaccagagtccctccctgcttcccaaaagctcccacatgtgaatatcgtgtcattcagactctgccacctattagctttcttggttctactcatcttctgtcccctgggtttcacttctcctggctcactctcactctccccatataatcactcctgtcctaattcttggtgatttcagtattacaaagatgatcctcccaacaccttgacacctccctcagtaatcttgttctccactctcagtaaatgaaattatttttagcttagacaagagtgatagcagtaaaagtggtatgaaacaagcatatttgggatataatttgaagacaaagctgaaagatttgatgagggattggaatgtggaggaattctagaaggggcaatgtggcttgaggattgcctatgcaagaaggaatggcacaagatcatggctaaagacagagcaattcaggccacagaaaggtgttagaagttgttcaaagtgctgttgcattcttttaagcgccggagtatcattttctatttgcttttaactttttcattgtgaaacatgacaaacatacagaaaagtgaagcccactgagttaccgcaaaatgaacccccatgtaaccaccaaccaggtcaaatctggaatgttgccagcacccagacgccctctcatgtttcttctcaataccagtctcctcactctccacacaaaggtaaccactgcccagaattttatggcattcacttccatacttctcctatggttttgccgtggaagcatacatccaaataccataggctagttttgcatggtttttttgaattttatagacctaaacaatttatcttctttgtgcctggcttctttcacttaacattataattatgatatttgtccagactattgaatgtagctgtagtttattcatttttattgttttattgtattctgttgattgacttataccataatgtatttatccacatttgagcactaataaaacttggattgattccagattggagtaaacaaaaaaaaaaaaaaaa

SEQ ID NO: 26384 - DNA, 3009 bp, Homo Sapiens
agttctcccgggcgcctagcgggatcgccagcgcggcagtgggggcttccgcggctgcaagccagcgggtcctgtgagggcgagcggaggcggagaaagggcgcgggagtgagagagggtgagtcagccactgtctatgcaataaagggaggcctcaccgcgggatagggctgaattcagaagtgcggcccgtgccgcagtctgttccaggacgcggcttgtcttagcgtcagcgagggaaggttgaggaggagccagagcctggtcctgcagcctttctcgccgtcagcgcccgtcgccatctccaccatgcagtcccgggaagacgtcccgcgctctcgccgcctcgccagtccccgtggtgggaggcggcccaagaggatttccaagccctcggtttcggcctttttcacgggtccagaggagttaaaggacacggcccattctgcagccctgctggcacagctcaagtccttctacgacgcgcggctgctgtgtgatgtgaccatcgaggtggtgacgcctggcagcgggcctggcacgggtcgcctcttttcctgcaatcgcaacgtgctagcagctgcgtgtccctacttcaagagcatgttcacaggtggcatgtacgagagccagcaggccagcgtgaccatgcacgatgtggacgccgagtccttcgaggtgttggtcgactactgctacacgggtcgtgtgtctctcagtgaggccaatgtgcagcgcctgtacgcggcctccgacatgctacagctggaatatgtgcgggaagcctgtgcctccttcttagcccgacgtcttgacctgaccaactgcaccgccatcctcaagtttgcagacgccttcgaccatcacaagcttcgatctcaggcccagtcctacatagctcacaacttcaagcagctcagccgaatgggttcaattcgggaggagactctagcagatctaaccctggcccagctgctggctgtcctacgcctggatagtctggacatagagagtgagcggactgtatgccatgtagctgtgcagtggctggaggctgctgccaaagagcggggtcccagtgctgcagaagtcttcaagtgcgtgcgctggatgcacttcactgaagaagatcaggactacttagaagggctgctgaccaagcccatcgtgaagaagtactgcctggacgttattgaaggggccctgcagatgcgctatggtgacctgttgtacaagtctctggtgccagtgccaaacagcagcagcagcagtagcagcagcaactctcttgtatctgcagcagaaaatccaccccagagactgggtatgtgtgccaaggagatggtgatcttctttggacatcctagagatccctttctctgctatgacccttactcgggggacatttacacaatgccatcccctttgaccagctttgctcacactaagactgtcacctcctcagctgtctgtgtgtccccagaccatgacatctatctagctgctcagcccaggaaagacctctgggtgtataaaccagctcagaatagttggcagcaacttgcagatcgcttgctgtgtcgtgagggcatggatgtggcatatctcaatggctacatctacattttggggggacgagaccctattactggagttaagttgaaggaagtggaatgctacagtgttcagagaaaccagtgggcattggtggctcctgtccctcattccttctattcctttgaactcatagtggttcagaactatctttatgctgtcaacagtaagcgcatgctttgctatgatcctagccacaatatgtggctgaactgtgcttctcttaaacgtagtgactttcaggaagcatgtgtcttcaatgatgaaatctattgtatctgtgacatcccagtcatgaaggtctacaacccagctaggggagaatggaggcggattagtaatattcctttggattcagagacccacaactaccagattgtcaatcatgaccaaaagttgcttctcatcacttctacaaccccacaatggaaaaagaaccgagtgacagtgtatgagtatgatactagggaagatcagtggattaatataggtaccatgttaggccttttgcagtttgactctggctttatttgcctttgtgctcgtgtttatccttcctgccttgaacctggtcagagttttattactgaggaagatgatgcacggagtgagtctagtactgaatgggacttagatggattcagtgagctggactctgagtcaggaagttcaagttctttttcagatgatgaagtctgggtgcaagtagcacctcagcgaaatgcacaggatcagcagggttctttgtaaatagtattttgagacactaagatgtttctactgctacggaatgtattttaaacacatatcgtttctttttcttggaaaaaaagttgattaggaccacagatttggtttagaaagggtaatattttgaaatactacaaggtttagacagtccatgaaatcgacctgtttaataatttaccatcctgaaagtccagaattaaaatatggaagcaagaactatataattgattaggatgcttggtaggtttttttcattgttcaaatattcattgcacagtggattgttttgattagttagtatgctttttttttaattaattcagtcttctgttaatttttaagttttggttagtgccacaaggaatttaactttttgatttgtataatagaaaactgaactaggaattgttagcggggttttgaaggatgtgtactttccttcaaaataaagtggtagattttcaaaattttacactagtcagttctttatattctaagttaaatgtagtttgtaaaattattttggttttcttctacaaaggaaaaaattggatttatatatataaggttactgcataatgatttcattttgataatgtgcagaatggcctcataagctcacagaaagcaaaaaaaaaaaaaaaa

SEQ ID NO: 26385 - DNA, 453 bp, Homo Sapiens
gggggcccaggatggcggtgtcaagtggggcaatcgctggtggaggtggcggagagcaaggtggcagccgggagcccaccagaggaaaagtccgaggcgctggaaccctgcgtccaggcgtgacggtcatcccgaaaggccggccccagtttcatccttttatcctgtaatctgtcaccatgaccctgacaaaaggttccttcacctactccagtggggaggaatatcgtggcgagtggaaggagggtgagaaggacccctggggagtatccatgatgaacacttcatttgctggaggacaaatacatcaggatatatagccaactttatggatcttcattttcaactccaggatttaattccatatagtgcctgccattcctttattccattttaggattaaataaaggaatttgaaaatgcaaaaaaaaaaaaaaaaaaaaaaaaaaaaaa

SEQ ID NO: 26386 - DNA, 2455 bp, Homo Sapiens
ctagggtcgccgccactgccgcaggaggcgtgaggggataaaaacattcagatggcagatcacagtttttcagatggggttccttcagattccgtggaagctgctaaaaatgcaagtaacacagaaaagctcacagatcaggtgatgcagaatcctcgagttctggcagctttacaggagcgacttgacaatgtccctcacaccccttccagctacatcgaaactttacctaaagcagtaaaaagaagaattaatgcattgaaacaacttcaggtgagatgtgctcacatagaagccaagttctatgaagaggtacatgacttggaaagaaagtatgcagcgctataccagcctctctttgacaagagaagagaatttatcaccggcgatgttgaaccaacagatgcggaatcggaatggcacagtgaaaatgaagaggaagagaaattggctggagacatgaaaagtaaagtagtcgtcacagaaaaagcagcggcaacggctgaagagccagatcccaaaggaattccagagttctggtttaccatcttcagaaatgtggacatgctgagtgaattagtccaggaatatgatgaaccaatcttgaaacacctgcaggatattaaagtgaaattttctgaccctggacagcctatgtcttttgtgttagagttccactttgaacccaacgactactttaccaactcagtcctgacaaaaacctacaagatgaaatcagaaccagataaggctgatcccttttcctttgaaggtcctgagattgtggactgtgacgggtgtactattgactggaagaaaggaaagaatgttactgtcaaaaccatcaagaaaaagcagaagcataagggtcgaggcactgttagaacaattacgaaacaagtacccaatgagtcctttttcaacttcttcaatccattgaaagcatccggggatggagaatcactggatgaagattctgaattcacattagcctctgattttgaaattggacactttttccgtgagcggatagtcccgcgggctgtgctgtacttcactggggaggccatagaagatgatgacaattttgaagaaggtgaagaaggagaagaggaggaattagaaggtgacgaggagggagaagacgaggatgatgcggaaattaaccccaaggtgtaatttttgtctgttaatcattcatacgtttctagaaggaacccagccagccggcggaatgcaagcagcagtaggaagcggaggcgggtgcctggcagaccggctgtcgggactccaggcctgtgggcggggcctcggtccttgccgcagcacaatcccgtggacagagcttactccatctaactcgttttcaagtgcatgattttcactttcacttttcctttttccttattattttgcttaacttgtacagtggcaactgaaatgcatttcagaaataggaggtttcgtccagcaccctctgcagccttggtgcctgtagctctggacttccctgggcctttccctgtgggagggccctgtagaccacatcagggtggggtgggggtcacttggcaaaaagggccgaggtctggtgatgtggttcccaggatctggaacctctcccacccctcctgcagttggactgaattcttccctttcatccgaagaaacccacttgctgtttccagccgctgaatctgctgagtgtgcagcctgcatcacctgctgtatgccgatcatctcagaaagggctgtgtagagtagggccctgttctccttaggatgttgcttcttgatttttttttttttttaggggtgggtcagggttgtgacacaccagcccaggtgagagctgctgcgggtcacctcatatttatttatcccttcttgcctgtgaggactgcggcttttcgctgtggctcgtccttaacgtttctgaaccaccttggtgccctgagcaggaagatgtgccacttcctagcaggcgcaaggcctgtgcggaagaaacgccgctccctgccaccagggctgaagatgcgagcccgtcctcatgacgcaggcgccaccctgctgccggagccgggcttcggcagtcttctccactgagggactgggctgggaagtcctgcgtttcagtggagcgtatgagcgtcaagtcctgctttctcagtagccccattgcggggccccaccattcatcctgtctgaaggtcctgggtttggtgtgaccgcttggcggctggtgggtggggttttcaagtgggtgacggcgctctccggcagccggggatggccgtgtccgcactgaccaggcctgtggagagtgctcggcctaaccttagaacacatttgtaactgaatacagtgttttcaatttgtacagaatagttagaatattctattaaagtggtgaaacattgaaaaaaaaaaaaaaaaaaaaaaaaaaaaaaaaaaa

SEQ ID NO: 26387 - DNA, 2599 bp, Homo Sapiens
gcgggagcctcccggcctgggattggtcgaaaaggaggggcgtggggcgggcgtgggggcagttccccagcccaggtcctcctctcacccgggccagttttcaaggcgggctgtaactggtggcatttgtcccgggaccaggtccacagttttatgtgtgagcaagatggaggctgacctgtctggctttaacatcgatgccccccgttgggaccagcgcaccttcctggggagagtgaagcacttcctaaacatcacggacccccgcactgtctttgtatctgagcgggagctggactgggccaaggtgatggtggagaagagcaggatgggggttgtgcccccaggcacccaagtggagcagctgctgtatgccaagaagctgtatgactcggccttccaccccgacactggggagaagatgaatgtcatcgggcgcatgtctttccagcttcctggcggcatgatcatcacgggcttcatgctccagttctacaggacgatgccggcggtgatcttctggcagtgggtgaaccagtccttcaatgccttagtcaactacaccaacaggaatgcggcttcccccacatcagtcaggcagatggccctttcctacttcacagccacaaccactgctgtggccacggctgtgggcatgaacatgttgacaaagaaagcgccgcccttggtgggccgctgggtgccctttgccgctgtggctgcggctaactgtgtcaatatccccatgatgcgacagcaggagctcataaagggaatctgcgtgaaggacaggaatgaaaatgagattggtcattcccggagagctgcggccataggcatcacccaagtagttatttctcggatcaccatgtcagctcctgggatgatcttgctgccagtcatcatggaaaggcttgagaaattgcacttcatgcagaaagtcaaggtcctgcacgccccattgcaggtcatgctgagcgggtgcttcctcatcttcatggtgccagtggcgtgtgggcttttcccacagaaatgtgaattgccagtttcctatctggaaccgaagctccaagacactatcaaggccaagtatggagaacttgagccttatgtctacttcaataagggtctctaaatgccccacttcagcaaggaccagtctattcccatattcaccagctcctccttagctacgtgcacacttgtgtcctccttcccctttgccaacaaggcctgaaggccagggtagattggggggtgggacaatgaatgcctcatacttacaccctggtactggttgattggacctcagggaaaaaaagtgaaaaagggtagcaaaggccaatgtcttctagctgcttcctcaacccctgtcccctggagaccagaagctgaggccctctcagggaggagacatccaagcaaatcatttggaaaagttaggaaacctttaggattctggttccagccagggttgaggaaaggaccttggatcaaaaggaagcttctatacctctttcttcttcgcttcctcctctcccaagcaatggaaacttttacccatgtaattctagctgaactcaggaaaaagaagggggaaaggactctgtccccttggggctcatcacccttccacatcctcctcctcgttgccccctggtcaggcagcttctttttttttttttcaagatggagtcttgctctgtcgcccaggctggaatgcagtggcgcgatctcggctcactgcaaactctgcctcctggattcaagcgattctcctgcctcagcctctcaagtagctgggattacagggcacctgccaccacgcctggctaatttttgtattttagtggagacggggtttcaccatgctggccagactggtctcgaactcctgacctcaggtgatccgcccgcctcagcctctgaaattgctgggattacaggcatgagccaccacacccagcccggacagcttctttgggagtgctgctaaccttgaaattatcagacacttaggagttattagtgctaaaaaggggaccgtgcaaggcagcagagttacatggttcttcaaatcatgtctgaacctattcttggaatcttctctataataagggaagttctcttaccccactgccacatacctctgttttaaaagataagtccactaactgtgagtaaaaatgatatatataggcattaaccacacactttaatgggtataatttcctggctgcctcccttcctcagcccattaggttaaacaccaaagaaagactggtgtgtactgaataggaaagggaagttttatttggaaccttctaagaggaaatcaaccaggaccaaagagccttaaaggacacacagcaatgcacagccacttcccttccccagcttggctgccctaggtgatttctcaagctccttgggggactgttgtttctcatctggaatcaatgtgtgtatgagttttgtctggtaggattgctgactctgtccaacagatatcactgtgaattgaataaatttgttgaaagagcacacaggcacacataaaaaaaaaaaaaaaaaaaaaaaaaaaaaaaaaaaaaaaaaa

SEQ ID NO: 26388 - DNA, 2029 bp, Homo Sapiens
ggaagcctgagctgggcttggggaactacgcccgcagatttctctaattttattcacaaaactggacaccctcagggaaagcggcaaagccggcgcgagcctccttcccactctggacctagctgcagctccaaagcgagatagctgtctagcctcagccggtacagctcccggcccctttctccacccggatctgcggctgctcagaagcgatcagctcccttagcccaggtgggaggcgggagactccagatcctgtgacccgcggaggcagacctcagacatgttccccatgcacagaaatgactggggctccagtgtgtgcaccttcaactctgaagcccacctgcccacttcaggcgctggcgcggagataaccaccacgcgtctgccgggcaaagttcgagagtgaatttacatcttctctttccgctactcctggccactgtcccctcccagccccatctcccccgcccccaaccctggactatgtggtaggggactcgcttaagcacccaagtactgcgcggttgttgagaccaaggcgagctgcggagcctgtgggctgttgttcgtgggaagagggttgcgacctcaggagagaccgaaaacagcgccacttgaaacccgccggtcctgaagatcacagagttcccggagtggtagggaaggctccacgctcttgagagcagaggcggccaggggcagtgggggacgcttccaggtatgtgggaaggagaacttcatgtctaagtgcgctcttgtgggtttctcggccagctgggccgagcctctctttctctgtcctcatgtgtctgtcctctggacaacagtggctctgtatggcggattgcgaccctgagtgacgggcgcctgtcttgcatcctgtgtcctgtgtcctcccctccagacctcatgcttggtgtccacagagtggacccaggactgcctggaaggcttatcatccaggcccgcgacttccccccagagtctgaagccttgcgacctggtcggggacgacaaacctgctcggggtcaacagcgagaccctagtggggaatgaggatgggtgagggtgcgcctgggttgagggtctgtgactgtagcatggaaaaggagttcatgcagggatcgcactgagggacagccaagaatactccagcggcagcctccctcctaccaattacacgccgcctgctggcacagtggcacctcgggaacaggacgcccttccgggccctgaattggggcagcgcaggagggagggtgcagagccatagcgacctgtgtgtaccatagacatgcacatgcgctcaccttcacgtgtaacccttctgagtcccagacagggtaactggcgaggccgtaagtaccctcgtgggggcggaaatattgccgcgtccctgagtcctctgggcagatgcagagccgcgtaagcctcatagaagcaaagccaggggaacagtgggagctctggcctcgcggtgcggacgctagtaatggattcctggggaacagcgacctctggaggagcctctcatccacacagagtcaggaactaaaggactggttctgagacaaagcaccctttcctcaccctactcccattccacccgcttggaaaagttatccagagacttttaacctccggactccactcttcgcttatgtttgcttttttttccaacctgtacccacgcttcaaaatccctgctccagtcctgcctcttccagaaagaagccttctggccagcccagttcctcttcccctcttcctgttctgagctcattctcaggccacactgcacagccaacctgcttcctgcctgctcttctccaaaaagactgtgaatccactccacccacgccttgtgttgcatgctgggcatgccgttccctgccccaacccaccccaccccccagtgaataaagactgaagttattcattccaaaaaaaaaaaaaaaaaaaaaaaaaaaaaaaaaaaaaaaaaaaaaaaaaaaaaaaaaaaaaaaaaaaaaaaaaaaaaaa

SEQ ID NO: 26389 - DNA, 1734 bp, Homo Sapiens
gggcggatggaaggggccggggcagcgtcggggaaaggaagggccggaggcgcggcggcgggcggccgagaggggcggcggcggcggcggcggcggggttcccgcgccgcggagcccggcccgagagccgcgtccacgttcctgcctcctgctcccgccgccctggggcgccgccatgacgcccgatctgctcaacttcaagaagggatggatgtcgatcttggacgagcctggagagcctccctccccctcgctcaccaccacctctacttcgcagtggaagaaacattggtttgtgctgacagattcaagtctcaaatattacagagactccactgctgaggaggcagatgagctggatggtgagatcgacctgcgttcctgcacggatgtcactgagtacgcggtacagcgcaactatggcttccagatccacaccaaggatgctgtctataccttgtcggccatgacctcaggcatccggcggaactggatcgaggctctgagaaagaccgtacgtccaacttcagccccagatgtcaccaagctctcggactctaacaaggagaacgcgctgcacagctacagcacccagaagggccccctgaaggcaggggagcagcgggcgggctctgaggtcatcagccggggtggccctcggaaggcggacgggcagcgtcaggccttggactacgtggagctctcgccgctgacccaggcttccccgcagcgggcccgcaccccagcccgcactcctgaccgcctggccaagcaggaggagctggagcgggacctggcccagcgctccgaggagcggcgcaagtggtttgaggccacagacagcaggaccccagaggtgcctgctggtgaggggccgcgccggggcctgggtgcccccctgactgaggaccagcaaaaccggcttagtgaggagatcgagaagaagtggcaggagctggagaagctgcccctgcgggagaataagcgggtgcccctcactgccctgctcaaccaaagccgcggagagcgccgagggcccccaagtgacggccacgaggcactggagaaggaggttcaggctcttcgggcccagctggaggcgtggcgtctccaaggggaggctcctcagagtgcactgagatcccaggaggatggccacatccccccgggctacatctcacagctggtgggcgtgatcactgtgcccgttttacagacaaggccactgagctctgagaggttatgtgacttgcccaaggtcaccccgcctgcaggtctcaaaggtgggatttgagcgagggtccggctgactgcagagcctgtgtgtgagtccccgtgtgacactctgcacttggacccttgccccggggaagtggggggctagtggccccgagagtcactccctgaacacagggaaatcctgccgaggcccactgggccaaggccccacacaaggaggtctgcaggacaggggagcctccagtagccctcagagaatgcaccgtccgcctaggacagcggttctcaacggggtccattttgtcccccttggggacatttggctgtgtctgggaatacttctggttgtcacaactaggacaaactaactctctagaaaaaacgtgtgtgtgtacacatatataagtttattataaattttaccaataaaaacaatgcttagtacacaatttacaaataaaaatatataattttaaaaaaaaaaaaaaaaaaaaa

SEQ ID NO: 26390 - DNA, 2395 bp, Homo Sapiens
tttaacttggacacttcctccaaacaccccaggttccttgcccaacctcctcgaatacagcctctctgggagtttccctctccccgactcagccgcgctggtccctgccttttcagcgctacctgccctccgtctgggacctggctcctttcctctcgccggtgtttcctcgccacccgcggaggggagggcggaccccagcctccttgccgcctgccccgcctccccgcctccccgccggcccggctcgggccgcgcaggcgcaccaggcgcggtccggaggccgagggcgaccacagcagcctccgcctcctgctgctccggactattctgcgctgggctagtcggcggtgacccggactgcgcccggcagtggcttcgcgggcgacgcgtcgccatgggctctcgctggagcagcgaagaggagaggcagccgctgctggggcccgggctcgggcctgggctgggggcctcctggagaagccgggaggcggcggcggcggcgctgcccgcggcggtcccgggtcccgggcgggtatacgggcgccgctggctggtgctgctgctcttctcgctgctggcgttcgttcagggcctggtctggaacacctggggtcccatccagaactcggcgcgccaggcctacggcttctccagctgggacatcgcgctgctcgtgctgtgggggcccatcggcttcctgccctgcttcgcgttcatgtggctcctggacaagagaggtctccggataactgtgctcctgacatccttccttatggttttgggaactggtctaagatgcatacctatatcagacttaatccttaaaagaagattaattcatggaggacagatgttaaatggattggcaggtccaactgtaatgaatgcagcaccatttctctctacgacgtggttttctgcagatgaaagggccacagccacagctattgcatcaatgctcagttatcttgggggagcatgtgcatttttagttggaccacttgttgttccagctcccaatgggacatcacctcttcttgctgcagagagcagcagggcgcatattaaagatcgcatagaggctgtgttatatgcagaatttggagttgtctgcttaatattttctgcaacactagcttatttcccaccccgacctcctcttcctcccagtgttgctgcagctagccagcggctgagttatcggagaagcgtttgtagattattaagcaattttcgatttttgatgattgctttagcatatgccataccacttggtgtatttgctggctggtctggagttctggacttaattttaacaccagcgcatgtcagccaagtagatgctggctggattggattttggtccatagttggaggctgtgttgttggaatagctatggcaaggtttgcagattttatcaggggtatgctgaaactaattcttctcctcctgttttcgggagctacactgtcatccacgtggttcaccctgacctgtttgaacagcatcacacacctacctttaaccacagtgacattgtatgcctcctgtattctcctgggagtgttcttgaatagcagcgtgcctatattttttgagctttttgtggaaactgtctacccagttccagaaggaattacttgtggagttgtcacttttttaagtaatatgtttatgggagtacttttattttttctcacattttatcatacagagttgtcttggttcaactggtgccttcccgggtcgtgtttgctcagtctcctcctcattctgtgcttcagggaatcctatgacagactctatcttgatgtggttgtctccgtttaatagcacagacttgaaggagtttaaaaggaggctggaaatcaatactgcacactgcacatttgctcggaattgcacatctaacaggaaaagagggagaagaaagaaacttcattcagaggttttgttaggttacagattatcacattaatttaattactactaggtaataataatgggagacttgagtgataataggggattttaaaactctacagatggcatacctgtgcctgcttctggggttggaagtgtgacttcttacacataaagcactacctaagtaattctctctctgttttgtgccagtgctaaactactgattacttgtaattatgaaaagaaataaagggtgtctatcatatgaagataacgccttccctaagtcacatatcagaataggaagatatgccactaacttctaaagaagttcaaaccctgtatccaattttaatgataaaatagccaagaggtatatcgatgatggaaattagccacatgtacactacattttttctaataaagccatttcttataaaaaaaaaaaaaaaaaaaaaaaaaaaa

SEQ ID NO: 26391 - DNA, 2728 bp, Homo Sapiens
tatttgcactcggtgcaaatatccatgtcttacctaattaagcaacatcatagtgccataactcaaggaagttgaatgaggtgaacatagatacagctctttccccttccccccctttttaaatgtaacaaatactttttatgttccccttccccccttccccttttcccctttccccttttggaaacgtgtcaggaaccaaatagtttaagatgagcagttgaggggactgagagagtgatcgacacagaacctggcttcttcgtgcttcatcataagtcgtgctgccggccaggttacttaagcacccttttaacaaggaaaccttgtgggagatccagctggccgactcgagttcagaaacaggaccacagaggttacactctgggatcctggccatgaggttggatgcctcaccttactgaaaggagacactggacctaaatggcgcagcatgattttgttcctgcttggctaaatttctcaacaccacagtcagctaagtcacctactgccaccttcgaaaaacacggagagcacctacccagaggagaaggtagatttggagtaagccgccgtcgacataattcctctgatggtttttttaacaatggtcccctacgaactgcaggagattcttggcaccagccctccctgttccgccatgattctgtggactctggtgtctctaagggagcatatgctggaatcacagggaacccatctggttggcatagctcttcccgaggtcatgatggcatgagccaacgtagtggaggtggcacagggaaccatcgccattggaatggcagcttccactcccggaaagggtgtgcttttcaggaaaagccacctatggagattagggaagaaaagaaagaagacaaggtggaaaagttgcagtttgaagaggaggactttccttccttgaatccagaagctggcaaacagcatcagccatgcagacctattgggacaccttctggagtatgggaaaacccgcctagtgccaagcaaccctccaagatgctagttatcaaaaaagtttccaaagaggatcctgctgctgccttctctgctgcattcacctcaccaggatctcaccatgcaaatgggaacaaattgtcatccgtggttccaagtgtctataagaacctggttcctaagcctgtaccacctccttccaagcctaatgcatggaaagctaacaggatggagcacaagtcaggatccctttcctctagccgggagtctgcttttaccagtccaatctctgttaccaaaccagtggtactggctagtggtgcagctctgagttctcccaaagagagtccctccagcaccacccctccaattgagatcagctcctctcgtctgaccaagttgacccgccgaaccaccgacaggaagagtgagttcctgaaaactctgaaggatgaccggaatggagacttctcagagaatagagactgtgacaagctggaagatttggaggacaacagcacacctgaaccaaaggaaaatggggaggaaggctgtcatcaaaatggtcttgccctccctgtagtggaagaaggggaggttctctcacactctctagaagcagagcacaggttattgaaagctatgggttggcaggaatatcctgaaaatgatgagaattgccttcccctcacagaggatgagctcaaagagttccacatgaagacagagcagctgagaagaaatggctttggaaagaatggcttcttgcagagccgcagttccagtctgttctccccttggagaagcacttgcaaagcagagtttgaggactcagacaccgaaaccagtagcagtgaaacatcagatgacgatgcctggaagtaggcatataaatgctcacagttaaatctgacccagtaaactctgtgtgtttagggagtatacaaaagaaatcgttcttttccttttcttatgttgttgaatacttcattcacaagggaaataatcatatcccaaagagagagcaattggcttgttttgcttttgttattgttcttccctgttatctgctttatagagagaagtttgtgtggtgggacagattttttaaacacactcacacacacacacacatacacacccagtatatatggggcgatgcacaggtaggagctggcagtgcagggaagaggagacactggtctgcagcaacagcttctactaccagcccttggggcactcacccctgtgatcaagcaatcattgtcaatgacaaagtgactattgaagttataattgtattaaattaatgctaataatttggatattttattttatttttggctgctcgggtaactttagcccttaaccaagcatatgtgggtttttttggttgtttttttttgttttttttttctttttcctttttgggtacagctgtaaaatatttggatataggaaatgttgtgttattcttgcagccttgatattcagggtggattgtaaaatataaatttttgtgagatttcaaagattaagattattttgataacattatttacagatttaaaagatgtggttatcacaagtctcgagggggaaactactgcataaaataactaacttggaataaatattttgcatcagtaaaaaaaaaaaaaaaaaaaaaaaaaaaaaaaaaaaaaaaaaaaaaaaaaaaaaaaaaaaaaaaaaaaaaaaaaaaaaaaaaaaaaaaaaaaaaaaa

SEQ ID NO: 26392 - DNA, 3629 bp, Homo Sapiens
catggccgccgctatcaccgacatggccgacctggaggagctctcccgcctgagccctctgccccccggcagcccgggttcggcggcgcggggccgggctgagccccccgaggaggaggaggaagaggaggaggaggaagaggaggcggaggccgaggcggtggcggcgctgctgctgaacggcggcagcggtgggggcggcggaggcggcggcggaggagtggggggcggcgaggcagagacgatgtcggagccgagccccgagagcgccagccaggccggggaggacgaagacgaggaggaggacgacgaggaggaggaagatgagagcagcagcagcggcgggggtgaggaggagagtagcgccgagagcctggtgggcagcagcggcgggagcagcagcgacgagacccgctcgttgagccccggcgccgccagcagcagcagcggggatggggacggcaaggagggcctggaggagcccaagggaccgcggggcagccagggcggcggcgggggcggcagcagtagcagcagcgtagtctccagcggcggcgacgagggctacgggactgggggaggcggaagcagcgcgacctccgggggccggcggggcagcttggagatgtcgtcggatggggaacccctgagccgcatggactcggaggacagcataagcagtactataatggatgtagacagcacaatttccagtgggcgttcaactccagcaatgatgaatggacaaggaagcactacttcttcaagcaaaaatattgcctataattgttgttgggaccagtgccaggcttgcttcaactctagcccagatctggcagatcacatccgttccatacatgtagatggtcagcgaggaggggtatttgtttgcttatggaaaggttgtaaagtatataacactccatctaccagtcaaagttggttacaaaggcatatgctgacacacagtggagacaaacctttcaagtgtgttgttggtggctgcaatgccagctttgcttctcagggagggctagctcgtcatgtacccacacacttcagtcagcagaactcctcaaaagtttctagccagccaaaggccaaagaagaatctccttctaaagctggaatgaacaaaaggaggaaattaaagaacaaaagacgacgctcattaccacggccacatgatttcttcgatgcacaaacactggatgcgataagacatcgagccatatgctttaacctctcagctcatatagaaagtttagggaagggacacagtgttgtttttcatagtactgtaatagctaagagaaaagaagattctgggaagatcaaacttttgcttcattggatgcctgaagacattctgcctgatgtgtgggtgaatgaaagtgaacgacatcagttaaaaactaaagtagttcatttatcaaagctacccaaagatactgccttgcttttggacccaaacatatacagaacaatgccgcagaagaggttgaagaggtaaaaaataaataaatacataaaaagcaaacaagcggggacacctgcagtcttagtcactgacaatgggtttagggaaagttgcacattagagtcaaccccttctttttttttttttttaaatccagtatttaggataatatttatgcttagtgtaaacattctgtgaatgaagtagactcttcggtggaatatattaatatattactgtatatccacattttcatggaatggtactgtgggagactgagcaaacactcttttggcaacttagtagaacagcttcttaaaggctttgcatgcttgctgctttaagctgcttttttttttcttttcttccctttagtgatttcagtagtttatattggaaagaaaaacaattacaacatgtgcccttacaaataccaaaagcactgtaaggatatttgtcttgacagtgtttattgatttgaagtcatattaggaaatatttagacaatgaaaattatcaagagataatttacctttcaattatgataaatagatgtgattggttgccatttgtgttcttttgcagaactctgataagaaaagtgttcaatttgtatttaagcaaacagtgaacgacgtttgcaatcaactaaaaattcgtctatcgaattagggctgaaaattactgttaaagagtgttgcagtatgtctggtggctcccttttcaggactagggctttctcatggagtacagtatgttaatatttacctatataactaatctgttaacggtttttgaaaaacctttcaaattatttgaataatcttcatattttcatttaacctatatgactctaattttttttctgaggaaatcatttggtttttgagttgttttttcttaatgtaagaaaaattgtattttttttacaagtatcttcaaactgaatcttttatgcaccaaagttggtcttgaaaaggaaaataaaatcactttcttgcttggtaagcaagaagccatatcgattttttttaacttacagaaatggaaatatgtgtaacttgttagtattgtattaaacaaatgttgcatagagataatagaacattgcttgtaaataattcagcagatttgtaatatatttttatattttgaaatgtactgtagatgttttctagaggcatgaaagttaaatgtatatattatggtagaaataatattgaaggatattgtacttcactagtgctgccagaggaattgttaataaaagcaccttctttaacaataaatgtctttcacagacttaagggactatgtactactgttaatatctctaagaacaaaacacattgaacatccttccagaaagtctttgagggaggacctatacccataatagaattatggcactcatttctgacagtgatcaagaaatcagttatttccttactgttggaaggacattgtaaagtatgtggttatatgcagtgaaactgcagaaaatactcctggttgaggagttttcactttactacagtgatataaaaaccagcagtttttacactaaattttttaaagaaatattagacaaaaatatagaattaaaacctttggttccaaaatgggaaaggttccacgatacataaatcatttctcatttgctttaaaaaatttaaaagtgtaaaaattatgagagactttattcgttaacaatgggggtaaagagctatatacatgaaaatgagtcttataaaattaagtgaagtgcaaataaaagcactgctactataagacattctggaatggttgtttaataagggtattatccatttgatctatagcaatgtgattttatttttaaaaagaaaagcagtgtgttttctttttttgttgttttcttttgcttaagcacttcatcaattgctttattctgtatctgcgaagtaatctgcaatctcttttgttctttttaaaatttgatttgttataaaattgccaaatagaagtgtttcagatacatagtttgtacctgtatttttattttattgcctcatgttcttgtaagtcattcttaattgaccaatgattgtagaccttgcttgagtattttttctaataaaacaaagcaaatcacaaaaaaaaaaaaaaa

SEQ ID NO: 26393 - DNA, 4589 bp, Homo Sapiens
tcgacccacgcgtccggaatcgctcaggaaagacacactgcagactccaccggcaccctgcaatagatggattccgactacacaagggagaaaacgcggaggtgacactctcctgcctggaaagaggacgaacgaccaaacaaacgcaaggactggactccatgccgaaggtatctggaagtcgtgacacgagcatctgcagcttttccatattgaagttgaagtgctggatattaatgacaattctccccagttttcaagatctctcatacctattgagatatctgagagtgcagcagttgggactcgcattcccctggacagtgcatttgatccagatgttggggaaaattccctccacacatactcgctctctgccaatgatttttttaatatcgaggttcggaccaggactgatggagccaagtatgcagaactcatagtggtcagagagttagatcgggagctgaagtcaagctacgagcttcagctcactgcctcagacatgggagtacctcagaggtctggctcatccatactaaaaataagcatttcagactccaatgacaacagccctgcttttgagcagcaatcttatataatacaactcttagaaaactccccggttggcactttgctcttagatctgaatgccacggatccagatgagggcgctaatgggaaaattgtatattccttcagcagtcatgtgtctcccaaaattatggagacttttaaaattgattctgaaagaggacatttgactcttttcaagcaagtggattatgaaatcaccaaatcctatgagattgatgttcaggctcaagatttgggtccaaattcaatcccagcccattgcaaaattataattaaggttgtggatgttaatgacaataaacctgaaattaacatcaacctcatgtcccctggaaaagaagaaatatcttatatttttgaaggggatcctattgatacatttgttgctttggtcagagttcaggacaaggattctgggctgaatggagaaatagtttgtaagcttcatggtcatggtcactttaaacttcagaagacatatgaaaacaattatttaatcttaactaatgccacactggatagagaaaagagatctgagtatagtttgactgtaatcgctgaggacagggggacacccagtctctctacagtgaaacattttacagttcaaatcaatgatatcaatgacaatccaccccacttccagagaagccgatatgaatttgtaatttcagaaaataactcaccaggggcatatatcaccactgttacagccacagatcctgatcttggagaaaatgggcaagtgacatacaccatcttggagagttttattctaggaagttccataactacatatgtaaccattgacccatctaatggagccatctatgccctcagaatctttgatcatgaagaagtgagtcagatcacttttgtggtagaagcaagagatggaggaagcccgaagcaactggtaagcaataccacagttgtgctcaccatcattgacgaaaatgacaacgttcctgtggttatagggcctgcattgcgtaataatacggcagaaatcaccattcccaaaggggctgaaagtggctttcatgtcacaagaataagggcaattgacagagactctggtgtgaatgctgaactcagctgcgccatagtagcaggtaatgaggagaatatcttcataattgatccacgatcatgtgacatccataccaacgttagcatggattctgttccctacacagaatgggagctgtcagttatcattcaggacaaaggcaatcctcagctacataccaaagtccttctgaagtgcatgatctttgaatatgcagagtcggtgacaagtacagcaatgacttcagtaagccaggcatccttggatgtctccatgataataattatttccttaggagcaatttgtgcagtgttgctggttattatggtgctatttgcaactaggtgtaaccgcgagaagaaagacactagatcctataactgcagggtggccgaatcaacttaccagcaccacccaaaaaggccatcccggcagattcacaaaggggacatcacattggtgcctaccataaatggcactctgcccatcagatctcatcacagatcgtctccatcttcatctcctaccttagaaagagggcagatgggcagccggcagagtcacaacagtcaccagtcactcaacagtttggtgacaatctcatcaaaccacgtgccagagaatttctcattagaactcacccacgccactcctgctgttgaggtctctcagcttctttcaatgcttcaccaggggcaatatcagccaagaccaagttttcgaggaaacaaatattccaggagctacagatatgcccttcaagacatggacaaatttagcttgaaagacagtggccgtggtgacagtgaggcaggagacagtgattatgatttggggcgagattctccaatagataggctgctgggtgaaggattcagcgacctgtttctcacagatggaagaattccagcagctatgagactctgcacggaggagtgcagggtcctgggacactctgaccagtgctggatgccaccactgccctcaccgtcttctgattataggagtaacatgttcattccaggggaagaattcccaacgcaaccccagcagcagcatccacatcagagtcttgaggatgacgctcagcctgcagattccggtgaaaagaagaagagtttttccacctttggaaaggactccccaaacgatgaggacactggggataccagcacatcatctctgctctcggaaatgagcagtgtgttccagcgtctcttaccgccttccctggacacctattctgaatgcagtgaggtggatcggtccaactccctggagcgcaggaagggacccttgccagccaaaactgtgggttacccacagggggtagcggcatgggcagccagtacgcattttcaaaatcccaccaccaactgtgggccgccacttggaactcactccagtgtgcagccttcttcaaaatggctgccagccatggaggagatccctgaaaattatgaggaagatgattttgacaatgtgctcaaccacctcaatgatgggaaacacgaactcatggatgccagtgaactggtggcagagattaacaaactgcttcaagatgtccgccagagctaggagattttagcgaagcatttttgtttccatgtatatggaaatagggaacaacaacaacaacaaaaaaccctgaaagaactggcattgccaaatagttgcatttatcataaatgtgtctgtgtatattgaatattaaatactgtattttcgtatgtacacaatgcaagtgtgattattttaatctgtattttaaaaatacatttgtaccttatatttatgtgtaatttaacaaacaaattttatttttttactcccatgacagacatgtttttcctagtcgtgtagaaactagccactgttcaaatctgatacactattcaaccacaaagtgtaaaggcactgcttagattagttttgttggggaagaattattatgttgtatgaacaaccccactgaagcattatacaattcttaattccattaagtgatcccactttttttcaataactttttagaaattaagaatcattaaaattgttaagctattttattgttattttctctactttctactagccccagtagttgaactcttataggaaaatcgaaagataaagtgaaagtttatttcaggactgagaaatatcttgaaggttatttattagatgactatctcaaatgaactttttatagacaatgatgaaaacagaactaaagtcaatgtttcctgactcccaggcccctactattccaggccatcacactggcctgttccggagaatatttctctcacaatattattatctacttataattatggtaaacaataaattttattccatccttgtagtatgaaacatgctccaaggaaatggaatctgtcctttaaatggataacagtatgtgttctaatggcataaaatattactggataaaaacagttgtgtcagtgtctctcctaaggtagtaaatataattgacttattctgaacccattctattttgaatcttcccctttcctctcacaatacttgaacattttaatcttttggaatattgtctttctttgttataactattcatttttagcttttgtctccagtgcatgatctcatatttttgcttttatttttagtataagaacatttataaaatcatatttttgttactgcaattgttttatttgttgtgtggcaaatgagaaatcctttatttattgtgctgtgatctctctgtgtggaatgccttggtgagagagatgcttattatgactattatcatttctgaccaagcttctattaatgttatttctaataatacactatcttgattgtactctccagaaaatttttctgtcagtgaaaataaaagaaaaattaaagtaaaaaaaaaaaaaaa

SEQ ID NO: 26394 - DNA, 688 bp, Homo Sapiens
gattaatgacctacaaaaagacatcgaaggcagtaggaaaagagaatctgagctgctgctgtttacagaaaggctcactagtaagaatgcacagcttcagtctgaatccaattctttgcagtcacaatttgataaagtttcctgtagtgaaagtcagttacaaagccagtgtgaacaaatgaaacagacaaatattaatttggaaagtaggttgttgaaagaggaagaactgcgaaaagaggaagtccaaactctgcaagctgaactcgcttgtagacaaacagaagttaaagcattgagtacccaggtagaagaattaaaagatgagttagtaactcagagacgtaaacatgcctctagtatcaaggatctcaccaaacaacttcagcaagcacgaagaaaattagatcaggttgagagtggaagctatgacaaagaagtcagcagcatgggaagtcgttctagttcatcagggtccctgaatgctcgaagcagtgcagaagatcgatctccagaaaatactgggtcctcagtagctgtggataactttccacaagtagataaggccatgttgattgagagaatagttaggctgcaaaaagcacatgcccggaaaaatgaaaagatagaatttatggaggaccacatcaaacaactggtggaagaaattaggaaaaaaaaaaaaaaa

SEQ ID NO: 26395 - DNA, 3870 bp, Homo Sapiens
atggcctttgatgtgtcctggtttgcggtgcactcttttggcctggacaaggctcctgtgctcctgtcttccctggatcggaagggcatcgtgaccacctcccggagggactggaagagcgacctcagcctggagcgcgtgagtgtgctggaattcttgctgcaagtgcatggctccgaggaccaggactttggcaactactactgttccgtgactccatgggtgaagtcaccaacaggttcctggcagaaggaggcagagatccactccaagcccgtttttataactgtgaagatggatgtgctgaacgccttcaagtatcccttgctgatcggcgtcggtctgtccacggtcatcgggctcctgtcctgtctcatcgggtactgcagctcccactggtgttgtaagaaggaggttcaggagacacggcgcgagcgccgcaggctcatgtcgatggagatggactaggctggcccgggaggggagtgacagagggacgttctaggagcaattggggcaagaagaggacagtgatattttaaaacaaagtgtgttacactaaaaaccagtcctctctaatctcaggtgggacttggcgctctctcttttctgcatgtcaagttctgagcgcggacatgtttaccagcacacggctcttcttcccacggcactttctgatgtaacaatcgagtgtgtgttttcccaactgcagctttttaatggttaaccttcatctaattttttttctcccactggtttatagatcctctgacttgtgtgtgtttatagcttttgtttcgcggggttgtggtgaggaaggggtgatggcatgcggagttctttatcttcagtgagaatgtgcctgcccgcctgagagccagcttccgcgttggaggcacgtgttcagagagctgctgagcgccaccctctacccggctgacagacaacacagacctgtgccgaaggctaatttgtggcttttacgaccctaccccaccccctgttttcaggggtttagactacatttgaaatccaaacttggagtatataacttcttattgagcccaactgcttttttttttttttttttttttgcttctctgccccttttccatttcttttgtatttgttttctgtgagagcactgaaatggcagccctggaatctacaatttggctctccactgagcaccttatcttgccaccttagccttaagaatgaatatgaagaaaaatacacagccacctctgtccagggcagtaagaagggctgcaaggaaggggaggatggggacaaggaaaggatcagatacctgctccagtagttgtgaggccactgtgtctcaggggactccaggaggagcagaagagggatcccacgaagttattcttacgcagctggggccaggagggtcagagtggtgccaggtgcaagttaggctaaagaagccaccactattcctctctcttgcccattgtggggggcaaaggcattggtcaccaagagtcttgcagggggacccacagatatgccatgtccttcacacgtgcttgggctccttaacctgaaggcaaattgctacttgcaagactgactgacttcaaggaatcagaaattacctagaagcaccatgttttttctatgaccttttcagtccttcaggtcattttaaggtccactgcagggggttagtgagaaagggtatactttgtggtatgttttgctttcctaatagggacatgaaggaaacccagcaatttgctgttatgtgaatggcctgtagagcagagtcaagagcggtgtgctttgcccgactgctcccatcaggaataggagagtagacagagatcttccacatcccaggcttctgctgctgctttaaaagctctgtccttggagcctcccgctccctgaagtgtctcgccccctgcacagcactggcctttcggaagcatcccagtagggttttctgaggctcgctggtgactcatgccctaattgcaatcctctgcttttatcttgactttgaaggatctaacactgctctctcttccaaaggggaaaaaaagattcatttgttttgagcaataaactaatacaaaatgatggccattcatgtgcagctctttgtcaccatgggccggatgagttgtgctcctcctggctcaccatttccccctgctcccccacagccggttctgcacttatcaccgagtcgcccctggaagcagattcccattgagttttccccaccaaggggaccatgcacatggtagaaacattagattctgcattgacagtagcctttccttggcccgggcctgtggtgggaagacgggcaacaagtataccccaccagggcctgagtgactagaggaagaggacgaggccttgttggcactagatttgggtattttctgcatgtcataacatatcctaactgctatttcagaagaggcagcttgtaggtgattgtacaagtgagaattaaagagagaacagatatttaaacaggtgctgtattagtaacagccagtgccctttcagcccttgcatctattaaaaggagattcaggattttattggcacaggcccttcttagtaggaagaaagggtgcttagctttggacctgaccgggtgtgtgtaaaaccatggactgagtcacagcagacactcgatggtggtaaatgtgatgggtgcttacacactgtaccttttcctttcatactgatgctgcagttcagggctggagttgttaaggcattgacctccacccacctgccccatgtccactgggctgcccaagctgcatgtcacctgagggctggcaggaaggggcgagaaatcccagggcattgtaccaaggacctagttccttctagggatataaatttccaggaatgtgtatttttaatgtggtgagatgcactcttttgttgtaccaaatagggctccccaccccacccctgcgacaagtgctcttctagaacaggttcctaccagcagcactggtgtgaatgaaagagagacccagccgcgtctcacacaggtggaattgcacttcttaacaaaaaggaactttataaaagtttgggattttttttcctaatcataaaaatagccccagaaagagcctaagctatgttcagatagaagcctcgaaattcctgtaaattgtttactttatgatgtttacatacacgtttcactttgaaaaaaaatgcaaatcgactttttaacaactgttgagatgtttcatgggacagtagaactctgactcaccaactgggctaaattttaatttaaaaatgtatttatttgagtgtctttccccccctcaccctcaccatctgaggggctccctgagatcttggtagaggaggcccctcctgcccagaccttcgtttgtttccccggtggcccttgcttcttgctttgcagactgcctgcagccatgattttgtcactgacatctgtgagccaaagactgagcctttttggcaggaataataagcaatactacacaacttgctactttcagaaaacttttttttagcttcaccgatgacaacagaggaagaagggaactgggatttgggtaagttctcctccactgtttgaccaaattctcagtgataaatatgtgtgcagatccctagaagagaaaacgctgactttctttttaagtgtggcacataaggatctgcagaattttccgtagacaaagaaaggatcttgtgtatttttgtccatatccaatgttatatgaactaattgtattgttttatactgtgaccacaaatattatgcaatgcaccatttgttttttatttcattaaaggaagtttaatttaaaaaaaaaaaaaaaa

SEQ ID NO: 26396 - DNA, 2357 bp, Homo Sapiens
gggccagggcactggaggggaggggcgtgctctgctgacaccgcccccgcctgcagaatgcaagtgcggccccatcgacctcctgttcgtgctggacagctcagagagcattggcctgcagaacttcgagattgccaaggacttcgtcgtcaaggtcatcgaccggctgagccgggacgagctggtcaagttcgagccagggcagtcgtacgcgggtgtggtgcagtacagccacagccagatgcaggagcacgtgagcctgcgcagccccagcatccggaacgtgcaggagctcaaggaagccatcaagagcctgcagtggatggcgggcggcaccttcacgggggaggccctgcagtacacgcgggaccagctgctgccgcccagcccgaacaaccgcatcgccctggtcatcactgacgggcgctcagacactcagagggacaccacaccgctcaacgtgctctgcagccccggcatccaggtggtctccgtgggcatcaaagacgtgtttgacttcatcccaggctcagaccagctcaatgtcatttcttgccaaggcctggcaccatcccagggccggcccggcctctcgctggtcaaggagaactatgcagagctgctggaggatgccttcctgaagaatgtcaccgcccagatctgcatagacaagaagtgtccagattacacctgccccatcacgttctcctccccggctgacatcaccatcctgctggacggctccgccagcgtgggcagccacaactttgacaccaccaagcacttcgccaagcgcctggccgagcgcttcctcacagcgggcaggacggaccccgcccacgacgtgcgggtggcggtggtgcagtacagcggcacgggccagcagcgcccagagcgggcatcgctgcagttcctgcagaactacacggccctggccagtgccgtcgatgccatggactttatcaacgacgccaccgacgtcaacgatgccctgggctatgtgacccgcttctaccgcgaggcctcgtctggcgctgccaagaagaggctgctgctcttctcagatggcaactcgcagggcgccacgcccgctgccatcgagaaggccgtgcaggaagcccagcgggcaggcatcgagatcttcgtggtggtcgtgggccgccaggtgaatgagccccacatccgcgtcctggtcaccggcaagacggccgagtacgacgtggcctacggcgagagccacctgttccgtgtccccagctaccaggccctgctccgcggtgtcttccaccagacagtctccaggaaggtggcgctgggctagcccaccctgcacgccggcaccaaaccctgtcctcccacccctccccactcatcactaaacagagtaaaatgtgatgcgaattttcccgaccaacctgattcgctagattttttttaaggaaaagcttggaaagccaggacacaacgctgctgcctgctttgtgcagggtcctccggggctcagccctgagttggcatcacctgcgcagggccctctggggctcagccctgagctagtgtcacctgcacagggccctctggggctcagccctgagctggcgtcacctgtgcagggccctctggggctcagccctgagctggcctcacctgggttccccaccccgggctctcctgcccgccctccctcctgcctgcgcagctccttccctaggcacctctgtgctgcgtcccaccagcctgagcaagacgccctctcggggcctgtgccgcactagcctccctctcctctgtccccatagctggtttttcccaccaatcctcacctaacagttactttacaattaaactcaaagcaagctcttctcctcagcttggggcagccattggcctctgtctcgttttgggaaaccaaggtcaggaggccgttgcagacataaatctcggcgactcggccccgtctcctgagggtcctgctggtgaccggcctggaccttggccctacagccctggaggccgctgctgaccagcactgaccccgacctcagagagtactcgcaggggcgctggctgcactcaagaccctcgagattaacggtgctaaccccgtctgctcctccctcccgcagagactggggcctggactggacatgagagccccttggtgccacagagggctgtgtcttactagaaacaacgcaaacctctccttcctcagaatagtgatgtgttcgacgttttatcaaaggccccctttctatgttcatgttagttttgctccttctgtgtttttttctgaaccatatccatgttgctgacttttccaaataaaggttttcactcctaaaaaaaaaaaaaaa

SEQ ID NO: 26397 - DNA, 2592 bp, Homo Sapiens
ggttcggcgtgggggccgttggctccagacaaataaacatggagtccatcttccacgagaaacaagaaggctcactttgtgctcaacattgcctgaataacttattgcaaggagaatattttagccctgtggaattatcctcaattgcacatcagctggatgaggaggagaggatgagaatggcagaaggaggagttactagtgaagattatcgcacgtttttacagcagccttctggaaatatggatgacagtggttttttctctattcagaaatgaaagatcatttatatgcaattataaggaacactggtttacagttagaaaattaggaaaacagtggtttaacttgaattctctcttgacgggtccagaattaatatcagatacatatcttgcacttttcttggctcaattacaacaggaaggttattctatatttgtcgttaagggtgatctgccagattgcgaagctgaccaactcctgcagatgattagggtccaacagatgcatcgaccaaaacttattggagaagaattagcacaactaaaagagcaaagagtccataaaacagacctggaacgagtgttagaagcaaatgatggctcaggaatgttagacgaagatgaggaggatttgcagagggctctggcactaagtcgccaagaaattgacatggaagatgaggaagcagatctccgcagggctattcagctaagtatgcaaggtagttccagaaacatatctcaagatatgacacagacatcaggtacaaatcttacttcagaagagcttcggaagagacgagaagcctactttgaaaaacagcagcaaaagcagcaacagcagcagcagcagcagcagcagggggacctatcaggacagagttcacatccatgtgaaaggccagccaccagttcaggagcacttgggagtgatctaggtgatgctatgagtgaagaagacatgcttcaggcagctgtgaccatgtctttagaaactgtcagaaatgatttgaaaacagaaggaaaaaaataatacctttaaaaaataatttagatattcatactttccaacattatcctgtgtgattacagcatagggtccactttggtaatgtgtcaaagagatgaggaaataagacttttagcggtttgcaaacaaaatgatgggaaagtggaacaatgcgtcggttgtaggactaaataatgatcttccaaatattagccaaagaggcattcagcaattaaagacatttaaaatagttttctaaatgtttctttttcttttttgagtgtgcaatatgtaacatgtctaaagttagggcatttttcttggatctttttgcagactagctaattagctctcgcctcaggctttttccatatagtttgttttctttttctgtcttgtaggtaagttggctcacatcatgtaatagtggctttcatttcttattaaccaaattaacctttcaggaaagtatctctactttcctgatgttgataatagtaatggttctagaaggatgaacagttctcccttcaactgtataccgtgtgctccagtgttttcttgtgttgttttctctgatcacaacttttctgctacctggttttcattattttcccacaattcttttgaaagatggtaatcttttctgaggtttagcgttttaagccctacgatgggatcattatttcatgactggtgcgttcctaaactctgaaatcagccttgcacaagtacttgagaataaatgagcattttttaaaatgtgtgagcatgtgctttcccagatgctttatgaatgtcttttcacttatatcaaaaccttacagctttgttgcaaccccttcttcctgcgccttattttttcctttcttctccaattgagaaaactaggagaagcatagtatgcaggcaagtctccttctgttagaagactaaacatacgtacccaccatgaatgtatgatacatgaaatttggccttcaattttaatagcagttttattttattttttctcctatgactggagctttgtgttctctttacagttgagtcatggaatgtaggtgtctgcttcacatcttttagtaggtatagcttgtcaaagatggtgatctggaacatgaaaataatttactaatgaaaatatgtttaaatttatactgtgatttgacacttgcatcatgtttagatagcttaagaacaatggaagtcacagtacttagtggatctataaataagaaagtccatagttttgataaatattctctttaattgagatgtacagagagtttcttgctgggtcaataggatagtatcattttggtgaaaaccatgtctctgaaattgatgttttagtttcagtgttccctatccctcattctccatctccttttgaagctcttttgaatgttgaattgttcataagctaaaatccaagaaatttcagctgacaacttcgaaaattataatatggtatattgccctcctggtgtgtggctgcacacattttatcagggaaagttttttgatctaggatttattgctaactaactgaaaaaaaaaaaaaaaaaaaaaaaa

SEQ ID NO: 26398 - DNA, 1698 bp, Homo Sapiens
aggaaacggaagaaggagcaagctatggaggggaacagggatgaggctgagaaatgtgtcgagatcgcccgggaggccctgaacgccggcaaccgcgagaaggcccagcgcttcctgcagaaggccgagaagctctacccactgccctcggcccgcgcactattggaaataattatgaaaaatggaagcacggctggaaatagccctcattgccgaaaaccatcaggtagtggcgatcaaagcaagcctaattgcacaaaggacagcacatctggtagtggtgaaggtggaaaaggctataccaaagaccaagtagatggagttctcagcataaacaaatgtaaaaattactatgaagtacttggagttacgaaagatgctggtgatgaagatttgaaaaaagcttatagaaagcttgctttgaagtttcatccagacaaaaaccatgcacctggagcaacagatgcttttaaaaagattggaaatgcttatgctgttttaagtaatccagaaaagcgaaaacagtatgacctcacgggcaatgaagaacaagcatgtaaccaccaaaacaatggcagatttaatttccatagaggttgtgaagctgatataactccagaagacttgtttaatatattttttgggggtggatttccttcaggtagtgtacattctttttcaaatggaagagctggttatagccaacaacatcagcatcgacatagtggacatgaaagagaagaggaaagaggagatggaggtttttctgtgtttatccagctgatgcccataattgtattgatcctcgtgtcattattaagccagttgatggtctctaatcctccttattccttatatcccagatctggaactgggcaaactattaaaatgcaaacagaaaacttgggtgttgtttattatgtcaacaaggacttcaaaaatgaatataaaggaatgttattacaaaaggtagaaaagagtgtggaggaagattatgtgactaatattcgaaataactgctggaaagaaagacaacaaaaaacagatatgcagtatgcagcaaaagtataccgtgatgatcgactccgaaggaaggcagatgccttgagcatggacaactgtaaagaattagagcggcttaccagtctttataaaggaggatgaactggaatttttatttataccttttagcgtactctttattttttctgtaagtaagtttggtttcatcatgagggatgaaggaaaagatttgatactgaaaactaaactgaatagttggttcctgaaatcttggactgtttatgacctactggctcctttaaatagtaactgaaaactaaaatggaatattttagttaacgcttctacaagtattttcattttaaaagcttacatgattcctaactaaagtgtcatgagaaaggattatcacacctgtagcaatttccagttttagtgattctccattttttcccttgtcatgtaaatatttatggaatgatcattttgtgtacatacaggttactgcttttttatttaaattcttttagtgtttagctccatgagacacttcagtttaaattgatggaataaatgttatatgacacatttacattttccttatcaaggtgtcaaatatgtggactttaaacaatgaaacttttccaaaaaaaaaaaaaaaaaaaaaaaaaaaaa

SEQ ID NO: 26399 - DNA, 2100 bp, Homo Sapiens
gaagcgcgctcccggggaggtgttgcagccatggctacggcagccggcgcgacctactttcagcgaggcagtctgttctggttcacagtcatcaccctcagctttggctactacacatgggttgtcttctggcctcagagtatcccttatcagaaccttgggcccctgggccccttcactcagtacttggtggaccaccatcacaccctcctgtgcaatgggtattggcttgcctggctgattcatgtgggagagtccttgtatgccatagtattgtgcaagcataaaggcatcacaagtggtcgggctcagctactctggttcctacagactttcttctttgggatagcgtctctcaccatcttgattgcttacaaacggaagcgccaaaaacaaacttgaagttgtctgaaagcttgctctacacttttacattcatcctcacccttttttttgtggggtagaggaggtgcagtaatttactcagtgatctttctactttctagaaactgtccttcaaagctctttaagaccccctcgttagtcagttttttctcttatatgctctggttgagcttgaatagaccagttgttacttaagaaagaaacagagaaagattttagcttttcaatcctatttggcagaggacttcagctaccttcttacagtctttggctgtgttggtaccctcgtgtgctctgagctaagccacatactaaactgactttttggtttgtatacccttgctcccgccttctgatgaaaacaccttaccctcacaaccaccatctttcctctcctttccaaagctctttccaccttgctgcactaagataaagtgacactttcactatatgtcaattccacacacatttattaggtacctgtgaggtaggatcctatcctctcaaacttccatttctcatgctacagagaaagataaggaagatgagcaagtgcctggaatggggcaggctgagcagtcacacaggcatagaggcacgctgagaacctggaggggagactgcagagtgccttccctgatgctgcagccggaagtgatccttccctccacctggcccctgggacactgtgctctgcagtgtgcagggcctgatggcactgctagattgctccttcagctcagggccacagcttaaacagctttacctttcccctcagcacctgtcccactatcttgcacacaggtgctctaaccatgtttattgaacaaaggagggaaactgatttcactttcacttgttcattatcattccaatttttatgtgaaaatggcacaacccatttggggtaccctcaccccaaaataaaagcccaagtctacctttgactggtaccaccttttttgtggtttcgttggtgagaaacctttatctttttcatacctttctattctcaatcacttctccaaaagtgtgtctttccagctctgatttattcaaaacacaagcatttctgtttagagattctagcccatgggttatctggctagttattacctctcctgttcacttagttatactttattattgctcacaggctggggaggcagaatgactctgtcaccactaggagccattagggcttcttccctggaggactgcctgcttgctttctggggacactagccctcatttcccttctgtggtacagtggggcaaattatttgtattaagcaaacatttatgggaaacaacccgctcccgaaaacggagcccccaagtaaagcacaaccctgaaagattatgaactatgaattgtctctagtagagataaatttctgcaaacatatctcagtcttccctctgtttctctggtgattaagaagttcctttttggtaaggaaaaggatttttaaccatagagttaggcatcatggaaattcaaaccagatttcttaatacctggtcttcctcaaagagaaataataacagtaatagtggtgctgggaacaatatggcagattattgaatgaaattgattaacttgaataaaatgctgtgaattttctctaaaaaaaaaaaaaaaaaaaaaaaaaaaaaaaaagtaaaaaaaaaaaaaaaaaaaaaaaaaaaaaa

SEQ ID NO: 26400 - DNA, 2684 bp, Homo Sapiens
gtcttggaaatgtgaacgcaagaagcaggcttgatttttttttctccccccttctctctctctctctctctctctcttcctctctccctctttctcctctctcacccacactcacgcacacctccaaaccgcacacccagacgcacacgcataccccagcgcccggcagttatgtattctccgctctgtctcacccaggatgaatttcatcctttcatcgaagcacttctgccccacgtccgagcctttgcctacacatggttcaacctgcaggcccgaaaacgaaaatacttcaaaaaacatgaaaagcgtatgtcaaaagaagaagagagagccgtgaaggatgaattgctaagtgaaaaaccagaggtcaagcagaagtgggcatctcgacttctggcaaagttgcggaaagatatccgacccgaatatcgagaggattttgttcttacagttacagggaaaaaacctccatgttgtgttctttccaacccagaccagaaaggcaagatgcgaagaattgactgcctccgccaggcagataaagtctggaggttggaccttgttatggtgattttgtttaaaggtattccgctggaaagtactgatggcgagcgccttgtaaagtccccacaatgctctaatccagggctctgtgtccaaccccatcacataggggtttctgttaaggaactcgatttatatttggcatactttgtgcatgcagcagattcaagtcaatctgaaagtcccagccagccaagtgacgctgacattaaggaccagccagaaaatggacatttgggcttccaggacagttttgtcacatcaggtgtttttagtgtcactgagctagtaagagtgtcacagacaccaatagctgcaggaactggcccaaatttttctctctcagatttggaaagttcttcatactacagcatgagtccaggagcaatgaggaggtctttacccagcacatcctctacgagctccacaaagcgcctcaagtctgtggaggatgaaatggacagtcctggtgaggagccattttatacaggccaagggcgctccccaggaagtggcagtcagtcaagtggatggcatgaagtggagccaggaatgccatctccaaccacactgaagaagtcggagaagtctggtttcagcagcccctccccttcacagacctcctccctgggaacggcgttcacacagcatcaccgacctgtcattacaggacccagagcaagtccgcatgcaacaccatcgactcttcatttcccgacatcacccattatccagcagcctgggccttacttctcacacccagccatccgctatcaccctcaggagacgctgaaagaatttgtccaacttgtctgccctgatgctggtcagcaggctggacaggtggggttcctcaatcccaatgggagcagccaaggcaaggtgcacaacccattccttcccaccccaatgttgccaccgccaccgccaccaccgatggccaggcctgtgcctctgccggtgccagacacaaagcctccaaccacgtcaacagaaggaggtgcagcctcccccacgtcaccaatcctggtacctgggataaaagttgcagcgtcccaccatccaccagacagaccacctgaccccttctcaactctgtaacatggacgcaacctcaacccagcgcagttacaacttcactatcagcggaaggggagaaaaaccgattcaaatcaacttgtacatggaaacagcaagcattatggtcaaacagcaaaggccataaccttttgggatttttttttttttttaaatactttagggactgttgtaatttctcatatggtgctggaaatggttgggctttgtaacatttgaagtgtttccatggtagcgtgagcattaggtgacgtggctagcggaggactacccttgctcactgacttcctgttgtaacacactttccttacggagcctggctgtttcacagtatttcatgaatttacccacacaggtgtgatcctccttgagcattgaggaggcacatggagaactaaatcttttgtagtagctgagatctgcaatatataacgggacagtcaaagggcaatgtttttctgtaacatattggaaaaagaaaatgcagttatattccttttttatttgttcctttagtttgttttggttcagcagtcagcagttaagtatataacatggcccgcaaggacaatgaatccactcacattgcagaacaattccgaaaatggcaaactactactactactgttcagttttttaaaagttttgaaatgctgcacttacatttaaaaaaacaacaacaacattttttcaacaatttcaacaatgacacaaaaattcacatggaaatggggaagatggtctgttttgacagaaactgacaggaatcaatcaaaacaatcgaattttgaattgagtaaagtgcaatttcattggatagctaaatatctttgtaagatagagattgttgaaaattctatttttgtttttctagtcctttcaccccaggactctaaattattggggtaaaaaacagccttgcaagaaaaaggggagctatttttgctttttatgttttttattgttaaacttgtatccctttaaaaactaaaaaaaaaaaaaaaaaaaaaaaaaaaaaa

SEQ ID NO: 26401 - DNA, 2634 bp, Homo Sapiens
agagctggctggacccaaggaggtgaagagtcacttttcagccccaggaagggcaaagaagagagaaaatcagcctgtctgctctctccttggctcaacaaggcctctaacagtcttctgtcctctattctgcacacggcatatttgggaacgagaaacaaaagttttcccaaatgaagagaactcacttgtttattgtggggatttattttctgtcctcttgcagggcagaagaggggcttaatttccccacatatgatgggaaggaccgagtggtaagtctttccgagaagaacttcaagcaggttttaaagaaatatgacttgctttgcctctactaccatgagccggtgtcttcagataaggtcacgcaaaaacagttccaactgaaagaaatcgtgcttgagcttgtggcccaggtccttgaacataaagctataggctttgtgatggtggatgccaagaaagaagccaagcttgccaagaaactgggttttgatgaagaaggaagcctgtatattcttaagggtgatcgcacaatagagtttgatggcgagtttgcagctgatgtcttggtggagttcctcttggatctaattgaagacccagtggagatcatcagcagcaaactggaagtccaagccttcgaacgcattgaagactacatcaaactcattggctttttcaagagtgaggactcagaatactacaaggcttttgaagaagcagctgaacacttccagccttacatcaaattctttgccacctttgacaaaggggttgcaaagaaattatctttgaagatgaatgaggttgacttctatgagccatttatggatgagcccattgccatccccaacaaaccttacacagaagaggagctggtggagtttgtgaaggaacaccaaagacccactctacgtcgcctgcgcccagaagaaatgtttgaaacatgggaagatgatttgaatgggatccacattgtggcctttgcagagaagagtgatccagatggctacgaattcctggagatcctgaaacaggttgcccgggacaatactgacaaccccgatctgagcatcctgtggatcgacccggacgactttcctctgctcgttgcctactgggagaagactttcaagattgacctattcaggccacagattggggtggtgaatgtcacagatgctgacagtgtctggatggagattccagatgatgacgatcttccaactgctgaggagctggaggactggattgaggatgtgctttctggaaagataaacactgaagatgatgatgaagatgatgatgatgatgataattctgatgaagaggataatgatgacagtgatgatgatgatgatgaatagcccaactccaaacaattctgatgaaaacaaaatcacagcacccactaccatacagacagcacaaggtggcagcaagcaattctgccccacacccagccagctcctttcccttttccatcatctcttttcccactccctttgcgtcaggagcagcatcattcagcaaatgccttttcaaatgcagcaatcccacttagcagggacaggagaaaaattattcccatgttgactgtcttgactgtcacggaacagatcttgttctttgctggaccatcaagggtcatggcagtgcctgaacatggcagtctagggtgaacaatcccctaacacaagtttacttgtctttgattatgacagtaacaaaattgacagctttctaactcacaggcatagagtgaccttttaatcagagcccagggaagacacatgattaatgatttagctccctccatacctcgaacatcagttgggatccctcctctagccaagatgatccttcttagagaaggctcagccttggaagcaaacttataaatcatattctcatggctttgttaaacttatttcaagtgatggtcattcatatcactatgaacttggatattcaagcctttggatggctatggagaggccttgaaatgtgtacaggtgtcaccatcatttctagtatattaggaaactgggatgggaggttgatttgctctctaaacttccctctagttggcaagtctcacatattcatcagcaggagtggagggtgggggaaaactagaaagatgaaaacttttacatttttctgatgggttcatgtctctgattgggtcagctggcttcctagcctaagctgggatctgaataccccttctctgtagctgctagtgagccttcccatttagattaaagattgcttatccagcagtcaattaactctccagttatcagtactcccacaattggccagggcaacaataattggagttcatactgatgccctgaggcactgaaaaaaaaaaaaatcccaaagtgccttctgagctgtctaaaagttacattgtgcttggtagatttagtgttaagtgtgcagtataattttctaatttattttctcaatcttttagcacgtgtaagacactgtgcaaattttttgaaaatagagcaatactttttgtggaatactagctaactaattctgtcattaaactcatattttgaaaatattcagacaatgttataaaaaaaaaaaaaaaaaaaaaaaaaaaaa

SEQ ID NO: 26402 - DNA, 2421 bp, Homo Sapiens
gaacgctacgcccacctggcggaaagcaccacggaaacgcatccttctgtggccactgttaggtctgccattttacacttttctgatctcctccttcccttctgtgagctatgtctcaggggtcagtgacattcagagatgtggccatagacttctcccaggaggagtggaaatggcttcagcctgctcaaagagatttgtacagatgtgtaatgttggagaactatggccatctggtctcactgggtctttccatttctaagccagatgtggtttccttattggagcaagggaaagaaccctggctggggaaaagggaagtgaaaagagatcagttttcaggtaactgaagtggtgaaaaactacagaggagaggactactgtaattcccagccttgttcctttatagtttcagagtcaagtggtgagatcaaagacttttcaccaaaaaatgtcatttatgatgactcatcccagtatttgatcatggaaagaattctaagtcaaggccctgtgtattccagttttaaaggaggctggaaatgcaaggatcatactgagatgctgcaagaaaatcagggatgtattaggaaagtaacagtctctcatcaagaagccctggctcaacatatgaatatcagtactgtggagaggccctatggatgccatgaatgtggaaaaacttttggtcgacgcttttccctggtgttacaccagaggactcatactggagagaaaccatatgcatgtaaggaatgtggcaaaacctttagccagatttcaaaccttgtgaaacaccaaatgatacatactggaaagaaaccccatgagtgtaaggactgtaataaaacattcagttacctttcatttcttattgaacaccagagaacgcacactggggagaaaccttatgaatgtactgagtgtggaaaggcctttagccgtgcctccaacctcactcgacatcaaagaattcacataggaaagaaacaatatatatgtaggaaatgtggtaaagcatttagcagtggctcagaactcattcgccaccagattacacatactggagagaaaccttatgaatgcattgaatgtgggaaggcatttcgccgtttctcacaccttactcgacatcagagcatccatacaaccaaaaccccgtatgaatgtaatgaatgtaggaaagctttccgttgtcactcattccttattaaacatcagagaattcatgctggagaaaagctctatgaatgtgatgaatgtggtaaagttttcacttggcatgcatcccttattcaacatacgaagagtcacactggagagaaaccctatgcgtgtgctgaatgtgataaagccttcagccggagcttttccctcattctacatcagagaactcatactggagagaaaccctatgtatgtaaggtatgcaacaaatccttcagctggagctcaaaccttgctaaacatcagaggacacacactcttgacaacccctatgaatatgaaaattcatttaattaccactcattccttactgaacaccagtgaatttacactgcaaagaaaaactatgaatgtatggaattttttaaaaagaagtataatgccttacttcagagaactcttggaaagaagccttatgtgaaagtgatgactgtgaagtaatatggcccacactttattcaccaccctggagaaaaaaaaacccaggaatatgtggaaaagccattaataaccactcttttatttttttgcaataacaaggtgaaatcaatattgttgagaagattcttccatctggtaatgttgagaagacttcatttggtaggagtcccttactttacgtgtgtaaattcctaccaggaaagaatacatatccaatagattggagaaagccagagattagccctcattccgcatctgtcaaccaggacagaaagcatggacaagggatgagctttacaaagatgatgcactttggagatcagaaaattcatatttaagcaaagtgatacaaacacagtgatttgggaatgccttcatttacaatgcaatacttacattttaatactcttgtaggagaaaaagcaactgtataaatgaatgtagagtgactttctgcaatatttcaaacctatatcagagaattacactgtgggaaaactaccattgtaataagtgtagcaaaatctccttagatatctgaaaagtcatactggatggaatctgtaggaaacggttctattttgagggaagggggattcctttttgttttttaagtgaattcagaaaatgttataaataaatcttttggtttattataaaaaaaaaaaaaaaaaaaaaaaaaaaaaaaaaaaaaaaaaaaaaaaaaaaaaaaaaaaaaaaaaccaaaaaaaaaaaaaaaaaaaaaaaaaaaaa

SEQ ID NO: 26403 - DNA, 1872 bp, Homo Sapiens
cgcggccccgcgcgccggatcggcgtgcgtgcggctggagccttaagcgtttcccccgcccggcttcatccctgctggcggcccagcgtcgttctcctcctgcgcgaggcggccaaggcctgctggcccggagccgcgcctccacccgcgcgaggtatcgtccttggagaagatggaagcggagaggcggccggcgccgggctcgccctccgagggcctgtttgcggacgggcacctgatcttgtggacgctgtgctcggtcctgctgccggtgttcatcaccttctggtgtagcctccagcggtcgcgccggcagctgcaccgcagggacatcttccgcaagagcaagcacgggtggcgcgacacggacctgttcagccagcccacctactgctgcgtgtgcgcgcagcacattctgcagggcgccttctgcgactgctgcgggctccgcgtggacgagggctgcctcaggaaggccgacaagcgcttccagtgcaaggagattatgctcaagaatgacaccaaggtcctggacgccatgccccaccactggatccggggcaacgtgcccctgtgcagttactgtatggtttgcaagcagcagtgtggctgtcaacccaagctttgcgattacaggtatggtcttcgtggacactcactgtcccagaatgcgccgtgggaatcaggatttcatagagtggtgtagaggcctgctttaatctctgctgatgacctaaactcattttgaggaagcaagctaataaataaacatccctgagtttgtgcaagcgtggcagctttgcagtagtcatttgctgagacgatgcatccagcctccactcctcagccagcctgcccttttgggtaataaaacttggctcctaacgttaatacagaggtttctaagtggtgcctgcttcatggccactgtatattttagcttttgttcctatcgattatctccttattttaaataaggaaaaatgaaatatggacaaattaacttttcccttcagccgcaaaactgatgggtcacaggttttgtactatgaatgtgcagtgaaaacaagtgtcattccaaggcagcacttttatgtcttttgctaatatagctgttggtaccatagcgaaatatactcaaaaagaacactgaaaggaatattccttttgacgcttggtctttcaggacatgtagaatcttagataagtgaccttgattaagccaagaatattttaatgtcttttatatacacactggacaacacatttttgtccttaaatattgtttgaaaataggtgaagatgtcctttgctgatgttggaaattggtaaaggagaatgctgctttgcaaatgatctattctaactcagttcacagttgagaaaattaaagcccgttaggtccactctggtaaaataggactgacctccaggatttccagctctggactaacacttagcctcctttgagccttaagtctggacatcttcattgtaatgggttttatttctgacaagtagaaaggcgcataaacatgcttaagaaatgaaataggcagtaaataggaagctgctttttaatttttgtaatttttttttgcagaaattctttcattagcatgaacgctattataatgtcaatacctgtttttaagtcttattttaaataattttacacattatcaaagaggcttaagaataaatgttcaaaataatgtattctagacaactacaaagttttgtaaccatgcatttttatttggtatctttaaaaattaaatgctgtccttctggcatcagtgagagccaagttagcagggactttaaataaatttcataatgaaaaaaaaaaaaaaaaaaaaaaaaaaaaaa

SEQ ID NO: 26404 - DNA, 988 bp, Homo Sapiens
ggaacctctgcgagatttagaggaaagaaccagttttcaggcggattgcctcagatcacactatctccacttgcccagccctgtggaagattagcggccatgtattccaatgtgataggaactgtaacctctggaaaaaggaaggtttatcttttgtccttgctgctcattggcttctgggactgcgtgacctgtcacgggagccctgtggacatctgcacagccaagccgcgggacattcccatgaatcccatgtgcatttaccgctccccggagaagaaggcaactgaggatgagggctcagaacagaagatcccggaggccaccaaccggcgtgtctgggaactgtccaaggccaattcccgctttgctaccactttctatcagcacctggcagattccaagaatgacaatgataacattttcctgtcacccctgagtatctccacggcttttgctatgaccaagctgggtgcctgtaatgacaccctccagcaactgatggaggtatttaagtttgacaccatatctgagaaaacatctgatcagatccacttcttctttgccaaactgaactgccgactctatcgaaaagccaacaaatcctccaagttagtatcagccaatcgcctttttggagacaaatcccttaccttcaatgacctctatgtctcagatgcattccataaggcatttcttgaggtaaatgaagaaggcagtgaagcagctgcaagtaccgctgttgtgattgctggccgttcgctaaaccccaacagggtgactttcaaggccaacaggcctttcctggtttttataagagaagttcctctgaacactattatcttcatgggcagagtagccaacccttgtgttaagtaaaatgttcttattctttgcacctcttcctatttttggtttgtgaacagaagtaaaaataaatacaaactacttccatcgcaaaaaaaaaaaaaaaaaaaaaaaaaaaaaa

SEQ ID NO: 26405 - DNA, 1908 bp, Homo Sapiens
aaagaaacccgagacgttccgaagtcaacgcaagcaaaggggagtgcgggtcggggaggaatattcttttggaaacgtaatattggccttggggctctccagccctttgggacttccaatgggatcttagaagcagccgaagcagcgtgagggcggcagcccagggccagccacgatttgaacgctctgccttgcagctcttctggaccgaggagcccaaagccctaccctcaccattcaccaggtcctgtgggaagagcagcgtggaggtgggctgaggttagaaggtgcagagcgtggaagaagattgtgagctgagtattggacatctgttcttgaatagtccctgggcctgccataggaaaggaagttctccagggttacagttcttatccgcgtgaatacacatggctctgttacgaaaaattaatcaggtgctgctgttccttctgatcgtgaccctctgtgtgattctgtataagaaagttcataaggggactgtgcccaagaatgacgcagatgatgaatccgagactcctgaagaactggaagaagagattcctgtggtgatttgtgctgcagcagggaggatgggtgccactatggctgccatcaatagcatctacagcaacactgacgccaacatcttgttctatgtagtgggactccggaatactctgactcgaatacgaaaatggattgaacattccaaactgagagaaataaactttaaaatcgtggaattcaacccgatggtcctcaaagggaagatcagaccagactcatcgaggcctgaattgctccagcctctgaactttgttcgattttatctccctctacttatccaccaacacgagaaagtcatctatttggacgatgatgtaattgtacaaggtgatatccaagaactgtatgacaccaccttggccctgggccacgcggcggctttctcagatgactgcgatttgccctctgctcaggacataaacagactcgtgggacttcagaacacatatatgggctatctggactaccggaagaaggccatcaaggaccttggcatcagccccagcacctgctctttcaatcctggtgtgattgttgccaacatgacagaatggaagcaccagcgcatcaccaagcaattggagaaatggatgcaaaagaatgtggaggaaaacctctatagcagctccctgggaggaggggtggccacctccccaatgctgattgtgtttcatgggaaatattccacaattaaccccctgtggcacataaggcacctgggctggaatccagatgccagatattcggagcattttctgcaggaagctaaattactccactggaatggaagacataaaccttgggacttccctagtgttcacaacgacttatgggaaagctggtttgttcctgaccctgcagggatatttaaactcaatcaccatagctgatataactctacccttaaaatattccctgtatagaaatgtggaattgtccctttgtagccaactataacattgttctttatgaatattacctttgatacatatgatccacaatataaaaaccaaaaactactgtgtgcaaattataccttggaccatataggcattgattaacttctttaagtacatgtgataactatggaaatcaagattatgtgactgaaaaacataaaggaagagacccatctagataacagcaatcaacctgcttaattctgaatgacaattatatccacaaatttttaaaacttctacatgtatttttcacatgaagatctccttaacaggttgccaaccttttcttttataaaactattacatttaaaatatggacgtctgaaaaataaaatattcatcatttttacaaaaaaaaaaaaaaaaaaaaaaaaaaaaa

SEQ ID NO: 26406 - DNA, 1419 bp, Homo Sapiens
gaaaagagactgagcgagggaaagagagaggcaaagtggaaaggaccataaactggcaaagcccgctctgcgctcgctgtggatgaaagccccgtgttggtgaagcctctcctcgcgagcagcgcgcacccctccagagcaccccgcggacccgcacctcggcgtggccaccatggtcaggagagttcagccggatcggaaacagttgccactggtcctactgagattgctctgccttcttcccacaggactgcctgttcgcagcgtggattttaaccgaggcacggacaacatcaccgtgaggcagggggacacagccatcctcaggtagggctttcgggcaacttttctgctgcgcgcgtctacacgtgtgtgtgtgtgtgtgtgtgtgtttgtgtgtgtgtgtgtgtgtgtctgatctccttgaactccagctcctgatgctgcaggcttgtggtgtgtgtgtgtgtggtgtgtgtgtgtgtgtccctgttttactgactggttggcattatagctaacaaaattcaagggaattctggtccctgtcaagcagcagtggtgttggttaaatgttgttcggttcttaggaccttgtttctcttatcaaggaagcctaacttcacccatggcattagtgacttctgggcagtattctcactattgtaattgctgtggcattgcacttgagagttttgttgggggtccttaattctgaaagaaaggttgttggattatggctctcagagagtagtacacagtactgcattctccttgctcctcccgtgtctgtgtgtgtgtgtgtgtgtgtttttcatgccaacacacacacacacatacacacacacacacacatatcaaggttgtgtgtgagggtttctgatagaagactttctgtaaggatcttctaattgacatggagggcaataaatcaatcttagaactttggttggttactgagcctttcctggaatgtggatataaatcaacacaagatatgaagagcagaaagaaaaggaatttgccaaattgctgatatttaagagtaggagtgttaaacacagaggttgggagagaattaacctggcataaaatggatatttcaaattgattattgacttcaaagtctttttttctgtgcagctctggcaaactctaaaataatttgagattgaaatttggaaagaagagtcccaagtccttgggagtttgacccctatcaggtactgtgagctagagagactcaaatgagacctagtcatatttttatttctaaaatgctccaaggttattttttgtgcttctcttttctcttcctcctctccaccaactgtacccaccccttgttcttttttctagctttccttgaatttctggcagatgctaaaaaaaaaaaaaaaaaaaaaaaaaaaaaaaaaa

SEQ ID NO: 26407 - DNA, 2009 bp, Homo Sapiens
gaggcagccatctttctcttgccgcgtgctggtgttggaggaccctccctgcttcagatttaccaacagcatgaatcaagaaaagttagccaaacttcaggctcaggtccggatagggggcaagggtacagctcgcagaaagaagaaggtggtacatagaacagccacagctgatgacaaaaagcttcagagttctctaaaaaaactggctgtgaataatatagctggtattgaagaggtgaacatgattaaagatgatgggacagttattcatttcaacaatcccaaagtccaagcttccctttctgctaatacctttgcaattactggtcatgcagaagccaaaccaatcacagaaatgcttcctggaatattaagtcagcttggtgctgacagtttaacaagccttaggaagttagctgaacagttcccacggcaagtcttggacagtaaagcaccaaaaccagaagacattgatgaggaagatgatgatgttccagatcttgtagaaaattttgatgaggcatcaaagaatgaagctaactaaaagtttggtttttggaagctggcatggactagatttaacaaatcagctatgtggttccaaagttttacagacatggagaacatcacctgttactagttcagtaatataaatattttgtatattaataatgctgtttgttcagcatttttcggtcatttgattttgcattttgcacttcctcccaggatatttttttggtcaaaatatgaagtattggtgcagtttgagggtgttttggtttttgattcctggtttttttgttttttgtttggggtatttttggtgtatgtatgtttatgtatgtgtgtgggtatgtgtgtataccgtggagagcaaattggaaaacagttctatttatcctcctccctccccagtagaaataaaaaaaatctttacatttgttacttttcttttccccccgtaagacacagaattaatggaaagtgagtatcttggatttcaaatctgaagagatttttaccattagtggtttgattttaatttgcttggttaactatcatatttttcatacacttctctggatttaaaatatcttgaggtattttgccactggcttcatgctggagtaatgggtaacatatctttggtatggttgccttagattaacttacctagtcagacccagaagaacttcttttactagcttgcttcctaaatgccttttttcctctccttttggtctccaaatggcctggtcagcttttggtaatattcttcctcatcttccacctagcttgagaaggatgttctccatatagagtttagcgagtgcctaatccctccttttgtaagtttttgttccctcagcttgaggaacaacttcatcttcaactttttatttctccctgatgttacagtttggtagatttcaaactggaatagctagcatgtgcttgctaaataattttatgccagccttatcctgtatcctagctgttcttaacagcaggtacaaaaatgcctgttttcagcaaggttgaaattgggaatgtccttttgaatcagaagaaaataggccatagactcatctcccagcacaaatgggcattctatgaaatggtactggccctaggaggatttcctcaaccactctcctactcttggccttgaacctacctctgggttggatcttactattgtagctgctcactataccctcctgcatgcttagaataatgctttgaggggagcactggtaaaacacagtatttatttttttacctcctttaagaggacttggaggtaagttgcattcattcactcaagtttccctcttgctgtctaatagaagcttactttttgctatatcagcatttgttacagccaatatttaaggacaaaatttagaaaatatatcatttcctagcccctcccctgatgaaatatacatatactcagttccttgttattcgaaaaaaaaaaaaaaaaaaaaaaaaaaaaa

SEQ ID NO: 26408 - DNA, 1979 bp, Homo Sapiens
aggggcaaggcgagtgtgtgtccttatcctagcaattggggcgcgggcctgtgagccagttggagttgcggcggcgggaacgattgggctgagcagaggacgacatgttgcttttcgtggagcaggtagcatctaaaggaactggtttaaatcctaatgccaaagtatggcaagaaattgctcctggaaatactgatgccaccccagtaactcatggaactgaaagctcttggcatgaaatagcagctacatcaggtgctcatcctgagggtaatgcagagctctcagaagatatatgtaaagaatatgaagtaatgtattcttcatcttgtgaaaccacaagaaatactacaggcattgaagaatcaactgatgggatgattttaggaccagaagatctgagttaccaaatatatgatgtttccggagaaagcaattcagcagtttctacagaagacctaaaagaatgtctgaagaaacaattagaattctgtttttcacgagaaaatttgtcaaaggatctttacttgatatctcaaatggatagtgatcagttcatcccaatttggacagttgccaacatggaagaaataaaaaagttgactacagaccctgatctaattcttgaagtgttaagatcttctcccatggtacaagttgatgagaagggtgagaaagtgagaccaagtcataagcgttgtattgtaattcttagagagattcctgaaacaacaccaatagaggaagtgaaaggtttgttcaaaagtgaaaactgccccaaagtgataagctgtgagtttgcacacaatagcaactggtatatcactttccagtcagacacagatgcacaacaggcttttatacttaagagaagaagttaaaacatttcagggcaagccaattatggctccctttcccaatggtagttttgtgaatggctttaattcgccaggatcttataaaacaaatgctgctgctatgaatatgggtcgaccattccaaaaaaatcggagaactctcttcagaggtcgaagacgacgagaagatgacaggatctcaagacctcatccttcaacagctgaatcaaaggctccaacaccaaagtttgacttattagcctcaaattttccacctttacctggaagttcatcaagaatgccaggtgaactcgttttggagaataggatgtctgatgttgttaaaggtgtctacaaagaaaaggataatgaagagttgacaattagttgcccagtgcctgcagatgagcagacagaatgcacttctgcccagcaactcaatatgagtaccagttctccatgtgctgctgagcttactgcattaagcacaactcagcaagaaaaggatctaatagaagattcctctgttcagaaggatggtctcaatcagacaactataccagtttctcctccaagtactacaaagccatcgagggcaagtactgcttcaccatgtaataataacataaatgcagctacagctgtggctctacaggaaccccgaaagttaagttatgctgaagtgtgccagaagccccctaaagagccatcttcagttcttgtgcagccactacgggaacttcgctccaatgtggtgtctcccaccaaaaatgaagacaatggagctcctgagaactccgttgagaaaccacatgagaagccagaagcaagggctagtaaggattattctggcttccgaggcaatataatccccaggggagcagcaggaaaaatcagggaacagagacgccagtttagccatagggctatacctcagggagtgactcgacgtaatggcaaagagcaatatgtgccacccagatcaccaaagtaaaaaacaacaaaactattcaaaaacttcactctcttcccattaaacttgaactgtggctatattgaactgttttggaggggagggggtagccaggaaggaaaaaaaaaaaaaaaaaaaaaaaaaaaaaa

SEQ ID NO: 26409 - DNA, 2195 bp, Homo Sapiens
agtggagacaggctctcaccatgttgaccaggctggtctcgaactcccgacctcaagtgatccgccggcctcggcctcccaaagtgctgggattacaggcgtgaaccaccactcctggcccttctgttacttttccactgctgttgagatagaagtcactgttgggatccaacctttttgtttgtataaactgacaacaagaaggtattccaagctgcacaatgaggcccaggagacccttggtcttcatgtctttggtgtgtgcactcttgaacacatgccaggcacacagggtgcatgacgacaagcctaatattgtcctaatcatggttgatgacctgggtattggagatctgggctgctacggcaatgacaccatgaggacgcctcacatcgaccgccttgccagggaaggcgtgcgactgactcagcacatctctgccgcctccctctgcagcccaagccggtccgcgttcttgacgggaagataccccatccgatcaggtatggtttctagtggtaatagacgtgtcatccaaaatcttgcagtccccgcaggcctccctcttaatgagacaacacttgcagccttgctaaagaagcaaggatacagcacggggcttataggcaaatggcaccaaggcttgaactgcgactcccgaagtgaccagtgccaccatccatataattatgggtttgactactactatggcatgccgttcactctcgttgacagctgctggccggacccctctcgtaacacggaattagcctttgagagtcagctctggctctgtgtgcagctagttgccattgccatcctcaccctaacctttgggaagctgagcggctgggtctctgttccctggctcctgatcttctccatgattctgtttattttcctcttgggctatgcttggttctccagccacacgtcccctttatactgggactgcctcctcatgcgggggcacgagatcacggagcagcccatgaaggctgaacgagctggatccattatggtgaaggaagcgatttcctttttagaaaggcacagtaaggaaactttccttctctttttctcctttcttcacgtgcacacacctctccccaccacggacgatttcactggcaccagcaagcatggcttgtatggggataatgtggaagagatggactccatggtgggcaagattcttgatgctatcgatgattttggcctaaggaacaacacccttgtctactttacatcagatcacggagggcatttggaagctaggcgagggcatgcccaacttggtggatggaatggaatatacaaaggtggaaaaggcatggggggctgggaaggtggaatccgcgtcccaggaattgtccgatggcctggaaaggtaccagctggacggttgattaaggaacctacaagtttaatggatattttaccaactgtcgcatcagtgtcaggaggaagtctccctcaggacagggtcattgacggccgagacctcatgcccttgctgcagggcaacgtcaggcactcggagcatgaatttcttttccactactgtggctcctacctgcacgccgtgcggtggatccccaaggacgacagtgggtcagtttggaaggctcactatgtgaccccggtattccagccaccagcttctggtggctgctatgtcacctcattatgcagatgtttcggagaacaggttacctaccacaacccccctctgctcttcgatctctccagggacccctcagagtccacacccctgacacctgccacagagcccctctatgattttgtgattaaaaaggtggccaacgccctgaaggaacaccaggaaaccatcgtgcctgtgacctaccaactctcagaactgaatcagggcaggacgtggctgaagccttgctgtggggtgttcccattttgtctgtgtgacaaggaagaggaagtctctcagcctcggggtcctaacgagaagagataattacaatcaggctaccagaggaagcctttggtcctaacgagaagagataattacaatcaggctaccaaaggaagcactaactttggtgctttcaagttggcaaggagtgcatttaatagtcaataaattcatctaccattccagattattaaaggcccactggttgttcctaaaaaaaaaaaaaaaaaaaaaaaaaaaaaa

SEQ ID NO: 26410 - DNA, 2408 bp, Homo Sapiens
gccggaacaaaaatgcctcagtttggaggtcgcgctcactgcgacggcaggctttgagtgtagcacttggtagttcttcctctgctctgcttcccttcggaggaaaatttcaggctgaaggtttagcgggtgccgcctctaaagagagcaatcactacacttatggctgggattttgcgcttagtagttcaatggcccccaggcagactacagaccgtgacaaaaggtgtggagtctcttatttgtacagattggattcgtcacaaattcaccagatcaagaattccagaaaaagtgtttcaggcctcacctgaagatcatgaaaaatacggtggggatccacagaaccctcataaactgcatattgttaccagaataaaaagtacaagaagacgtccatattgggaaaaagatataataaagatgcttggattagaaaaagcacatacccctcaagttcacaagaatatcccttcagtgaatgcaaaattgaaagtagttaagcatttgataagaatcaagcccttgaagttgccacaaggacttccagcagaggagaacatgtctaacacgtgcctcaaaagcactggggagttagtagtgcagtggcatctgaaacctgtggagcagaaagcacatgagtcctaatgccccagcagcttccgattggaaaatgcaaattgtttttatttaaagatggtgagaaagtgttttcattaaaatatgttttcaaaaccattttcaggccgggcacggtggctcacctgtaatcccagcactttgggaggccaaggcgggcagatcacctgaggtcaagagttcgagaccagcctgaccaacatggagaaacccccatctctactgaaaatacagaattagccaggcatggtggcacatgcctgtaacccggctactcgggaggctgaggcaggagaatcacttgaacccgggaggcagaggttgcagtgagctgagatggtgccactgtactccagcctgggtgataggatgagactccatctcaggggaaaaaaaaaaaatttttttttcactgactaaacctgctgcagctctcttttactacagacttggagattttagtttaatttggtttaattctctgtcctttccctttcactgtttcactccaaaacatgtaagaatggcaatgtttgaacatctgcgtttgggtctactgccaccttagcaagcctcattaaccattttataaaaattgcgttagtattgttgttgttgtttttgagacagggtcttgctctgtcacccaagctggagtgcagtggcatgatttcagttcactgcagcctcgacctcccgggctcgggtgatcctcccacctcagcctccagagtagctgggactacaggcagtgtgccaccacatccagctaattttttaaagttttttcatagagacagggactcactatgttgtccaggctggtctcaaactcctgggttcaagccatcctcccacctcagcctcccaaaatgctgggattacaggcatgagccactgtacccagccaaaattgttttcttttttaagtgaattcaacaatttctgtgagtggctctttgcatgaacactgtgcaaggtgttggagaaatccaaagctgaccaaaacatggtccccaccttttggagcttacagtctgttctggggaacagagattcagccaaagtcaagaaacactggatgccagctagattatctgttctgtgctttggtgtctataagtacatatgtggatatgggttcattttatccctaaacttagtaccaaaccagcatttaatatctaattataaatctaatttggcctaaactttattattgcacactgcctgaacaaaacctatttgtctctatgtaaattttttcctcatggaacaagggtgtgaaatgaaaatattttaggatttattcaaaaacagactattctgttttcagcttcagaattgttctttgaatcctaaggaacctctgtcaacagttgaggttgctgttgaaaagaaagaagaaggaggcggaaatctctcagggagaattatttcctttcttttctattttagatacctggaggggtggggagaagtaagaattgtaagggaggttcagtagtggggaattctgtgacagctgattgaagatgatgatgaagaacctctgcattctagttaccctttgcttcccttcacctcttgtaaaatttggcttggcaacaatgacattgtcatgcttattgtcccaatatccatcctgtcgtagatcttaatgtttttgatcgttgcgttaaagtggaagtgccacccacagtgaaaccagatcccattaataaataagcttaaaggcgaaaaaaaaaaaaaaaaaaaaaaaaaaaaaa

SEQ ID NO: 26411 - DNA, 1306 bp, Homo Sapiens
tgtaaagcaaatgggaacgttgaggcatgtagaggttttgaagcagagtgtcggtccttccttccatacgcctgaaacgcataatccggggctttttgagagcaaaaacatagtcagaaatgtgccctgagggagaatgtactattttggcacacatatgtatatatgtatatataatttttaaattttttttgagagggggtttcactcttgtcgcccaggctggagcgcaatggcgcgatctcggctcactgcaacctccacctcccgggttcaagcgattctcttgcctcagcctcccgagtagctgggattacaggcgcccgccgccacgcccggctaatttttgtagagacagggtttcaccatgttggccaggctggtcttgaactcctgacctcaggtgatgcaccctccttggcctcccaaagtgctgagattacaggcatgagccactgtgcccggcctaaaaaaatattttaaatgagaaataacacaagtaatagtcattctttgttaggcagaagcatatgctgttatgctggccattttcattcacacttgccaggaaacactcacattttgtttctgtatatggaggcagccaagagtattatgttaatgtttaggaagagaatttcctcgtgattttattgctgatttctgaaataattcagtgtaactaattttgactgtatttgcacatctctccaattccaaaagctggcataattttctgtttggttaggaagtaggaattttatgaggacttttattgtaaactgtgtcaagggaaaaatcatcttatactaaacgtctttattgccaaactagaataccttcacaatctgaactttctctagatgggcacagatcatgaataactcagaaaccattagcatattgtgtgcttaattaaggctggaaagtgctgaggctttttgcaggcgcagttagcaggcgaactggtcagcagggtttctggggaacgtagatttgcgtgacaggggccctgtgttgctaaggaattactgcaggcactgagaaaagtctcagcgtcagacactcctccacctcccgggtcctgcttccctccctctcccctttccaggcaactcacagtttaggggtgtggttgtgtgtgttcaagctcttgggttttacatataaatgcctgagacttttctgcagggtttaaaaactaacatcttgtcttacagctcttttaggatttgtcttttagaatctccagtcctcacaggaaaaccccccaactaaaaaaaaaaaaaaaaaaaaaaaaaaaaaa

SEQ ID NO: 26412 - DNA, 1023 bp, Homo Sapiens
aactcccggagaatccgaattcgtggtcctcagaattggtttagggttgtttcgcggttcttcccgtattctgcctccgaggcccagtggggctggctgtgggccccctgtgctgtttgaggcgtgaaactcacctcaggaaatgtatctgatccattagcgtggattcatattatttggtgatggagaatcttcagctgtgttaagtgttaccgtcagtttcagagatggcttctttgcaaaggaaagggctgcaggcaaggattctcacctctgaagaagaggagaaactgaaaagagaccaaactttggtgtctgattttaaacagcagaaattggaacaagaggctcagaaaaattgggatcttttttacaaaagaaatagcactaatttcttcaaagacagacactggaccaccagagagtttgaggagctaagatcatgtagagagtttgaagatcaaaagttaacaatgcttgaagctggctgtggggttggaaactgtttattcccacttttagaagaagatccgaatatctttgcctatgcctgtgatttttctccaagagccattgaatatgttaagcaaaatcctttatatgatacagaaagatgcaaggtattccagtgtgatctgactaaagatgatcttctggatcatgtaccgccagagtctgtggatgttgttatgttgatatttgtgctgtcagctgttcatcctgataagatgcaccttgtcttacaaaacatttacaaggtattaaaaccaggcaaaagtgtcttgtttcgtgactacggactgtatgatcatgccatgcttaggtttaaagccagcagcaaacttggagaaaacttttatgttagacaagatgggaccagatcatatttttttactgatgacttcctggctcagctctttatggacacaggttatgaagaagtggtaaacgagtatgtgtttcgagagacggtgaataaaaaagaaggcctgtgaaaaaaaaaaaaaaaaaaaaaaaaaaaaa

SEQ ID NO: 26413 - DNA, 1381 bp, Homo Sapiens
cgcaaagtttgcagtcatggcagcagctaaaaatgtgcctacaggccgcatgccaccatgccatctccctgttaccattaccttcttctttctctccttcctgctgatgcagcagtgcctccttggatacaggatcattcctgctctaggctttttcctgagaggggcagctctcctgggattctggcgaatcaaatgcttcatctcaacagatttgtttatattcgccccttttccatgtggtgggaggaaaaactttttcactactttctttaattcaatgcttggggactgctgaattagaataacagaagacaggttaacaggataaaagttacacagtttttattaatatttacatacgtgggagttcacagaagagaaaatcaaaaaagtagtctcagggtcttgtatcattcaaacataggacagggcggattgggcttcaaggggtcataaattgtggggaagtgactaggaatatgggggaaactaatggaagataggattattttagtaagggttgctaattcagtctcatccaggtgccgactcctcatcttgtgataacttgtgataagagttgctctcctttctgtggtccggaagtacggagcaccctcacaagggaaatttctgccctgcttttaagcagataagggagggcagagaactcttctgcatctgttcattctcacttgccttcagctcaaaataatccttgtgtttgagcagcatattttagggtagtatatcctcatctccttcatccacaaaagatttaaggtggtttttacagatgcaattaagtaagctaaacttaatgatatatgagaaatatgaaactaatgaaatgatggctcaaaaagtcagaagcagccattgatgttagtggttggagatggactgtgaatatgtcttgagctttccagcagtcagcacagagatgcacatagatatacctcatttgattccttgggtctatcatataaaataaaccatttgctcagaagaattatctgttcctggaaatgggatagcttctagagattctcttgaagataatactttgtaatgtaatgcgtatatttttaacaatgaagtaaatgcagtacaacagagtaaataaaatattaataatacatatttactgagtatattctgtatgccagaaacacattaggtatgctggatatgtaatagtgaaccagacagacatgacctgtgtcttcaaggagcttataaatataatggggagagacagataataaacaagaagtaagcgagcaaaaatatcagatacttatgaaatccagtaagtggcaggtaggaaatcaccagggagtaatacaaaaaaaaaaaaaaaaaaaaaaaaaaaaaa

SEQ ID NO: 26414 - DNA, 1686 bp, Homo Sapiens
agtgtctcctgatacccggatgtgaggcgatccgctggcgctagtctgaccctccgccaggcaaaaggaagaagctgaaacctatcaacactcttcaaaatgcaatggaatgtaccacggactgtatctcgactggcacgcaggacatgcttggaaccacataatgctggtctctttggacactgtcaaaatgtaaagggacctttacttttatacaatgctgaatccaaagtggttttggtacaaggccctcaaaaacaatggttgcatttatctgctgcccagtgtgttgcaaaggaaaggaggccattggatgctcatccaccccaaccaggagtccttcgccataagcaagggaagcaacatgtttcattcaggagggttttttcatccagtgccacagctcagggaactccggaaaaaaaggaagagcctgatcctttgcaagacaaatctattagtctttatcaacgattcaagaagacatttagacagtatggaaaagttctgattccagtgcatctaataacttctggtgtttggtttggaacattttattatgcagccttgaaaggagtgaatgtcgttccttttctagaactcattgggttacctgacagtgtggtaagcatcctgaaaaactcccagagtggaaatgccctcacagcatatgccttgtttaagattgcaacacctgctcggtataccgtgactttgggaggaacatctgtcactgtgaagtatctgcgcagtcatggctacatgtccacgccgccacccgtcaaggagtatctgcaggacaggatggaagagacaaaggagcttatcacagagaaaatggaagaaacaaaagatagactcactgaaaagttacaagaaaccaaagaaaaagtttcctttaagaaaaaagtggaataaggtgccttatatagcagtatagaaaattcctgcactttaaccctttggaaactatgggcaaagatacatgtgtctgattatttttttggttagttgccgaaatatactagttctctgagggttaaagaagtaaaatacctttttaaagttaaatatcactagaaaaatcagtgttattacaagggaagaaatgaacccagtttaagaatttgccatcagtagcagtattaagcagtggttaatgtcttagaagtcagacttctttttcaaggtcttcagaaccacacttgatttctgttttgttgcagctgtaattgacacacactaggcagctgactccttgaatatccagtgtgacccataaaatagtctgttaataccggatcttaatttttatgttattcattaagattttaactatattcagtacgtaatttggagacaaactagcatcatcaaaactgcctgtaaataaggtgtttagtctttctataaaaacagaatagagcagttacctaccagttaaaatatcttatatgaagaaaatagaataaagatccagtcatatatgtaaataagatgtactgattgtacgtaaatgaaaaatggaccctttaaaaattatttttacctgaagcttgtcataatttttttaaagcaaatatatatatggtgatggtacttttcaaagtgtgtattagtggtgatcacctcaaacataaacctctgttgtgaaccaaaaaaaaaaaaaaaaaaaaaaaaaaaaaa

SEQ ID NO: 26415 - DNA, 1250 bp, Homo Sapiens
cctgttcgcagctgcggcagtgagtatgtgtgtgacggacccccgccgcccgcggctcgggacccctgcctaccctccttcttgcccgccgggctgtggaactagcgcgtgccccctcgccggcctcgacgtctcccgtccgcccctcactcgtggcagggcgcagctcctggagaatctgagcatggggaataaagtcaggaaggatcgcaagtgaggattatattaatatgataattagcacgcttcaaggttactgactttttatgatgtttggtggctatgagactatagaagcatacgaagatgatctttatcgagatgagtcatctagtgaactgagtgttgatagtgaggtggaatttcaactctatagccaaattcattatgcccaagatcttgatgatgtcatcagggaggaagagcatgaagaaaagaactctgggaattcggaatctccgagtagtaaaccaaatcagaagaagctaatcgtcctttcagatagtgaggtcatccagctgtcagatgggtcagaggtcatcactttgtctgatgaagacagtatttatagatgtaaaggaaagaatgttagagttcaagcacaagaaaatgcccatggtctttcttcttctcttcaatctaatgagctggttgataagaaatgcaagagtgatattgagaagcctaaatctgaagagagatcaggtgtaatccgagaggtcatgattatagaggtcagttcaagtgaagaggaagagagcaccatttcagaaggtgataatgtggaaagctggatgctactgggatgtgaagtagatgataaagatgatgatatccttctcaaccttgtgggatgtgaaaactctgttactgaaggccaagaataaaatctttatgaactaacaagatgaattaaagatggaatgattcatttctatggttaggttttaattaatacatgggggatgattttggcactttttcaaagaatttgtttctgtgtatctgaatttgcacctactctgtaacctaactgcgatttataaaatgaaacaatctcttctaatttggcacttgataggtgctttgactttaaaaggcaagtgtatttttctgtcacgaatatcttgtcattctaaaataagtaaaaacaatggattgatgaaacttcttcactgcttttttctttgtgtataacaaatacattgatattttactgccaaaaaaaaaaaaaaaaaaaaaaaaaaaaa

SEQ ID NO: 26416 - DNA, 1102 bp, Homo Sapiens
gcgctaagatggcgactcccatgcatcggctaatagcccggagacaagcattcgacacagagttgcagcctgtcaagaccttttggatcctgattcagccatccatcgttattagtgaagcaaataagcaacatgtaagatgtcagaaatgcttggaatttggacattggacttatgaatgcacaggaaaaagaaaatacctacataggccctcaaggacagcagaactaaagaaagctttaaaagaaaaagaaaacagattattattgcaacaaagcattggagaaaccaatgtagaaagaaaggccaagaaaaaaaggtctaagagtgtaaccagttccagtagcagtagcagtgacagttctgccagtgattcttcatcagagagtgaagaaacatctacctcttcctcctcagaggacagtgacactgatgaaagctcctctagttcctcatcctcagcctcctccacaacctcttcctcctcctctgattcagactcagattccagctcttccagtagcagtagcaccagcacagatagcagctctgacgatgaaccaccaaagaagaagaaaaagaaatagagttgctccattcatattggactgatggactgaaaacattgatgtgattcttgaaagggaatttagaatatgttaaggccaagtaggttaactggtgaacatttctagaattcaaaagtttctaaatgttttacattgtaagagcatagagaatattaataatggcttatagagagagacttttatttgaagggtgaatcttgttttttttatctttaaaatatatctctagaacttaaagctgaaatctgcaaatctgtttgtgtgatgaaactatcttttctctctgtgaaataaatgccatactttgttatatatgttagtggtatgtatcagacatattttcaggatggtgcgtcaggatatctggcagtggatttctaatgcttttggctgtatgttatgtaagatttaatatgttgttactgtaagcttaggagttttcctactattaataaatgtgctctatttttacatttatgtccaaaaaaaaaaaaaaaaaaaaaaaaaaaaaa

SEQ ID NO: 26417 - DNA, 2101 bp, Homo Sapiens
gctcggctccgtcggctaccgcgggcgggcgcaggcgacgggcacggcgggcgagcgggcggtatggcggcggcggggcccgcggcggggccgacggggcccgagcccatgccgagctacgcgcagctagtgcagcgcggctggggcagcgcgctggcggcggcgcggggctgcacggactgcggctgggggctggcgcgtcgcggcctggctgagcacgcgcacctggcgccgcccgagctgctgctgctggcgctcggcgcgctgggctggaccgcgctgcgctccgcggccactgcgcgcctctttcggcccctggcgaagcggtgctgcctccagcccagagatgccgccaagatgcccgagagcgcttggaagtttctcttctacctgtgcagctggagctacagtgcctacctgctgtttggcaccgactaccccttcttccatgacccaccatctgtcttctacgactggacgccgggcatggcagtgccacgggacattgcagccgcctacctgctccagggaagcttctatggccactccatctacgctacgctatacatggacacctggcgcaaggactcggtggtcatgctgctccaccacgtggtcactctcatcctcatcgtctcctcctacgcattccggtaccacaatgtgggcatccttgtgctcttcctgcacgatatcagtgacgtgcagcttgagttcaccaagctcaacatttacttcaagtcccgcggcggctcctaccatcggctgcatgccttggcagcagacttgggctgcctcagcttcggcttcagctggttctggttccgcctctactggttcccgctcaaggtcctgtatgccaccagtcactgcagtctgcgcacggtgcctgacatccccttctacttcttcttcaatgcgctcctgctgctgctcacccttatgaacctctactggttcctgtacatcgtggcgtttgcagccaaggtgttgacaggccaggtgcacgagctgaaggacctgcgggagtatgacacagccgaggcccagagcctgaagcccagcaaagccgagtgagtgtggaggggcccgcaccccgcgttccctcctttagtgtcacccgtccaagcgtgttcgtgggcaggcccccaagacccagcagcagatgaggccgacgcggatgctgccccccaagcctactccaaaacagggactgcaataaaggcgtggacgatgtggccagtaccctgaaggacaggacagtgaggaaggggagggagaggctggggaggggcaggcagggcgacaggcagggtctcagcggtagggacactgagggccaggcctagtggctggcgtggcgggagtggcgagccagggccctgtgggtggtgaggagtagttgctggccagcctggatgacgacctctgacccatgtcgccactggagctggtggcagtggggctggggaggaaggaacgccaagggccgcagagagaacccaggctccatctgggccgagacatcctggcctctgagtctgacaggggagcccactgcccggccaaacaggagctggggctgggagctcagactcagtccagcccaggtgggagtcctggggaaggagatagcccacgagcctcaccagccctgggtgacagccagatggtgtccgaagccccaggcctggggcaggcagggggtgtctgggccagggatgaacggaggccaaactgggtaacaagcagagtcgggtgtgcagtgtctcataggcaacgtgaggagtgtttgagcaggagccggggcaggaggttgtggaaggccctggaaggtgccgaccagccaggccctctgatttggccggtgggggccatcggtgacgtgggaacgatggtttcagggaagcagtggctcagagctccgtgacgttttttggaacgggaggtgcgagatgcagacatttaacacatccggggctgtagccaggcagaggagcgtcagaccccccaccctgtttggaagggagaacccatcagattcgccttgggtgtagatgaaacagaaataaaagaatcaaagacaaaaaaaaaaaaaaaa

SEQ ID NO: 26418 - DNA, 1535 bp, Homo Sapiens
gaaaaaacgcgctcttagaccatggcgacccaggcgaagcgtccacgggtggcggggcccgtggacggcggcgacctggatcctgtggcctgcttcctgagctggtgccggcgggtggggctggagctgagtcccaaggtgagcgagcgagccggcgggcggaggacccgcggcggggcgcgggctgccctgaccagccctcctgctcaggtggcggtcagccggcagggcacggtggccggctacggcatggtggcccgggagagcgtgcaggccggagagttgctgttcgtggtgccgcgggccgcgctcctgtcgcagcacacctgctccatcggcggcctgctggagcgagagcgagttgcgctgcagagccagtcgggctgggtgccactgctgctggcgctgctccacgagctgcaggccccggcctcacgctggaggccctactttgcgctctggcccgagctgggccgcttggagcacccgatgttctggccagaggaggagcgccggtgcctgctccagggcacaggcgtacctgaggccgtggagaaggatttggccaacatcagcagcgagtaccagtccatcgtgctgcccttcatggaagcccaccccgatctcttcagcctcggggttcgctccctagaactctaccaccagctggtggcccttgtgatggcctatagctttcaggaaccactggaggaagaagaggatgaaaaggagcccaactcccccgtgatggtgcctgctgcagacatactaaaccacttagccaatcacaacgccaatctagaatactctgcgaattgtcttcggatggtagccactcagcccattcctaaaggccatgagattttcaacacttatgggcaaatggctaactggcaactgattcatatgtacggttttgttgaaccatatcctgacaacacagatgacacagctgacattcagatggtgacagttcgtgaggcagcattacagggaacaaaaactgaagctgaaaggcacctagtgtacgagcgctgggatttcctatgcaaactggagatggtaggggaagagggagcctttgtgatagggagggaggaggtgctgactgaagaggagctgaccaccacactaaaggtactgtgcatgcctgctgaggagttcagagagcttaaagaccaggatggagggggagatgataaaagggaagagggcagcctgacgatcacaaatattcccaagctcaaagcatcgtggagacagctgcttcaaaacagtgttctactgactttgcagacctatgccacagacttaaaaactgaccaaggtttactcagtaataaggaagtctatgcgaaactcagctggagggaacagcaagccttacaggttcgctatggtcagaagatgatcttacatcagttgttggaactgacaagttagcagtttccctgttccctgaaggaacggcaataagaactttattctaagctaatactcattgatgtttgaaaaagaggaaaaaaaaaaaaaaa

SEQ ID NO: 26419 - DNA, 1990 bp, Homo Sapiens
aggcggtgctgcagggctggtccgggaggtgacgaccggcttcggagagtctatcatggcagctcggactggtcatacggccttgagaagggtagtctcgggatgccgtccgaagtcggcgacagcggccggggcgcaggcgcccgtgcggaatggcagatatttagcttcctgtggtatactgatgagcagaactcttccactacatacctcaattttgcctaaggagatatgtgcacgaactttcttcaaaatcactgcaccattaataaacaaaaggaaagaatattcagagagaagaattttaggatattcaatgcaggaaatgtatgatgtagtatcgggagtggaggattacaagcattttgttccttggtgcaaaaaatcagatgttatatcaaagagatctggatattgtaaaacaagattagaaattggatttccacctgtgttggagcgatatacatcagtagtaaccttggtgaaacctcatttagtaaaggcatcttgtactgatgggagacttttcaatcatttggagactatttggcgttttagcccaggtcttcctggctacccaagaacttgtaccttggatttttcaatttcttttgaatttcgatcacttctacattcccagcttgccacactcttttttgatgaagttgtgaagcagatggtagctgcctttgaaagaagagcatgtaagctgtatggtccagaaacaaatatacctcgggagttaatgcttcatgaagtccatcacacataaaggcaaaaaagaactggtgccacctgcttctgactttagtttgttcacttttaggaagtattttcatgacatgttttcagaagccagaaagcatttgttaaacgcagctttggttataaacctgcaccattgaaaatttgcacatagaatatagactcacttgtacatagaattatttcttcaagtataattcaaaataatatggacattatcatgttctgcattacaataatgggatgtcatcaccattgctagaatactggcatgattcttctgagcagaagttgaaactgtaaatttaaaccttttaattatcaccttacctgaaagaggttagttaagatattcacacagtatgtattatattaaccatatcacacttaagttattaaattcagactatttgtaacttattgttatagggcctgccgtatggcttaggatatttgagtaatcatatatttaaagtaaaaactttgggctgggcacagtggctcacacctgtaatcccagcacttggggaagctgaggtgggcagatcagttgaggtcaggagttctagaccagcctggtcaacatggcgaaaccccatctctactaaaaatacaaaaattagctgggcgtggtggcacacacctgtaatcccagttacttgggaggctgaggcacaagaatcgcttgaacccgggaggcggaggttgcagttagccaagatcgccctgctgcactccagcctgggcaacagagggagactctgtctccaaaaacaaaaacaaaaactgttagtgaaggttccctgggacttttgatattttaaaaattgttcttatgactagtagataaattcattgccataatgaggctagctcccagataaacagtgtattttcttctttttttttttttttttggtgagtggtccagagctttaagctacttttccagtagtttgccactttctccgaggtagtttggctgctctttcagtaatgctaattgtgtgtcaaattttgtctacaacagtaggcaacagatgaagataagttggttgaatgtctccagcactatgcatccctattttctatttattgtgtacactcactttcagtaatgtgtttcaaactggtattttttaaaaaacaaatcaatgtaaggactgaagttgaagtagcaatgtaataaagttaatttgtttattttttgaaaaaaaaaaaaaaa

SEQ ID NO: 26420 - DNA, 2907 bp, Homo Sapiens
ggttggcgtctgcacctgcgaccaccgtgagcagtcatggcgtactccacagtgcagagagtcgctctggcttctgggcttgtcctggctctgtcgctgctgctgcccaaggccttcctgtcccgcgggaagcggcaggagccgccgccgacacctgaaggaaaattgggccgatttccacctatgatgcatcatcaccaggcacactcagatggccagactcctggggctcgtttccagaggtctcaccttgccgaggcatttgcaaaggccaaaggatcaggtggaggtgctggaggaggaggtagtggaagaggtctgatggggcagattattccgatctacggttttgggatttttttatatatactgtacattctatttaagctctcaaaggggaaaacaactgcagaggatgggaaatgctatactgccatgcctggaaacacccacaggaaaattaccagttttgagcttgctcaactgcaagaaaaactgaaggagacagaagcagccatggaaaaattattcaacagagtgggacctaatggtgagagagcacagactgtgacttctgaccaagagaaacggttgctacatcagctccgagaaatcaccagggtcatgaaagaaggaaaattcattgacagattttctccagagaaagaagctgaggaggccccttacatggaggactgggaaggttaccctgaagagacttacccaatttatgacctttcagactgtatcaagcgtaggcaagaaacaatcttggtggattaccctgacccaaaagaactttctgctgaagaaatagctgaaagaatgggaatgatagaagaggaagaatcagatcatttgggttgggaaagtctgcccactgaccccagagcccaggaagataattctgttacctcgtgtgatccaaagccagaaacatgttcctgctgttttcatgaagacgaggatcctgctgtcttggcagagaatgctggattcagtgcagatagctaccctgagcaagaggaaaccaccaaagaagagtggtcccaagactttaaagatgaagggttgggcatcagcacagataaagcatatacaggcagcatgctgaggaagcgtaacccccagggtttagagtgaaaacagccagtctgaagtatccattactcaagtcccaaggtgacctctctctcctcagatttccttcttggccctgtgccctgcactttcttcactgtgttcaagtgtcatagctatcaggccactatcatggatatcatgtatccttcctggtgctcacacacctgtcaccttgtaaaacacggacattagtgtgaacacaggacagcttcgctctttctcttcctgcctttcctctatcagagaagttgatccattaagtaattatgtttggtctattgtaattacagatgggaccactcaggggcaaaggtctgactcttcctggtaggtgtaacagatagttcacctgtgaacgaacatcagcttacagatgatgaggacttaaggttgcaagaatgaagatttcagactccaagatcccttattctttgggccttgagcaggttagtagtcccctggtgagaagagaacattttgtttgtggggctaatgggcccagaggagggtaagactctgctgtctaagctgaagcctcttcctcgcagcgagggtcttcctaggaacattgatgctacctcagacatcctcttttctccagagtagggaagactcccactgatctgagaatgagcccagaggcttgtttggggactgttttactctgatactacctggatatctagcttcctttacccctgttctgcttaacagaactgccaagcccagaagtacctttgcactcctggttttcagtggacagaggaagctttagatagagactttagaccctgccctgcagagtcaagacttgaggccattgaagctgcaggaagccctgcccagggatggtcctgccatgaggaggctgcaacgctataagagggctcaagattgtgaattctgctcctgccatgaggagctcagaaggccaggaagccagcaataggggagagaatctgtgtgcttatggacagtccttacctaaagctgtttctgaatgttgcaccctttgagaaatttcttctcagaaccataaattgaaacaaatgaggactgatcttgtatacaaagtgccaactcaagagggaagttggagtatgtctgttgcagagaaccgatatagcagtgcccaggggtagagaccatgtgttccatactcggatatttgggtctttttgagagagctggggaaagtagcagcaactagattaagactgggaggattttgaccaaactaaaggccttttctccttactgcatctgacgtgtgtcttcttgagacaagatagcacccatgaattacatcatgaggtatgtgtgaattcagtttacatgtaagacctgagagttcgaagagggcacattcccaaagacattcccagtcatgaaatgtagaagactggaaaattaagacattatgtaaaggtagatatggcttttagagttacattatgcttggcatgaataaggtgccaggaaaacagtttaaaattatacatcagcatacagactgctgttagaaggtatgggatcatattaagataatctgtcagctactactaggcatttattgttaattgagttacagaaagtcattcaagactgagtttatagaaagcatattgcatctatctctgtgtagaacatttgattcacattgtgaagaatgcagtttaaaatatactgaatgcaatctagatgtattgtacacgaaaggtgaaaaataacaggtgctctttactgtttaaaaaaaaaaaaaaa

SEQ ID NO: 26421 - DNA, 2369 bp, Homo Sapiens
aggaagaagccagtgcaccagaccggcaaagagaagcgggagccgccgcggcagcgcggccgtggggtccgccgccgccgcatcggagcgggaggaggagcagcggggagggcgaggccgccgggccgagagccgtcccgcctgctctcggtcttctgccttcgcctccgcgcggtgcgtcggacccagggtctgtcacctgggcgccaggggccgccgccggggagccggagcgggcaggaccctccctccgccgactgcggcccgagagcgcccccgcggggtggagcggcagccgccttctgcgggcggctgagtgtccgtctcgcgcccggagcgggcgaccgccgtcagcccggaggaggaggaggaggaggaggagggggcggccatggggctgctgtcccagggctcgccgctgagctgggaggaaaccaagcgccatgccgaccacgtgcggcggcacgggatcctccagttcctgcacatctaccacgccgtcaaggaccggcacaaggacgttctcaagtggggcgatgaggtggaatacatgttggtatcttttgatcatgaaaataaaaaagtccggttggtcctgtctggggagaaagttcttgaaactctgcaagagaagggggaaaggacaaacccaaaccatcctaccctttggagaccagagtatgggagttacatgattgaagggacaccaggacagccctacggaggaacaatgtccgagttcaatacagttgaggccaacatgcgaaaacgccggaaggaggctacttctatattagaagaaaatcaggctctttgcacaataacttcatttcccagattaggctgtcctgggttcacactgcccgaggtcaaacccaacccagtggaaggaggagcttccaagtccctcttctttccagatgaagcaataaacaagcaccctcgcttcagtaccttaacaagaaatatccgacataggagaggagaaaaggttgtcatcaatgtaccaatatttaaggacaagaatacaccatctccatttatagaaacatttactgaggatgatgaagcttcaagggcttctaagccggatcatatttacatggatgccatgggatttggaatgggcaattgctgtctccaggtatagtttcaaatatacagagaggcaaagtgttccatccatttctgttttttaacttctttatatatgcatgtttcctgttccaaaaatcacattttaatgaggttgaaatggtagctggtatgcctttctgaaaaacatgaagttatattagtaaattcattggaagctgtctatgactaatagttctacagactctgttgttcaccacaaaggtatatacggtatatatacctttataactgtaatttcagttaacttaaaatgcaatatattctgtcattgtttcccttctctttttatatgcctagtttttactgccatctcgtgacaggctagtgaggtggtttaaatattgttcaaaactctgaaaatgagctctgatggaagtattccaatgattttgtgatccaagggatttgtgcaaagctgtctagcggtacaaaaagaataaatatttagcagcttgtgtttgtcttgcccctgagtaaagtatacaggagcctgtctctgtttacccatttaaaaattttcctggatctgtttaaatgatggtgcccctggcagtgagtgtgtccaagctcacttaggaccagagtggaagagcatggaacccatcaggtggccacacaaaagcctgcagttggcttttggctctgtcactactcaggtttttgggcaactccctttacttcttttggctcagatttttcatcagttgaaagaagggctgatattaagtccccttctaggtctgactctaagctaatatttattttattgccttaactaacagaagtaaaagagagaggctgcttgttatttaatgtccaaggaaattttatccagttgtgattacttcagctgattcaaaacagcgtccttagaggcacagggccgtgcagagcctggacccatgtaagacccctctgagccgccagcctgactgctctcagtgcaaagacccagaacccagccttccttcacctgaaacagctgcagcgtgcacacacacttcttgtgcatatatctctggtctatttattttcaaaactaagtataatccaaattgaatgctggaatcagatttttccattctgaatgtgtttaaataacatggccaaggataatttctttctgttttcttgacatttataggtagtataagatatgtgacttccaaataaacataaaccatcacacttcacgaaaaaaaaaaaaaaaa

SEQ ID NO: 26422 - DNA, 2381 bp, Homo Sapiens
aagcggcctcggggagcagcccgaggctgcgcgtgggctccgctcctccggcgaggtgtgggcgaggggagcggcgctccgagcgcacccaggcgcccgacgccgcccgggtctgcgccgctgctagtgccaggcgggcgacgagcggcggtgatgaagacaaaattgaacatctacaacatgcagttcctgctttttgttttcttggtgtgggaccctgccaggttggtgctggctaacatccaagaagatgaggctaaaaataacattaccatctttacgagaattcttgacagacttctggatggttacgataatcggcttagaccaggactgggagacagtattactgaagtcttcactaacatctacgtgaccagttttggccctgtctcagatacagatatggaatatacaattgatgttttctttcgacaaaaatggaaagatgaacgtttaaaatttaaaggtcctatgaatatccttcgactaaacaatttaatggctagcaaaatctggactccagataccttttttcacaatgggaaaaaatcagcagctcataatatgacaatgccaaataagttgcttcgaattcaggatgatgggactctgctgtataccatgaggcttacagttcaagctgaatgcccaatgcacttggaggatttcccaatggatgctcattcatgtcctctgaaatttggcagctatgcatatacaacttcagaggtcacttatatttggacttacaatgcatctgattcagtacaggttgctcctgatggctctaggttaaatcaatatgacctgctgggccaatcaatcggaaaggagacaattaaatccagtacaggtgaatatactgtaatgacagctcatttccacctgaaaagaaaaattgggtattttgtgattcaaacctatctgccttgcatcatgactgtcattctctcccaagtttcattctggcttaacagagaatctgtgcctgcaagaactgtgtttggagtaacaactgtcctaacaatgacaactctaagcatcagtgctcggaattctctccccaaagtggcttatgcaactgccatggactggtttattgctgtttgttatgcatttgtgttctctgccctaattgaatttgcaactgttaattacttcaccaaaagaggatgggcttgggatgggaagagtgtagtaaatgacaaggtaagtgagagcttccgtgttatcattattaagaaaataccctaatgaattccgcttgtaacagatatgtttctaaaatcctgacattaaagacatccatatatatatgaatttgaatcatatcaatttcttttaaagtgttcttgcctgaaatcctttaggagttcttgtagtactaatacttccattaaaaccactccgtagcatctgttgagctgtatgtgtcaggcactgtgctaagtgttttacatatgctctctcacataatctttatagcatccttatgactagactgccttcttattcttatttttactcatgaagaatctgaagcagtaaagttattttcttgcccaagcttacacaacttgttagtaagtatacttgaactccgatctacctgtctgactgttaagttcatggttttaacaccacactgcattattataaagagattagaaaaagaaaatgggcattaattttacttattatagaattccaggctctatcaatgaattgaatcctcttcacctgttccagtctctgctgatttattgtaaaagcccggatagcatttttttaaaatctttcccatgttgcatggaataaatatgtcggtgctggaatgcttaggaattttaaattgttcatatggtctaaaagggaaaagttatttgtttttaagattaacttcttttgagattattgctgtccatatttaggtttcaagtactgaatctaatgggagatttgtgcattgatataacagctgtttcctttcatactctgtagattatgtatctgcctaaagggaggctttgaatgtatcataatcatctatattcttaataatggtaaaaagttgtattcagaggatatctttaacattgtatcaacctaaatgcttcttttattaaatttggattaacatacttgcagatttgatttctttttcagttatttgaatatattttttcatttctatgaccatgttacagtttaaatatacaagcagtaaatgttatagtttaaaagtcttggtctttttccttaattttgtaagccatagaaattttaataagactgattatttatttcattttataagttgtgttttccctactaacggagccaacaaataaatattaaaaggaaaaaaaaaaaaaaaa

SEQ ID NO: 26423 - DNA, 2494 bp, Homo Sapiens
ggcgggcgcagcggctccctataagcagaggagctgtccgtgtgctgaaacggcccgagaagctcgcccggagaacggggaggaatatgctgtggagctcctctgccatataaacaaaaagaggaaatctttcaaacatggctgaagcaaagacccactggcttggagcagccctgtctcttatccctttaattttcctcatctctggggctgaagcagcttcatttcagagaaaccagctgcttcagaaagaaccagacctcaggttggaaaatgtccaaaagtttcccagtcctgaaatgatcagggctttggagtacatagaaaacctccgacaacaagctcataaggaagaaagcagcccagattataatccctaccaaggtgtctctgtcccccttcagcaaaaagaaaatggcgatgaaagccacttgcccgagagggattcactgagtgaagaagactggatgagaataatactcgaagctttgagacaggctgaaaatgagcctcagtctgcaccaaaagaaaataagccctatgccttgaattcagaaaagaactttccaatggacatgagtgatgattatgagacacagcagtggccagaaagaaagcttaagcacatgcaattccctcctatgtatgaagagaattccagggataacccctttaaacgcacaaatgaaatagtggaggaacaatatactcctcaaagccttgctacattggaatctgtcttccaagagctggggaaactgacaggaccaaacaaccagaaacgtgagaggatggatgaggagcaaaaactttatacggatgatgaagatgatatctacaaggctaataacattgcctatgaagatgtggtcgggggagaagactggaacccagtagaggagaaaatagagagtcaaacccaggaagaggtgagagacagcaaagagaatatagaaaaaaatgaacaaatcaatgatgagatgaaacgctcagggcagcttggcatccaggaagaaggtcttcggaaagagagtaaagaccaactctcagatgatgtctccaaagtaattgcctatttgaaaaggttagtaaatgctgcaggaagtgggaggttacagaatgggcaaaatggggaaagggccaccaggctttttgagaaacctcttgattctcagtctatttatcagctgattgaaatctcaaggaatttacagatacccccagaagacttaattgagatgctcaaaactggggagaagccgaatggatcagtggaaccggagcgggagcttgaccttcctgttgacctagatgacatctcagaggctgacttagaccatccagacctgttccaaaataggatgctctccaagagtggctaccctaaaacacctggtggtgctgggactgaggccctaccagacgggctcagtgttgaggatattttaaatcttttagggatggagagtgcagcaaatcagaaaacgtcgtattttcccaatccatataaccaggagaaagttctgccaaggctcccttatggtgctggaagatctagatcgaaccagcttcccaaagctgcctggattccacatgttgaaaacagacagatggcatatgaaaacctgaacgacaaggatcaagaattaggtgagtacttggccaggatgctagttaaataccctgagatcattaattcaaaccaagtgaagcgagttcctggtcaaggctcatctgaaggtgacctgcaggaagaggaacaaattgagcaggccatcaaagagcatttgaatcaaggcagctctcaggagactgacaagctggccccggtgagcaaaaggttccctgtggggcccccgaagaatgatgataccccaaataggcagtactgggatgaagatctgttaatgaaagtgctggaatacctcaaccaagaaaaggcagaaaagggaagggagcatattgctaagagagcaatggaaaatatgtaagctgctttcattaattaccctactttcattcctcccaccccaagcaaatcccaacatttctcttcagtgtgttgacttctatcctgttaacactgtaatatctttaaatgatgtacaggcagatgaaaccaggtcactggggagtctgcttcatttcctctgagctgttatcttgtgtatggatatgtgtaaatgttatgactccttgataaaaaatttattatgtccattattcaagaaagatatctatgactgtgtttaatagtatatctaatggctgtggcattgttgatgctcacatatgataaaaaagtgtcctataattctattgaaagtttttaatatttattgaattattttgttactgtctgtagtgttttgtggagtactggaccaaaaaaataaagcattataaatatatagttttatttataaggccttttctattgtgtgttttactgttgattaataaatgttatttctggacaaaaaaaaaaaaaaaa

SEQ ID NO: 26424 - DNA, 2147 bp, Homo Sapiens
tgagagctccaggcgcacatccgcagtcagccacgtcgcgcgcgcctccaggagcaaggatggagaggctggtgatcaggatgcccttctgtcatctgtctacctacagcctggtttgggtcatggcagcagtggtgctgtgcacagcacaagtgcaagtggtgacccaggatgaaagagagcagctgtacacacctgcttccttaaaatgctctctgcaaaatgcccaggaagccctcattgtgacatggcagaaaaagaaagctgtaagcccagaaaacatggtcaccttcagcgagaaccatggggtggtgatccagcctgcctataaggacaagataaacattacccagctgggactccaaaactcaaccatcaccttctggaatatcaccctggaggatgaagggtgttacatgtgtctcttcaatacctttggttttgggaagatctcaggaacggcctgcctcaccgtctatgtacagcccatagtatcccttcactacaaattctctgaagaccacctaaatatcacttgctctgccactgcccgcccagcccccatggtcttctggaaggtccctcggtcagggattgaaaatagtacagtgactctgtctcacccaaatgggaccacgtctgttaccagcatcctccatatcaaagaccctaagaatcaggtggggaaggaggtgatctgccaggtgctgcacctggggactgtgaccgactttaagcaaaccgtcaacaaaggctattggttttcagttccgctattgctaagcattgtttccctggtaattcttctcgtcctaatctcaatcttactgtactggaaacgtcaccggaatcaggaccgagagccctaaataagtcacacagcaccctgaaagtgattccctggtctacttgaatttgacacaagagaaaagcaggaggaaaaggggccattctccaaaggacctgaaagagcaaaagaggtgggagcgaaagccttaaggatcccacgactttttactgccatctgagctactcagtgtttgaatcccaagaggaagtcagtttacctctcaggtctgttgtaggacttgattttgtaaagcaatgccatgttatgtggttgaaagggcactggacttagttagtatcaggagcactgagctcacagactgacttgggctcctactggtggggacctctgttagtcactttacctcatccaaagtataaaggaattggaccaaataatttaccacatagctctaaaacttaatttaaaatgtaattccagaaaaaaaaagggaataagcaaagggggaagaattgaaagagagagagaagaaagaatacagagagcttaccttttgcctttctgttgatgttacatctcttcttcctatgttcttaggtctatgagtctgtttccccatcatttggtatctagtccagttcctgcttactgctttgctaatagctggccttgctagaatccttggtttcactgctgttcttcatgtgcttctatgagatttactccaacacaaataggactgaatttattgtgaagtaacattggcaatcttaacttattcatttaacttatttttatagctagataaatattgttagtcttagacaatagctcacattttttgagaagcatgccctccctgtccatttgtcttataacatgacccagccctattttacgtcattctaaattcagcctcatataatgaaaatacattatgaaaacagatgtttaggagatttcctgtatagcagtcagccaattcatatgctttgtctctgctggcttctttttccatgcgttaacttttcccaatagcagaggaggcaaatatgagcatacaatccctttgttctaaagatattgttccagctagtggaatgatgttgaatctttaataaccataattagttgctttttcagtatcttctgctttgtctgtgtctatccagtggcctaggaattaaagtgtaagttgttttcgctgttaaattggatatttatatatatatatatagcaagattttcatgtgttatttaattctgtattgtttcttatatttgtagtaaaatattgaacaattaaaaaaaaaaaaaaaagaaaaaaaaaaaaaaa

SEQ ID NO: 26425 - DNA, 2920 bp, Homo Sapiens
gcggcgcgggcccgcagccgggcgccctgctcagccagcgccagcggccgcagcacccagccgcgccggcgaggacatgggcagccgcggcgcgcccaccccccgcgccgatgtgaattattaaaaagaaaatggcccaacggagcactgtatttccttctcgtgtcaccaaggaaaggtataatatatggaaaatatgcatctaaggcgagtgagaaccatgccccgacacagccagtccctgacaatggcaccatactcatctgtaagcctcgtggagcagctggaagacaggatcctctgccatgagaaaaccaccgccgccctcgtagagcacgcctttcggattaaagatgacattgtcaacagtttgcagaaaatgcaaaacaaagggggaggtgaccgcttggccaggcttttcttggaggagcatatcagaaacataactgccatagtgaagcaacttaatcgggatatcgaggtactccaggagcagattcgtgctcgggacaacattagctatggaactaattctgccttaaagaccctggagatgcgccagctctccggtttgggagatcttcgaggaagagtggcaagatgtgatgccagcatagctagactttctgcagagcacaaaacgacctatgaggggctccagcacttgaacaaagaacagcaggctgccaaacttatcttggaaacgaaaatcaaagatgcagagggacagatttctcagcttttgaacagagtggacttgtcaatatcagagcagagcaccaaactgaagatgtctcacagagacagtaaccaccagcttcagcttttggacactaaatttaaaggtacagttgaggaactcagtaaccagatattatctgcacggagttggttgcaacaggaacaagaacggatagaaaaagagcttttacagaaaattgatcagctttccttgattgttaaggaaaacagtggagccagtgaaagggatatggagaagaagctcagccagatgtcagccaggcttgacaaaatagaagagggtcaaaagaagacttttgatggtcagagaacaaggcaagaagaggagaagatgcacgggcgaatcaccaagctggagttacagatgaaccagaacatcaaggaaatgaaagcagaagttaatgctgggtttacagccgtctatgaaagcataggatccatcaggcaagttctcgaggccaagatgaagctggacagggaccagctacagaagcaaatccagctgatgcagaagccagagacccccatgtgaagggagctgggacaaggtcctaaaagacagttttgccagtggggctaggagccggatacctctgtagccaggccatcgctgcattcaggattgttccatccatggcgtgcatgtgccaagaaatgtgtttttatgggtctaaatgtttaccttgagtcttgaaaatactcttttgttaaaagtatgaaatacagtttttaccagtttatttcacttctctaaattcaatggaaatcccccgccctggattttgaaaggcttttatcttcttcattttacgaatggaaagacgacaatttttcttcaatgcttgatgcactaatgaagactgtttactattttgaaaaatgtcatggggatttttttttaattaagaaactaatgaatcatcacaggaatgtgttgctcctcaccctaaattaagagaatgtcccagtagattagacttcaacctttgagtccaatttggattttattatcgttgtctatgcacttcttatattggttatcttcttgtaaatcttctgtcttttgtaaggggaaaggatttaacatttagaataaaccccaccatttatgtaatggaaatagtttaaaaattgctaactgccatgtggattgcaaattaaatggaaacttatttagataacgtaaggctcaatatctgcgttgaccacctagatattacaggttttaatatttaaaactatttttgaattatccacaacctgtatagtgatagccatatatttaataatggaatggtggttaacagtctatttactgcacaattaattgttcactaatcaaatagaatgtggtaatttttcagactttatgatctgtttccaaaattggcacaaagtgctagggtttatatacacttatcgtaactgtatttttgtgccttggttttatcatgtcaatgcactgtactctgtaaaagttttgcagacaaaatagaaagtatgataatccgtcagaagtatgatgtaaaactggaatcctctgtattttttaaatgttctaaaaattttatcgctgttaaggtattaatcattcagtattactaatggaatagaaattcatacttttgtatggacaacaattcaaattgatattgcatttatagcactgtaagaaactttcatcttgagcaactttgtagatgatgggtgttttattttcaatcgccatatttgatcagtcattgaaaattggccccggtgctgtttgttcatctctgtatgtaaaaactgacagtgagacacaacgttctgaactgtgagggtgtcccaggaaaaagaaaaacaggaatactttaacaattaaaaagaaaaaaatgttttttgtttgccgaggactcaggaaaataaaaagcattttctatttttaggacaaatcacaaatgaagtgtctaactggctattactgtttacccatataaaatatgctgctaaagtacatattttgctgtcaatggcttgacaattttttttttcaaatttggacatgagaggttatatagggactatattatccaacacatattttcttattttgccacaaatttccacttaacaaataaaaaaaggcgaatgctgttttgcaaaaaaaaaaaaaaaa

SEQ ID NO: 26426 - DNA, 2971 bp, Homo Sapiens
agcgacggcggtggcgtcccaagatggcgtcgtggctgccggagactctctttgaaactgtaggacaaggcccgccgcctagcaaagactattaccagttactggtcacccggtctcagaaaaattgagtttgcatagccgggcgcagtggcttacgcctgtaatcccagcactttgggaggccgagccaggtggatcacgacgtctggagttggagaccagcctgacaaacatggtaatctttagatggtggaagatctctctaaggagtgagtatcgatcaacaaaacctggagaagcaaaagaaacccatgaagacttcctagagaattcacatcttcaaggtcaaactgccttaatatttggtgcaagaatattagactatgtcatcaatttttgcaaaggtaaatttgacttccttgaacggctctcagacgatttgctcctgactatcatttcttatctggatcttgaagatattgccaggctttgtcaaacatcacacagatttgcaaagctgtgcatgtctgataaactgtgggaacagatagtccagtcgacctgcgacaccatcactcctgacgtgagggccctggcggaggacacaggctggagacagctgttcttcaccaacaagctccagctccagcggcagctccgcaagaggaaacaaaaatatggaaacctgagagaaaagcaaccttaggcacacattttcataccagcagggagctcaggcatggctgtgtttctcttcagtgtccaaatctcttctgtctccttttcttaagaactaagaggttttgttgatgcgtggagccatttgaaactcgtaggggatttgcacacaaatgcagcagagtctggctccccagtgccttgctagagtcaccgtcattctgaggtcaaatcatggcccgaggacaagggctgtaagacagggagccccataggccatcatcatccttatcccacacccattataaaagaggtttctattgtatataaacaaacaataaatgattattagcaggtttttattagacatctattttatctaggcattagaaagggtaatggggcttttgaattttttcctggcattgtgtcgtctgcgtccagccatgaagctggtggctgagtgtccccaccaggaactgtgaagggcacgtaccacgggaggcactcagggtgggtgcagctgccttcccaactttgttctgctaagtccatattcagggccctatccttgtgagcccaggatgccagggtccatccccgcatgtagacagcttccgacctggtgctggagcatgactggagaagtgcaggcatcctgcttgcggaccttgctcaaagtacaacttcccaggactacttcacattgttaaataaacctataaacatttcttttcttttcttttttttttttttttttttgtattttctttttagtagaggtggagtttcgccatgtaggccaggctggtcttgaactcctgacctcaagtgatctacctgctctggcttccaaagtgctgggattacaggcatgagccactatgtctggctaaaacctataaacatttcttagagaaatgctgttccccaaaggaatgtgaacagctaccacttttaacaaggatatttaagaaaacagactatgagttaactaagtaaaaatgtaaatatggtttgcatgctgttaacatggcagaggggtaaaaagaatacagtcctggggagaaaggtcacttcactgagaaggcttacttaaaaatgtttttctccctgcactttcatgattattaagtacccctagaaaatgaactcatagcagcaaataatctaatgactccttttaggttacagagcaaagtagctttctacttccacatcacattataatatagccttataatttcttctttcctgcaaccttcactttcctacctaggaaaactcacctccggtgccagagaaacttcccaggatgcactagggccctgtgaacaatacagaagttgtggactctggctctttgtcccacctaagtccttccagaagggctctacagcatggcttagtgacattaaaaaaaaaaactgaacccatgttaatatcaaacaagattttaatcttcattcacacacccttaaaacccagtcacggggctccccggtgccagtttgagaccgtcaacgtagccctctctgcttctcattgctggaggtacacacagtcaaaagttttccgtgactgtgaaatccagtgcaatctgcttcccagcagatgaggagcctgacgtggttatgtctggatttagtccaagaacagagcaaagctttaattgtcaagagacccaggcctcattctccacttaggagagtttgctagggcaggtacaggtaaaggtaaccagcaggcagctgagagcaagaaggcacgtgctctgcagagctctagctgccttggctctccctgagctcccagacttcactcatggcctaattttcaatgacagaacgtaggttttatcgtgaggatgcagacacaaccacaattacgtatgtcaacataacttcataaatatgtaactgtaacttattggtaacatcagtgcaagatgattaaagcttcatgtgtagtattttatcaacaaacagattctgaaagcttatggacatgcgcaatagttgattcagcttcaatcaataagaacataaatatggcaatttgaaaacactatgtatatacctactcacatatatattatacttacgatatatacttatatgtagtatataataatattacatataaaaatgttataaaaataaatgctaaagtaaataaaaaaagagccactaatatgttaactattgttaaataatagctaaaataatacagattattaaattattttaatacttaaaaaaaaaaaaaaaaaaaaataaaaaaaaaaaaaaaa

SEQ ID NO: 26427 - DNA, 2910 bp, Homo Sapiens
aggggaagtgatcgctcccggaggagcgcgagccgagcggccggcgcagcgtgagacagcacatcctgcccgcgccggccccgccaccttcgggagccgcctgcaccaacgctgccgccgcccaggagccgccgccggctcggggagcccagttccgccgctgccgagcgcgtccaggaaaccaacatgtctgacaaaagtgacttaaaagctgagctagagcgcaaaaagcagcgcttagcacagataagagaagagaagaaacggaaggaagaggagaggaaaaagaaagaggctgatatgcagcagaagaaagaacccgttcaggacgactctgatctggatcgcaaacgacgagagacagaggctttgctgcaaagcattggtatctcaccggagccgcctctagtgcagccgctgcattttttaacatgggatacctgttattttcattatttagtcccaacccctatgtctccctcctcgaaatcagtgagcactcccagtgaagctggaagccaagactcaggcgatctggggccattaacaagaagaagactgcataaactgggcgtgtcaaaggtcacccaagtggatttcctgccaagggaagtagtgtcctactcaaaggagacccagactcctcttgccacgcatcagtctgaagaggatgaggaagatgaggaaatggtggaatctaaagttggccaggactcagaactggaaaatcaggacaaaaaacaggaagtgaaggaagcccctccaagagagttgacagaggaagaaaaacagcagatccttcattcagaggaatttctcatcttttttgaccggacaatacgggtaattgaaagagccctggctgaagattccgacatcttttttgactacagcggccgagagttagaggaaaaagatggggatgttcaggctggagccaatctttctttcaatcgtcagttctatgatgaacattggtccaagcatcgagtggtcacttgtatggactggtccctccagtaccctgagctgatggtggcttcttacaacaacaatgaagatgctccccatgaaccagatggagtggccttggtttggaacatgaagtttaagaaaaccacaccagaatacgtcttccactgtcagtcctctgtgatgtcggtctgcttcgcccgtttccatcctaacttggtggttggtgggacttactcgggccagattgtcctctgggacaatcgcagtcatcgaaggactccagtgcagcggacacccttatcagctgctgcacacacgcatcccgtgtactgtgtaaatgttgttgggacccagaatgctcataacctcatcactgtctccactgatggcaaaatgtgttcctggagcctggacatgctctcaactccacaggagagcatggagctggtgtacaataagtccaagcctgtcgctgttaccggaatggctttcccaacgggagacgtcaataacttcgtggttggcagtgaggaaggtacagtctacacggcttgtcgtcatggaagcaaagcaggtattggtgaggtctttgaaggtcaccaagggccagtgacaggaattaactgccacatggcagtgggaccaatcgacttttctcacctgtttgtcacatcatcatttgactggactgtcaaactgtgtaccaccaagcacaacaagccgctctactcctttgaagacaatgcagactatgtgtacgatgtcatgtggtcccccgtgcatcctgcgctttttgcctgcgtggacgggatggggcgcttggacctctggaacctcaacaatgacaccgaggttccaacagcaagtgtggccattgagggggcatccgccctaaaccgtgttcgttgggcccaagctggcaaagaagttgctgttggggactcagaaggccgtatttgggtctatgacgttggagagcttgcagttccccacaatgatgaatggacccgatttgccaggacccttgtggaaattcgtgctaacagagctgatagcgaggaggaaggcactgttgagttatctgcctagtggaaatgagccacccccactgcagcccccacctttgtgtcctagagctcagcgtctgcagtcaagtctcttgtattcggtgtccattcagtatcagtattgctgtgacattttgggtgccatattgtgccagctttgctccaagtattctaaatgtgtcccatcatgctttccactgacccaaaattcaccacagcatttctatctttatatttctgtctcaaaaatgaagagaagggggttatgggttaagttgctgccttttaactactttgtagctgtatttaatagctggaaacctctggttaaatttgtgcttacatgcactcctggcatagtcctattaaatccatatgaagccagatatgattgggtgcagatgtggtgttcctcatattatggtacagggccaaagacttgagacgtggtgttttacatggtgactcacattatgaatggatttactagaagaacattgctgctccttatttattgtagtgtgctgcatggaacgtatttatttgaaagcattaaaataaatgatcctagagcatgtgcataatgagaggactgtattctctctgctgctgttgaggttatattaagttccacatagcaattacagtatgccagttccactgaagacatgaaatctttagaggtttcttgcagtgaacgaaatgaattttaatgcctattatttctgggtactttaacaatatttcaaatatcattgaccactaatacttctcactgaagctaacacagtctgacaaaagtctatggttcctaaatatgacatcagtgttgccaataaaatgtttcaaaccaaaaaaaaaaaaaaaa

SEQ ID NO: 26428 - DNA, 1834 bp, Homo Sapiens
gccgggatctcaaacagtcgggaagaagcaccgtggctgctattatctgctctccgcgcctgacccctcccaggactcgtgatgccaaggccgctgcgagcggctacgaagagtcggggttgagccccagctgagccgagggctcgcactcttctggtctcccaggcccaacccacctgaagaaatgagtggtggattggctccaagtaagagcacagtgtatgtatccaacttgcctttttccctgacaaacaatgacttgtaccggatattttccaagtatggcaaagttgtaaaggttaccatcatgaaagataaagataccaggaagagtaaaggggttgcatttattttatttttggataaagactctgcacaaaactgtaccagggcaataaacaacaaacagttatttggtagagtgataaaagcaagcattgctattgacaatggaagagcagctgagttcatccgaaggcgaaactactttgataaatctaagtgttatgaatgtggggaaagtggacacttaagttatgcctgtccgaaaaatatgctcggagaacgtgagcctcaaaagaagaaagaaaaaaagaaaaaaaagaaagctcctgaaccagaagaagaaattgaggaagtagaagaaagtgaagatgaaggggaggatcctgctcttgacagcctcagtcaggccatagcattccagcaagccaaaattgaagaagaacaaaaaaaatggaaacccagttcaggagtcccctcaacatcagatgattcaagacgcccaaggataaagaaaagcacatatttcagtgatgaggaagaacttagtgattaaaatcttgccccagcacagtaataaaaatcaagatttgttagtaacaatcttgaagagctaattttaataaaaataagaaaaattaatactatcatgttaatactattattgtcatcccaagaaaaaagatattttaaaaatttatttgaaaagttcattataagggctttattcatgcctgatttgtttacatgaggacttctgaaattaatccttaaaacaaacttcctgaagacagaaaagttgaatgatttattgttacttatattaataaacttttcaagagaattttgtctttaaatatgggtgttttgtcatcatatttcttgtagctttatcccaatctggataaattgtaaatacctataaaataaattataaatacctataaaatataaagtaacatagctctaaaaggcttaaaatcaaacacaggtgttatttgtctgccctacccatagcaccaaattccattccctagaagaaactacttacatgtgcacacatgtagctaaataaagtacatatatttcagtcacttaataaaagaataaaggagaattattcaatctcttatacttctcctaccttcctcaatattcccaatgtggctgtattaaaaatttgggggaatccatatatatcttttttaataaccaagtaaatacttttcatttctgagccaaggaatatgctatgattacgttttttcctagagttaataattgtctattttttttccatgtattgtctttgtatttatgactaaatcttcccattctgtctgcaggtgggtatatggtaatgggattagagagcctttaattttctgctttgtatatttctatattgtttaactttgtaagaatgcccattacttttttaactagtaaaagcaatagaaataagttaatactatcatagtaatattattattgtcatcccaagaaaaaatatattaaaaagatatttgaaatttcaaaaaaaaaaaaaaaa

SEQ ID NO: 26429 - DNA, 2726 bp, Homo Sapiens
gggatccaggagcgaggagccgggagcggggaacagggagtcggggagccgggaaccggggctggcagcggccgccatgagcacggtggaccttgctcgcgtgggcgcgtgcatcctgaagcatgcggtgaccggggaggccgtggagctgcggagcctgtggcgggagcacgcgtgcgtggtggccgggctgcggcgcttcgggtgcgtggtgtgccgctggatcgcccaggacctcagcagccttgctgggctcctggaccaacacggcgtgcgcctggtgggcgtagggcccgaggccctgggtctgcaggagttcctggacggcgactacttcgcgggagagctctacctggatgagagcaagcagctttacaaggagctaggcttcaagcggtacaacagcctgagcatcctcccagcagctctggggaagcccgtgcgtgatgtggctgccaaggccaaggccgttggcatccaggggaacttgtctggggacctgctgcagagcggagggctgctggtggtcagcaaaggtggtgataaagtgctcctgcatttcgtccagaagtccccaggcgactacgtccccaaggagcacatcctgcaggtcctgggcatctctgcggaggtctgtgccagcgacccgcctcagtgtgacagagaggtgtgagggaggcgaaggccctggcctccgaggatctgggtggcgtctgctgccctaggtgtgctggaagtccacttggaagaactgttccggaggcgctgggtcgggatgccgaacctctcctgatccgccggcagcaacgagccattaaaactgcagttcctgaccacgcactgcttcgcaggctccgagccctgcatcctccacagcccccgccttgctcactgttgggccctcagggcgggcagggtggctgtgagtcacaggtgtcatcttcctgctctgcgactttctctggagaccttgggcctttggcctgtggggcactggggatggtaacctcactgccccgtcactcccttcaaaggcgacagacccaagcccacgtcaggagaggagcgtggggtcagctccagcagggtcggggtcagtgcctgtgtctggtgggggccactcaggagagttgggttttcagggcagagatgggcttgattccacctggtggggtgggtggaccctggagactctcaggtgatgggccagcctgccccaaggctctttactgatgtcagaatcattgtttgcacctgctgggtatggcctttggggcggccggcccgggagggtcttagtctaattaggtgtgtccagcttcttggccacctttccctggggaccctaacaggcccagagcagagccccttacctcccaggtcagactacctgctcaggccctcccctcccatgcaggccgatgacaactgcagccctctctgcactccctagtccagacctggggaccactgtgggttcctgtgggtctcccggctcccttcctgcccccaatgccaccattgcagtggccatttaaaaatgcatagcaggtgacccactgcgtccctttgcgttcagcccctcctctggctttcagttacaccaagctaaaatttcaggttcccagctgcagctctctgggtcccccggtgccccagtggggctctccgcatctgaatgtgtggtccctgggggtgggcacttgggggcatcctggtcactgctggccctagcattggaccctaggagacctgactggaactggctccctccccatcagctcccagctgtcactctctcccacccccgggcagctgttttgcccaagaccactgctacctgtttacccaccctggtccctcccagacaagcaaggcctctgatttctttgaagcatttacttagctcaagtctgaagctgtagatactggaagacaatgcaccttggagggtgggcaggacacagttgattgtctctacagagctgtgacgggggcactgagccccgctggtgtctgtggagggggctccggtccaggtactgcactggacactgctcatccctgggtgtcaggcaggtggctgcaccctaggccaggcgcagaggcctggcaggcaggcttggcatggttggccggggcgggacgtacactgggtcgccgctagctgcaccttcgcacagatgcctccgagcagcgggtgggcgtgggccgcacagcgcggcagggccttggctaccacacgcggcatcgctccttggggtgcatgggggtgccccgggcacagtggaacgtgtctgcgaaggcggccaggttctgcagcgaccccagtaccctgtgggtgggtgggtgtgacagcaggagcattgccatcttggacaaacatggccattttaagttctccgtgattaaaaaccagcccaaaacatcagcctaatggctcatgtcagtatgagcagaaacatttcaaccatgagataaacccccatctgaccagaaacatgccaatcctgagaataacctcccctccagccagagatattccaactctgcaataaaactctccttcacacagaaacattcgcagcctgcggtaggctccccattcctaaacccttaaatgcccttagtctgtaagagaatgtccctgaccgaaatcggccagaagcccctctcaggtttattcccaaaataaacctgtctctgttggaaaaaaaaaaaaaaaa

SEQ ID NO: 26430 - DNA, 2128 bp, Homo Sapiens
aagagtgagagcagagggggaagcaaaggtggcacattgattataacacacagctgaggtctcgatcacactagatgtctccagtcagtcgtgtagaaatctatgtgcttcagaacagtctattggatgacctggctccaggatcagggaagtcagagccgagacctcggttcacggtgcttcctcagattctgggaatgctgcaggaagctgaacttcaggggcccagtgggttcaggccccagacaccagggtctttgcagtcccatcatgagtcttgttatgtcgcccaggctggagtgcagtggtgtgatctcggctcactgcaacgtctgcctcccaggttcaagcgattctcccacctcagcctcctgaatagatgggattacaggcacccaccaccacgccaagataatatttgtatttttagtagagatggggtttcaacatattcaccaggctggccttgaactcctgacctaaggtgatccacctacctcggcctcccaaagttctgggactacaggagtgagccaccatgcccagcctatacttattccctgacttctcccaactagtatgtaaacttcaagctgacaaggaatttgtcttaaaacagtatctggcatgtaagaagcactcaattaatattcattcactgaatgaaagaagaaaggaaagagcatatgacaagaaaaacaacaacaacaacaacaaaaaggataagcaagacaatctacgtttataacagaagaattgaatctaggggtgctcgttaagaattgtgatcaagcttaaatttttccagaaaaaaaaaagatgtttaaatagtacaagaaaatgaatacgacagattgcatcttgtaataagtaagttctaaagagagagagtgttccatgtctgaaaatgtctagctgatagcatcatgggcataatagtggatcttcatctaagtttattcagtctttacccaacttgtcctggatggccaagagactagcaaaggttggatgcaggtggaacatactctgattcagggatacttatttcatgattagacagcagtttcctaatcgttgtccatcccttctccccgtgcacacgattcagcccgtagggttatctctggatacccatcacttgggttgctgggcactcttgtgtaaagagaaccagccctgagaaaagagaaatttccttcagcagtctacaccttcatagatgagggtagtagcaacaggagaaatctattttacagattaaaatcagaagaaaggagaaatttctgctaagacagaggagaacagtagactggctatcaacaagataaactatagaaaagcgatcactagcgtatgaaccatcccccaaggcactgtaggtcaaaacagatgatctaggaacctgcagatgaatccctctagaacaagaaaacaacattaataaaagtttatatttattgaactttttgttaagtggttacctaaaccttttatgcatattgatgagtttaattctcaccataaccttaccgggtaggcatcattgttatctgaaaggcagcgagattaagtaacctgctcaaggccacataattaggaaatgaaggggtcttgagatgaacccagacaatctggctttggagctcatcatccgtttttttaaaacaaaacaaaacaaaacaaaaaaaaccctgttgtatacactataatatgcattttaaagtgtacaatttaattatttttagcatatttgtgaagttgtgcaaccatcactacaattttagaacattttcatcactccaaaataagctccatacccattgtcaatcaccctccgtttttcttcagctccccaaacccaagaaacaactaacctactttctatctctattgaattagctcttctgaacctttcagatgaatgggattatacaatatgtggtctttgattcatccatgttgtagcatgtatcagcattccatttcttttttatcaaatgatacttggttgtctggatacaccacattttatttacccattaatcagttgaagaacatttgcattgttttcacattttcctgttataaataatgcttctgtgaacattcaaaaaaaaaaaaaaaa

SEQ ID NO: 26431 - DNA, 2431 bp, Homo Sapiens
gatgtgtgctgagacccagagtcacccaggggtctccgtcacgtgccaggagtaggcagaagtgggctgtgacagatcaggaaacagagctcagtgcagcccactaaattgctcagggccctacagctaacaagcggcagaggcaggatctgcactcaggagctgcttggagatgctgctgtggccactgctgctgctgctgctgctgctgccaacattggccctgctcaggcagcagcggtcccaggatgccaggctgtcctggcttgctggcctccagcaccgagtggcatggggggccctggtctgggcagccacctggcagcggcggaggctggagcagagcacgctccatgtgcaccagagccagcagcaggccctgaggtggtgtctacagggagcccagcgcccccactgttccctcagaaggagcacagacataagcaccttccggaatcatctccctctgaccaaggccagccagacccagcaggaagacagtggagagcagccactgcccccgacctcaaaccaggaccttggggaggcctctctgcaggccaccttgctgggtctggcagccctaaacaaggcctacccagaagtgctggctcagggacgcactgcccgtgtgacgcttacatccccttggccccgacccctgccttggcctgggaataccctgggccaggtgggcacccctggaaccaaggaccctagggccctgctgctggacgcactgaggtccccagggctgagggcactggaggctgggacggctgtcgaacttctggatgttttcttgggcctggagactgatggtgaagagctagctggggcgatagctgccgggaaccctggagcgcctctccgtgaacgggcagctgagctccgggaggccctagagcaggggccacggggactggcccttcggctctggccaaagctgcaggtggtggtgactctggatgcaggaggccaggccgaggctgtggctgccctcggggccttgtggtgccaaggactagccttcttctctcctgcttatgctgcctcgggaggggtgctgggcctaaacctacagccagagcagccccatgggctctaccttctgccccctggggccccctttatcgagctgctcccagtcaaggaaggcacccaggaggaagctgcctccaccctccttttggccgaggcccagcagggcaaggagtatgagctggtgctgacggaccgcgccagcctcaccaggtgccgcctgggtgatgtggtgcgagtggttggtgcctacaatcagtgtccagtcgtcaggttcatctgcaggctggaccagaccctgagtgtgcgaggggaagatattggtgaagacctgttctctgaggccctgggccgggcagtggggcagtgggcgggggccaagctgctggaccatggctgtgtggagagcagcattctggattcctctgcgggctctgctccccactacgaggtgtttgtggcgctgagggggctgaggaatctgtcagaggaaaatcgagacaagctggaccactgccttcaggaagcctctccccgctacaagtccctgcggttctggggcagcgtgggccctgccagagtccacctggtggggcagggagccttccgagcactccgggcagccctcgctgcctgcccctcctcccccttcccccctgcgatgccccgggtccttcggcacaggcacctggcccagtgtctgcaggagagggtggtgtcctgagtcaagtcctgccccaccgcccagctccccccagaggccacctcgcccctccctctgggacctctccggatggggagtccttggccagggtctctgactctgtgtcacctgacatttgcccatgagagccgctgggccttagagaggccttggcccagctgaccggttctgaagtatgggcctccggggttagcagatgccagcagtgcctgcccgtgtccccatgtcccggcatgaaggacactgctagagagttaccatgcacaccgatggtttcctgtatcacagcccaaagaggttctctggtggccacagctgtgtgctcagtcagtgcactgggcaagctagaagtgttggggggttaatgtccccaggagcagcaaccctgagtcaataaggagcaggacctcagcttcattgtccttgagcaggacaattctgaagtgtattctacataaactctcagaggatgcccagcaggatggagtcccagttgcccgcagcagtaacccactcattcatgtacttcctgcgggggctctcccttccctctcttccccactcccccgccttgggcttcctgggatggctcccaaataaacctcttgcacccagaaaaaaaaaaaaaaaaaaaaaaaaaaaaaaaaaaaaaaaaaaaaaaaaaaa

SEQ ID NO: 26432 - DNA, 858 bp, Homo Sapiens
gtgggccgttgccttacagttgctgagaggaggcgagaggcgggggcgctagggccgagatcatgtctgactgggagaggtttccttggcagcagaggacgctaggtttgggatgaaagaagctgggcagatgcaaaatctggagagcgcgagggccgggcggtcagtcagcacccagactggcagcatgaccggtcagataccaaggctttctaaagtcaaccttttcactctgctcagcctctggatggagctctttccagcagaagcccagcggcaaaaatctcagaaaaatgaagagggaaagcatggacccttaggagataatgaagagaggaccagagtatctactgacaaaagacaggtaaagagaactggtcttgtggtggtgaaaaacatgaaaattgttggtctccactgttctagtgaagatttacatgccgggcagattgctcttattaaacatgggtcaaggctgaaaaactgtgatctttatttttccagaaaaccatgttctgcttgtttgaaaatgattgtaaatgctggagttaaccgaatttcatactggcctgctgatccagaaataagtttgcttacggaggcttctagttctgaagatgcaaagttagatgccaaagcagtggaaagattgaagtcaaacagtcgggcccatgtgtgtgtcttacttcaacctttggtgtgttatatggtgcagtttgtagaggagacctcttacaaatgtgactttattcaaaaaattacaaaaacattgccggatgctaacactgacttttattatgaatgtaaacaagaaagaataaaagaatatgaaatgttaaaaaaaaaaaaaaaaaaaaa

SEQ ID NO: 26433 - DNA, 630 bp, Homo Sapiens
cggtggtgaaggtgcaggccgttggggcggctcagaggcagccacttctttcttcctcatcactttgctgttttcggaaagcagttagtagttattcgctgtatgtggcttttgagccagatcggccctcttcattatgctaaacggcggaatcatctggagcgagatacccaatgaactacattgagctcaggagagttttatgagcagaagagcaaaaatacacatattggccgagcgtggtggctcacgcctgtaatcccagcactttgggaggcctaggcgggtggatcacttgaggccaggagttcgagaccagcctggccaacatggtgaaaccccgtgtctactaaaaatacagaaattagccgggcatggtggtgcacgcctgtaattccagctactcaggaggctgaggcaggagaattgcttgaacccgggaggcggaggttacagtgagccaagatcacgaccaccacactctagcctgggcaacagagtgagaccctgtctcaaaaaaaaaaaaaaaaatacacatctatatatgctaaaatatggtattttacaaaaaaaaaagtcttccattttatgcataataaagacatgaaattaaaaaaaaaaaaaaaaaaa

SEQ ID NO: 26434 - DNA, 3752 bp, Homo Sapiens
cggcgatggattggttgccgtggtctttactgcttttctccctgatgtgtgaaacaagcgccttctatgtgcctggggtcgcgcctatcaacttccaccagaacgatcccgtagaaatcaaggctgtgaagctcaccagctctcgaacccagctaccttatgaatactattcactgcccttctgccagcccagcaagataacctacaaggcagagaatctgggagaggtgctgagaggggaccggattgtcaacacccctttccaggttctcatgaacagcgagaagaagtgtgaagttctgtgcagccagtccaacaagccagtgaccctgacagtggagcagagccgactcgtggccgagcggatcacagaagactactacgtccacctcattgctgacaacctgcctgtggccacccggctggagctctactccaaccgagacagcgatgacaagaagaaggaaaaagatgtgcagtttgaacacggctaccggctcggcttcacagatgtcaacaagatctacctgcacaaccacctctcattcatcctttactatcatcgggaggacatggaagaggaccaggagcacacgtaccgtgtcgtccgcttcgaggtgattccccagagcatcaggctggaggacctcaaagcagatgagaagagttcgtgcactctgcctgagggtaccaactcctcgccccaagaaattgaccccaccaaggagaatcagctgtacttcacctactctgtccactgggaggaaagtgatatcaaatgggcctctcgctgggacacttacctgaccatgagtgacgtccagatccactggttttctatcattaactccgttgttgtggtcttcttcctgtcaggtatcctgagcatgattatcattcggaccctccggaaggacattgccaactacaacaaggaggatgacattgaagacaccatggaggagtctgggtggaagttggtgcacggcgacgtcttcaggcccccccagtaccccatgatcctcagctccctgctgggctcaggcattcagctgttctgtatgatcctcatcgtcatctttgtagccatgcttgggatgctgtcgccctccagccggggagctctcatgaccacagcctgcttcctcttcatgttcatgggggtgtttggcggattttctgctggccgtctgtaccgcactttaaaaggccatcggtggaagaaaggagccttctgtacggcaactctgtaccctggtgtggtttttggcatctgcttcgtattgaattgcttcatttggggaaagcactcatcaggagcggtgccctttcccaccatggtggctctgctgtgcatgtggttcgggatctccctgcccctcgtctacttgggctactacttcggcttccgaaagcagccatatgacaaccctgtgcgcaccaaccagattccccggcagatccccgagcagcggtggtacatgaaccgatttgtgggcatcctcatggctgggatcttgcccttcggcgccatgttcatcgagctcttcttcatcttcagtgctatctgggagaatcagttctattacctctttggcttcctgttccttgttttcatcatcctggtggtatcctgttcacaaatcagcatcgtcatggtgtacttccagctgtgtgcagaggattaccgctggtggtggagaaatttcctagtctccgggggctctgcattctacgtcctggtttatgccatcttttatttcgttaacaagctggacatcgtggagttcatcccctctctcctctactttggctacacggccctcatggtcttgtccttctggctgctaacgggtaccatcggcttctatgcagcctacatgtttgttcgcaagatctatgctgctgtgaagatagactgattggagtggaccacggccaagcttgctccgtcctcggacaggaagccaccctgcgtgggggactgcaggcacgcaaaataaaataactcctgctcgtttggaatgtaactcctggcacagtgttcctggatcctggggctgcgtggggggcgggagggcctgtagataatcttgcgtttttcgtcatcttattccagttctgtgggggatgagtttttttgtgggttgctttttcttcagtgctaagaaagttccctccaacaggaactctctgacctgtttattcaggtgtatttctggtttggatttttttttccttctttgttttaacaaatggatccaggatggataaatccaccgagataagggttttggtcactgtctccacctcagttcctcagggctgttggccaccctatgactaactggaagaggacacgccagagcttcagtgaggtttccgagcctctccctgcccatcctcaccactgaggccacgacaaagcacagctccagctcggacagcaccctcagtgccagccagcctctgccagacctctctttccctcttctccccagcctcctccagggctgcccaaggcagggtttccagccaggcctcggggtcatcttttcaccaggagcaaacccaagtcttagttgctacaagaaaatcccctggaagtactgggggccaggttccccagacagcaggaattgcccctgttcagagcagccggagtttgctggaccacaaggaagaagagaagagacttgcagtgaactgtttttgtgccaagaaaccctggacctggggccaagtatttcccaagccaagcatccacttgtctgtgtctgggaagggatggccaaggccgctagggtccttacccctcaggatcactccccagccctttcctcaggaggtaccgctctccaaggtgtgctagcagtgggccctgcccaacttcaggcagaacagggaggcccagagattacagatcccctcctgtaagtggccaggcattctctccctgccctctctggcctctggggtcatactcacttctttagccagccccatcccctccaccccacacctgagttcttgcctcctccttttggggacacccaaaacactgcttgtgagaaggaagatggaaggtaagttctgtcgttctttccccaatccccaggaatggacaagaagccaacttagaaagaagggtctcacgtggctggcctggctcctccgtagacccctgttcttttcaacctctgcccacccgtgcatgtcatcacaaacatttgctcttaagttacaagagaccacatccacccagggattagggttcaagtagcagctgctaacccttgcaccagcccttgtgggactcccaacacaagacaaagctcaggatgctggtgatgctaggaagatgtccctcccctcactgccccacattctcccagtggctctaccagcctcacccatcaaaccagtgaatttctcaatcttgcctcacagtgactgcagcgccaagcggcatccaccaagcatcaagttggagaaaagggaacccaagcagtagagagcgatattggagtcttttgttcattcaaatcttggattttttttttccctaagagattctctttttagggggaatgggaaacggacacctcataaagggttcaaagatcatcaatttttctgactttttaaatcattatcattattatttttaattaaaaaaatgcctgtatgcctttttttggtcggattgtaaataaatataccattgtcctacaaaaaaaaaaaaaaaaaaa

SEQ ID NO: 26435 - DNA, 1226 bp, Homo Sapiens
ggggagtgggagggggaggtacctggaactgggagtgatgtcagctcccagctcggtgcctgcccggattcctgacatggtgtagtgcaggcagggtggggaaaggacggggaaggactcgtgtgctgcgagctggcggccgggccggagtgctggggctttgaactccgagaggaggtggaccagaacttttggaactagtgccggcggctctccaccccccagtataaaagaacgtgtggatcactttgctgagtacatccaagatttgaagaactgaaataaatcagctttaaacctgctttttaaaaatatctgggttggaatttgcccctgacaaataataaaatgatgagtgatgcaagtgacatgttggctgcagcgttggagcagatggatggtatcatagcaggttctaaggctctggaatattccaatgggatttttgattgccaatctcccacctctccattcatgggaagtttgcgagctctgcaccttgtggaagacctgcgtggattgttagagatgatggaaacagatgagaaagaaggcttgagatgccagatcccagattcaacagcagaaacgcttgttgaatggcttcagagtcaaatgacaaatggacacctaccagggaacggagatgtgtatcaagaaaggctggcacgtttagaaaatgataaagaatccctcgttcttcaggtaagtgtgttaacagaccaggtggaggctcagggagagaagattcgagatttggagttttgtcttgaagagcacagagagaagttgaatgccacagaagaaatgctgcagcaggagcttctaagtaggacatccttagaaactcagaagttggatctgatggctgaaatatctaacttgaagttgaaactgacagctgtagagaaggacagattggattatgaagataagttcagagacacagaggggctgattcaggagatcaatgatttgaggttaaaagttagtgaaatggacagtgagagacttcagtatgaaaaaaagcttaaatcaaccaaagatgaactggcatctttaaaagaacaactagaagaaaaggaatctgaagtaaaaaggctacaagaaaaattggtttgcaagatgaaaggagaaggggttgaaattgttgatagagatgaaaattttaaaaagaagctcaaagaaaaaaacatcgaagtacaaaaaaaaaaaaaaaaaaaaaa

SEQ ID NO: 26436 - DNA, 1597 bp, Homo Sapiens
gggggcctcctctgttgggtggaaaaagactttcttctctattttcctagttatatatgctatcatatgtctgtttttctcctcttgaagtttccctgaaacctgggctcttgaagacgcatcactggagcagatggataatggagactggggctatatgatgactgacccagtcacattaaatgtaggtggacacttgtatacaacgtctctcaccacattgacgcgttacccggattccatgcttggagctatgtttgggggggacttccccacagctcgagaccctcaaggcaattactttattgatcgagatggacctcttttccgatatgtcctcaacttcttaagaacttcagaattgaccttaccgttggattttaaggaatttgatctgcttcggaaagaagcagatttttaccagattgagcccttgattcagtgtctcaatgatcctaagcctttgtatcccatggatacttttgaagaagttgtggagctgtctagtactcggaagctttctaagtactccaacccagtggctgtcatcataacgcaactaaccatcaccactaaggtccattccttactagaaggcatctcaaattattttaccaagtggaataagcacatgatggacaccagagactgccaggtttcctttacttttggaccctgtgattatcaccaggaagtttctcttagggtccacctgatggaatacattacaaaacaaggtttcacgatccgcaacacccgggtgcatcacatgagtgagcgggccaatgaaaacacagtggagcacaactggactttctgtaggctagcccggaagacagacgactgatctccgaccctgccacaggttcctggaaagactctccaggaaatggaagatactgatttttttttttaaatcacagtgtgagatattttttttcttttaaatagttgtatttatttgaaggcagtgaggaccagaaggaagttttgtgctttggcagactcctccatgttttgttcccttccccctgagtatgcatgtgcctgttcagagtctccagataccttttttataaaaagaagtctgaaaatcattatggtatataatctacccttaacagagcttttcttattacagtgctaaaatgatttctgataaaatggtccctaactcaactagaaggctaaaaatacaagaatgaaagaataagcagagtactcatgatgcctttgagaaaaatcaaaacatcatgtagggtgacctagtttccaaaccaataaataagtagtattgtaatattaaaggaaaactgttccaatcatttaaaagtacttattaagtactgctttttacagttatgacaactgtttctttctatgcatataaatcaaggaaccaaatatctgtagccatggaaatgtctgactagaaatatttatattgaattctgaatacaaaatgtccctgtggtagaaaacttactctttatgcctggtgcagtataattcccaagtgtactgtctaccagaaaaaaaaaaacaaaactaataaaaaatgaaatcgaaaaaaaaaaaaaaaaaaaaaaaaaaaaaa

SEQ ID NO: 26437 - DNA, 3362 bp, Homo Sapiens
atgcaaaataatggataaccatttttcaaaatgtacattctctgaagaggaagcagctggttggacaggatttcttgaagagccaggtgctaagggcatcaggtcgacatccatagtaaccatgtgccataacatctacacatttccacttgttttacagacaaggtaacaggcagaaggaaaatccagagtcttgcagtaagcagatgacaaaacttcaatatgcttgggcaccacttaggtgaccccagggagatttagtgtggccttaggaaagcaaaagagcactttttattggaaatatgagcttgtcactgggaaagatttgtaaaattgatcaagaacttgatttataattatgcctcaaaaaaaaaagttctcatttagtagtggagcaatctagaaaacataccttttttgtttgtttggaagatcctctttccctggctgtattgtagtgtttgctatttgatgtggaaataactaataacttaagattttggaacagaacaccctttagatttccaaaacacaattcttatttcagggaagacagaccaaaaatatctcctgagatcattggtttctttataaattgtggtaccactccatcattgaagagaaaccactaccacaccactagcaccatacagaaccttttctctgtatctttgtacaatactacaaaggggtaccagggaggagagagtggctgaccactttagtgacaaaacagcactccactgctggtgaatcccatctaattatggtccttccacccttttcaaccaccaacaactgttcgtactgttaattcctatcctgaaggtttaaccagtggttgtctagtatcttctgtctttagaacagtggttctcaaactttagtacacatcagcatcacctggagggcctttttttaaaataagacacagattgctgggctcatggtcagagttcccagttaagtaaatcaggaaatttgtatttctaacaagtttataggtgaggccaatactgctgttttgggaactatgctttgagaaccactgccttgaaaaaatttccaacttctacctttaagatcagcctgacttatcaaacgctagagaaaaactgaatctacccttgggcagatgacttgggattggattctatacagcagtcttgctcaatcttcccagtttccagttttattataccaacaattggtttttacaagctagaagacaatgaatgtataagttctatggaacagtgagataaatctaagcttcttgtctttgtatttagaaacattgattctatggatgatcatttgtatcatgttgaccctttgacttgtactgaaggtgattttaaatttaagtatgtagtgtttgaatttcttccatccatgtcgttttaatgagatgtttccatgtcagctcctttacagccttggctcctggcttacagatttttgaatagttgtttgcttgccagttgttttacatctttcattggccaccaaaatattagccatttgagatgagatgagactacttgttgtaccttcatctttcatttaattttctggcgtaaattaacattttaatttcatatatatctgtaaagagtctacccaaaggcttcacggaaatttgcaaaatgaactaattcccttttaagcagcaggtgtgcctgtttttgacttttcagtaaatatgttgtttgtgcacatatctacatggtggagaccatattcattatttcatcttccaaataatgggaaaaatataaaagtgaatcagtgtgctttgggaattcagtgaaatcatgttaactcatatagagggggccttagtttatctcttctttactgaattaattagttttggaaattcttttaccattaaaaaaaattaaggaccatacagagaatgatttaagaaaaaacaagtcacttaaaaatcatcacctatttataaactgtattaattacacataatgcttattgattcaatgaggtttctctaaagacttctgcttaataaatatgctgacttcatttaaattagtttagactattgtaggaatggaaggaaatgattatatttactagaattagtgagatcagaaagcatatcagaatgttgatgatatcaaggagacaatctacagagtttttgcctctgtggatggaaataagggtgtttttttttggtttttttttactttagtttcccataatttttggaaattatgtgtgcatttagttcttttagtaacactgattttaaaattaaatttcaaaagtcaatctctaagagtaatttatttttgttttaccaaccagtgccaaaaaggagaggagggaatccaaaagccaatcttttgaaccaatgtgtaaaagattatgttttttcttaaagttagggaggctcgggccctgacactgccagccccagtgagcatccctggctacctcgggattatgtgcaagctgctttgtcctacatttctttcatctggttcttattgggagtgcttctctctaataaaaattgatttcccacaaaataggcaaagctgaacaaagatgaatgcttttgataagttgggtttcacttcagttgaaacaatgtgatagaatatccaggtgtggcatgatggggcaggaggaggtgcctagagggaaaagttatttttgtttcttagtgttgtgttgtggggatgggacagataagaataagatgtttattgccctaatcatgctaagagactattattcaatatgcttttcccgcttttctaagaggaataaacttagacaaattacattataaacagttcccctactactatctcccactctagataaagccagtgggtggtatgggtccttttattccttatagtattatgccaaagaatcaacttattttcattgaagattataaataaatgaagcttgttatagccataatgatttgagtcagtataccatttcacctataaaatgcaaaattcatccttgcaaccccattcaccaggagccttgaagcattttgtttactccaaaggccttgtcaaggaagcataattttttgttttgccttcttatttagtcagtttggtcatatttacttaaaaaaacaaactgaaaatcacactcctttatatgttgatataactgattttatagaatctgtctgttctttgtttaacaggtctctgtaagcaagcttgcaagtgtattttgtgtacattttatctgaggtggaaatgaaaattctaaagagaaaatattttaaaagatattgtatttatgttgcttgtgttgtagaataaagattcaaatgcattaaaaaaaaaaaaaaa

SEQ ID NO: 26438 - DNA, 2808 bp, Homo Sapiens
gctcggttcacccacaaggaatgagagctgcctgcctgctgctgcttggagagccccagacagtcgcttgaagaggtgtgtggatgtctcctagatcttgacttgctcctgaggaaatattgtgtgactgagtttcctgttatactgctctccaatccatcatgaaccagccagagtctgccaacgatcctgaacccctgtgtgcagtgtgtggccaagcccactccttggaggaaaaccacttctacagctatccagaggaagtggatgatgacctcatctgccacatctgcctgcaggctttgctggaccccctggacactccgtgtggacacacctactgcaccctctgcctcaccaacttcctggtggagaaggacttctgtcccatggaccgcaagcctctggttctgcagcactgcaagaagtccagcatcctggtcaacaaactcctcaacaagctactggtgacctgcccattcagggagcactgcacccaggtgttgcagcgctgtgacctcgagcatcactttcaaaccagctgtaaaggtgcctcccactacggcctgaccaaagataggaagaggcgctcacaagatggctgtccagacggctgtgcgagcctcacagccacggctccctccccagaggtttctgcagctgccaccatctccttaatgacagacgagcctggcctagacaaccctgcctacgtgtcctcggcagaggacgggcagccagcaatcagcccagtggactctggccggagcaaccgaactagggcacggccctttgagagatccactattagaagcagatcatttaaaaaaataaatcgagctttgagtgttcttcgaaggacaaagagcgggagtgcagttgccaaccatgccgaccagggcagggaaaattctgaaaacaccactgcccctgaagtctttccaaggttgtaccacctgattccagatggtgaaattaccagcatcaagatcaatcgagtagatcccagtgaaagcctctctattaggctggtgggaggtagcgaaaccccactggtccatatcattatccaacacatttatcgtgatggggtgatcgccagagacggccggctactgccaggagacatcattctaaaggtcaacgggatggacatcagcaatgtccctcacaactacgctgtgcgtctcctgcggcagccctgccaggtgctgtggctgactgtgatgcgtgaacagaagttccgcagcaggaacaatggacaggccccggatgcctacagaccccgagatgacagctttcatgtgattctcaacaaaagtagccccgaggagcagcttggaataaaactggtgcgcaaggtggatgagcctggggttttcatcttcaatgtgctggatggcggtgtggcatatcgacatggtcagcttgaggagaatgaccgtgtgttagccatcaatggacatgatcttcgatatggcagcccagaaagtgcggctcatctgattcaggccagtgaaagacgtgttcacctcgtcgtgtcccgccaggttcggcagcggagccctgacatctttcaggaagccggctggaacagcaatggcagctggtccccagggccaggggagaggagcaacactcccaagcccctccatcctacaattacttgtcatgagaaggtggtaaatatccaaaaagaccccggtgaatctctcggcatgaccgtcgcagggggagcatcacatagagaatgggatttgcctatctatgtcatcagtgttgagcccggaggagtcataagcagagatggaagaataaaaacaggtgacattttgttgaatgtggatggggtcgaactgacagaggtcagccggagtgaggcagtggcattattgaaaagaacatcatcctcgatagtactcaaagctttggaagtcaaagagtatgagccccaggaagactgcagcagcccagcagccctggactccaaccacaacatggccccacccagtgactggtccccatcctgggtcatgtggctggaattaccacggtgcttgtataactgtaaagatattgtattacgaagaaacacagctggaagtctgggcttctgcattgtaggaggttatgaagaatacaatggaaacaaaccttttttcatcaaatccattgttgaaggaacaccagcatacaatgatggaagaattagatgtggtgatattcttcttgctgtcaatggtagaagtacatcaggaatgatacatgcttgcttggcaagactgctgaaagaacttaaaggaagaattactctaactattgtttcttggcctggcacttttttatagaatcaatgatgggtcagaggaaaacagaaaaatcacaaataggctaagaagttgaaacactatatttatcttgtcagtttttatatttaaagaaagaatacattgtaaaaatgtcaggaaaagtatgatcatctaatgaaagccagttacacctcagaaaatatgattccaaaaaaattaaaactactagttttttttcagtgtggaggatttctcattactctacaacattgtttatattttttctattcaataaaaagccctaaaacaactaaaatgatttgtataccccactgaattcaagctgatttaaatttaaaatttggtatatgctgaagtctgccaagggtacattatggccatttttaatttacagctaaaatattttttaaaatgcattgctgagaaacgttgctttcatcaaacaagaataaatatttttcagaaaaaaaaaaaaaaa

SEQ ID NO: 26439 - DNA, 1478 bp, Homo Sapiens
tggaagttcagtgagggaaagtcagttgagggacacaaaagtgttttgtaaactataaagtacgtggcatgtgtaggtgaattacaggggccatggatgtggacaccatggagggggaagtggagcgttttcagtggagttggctcctccccgcactgagccatgttcctatgtcaggtggcagcggggaagcgagggtccaatcctgccctgcgctagtcctcatctgagtctcagcctgggtcccccatggttttagcaacacgggtggcgagcagatcaaccaggtggcattggaggcgtggcgcagccggcgggaccgcgaggagatcctcctgcaggagctggagccggtcatctcccgcgcggtgctggacaacccgcaccgtgagtctggctcagcagccccctcccgggcggcttcaccccacacccaggggccaggctctcccggggtctcatgctttgcccactgacccggcagttctgagcctggctttggcactcccagctttgtgactttgggtgagccttacagcccctgagtcctacacccagaaggtggctgagggaactgaggccagcatttttcctcctgcccctgggggtttggggccggcttctcccctcttgtgaagcacaaagtcccctccccacctacccttcctgcagatggcttctcaaactcgggcatcatggaagagcgcctcctagacgcagtggtgcccttcctcccgctccagcggcaccacgtccggcactgcgtgctcaacgagctggcccagctgggcctggagccaagggatgaggttgtccaggctgtgctggacagcaccaccttcttccctgaagacgagcagctcttctcctccaacggctgcaagaccgtggcctcccgaatcgccttcttcctctgactctctgagtggtgtcctcggcccccctgatggccaggccatgcaggaaaggccaggggcctctgtcacaggaacccagagcaccaagtgagatgaacggagtgtcggctaggccacgggacagatggccaggaagggccctggcctctaaactggctcgagagcatcttggccccggccaccttccccagggaaacccctggtcaccccagaacctcactgagccttgacctccccctgcagcctgagccttcttactgtgaattataactcagggactgtggctcgtggcggtgctccctcctcagtctgccacccttgccccttgcctccttggtcgggcaccatacctcctcccctccaccccacaccctgtgtccatatcaagccaggtggagccttctcagtttccagaaatggagggactcaagctgccacttgggcctggttttagatgtttttaattttgtaaaagaaaacaagtataataaactcagctgtgggaccagaaaaaaaaaaaaaaaaaaaaaaaaaaaaaaaaaaaaaaaaaaaaaaaaaaaa

SEQ ID NO: 26440 - DNA, 1825 bp, Homo Sapiens
gctagggccgctggaccccgttgctaaggacccttgagatcgtgagcgcttggagtgtacccctcctttcctggggtagagggtcagtcgagagtagccttcgttaaccttaattgaaactggagtgaaagggaagcaatgcagaaatcagagggctctggaggtacacagttgaaaaacagagcaacaggtaactatgatcaaaggacatcatcaagcacacagttaaaacacaggaatgcagttcagggaagcaaatcctcattgtcaaccagttctccagagtctgcaagaaaacttcatcctagaccaagtgataaactgaaccctaaaacaattaatccgtttggtgaacagtcacgagtgccttctgcatttgcagctatttactctaaaggaggtattccttgcagattggtacatggttcagtaaaacacagattacagtgggaatgtcctcctgaaagtctttcatttgatccacttcttattactttagctgagggtctgagagagactaagcatccatacacttttgtgtcaaaggagggttttagagaattacttttggtcaaaggtgctcctgaaaaagctattcctttgctacctagactgattcctgtgctaaaggcagctctggtccattcggatgatgaagtgtttgaaagaggattgaatgctctagttcagctaagtgtcgttgttggtccttctctaaacgaccatctgaagcatctgcttacaagcgggagccttagcatcatcaaatctaaaattccaacatactgctccatatgctgttgaagaagggagccaacaaaaattgttttttctacctgttgacgtgtcaagcactaactgtgggtactcatttattttattcttttgtaaatcacagccaccattcattatttactaggttaagatgaatagacactgaatcaaagttattcatcaacaaaaaagaacagttactaatggaaagttattaaaataagttctataagagtacaattttgaggtttattttttgtatttttattatttgtgcgaagaaccattattgagtttgcaagataagatgtatttgtattttctagtgtctttttatttataacacttttttggcaatcagtttgtagctgtgcccttatttttatagatagtttgccatttcttgggtttaatgtttaacaaggctatagaagtttaaaatagtggacaaatgtttgtgaatacacttttaaaaaattgttttaaaagagaaaagcggtcttgctttgttgcccagactggagtgcagtggcataatcatagctcaccgcaagcctcaaatttttgtgctcagatgatccttttcatctcagcctcctgattagctgggactataggcgtgtgccaccatgcccagctaattttgaaatttgcttgtagagatgggatctcactctgttgtccaggctggtctcagaattctggtgagtgatcctcccacagtggacttccaaagtgctgggattacaggtgtgagccaccatgcctggccccatgaatacactactaatattatttgtaaatatgtattttataatgtacaatgcttggaaaattttcagagtattctagtttaaaaaattttttctaattctgtaaattctattacaagtatgttgtttattacaactcattacaactacctaaattttaggtgttaactgtatttaagtaaatgtgttatttttgcatttcatagccagaaaatactgatgttcacttaaagatattcagcaattaaaatgttaaaacttgtaaaaaaaaaaaaaaa

SEQ ID NO: 26441 - DNA, 2506 bp, Homo Sapiens
ggaggaagaagaggtggatccccggatccagggagaactggagaagttaaatcagtccacggatgatatcaacagacgggagactgaacttgaggatgctcgtcagaagttccgctctgttctggttgaagcaacggtgaaactggatgaactggtgaagaaaattggcaaagctgtggaagactccaagccctactgggaggcacggagggtggcgaggcaggctcagctggaagctcagaaagccacgcaggacttccagagggccacagaggtgctccgcgccgccaaggagaccatctccctggccgagcagcggctgctggaggatgacaagcggcagttcgactccgcctggcaggagatgctgaatcacgccactcagagggtcatggaggcggagcagaccaagaccaggagcgagctggtgcataaggagacggcagccaggtacaatgccgccatgggccgcatgcgacagctggagaagaaactcaagagagccatcaacaagtccaagccttattttgaactcaaggcaaagtactatgtgcagctcgagcaactgaaaaagactgtggatgacctgcaggccaaactgaccctggcaaaaggcgagtacaagatggccctgaagaacctggagatgatctcagatgagatccacgagcggcggcgctccagtgccatggggcctcggggatgcggtgttggtgctgagggcagcagcacatctgtggaggatctgccagggagcaaacctgagcctgatgccatttctgtggcctcggaggcctttgaagatgacagctgtagcaactttgtgtctgaagatgactcggaaacccagtccgtgtccagctttagttcaggaccaacaagcccgtctgagatgcctgaccagttccctgcggttgtgaggcctggcagcctggatctgcccagccctgtgtccctgtcagagtttgggatgatgttcccagtgttgggccctcgaagtgaatgcagcggggcctcctcccctgaatgtgaagtagaacgaggagacagggcagaaggggcagagaataaaacaagtgacaaagccaacaacaaccggggcctcagcagtagcagtggcagtggtggcagcagtaagagccaaagcagcacctcccctgagggccaggccttggagaaccggatgaagcagctctccctacagtgctcaaagggaagagatggaattattgctgacataaaaatggtgcagattggctgattcatcctgggccctggccgatgtgcatatcaacatttatacatggaactggagaacattgtgccaataatcatttaatatatgccaaatcttacacgtctactctaaactgctctaatgaagtttcagtgaccttgagggctaaagattgttcttctgggtaagagctcttgggctggtttttcagagcagagttcttgttgtgggtagactgtgactaggttcacagcctttgtggaacattccgtataacggcattgtggaagcaataactagttcctatgaaagaaccagagctgggaagatggctgggaagccaggccaaagtgggggcaacagcttgcttctctttctcttctcaccctcagtttgtatgggaaaatggagatgtcctctccactttatcccacgatatctaaatgaaaaagaaagaaaacccacacacaaagcaaaaactcaagtattaagagcacatatttttgacccagtggaggcttaaaaaaaaaaaaatccaagaacacaattcattttcaccacctctggtgttcagagggggcttttaaaaaagcgtgtatgctgggatacccattaaaaccattttctagaaggctaccatgagctgcactttttggggtgggaaaggtgaatgccagtggggatgcggggggatgagggtaggagggacttatagaaggggatttgtggctgtgggggagaaggttctacagcataagccttatcctgccagccaaggggatttattctaagagaagtgcatgtgaagaatggttgccactgttattagattgacaagatgttaatttctctgtaggttgtaactttaaaaataaatgaaattatttaagggttatgctgcactagtattccttagaggaaacagttctttaaagttaggaaagggagtaggcaggcatgtgttggcaaaggctgttaatagtagttaagtgttaagactgcttttctttaacgttttcatggtaatgcatatttagagcactgtatttttgtcttgttaagaaaatttagcatttctaaaagaaaaaagcaaccctctttcaaactgttaattctgtcacagcctgtatattttagtcatttgtaaatctcttcatacaatagtgacttcttttttgactgatacagtatcttaattacaaggttattttgtacttgtcttaatacactaagtgtaataaaaacggcttgagaaaaaaaaaaaaaaaa

SEQ ID NO: 26442 - DNA, 2496 bp, Homo Sapiens
agagaaagcgcgtactaccttcggtctaggcagcggaggcagccgcgaccccaggaaaccgaggaaatgaagacgcgaaggactacccgccttcagcagcagcactcagagcagcctccgctacagccgtctcctgttacgaccaggagagggctgcgggactctcattcctctgaagaggatgaagcatcttcccaaactgatttaagccaaacgatctcaaagaaaactgtcaggagcatacaagaggctccagtgagtgaagatcttgtaatcaggttacgtcgaccccctctaagatacccaagatatgaagccaccagtgtccaacagaaggtcaatttctctgaagaaggagaaactgaagaagatgatcaagacagctctcacagcagtgtcactactgttaaggccagatccagggattctgatgaatctggagataaaaccaccagatcatctagtcaatatatagaatcattttggcagtcatcacaaagtcaaaacttcacagctcatgataagcaacgttcagtgctaagctcaggatatcaaaaaactccccaggaatgggccccacaaactgcaagaataaggaccaggatgcaaaatgacagcattctgaaatcagagcttggaaaccagtcaccatcaacctccagccgacaagtgactggacaaccccaaaatgcatcttttgtcaagaggaaccggtggtggctacttcctctgatagctgctcttgcctctgggagtttttggttctttagtactcctgaggtagaaaccactgctgttcaagagttccagaaccagatgaatcaacttaagaataagtaccaaggtcaagatgagaagctgtggaaaaggagccaaacattcctggaaaaacatcttaatagctcccatcctcggtctcagcctgctatcttactgctcactgctgcccgagatgctgaagaagcacttaggtgtctgagtgaacaaattgctgatgcctattcttcttttcgtagtgtccgtgccatccggattgatgggacagataaagctactcaagacagtgatactgtcaaactagaggtagaccaagaactgagcaatggatttaagaatggccagaatgcagctgtggtacaccgctttgagtcatttcccgcaggctctactttgatcttctacaaatattgtgaccatgaaaacgcagccttcaaagatgtagccttagtcctgactgtcttattggaggaagagacacttggaacaagtctaggcctaaaggaagttgaagaaaaagtaagagattttcttaaagtcaagttcaccaattctaacacacccaactcctacaatcatatggacccagacaaactgaatggcctctggagccgtatttctcacttagttctgcctgtgcaacctgaaaatgccctgaaaaggggcatctgcttataagaagtgagagagaagaaaaatcatgtcccaagttctgagaattgttcacactttctaaccagagacagaattcagagctctttttgaaagaactagtttctttttaaagaagttaagtgcttacataaacatggaacatataaatcattcattcaacctaattatctgtgatatgagagaatcatttcagtttccattgagagctctgttaaaggtatcttaggagtgcagattatatgcagttccttagagaatctgttttgattctgggctgagttattacagttatggtatgaccagtgagagcgatttgtgtcctttcttatgaaccttcctgattttttaacttagatttctcactaagtttcctgagttattagtaagattgctccctaaatgtaaccagggatttttccattatgttcccttttataccatttaggtgtgagttccttagcttctgcctataggaacataagtaatgaaaggtcatctaggtgtgtgtttggaatttttttcttttgttttttggaaaatggaaagaacaaggcaaggaaggaaaattaatggggaagctgaagggaggaaatgttacagtaatccactgagatgtagtttagtcaaacataggtatatgaactgttaatcttggtggattccgttgggatttgttttttacatctcctttttccttccttgaagaaaaattcttggctgtcccaaggattcttcatgtatattgcaaaatttaatatatttgttcacttgagtcttaagagtaggtcaggccaaggcaggtggatcacctgaggtcagaagttcaagaccagcctggccaacatggtgaaaccccctctctactaaaaatacaaaaattagctgggcgtggtggtgcatgcctgaaatcccagctacttgggaggctgaggcaggagaattgcttgaacccgggaggcggaggttgcagtaagccgagaccatgcttattgccctccagtctgggcaacaaaaatgaaactccgtctcaaaaaaaaaaaaaaa

SEQ ID NO: 26443 - DNA, 1697 bp, Homo Sapiens
ggaagcccggcaggagaattctgccagatatcaggacagatggggaacagcagaagccgtgtggggcggagcttttgttcacagtttcttcctgaggaacaggcagagattgatcaattgtttgatgctctgtcatcagataaaaacagcccgaatgtctcatccaaatccttctctctgaaggcactacagaaccacgtcggggaagctcttcccccagagatggtcaccaggctgtatgatggcatgcggagggtcgacctgacagggaaggcgaagggacccagtgagaacgtgtcccaggagcagttcacagcatccatgtcccacctgttgaaaggaaactccgaggagaagagtctcatgattatgaaaatgatttctgccacagaaggtcccgtgaaggccagagaagtccaaaagtttacagaggatctggttggctctgtggtgcacgtgctaagccacagacaggagctgagaggctggactgggaaggaagccccagggcccaacccccgggtgcaggtgctggctgctcagctgctctctgagatgaagctgcaagatggcaagagacttctggggccccagtggctggactatgactgtgaccgagctgtgatcgaggactgggtgttcagggtcccccatgtggccatattcctgagtgtggtcatttgcaagggctttctcgtcctgtgctcgtctcttgatctgactaccctggtccctgagcgtcaagtggaccagggcaggggttttgagagcatcctggatgtcctctctgtcatgtacatcaacgcccagctgcctcgggagcagcggcaccgctggcgcctgctcttttcgtctgagctccatggacacagcttctcccagctctgtggccacatcactcaccgggggccctgtgtggctgtcctcgaggaccatgacaagcatgtgttcggtgggtttgcctcttgctcttgggaggtgaagcctcagtttcaaggggacaatagatgcttcctgttctccatctgccccagcatggctgtgtacacacacacgggctacaacgaccactacatgtacttgaaccatggacagcagacgatcccgaacggactgggtatgggggggcagcacaattactttgggctttgggtggatgttgattttgggaaaggacacagcagagccaagcccacgtgcaccacgtacaacagcccgcagctgtcggctcaggagaacttccagtttgataagatggaggtgtgggcggttggagacccctcagaggagcagttggccaagggcaacaagagcatcctggatgcggaccctgaggcccaggccctgctggagatcagtgggcattcgcgccacagcgaagggctccgggaagtcccggacgatgaatgaggagccgcctgagccttcctggagccaggacctggattcctctgggtagagggcaccgcctgcagcccctcttccctcccacatggtttaactgtaatagcgtaccgcacgggtcacagcctggtagtcccacatgtgccaagaagacgccctctgaagccatgtcctgactcatgggtggatctcccagaaatagatgttttttaagttttcttttttgccctacagggtcaccctcaggatctctccaagaaatcttgtgtcaaattagtaaaaaaaaaaaaaaa

SEQ ID NO: 26444 - DNA, 1785 bp, Homo Sapiens
ggttcgtgttggaggtggatggatggcacttgatgagttcttagtgaaaaatgatccttgcagggccaaaggaaggacaaacatggaactgcgtgagaagttcattttagcagatggtgccagccagggtatggctgctttccgaccccgaggccgaagatcccggccatcatcacgaggcgcttcacccaacagatccacttctgtgtccagtcaggctgcgcaggcggcctccccacaggtccctgccaccaccacacccaagattctccatcctttaacacgcaattatggtaaaccatggttgacaaacagcaaaatgtcaactccttgtaaagcagcagagtgctcagactttcccgtgccatctgcagagggaacgccaatacaaggaagcaagcttcgacttccaggatatttatcagggaaaggcttccactctggggaggacagtggcttgataacaactgcagctgccagagtccgaacacagtttgctgattccaagaagactcccagccgaccaggaagtcgagctggaagcaaagctggcagcagggccagcagccgccgaggcagtgatgcatcagactttgacatttcagaaatccagtccgtgtgctcagatgtggaaactgtcccccagacacacagacctacaccccgagcaggttctcggccatccacagcgaagccttcaaaaatccccacgccccagaggaaatcacctgccagcaaattggacaagtcctcaaagagatagtgcaattggttctaccaaggcccttccttgagcatttattatttaagtttgaacgatgtaaaatatggtgtagaaattcttgtgaaatattgcaagaggcgagtttaaaattctgcagatggccttatttgtgtatttgtctttttattttatctgtataattttttttgtcagatattctggggttaaagtcacatcatatgtgaggaggaaaagtttaacatgaactaacatttctgcactgtaacgtgccgggcacacactaaactcagttactgtacctacaggtaagtctacatcctctctgacagccacagcactacatcaatccctgacgttagggatacctcatgacattttcctgtttttatggaaactctgagaagctgaatgatacatgcaggggatattttttgagatgatttaaatgtaaaccaaaagatggaagacaaaaagacaaacacacccacacgcagtctttgcagtatctgacagagaactcacaggaagttacttcaagcacttgccagtactatgatattcaagtaccttgcagcatttctctgccattgctttcaatgaggccagaggcatcctggatattagacctattatactgtaagaatataagtataaagtgcgttcatatacatgtgaggttttcttttgcttgagtggacagtagcacctgtatcattgaactcattttgtatcagagcaattttgcttgcagaaagctatgaaataaaacacgtcccttaactgcattgctatggaattaattttttttccccagggaaaactagtgtatttttttatgagcaatatcaatttggagtgaccaaaagatacttaaaaatgggtttattttgatttctcatctgaaataatcatgttctggtattatatctatctatatttaataaatatatacattttaatttattatgtgtactcacatactatagaaagatattagtatgcatttaataaaacatattcacttgaaaaaaaaaaaaaaa

SEQ ID NO: 26445 - DNA, 2128 bp, Homo Sapiens
ccaagatggcggcgcccagcgaagtggccgcgatagcccctggcgaaggcgatggcggaggcggcggctttggctcctggctggacggacggttggaggcactgggagtggaccgagccgtttatggagcctacatcttgggtatcctgcaggaggaggaggaagaagagaagctggacgctctgcaggggatcctctctgctttcctggaagaagattccctccttaatatctgcaaggagattgtggaacgatggtcagaaactcagaatgttgtcaccaaagtgaaaaaagaagatgaagtacaggccattgccaccctaattgagaagcaggcacaaatcgtagtaaagccaaggatggtgtcagaagaggagaagcagagaaaagctgccctcctggcccagtatgctgatgtgacagatgaagaggatgaagcagatgagaaggatgattcaggtgctaccacaatgaacattggttctgacaaacttctgttccgaaacaccaatgtggaagatgtccttaatgcccgaaaactggagcgagactcacttcgggatgaatcccaaaggaagaaggaacaggacaagctgcagagggagagagacaaactagccaagcaggagcgcaaggaaaaggaaaaaaaaaggacacagagaggggagcgaaagcgataaccttggcctactctattctttccccccatgaacttatcaaagggagaactggttgtgtatttaagagaaatgagagtgcattgcaaagtagtttcccaaggcatttcccctattgtttacatggtcaaaaggaaaatcaaaatcacttctaattacaaaatgtgctgttttggtggggtgggcaatcagattattatagttgatgactgtaccaaagatctggaatgggggccacctttatattttaatactcaagtcctgtgctccttttggccactttaaaaagtcttccctcaccttggataaataggattcagaaagctaacagttttcattctgaaggagcagaaacataatcaatccctccctgagataaaatgtgggcatgcacattgctttggagtcagtattcagctgtaagtgtagtattgttttatggctgaaatagaaagctaatgaagaggcctacctggatccagattttatgttaacatggcagcaaaactaggaaaatgggaagaaattacttgcggggtgttctagatctgattttttttttttttttgaaagtttcagcctgtgggaggaaaagaggtatcttttaaaatagagatagttacatattttcctcatctaggctgtgtcactattgggtgcaaggatatcattgttggctagattcattttgtataatcatgtatcctcttgtgtgctggtagagattttaatcctgatttttccataaaacatgagtattaagaaataattcctggtttggagaaactggagaaatcacccttttaaggaagaaacactggaaatttctgctaacaccaagatatttaagagtgtacatagtaggtgctcaacaaatttattgaatgaatgagtgaatggaaaaactgggagagtcaaaagtgagcagaagctctccatttctacttctgtcacaaaccacattaaattgtaaataaggcccttctccacttgacttcaggcagcagattgtctagaagcctaaggacagcaatttctctgacaagacaaagtagatattttataccaggggttggcaaactactgcccacgggccgaatttggcccagtctgtttttgtatggtgcaaactaaaaatgatttttacatttttaaagagttataaaagaaaaaaatatgtggtctgtgaaatctaaaatatttactacctggcctgttggaggaaaggtttgccaatctctgttttataccattaactatgagattaacaaaaacttttacctttgtgcagaaggttaaaaaaaaaaaaacatggttaaggaaaaggagacatgttacctcttcatacactcctataactgtggcattgcaaaaaataaaaataaccacctttaaaaaaataaatcttatttaaattgcaaaaaaaaaaaaaaaaaaaaaaaaaaaaaaaa

SEQ ID NO: 26446 - DNA, 2107 bp, Homo Sapiens
gagcctgagactccgggcagggctgctccctcctctgctcccccgccagatccgcggggaaggaatcgtgcccgcgccgcccctggcccgcgccaccttcctttggtttctgccggcctcgggcttctgcggcccgatgtggcaggcgccgcgagagaggcagcagccggctggagcagcggcccctcaggtctcggagcccggtgcgcctctgcggtcgtcgctcctgggcctcggcgggtcactcttgccggccggcttcgctgcgggtttgcactgcccggcatttgcaagtgaggaagcagcacaaccctgggttttagataatttctaacagagaggccccagcaattcagcaggcagcgtcctgagtctttggcagcctggtccctctttcgcaaattctccacctttgcgaacagagggtctttaggacacagattcttaaaagtgcaggtgagccagccatgagagggtatcttgtggccatattcctgagtgctgtcttcctctattatgtactgcattgcatattatggggaacgaatgtctattgggtggcacctgtggaaatgaaacggagaaataagatccagccttgtttatcaaagccagcttttgcctctctgctgaggtttcatcagtttcacccttttctgtgtgcggctgattttagaaagattgcttccttgtatggtagcgataagtttgatttgccctatgggatgagaacatcagcggaatattttcgacttgctctttcaaaactgcagagttgtgatctctttgatgagtttgacaacataccctgtaaaaagtgtgtggtggttggtaatggaggagttttgaagaataagacattaggagaaaaaatcgactcctatgatgtaataataagaatgaataatggtcctgttttaggacatgaagaagaagttgggagaaggacaaccttccgacttttttatccagaatctgttttttcagatcctattcacaatgaccctaatacgacagtgattctcactgcttttaagccacatgatttaaggtggctgttggaattgttgatgggtgacaaaataaacactaatggtttttggaagaaaccagccttaaacctgatttataaaccttatcaaatccgaatattagatcctttcattatcagaacagcagcttatgaactgcttcattttccaaaagtgtttcccaaaaatcagaaacctaaacacccaacaacaggaattattgccatcacattggcgttttacatatgtcacgaagttcacctagctggttttaaatacaacttttctgacctcaagagtcctttgcactactatgggaatgccaccatgtctttgatgaataagaacgcgtatcacaatgtgactgcagagcagctctttttgaaggacattatagaaaaaaacctcgtaatcaacttgactcaagattgactctacagactcagaagatgatgctaacagtgttagttttatttttgtactgcaatttttagtttaaaatatgttggatgcactcgtcaaataattatgtatactgtctgttgctgcctggtgattcataaccaccagcttaatttctgtgaatactgtatatttaacttatgaaaaccaagaaatgtaaagataacaggaaaataagttttgattgcaatgtttttaaaataagctagttttctgaggtgttttcacacgtctttttatagttacttcatcttagatttttgaagggatatgacttcctactaaggatttagtttaccacaacaattctgactacaataagacattttgaggaggatatttggctactgtaaacatggctggtggaaaatcacgattgtggcttgatgtggcaagccgaaaccacttggctctggaaatctaagttcatactggtttaattaagctctctcctgacaacccccagaattaaatgaaccatgattgtgaagagtaatttggtacaatgaaggcagtgtttgtttttaagttaaaggaaatgggctaaacataaagttcttattagataagtaaataactaaagaaagaatacaattactaaaaaaaaaaaaaaa

SEQ ID NO: 26447 - DNA, 1285 bp, Homo Sapiens
ctcttcttggcgtagagttttcagattgctcttgggaaccatgccgaaagtagtgtctcggtcagtagtctgctctgacactcgggaccgggaggaatatgacgacggcgagaagcccctccatgtttactactgtttgtgcggccagatggtcctagtgctggactgccagttagagaaattgcccatgaggccccgggaccggtcccgtgtgattgatgctgccaaacatgcccataagttttgtaacacagaagatgaggagactatgtatctgcggagacctgaaggcattgaacgacagtacaggaagaaatgtgcaaagtgtggactgccgctcttctaccaatcccagccaaagaatgctcctgttaccttcattgtggatggagcagtagtcaagtttggccagggttttgggaaaacgaacatatatactcagaaacaagagcctcctaagaaggtgatgatgaccaaacggaccaaagacatgggcaagttcagttctgtcaccgtgtctaccattgatgaagaggaagaggagattgaggctagggaagttgctgactcatatgcacagaatgccaaagtgattgaaaaacagctggagcgcaaaggcatgagcaagaggcgactgcaagagctggctgaattggaagccaagaaagcgaaaatgaaggggaccttgattgacaaccagttcaaataaccaggcctttttctaagccctagactagaggcaagcatttagatcaggaggcaaagtaatttcttgattacatagacggattcctatttatgccctagcagaaggctttacgttgtttcccattgattctcctacattcagtgaggtctttaactgagtccatttaacttgctttctttttttttttttgagacagagtcttgctctttcgcccactgtactccagcactctagcctgggcgacagagtgagactctgtctctacaaaaaaaaaaaaaaaaaaaagtaacccaagggagggagctaccctctagtcgggcagctgatactgcttccttgcatggatacatgggagggagacgttatagattaagaaatgatagcaagataaacaaaatgatttgttgggtatcttttactttacatttgttatttgcagaggagtgttgtatatatagatgttattttatgtcacactgcttcaatgatacctatatccatgtgtttgtatccatgtttttatccattcaactgtattaaaaagtgttgggacaaaaaaaaaaaaaaaaaaaaaaa

SEQ ID NO: 26448 - DNA, 3226 bp, Homo Sapiens
ggaaggggaggccattttccgtttctgggaggagtgaggggcaacgggtcggagaaaaaggaaaaaagaagggctcagcgcctccccgccgggccgtggacagaggggcacagtttcggcaggcgggtgaggtcgctgagggcccgccggagatgttttccttgtcgagcacggtgcaaccccaggttacagttcctctgagtcatctcatcaatgccttccatacaccaaaaaacacttctgtttctctcagtggagtgtcagtttctcaaaaccagcatcgagatgtagttcctgagcatgaggctcccagcagtgagccttcacttaacttaagggaccttggattatctgaactaaaaattggacagattgatcagctggtagaaaatctacttcctggattttgtaaaggcaaaaacatttcttcccattggcatacatcccatgtctctgcacaatccttctttgaaaataaatatggtaacttagatatatttagtacattacgttcctcttgcttgtatcgacatcattcaagagctcttcaaagcatttgttcagatcttcagtactggccagttttcatacagtctcggggttttaaaactttgaaatcaaggacacgacgtctccagtctacctccgagagattagctgaaacacagaatatagcgccatcattcgtgaaggggtttcttttgcgggacagaggatcagatgttgagagtttggacaaactcatgaaaaccaaaaatatacctgaagctcaccaagatgcatttaaaactggttttgcggaaggttttctgaaagctcaagcactcacacaaaaaaccaatgattccctaaggcgaacccgtctgattctcttcgttctgctgctattcggcatttatggacttctaaaaaacccatttttatctgtccgcttccggacaacaacagggcttgattctgcagtagatcctgtccagatgaaaaatgtcacctttgaacatgttaaaggggtggaggaagctaaacaagaattacaggaagttgttgaattcttgaaaaatccacaaaaatttactattcttggaggtaaacttccaaaaggaattcttttagttggacccccagggactggaaagacacttcttgcccgagctgtggcgggagaagctgatgttcctttttattatgcttctggatccgaatttgatgagatgtttgtgggtgtgggagccagccgtatcagaaatctttttagggaagcaaaggcgaatgctccttgtgttatatttattgatgaattagattctgttggtgggaagagaattgaatctccaatgcatccatattcaaggcagaccataaatcaacttcttgctgaaatggatggttttaaacccaatgaaggagttatcataataggagccacaaacttcccagaggcattagataatgccttaatacgtcctggtcgttttgacatgcaagttacagttccaaggccagatgtaaaaggtcgaacagaaattttgaaatggtatctcaataaaataaagtttgatcaatccgttgatccagaaattatagctcgaggtactgttggcttttccggagcagagttggagaatcttgtgaaccaggctgcattaaaagcagctgttgatggaaaagaaatggttaccatgaaggagctggagttttccaaagacaaaattctaatggggcctgaaagaagaagtgtggaaattgataacaaaaacaaaaccatcacagcatatcatgaatctggtcatgccattattgcatattacacaaaagatgcaatgcctatcaacaaagctacaatcatgccacgggggccaacacttggacatgtgtccctgttacctgagaatgacagatggaatgaaactagagcccagctgcttgcacaaatggatgttagtatgggaggaagagtggcagaggagcttatatttggaaccgaccatattacaacaggtgcttccagtgattttgataatgccactaaaatagcaaagcggatggttaccaaatttggaatgagtgaaaagcttggagttatgacctacagtgatacagggaaactaagtccagaaacccaatctgccatcgaacaagaaataagaatccttctaagggactcatatgaacgagcaaaacatatcttgaaaactcatgcaaaggagcataagaatctcgcagaagctttattgacctatgagactttggatgccaaagagattcaaattgttcttgaggggaaaaagttggaagtgagatgataactctcttgatatggatgcttgctggttttattgcaagaatataagtagcattgcagtagtctacttttacaacgctttcccctcattcttgatgtggtgtaattgaagggtgtgaaatgctttgtcaatcatttgtcacatttatccagtttgggttattctcattatgacacctattgcaaattagcatcccatggcaaatatattttgaaaaaataaagaactatcaggattgaaaacagctcttttgaggaatgtcaattagttattaagttgaaagtaattaatgattttatgtttggttactctactagatttgataaaaattgtgcctttagccttctatatacatcagtggaaacttaagatgcagtaattatgttccagattgaccatgaataaaatattttttaatctaaatgtagagaagttgggattaaaagcagtctcggaaacacagagccaggaatatagccttttggcatggtgccatggctcacatctgtaatcccagcacttttggaggctgaggcgggtggattgcttgaggccaggagttcgagaccagcctggccaacgtggtgaaacgctgtctctactaaaatacaaaaaaatagggctgggcgcggttgctcacgcctgtaatcccagcacttttcagaggccaaggcgggcaaatcacctgaggtcaagagtttgagaccagcctggccaacatggtgaaaccccatctctactaaacatgcaaaaattacctgggcatggtggcaggtgcttataatcccagctactctgggggccaaggcaggagaattgcttgagcctgggagatggaggttgcagtgagctgagatcatgccactgcactccagcctgggcaacagagcaagactctgcctcaaaaaaaaaaaaaaaaaaaa

SEQ ID NO: 26449 - DNA, 4558 bp, Homo Sapiens
cagagagggagcgcgccttggctcgctggccttggcggcggctcctcaggagagctggggcgcccacgagaggatccctcacccgggtctctcctcagggatgacatcatccgtccacctccttgtcttcaaggaccacctcctctccatgctgagctgctgccaaggggcctgctgcccatctacacctcacgagggcactaggagcacggtttcctggatcccaccaacatacaaagcagccactcactgacccccaggaccaggatggcaaaggatgaagaggaccggaactgaccagccagctgtccctcttacctaaagacttaaaccaatgccctagtgagggggcattgggcattaagccctgacctttgctatgctcatactttgactctatgagtactttcctataagtctttgcttgtgttcacctgctagcaaactggagtgtttccctccccaagggggtgtcagtctttgtcgactgactctgtcatcacccttatgatgtcctgaatggaaggatccctttgggaaattctcaggagggggacctgggccaagggcttggccagcatcctgctggcaactccaaggccctgggtgggcttctggaatgagcatgctactgaatcaccaaaggcacgccccacctctctgaagatcttcctatccttttctgggggaatggggtcgatgagagcaacctcctagggttgttgtgagaattaaatgagataaaagaggcctcaggcaggatctggcatagaggaggtgatcagcaaatgtttgttgaaaaggtttgacaggtcagtcccttcccacccctcttgcttgtcttacttgtcttatttattctccaacagcactccaggcagcccttgtccacgggctctccttgcatcaggtaggggctttgcagagaccatcgacgggctgacttgagtaagaacacgaattatgcatgtggccatttccagagcactttctatgtgatatgaacatgtgatttttatgtaatatgtgtatgtaaacgaggcagcctcatttccaggtgaggatgcatttggtagtgttgatttttgtaatttaaagaagctgaaagggagagaggacccgtgaggactgaactctctgtcccatggggtagggcttacatttacattaaagaaacagaaacttgctgggaggtgtaagtatttggtcacattgctggcaacagaaggggttggagttggacccagggtgccacgctagctgccctcaccccttcttcccctctggcccagagttatactaagagtccttttatttcaaaccaaatgtttgacaatgggacagtctgtttgaaatcccagctgcctggggtggtcttgggggtctgggtggccccagtgctggtaccatgtgctggcttcaccttttaataacagtgtgaccttaaacaagtcgcttaactactctaagtttcagtttctttcatggtctaaatggagattaaaacacacacacacacacacacacacacacacacacacacacacaccctcgtgtatctaccccacagggcgcttttgaagaccaaatgctgtaactactatgaaagtgctttgtaaattgctgtggaaagtgtgagctactcaagcacccgaggctgtccctccttgctcacatgtccagcccaattctcccttagtgagaacagcactcagtaggtgctgtgtgtgtttgtgttcaattaagaaattccagaataaataaaaatgaattaattcaacaaacattttctggggcaccgacaatctgcccagtgcaccaggctaggtatctgatacaaagataatgaaaacagtctcttggaacctaattggggtcctcatttgaccaggaatttctttcgtcccgttttaagccaaccagttttgtccggacaagacaaaaacaacttgggctgctttagagaagcccagctcagtgtagacaatagctgcccagcctctgaaaggggctgattggattatgtggcaaatggaggtgcaaggatgacttggacggtgacaaatgaagtgggcggagacctgctttgagttaatccaggctattaggaggggaccttttgtcttccagagactggcaggagcttttaccagtggtttttacatccttaatgttcaggacgaataatttatggtcagtgaaaatccaggccccagtgagattcgagtgggctgtaaaatcgagagtcctgctcccagtgagtaatggtagtgaatgtttctgtcactttttgcaaccgtccattcatttgatcctcacaactccctgtcctgagccaggaccggccactgccactcccagggaaacagaggctgtcaagaggctccacagattgggccccactggatcattgaacccctgttccctgagttctagaggaagaattgtacctgtctcagtcccggccacctccagaaggcctccctctgcatttctgactttgctgtgccggcagcctggagcctcccaggtccctgctgtcatcttttctagccactacagtctctgtctttcctttcacagccaagcttcttgaaaggcctgtctacacttgctgtcttccttcctcacctccaatttcctcttcaacccactgcttcctgactcgctctactccgtggaagcacgctcacaaaggtaaagacttttctgtggcttaatccttgtcatgttttcggctcatggacacaaggacacattttcatgccttctctcacagggctctgcgtctccggttcacttctgtgtctttacactcccttcacagagacacttgctcccccttctctcgttcttagcatcccctaggaacttgcacacccaggtctctcgacttctggacctgcttcttaccatgccgtcttaagcagtcaggagtcgctgcctgggttcgagtcctagttaaattacttagtgctgagaccttggggtaggtaaacttttccaagccaggtttatctcagtttcaaaatagggttaatcgtctttatctggcaggtcaggtgggatgtctcacaggtaagcaccagatgccatttgaaaggcttgaagcaaagtcaataaagcattcatgggaaaatacaactggaggcaccactagattttcgtatacattaggttcccacggggaggaccgaagagagaagaaagaagtggaaagggaggagcgtgcaggagagacaggagaagagaataactaaacaaagacattaaagacaaaaaaaaagtaggaaagggagacttagaaaatattaaaagccaccaaaaacacatccaaagacggtttccccttacgttagttgggctaaaagaaagcaaatgggaagaaggttttaaattgattatcccagtgacaaatcccaggaagctttcacatcaaatcaccctattctgggtttttaactccttccatcgagtttaacctctttacctcccacatcctggtaaaccctgccccctccctaccgccccctttgctggtgattaaatcctgaaggtacacgaagtatttcagtgaatgaatggctaacagaaaagggcctcccctcccccttaccctggcggtgtttttcagttttattccactttccgcccttttcccttaatgaacacagggctaatctcgggccttgtcgaaggaagaggctgcagacgttaatgaggttagctgctggattccagtattcgtcgcataaggatccttctttgtctgcgaaggaaaaacacactgattatcataatgaggtgaactggccaccgccgggccggggcgatgtggcttcttaagccacacttctaattttggtgatggagccgacatttctttggctcctcatttaagtctttgcctctgtcccagtgcgaagtccattcagcggggttgaaagttgcaggcagctttgggaaggggggcgtcggacagggttgcattgtagaaagtggctttgttcgatccttcgcacagatgcaaatggccagagcattcattccctttcttcaagagctgaggactgggggggccactggtgatcagttcccaactctagctctcctctgactcatctcaggacccattgaggacatccaaaactcactcaagatcaccaagtggtaggaaagtactaactcctgggcatagccctaggggagtgactacaatgtgaatactcatggaatgcctagccaggtgaagaagtgaatgcatgttggcatcccagagggaccccccttaagagggcatagtttggggttcagatttgactccagcatactgttgaaattgggcacagggggctagtgattagtcaggatcaatcagtggagaggagattaaaactcacatctgggagtccggaatcagaacttgtagttcttttttttgaaatggagtctgcactccagcctgggcaacaagagcaaaaactccatctcaaaaaaaaaaaaaaaaaaaaaaaaaaaaaaaaaaaaaaaaaaaaagtttaaaaaaaaaaaaaaaaaa

SEQ ID NO: 26450 - DNA, 2880 bp, Homo Sapiens
ccgcgctaggtttcgccggccgcgcggccagatgaggggggcgatggagctggagcctgagctgctgttgcaggaggcccgcgagaacgtggaggcagcgcagagctaccggcgggagctgggtcaccggcttgaggggctgcgtgaggcgcggaggcagatcaaagaaagtgcatcacagacaagggatgttctcaaacagcattttaatgatttaaagggaacccttggaaagctcctggatgagcgattggtgacccttttgcaagaggtggacaccattgaacaggagaccattaaaccactagatgactgccagaagctcatagaacacggagtcaacactgcagaggacttagtccgagaaggtgaaatcgccatgcttggtggtgtgggagaagagaatgagaaactgtggagctttaccaaaaaggcctcgcacattcagttggacagcttaccagaagtacctttactggttgatgtgccttgtttatctgctcagttggatgactcaattcttaacatagtgaaagaccacatttttaagcatggaacagtagcatctcgcccaccagtacagatagaagaactaatagagaaacctggaggcatcattgtacgatggtgtaaggtggatgatgactttacagcccaagattacaggctccagtttcgtaaatgtacttcaaatcattttgaggatgtatatgtaggttctgaaactgaattcatagtattgcacatagaccccaacgttgattaccagttcagagtctgcgcccgaggagatggccgacaggagtggagtccttggagtgtcccccagataggtcattccacattggtgcctcatgagtggacagctggttttgaggggtacagtctgagcagtcgaagaaatatagcacttcggaacgattctgaatcatcgggtgttctctactccagagctccgacttatttctgtgggcagacattaacattcagagttgaaactgtgggacagccagacagaagagatagcataggagtgtgtgcagaaaaacaggatggatatgactctctgcagcgggatcaagctgtgtgcattagtacaaatggtgcagtttttgtcaatggaaaagaaatgacaaatcagttacccgcagttacttctgggtccactgtcacgtttgacattgaagccgtgactctaggaaccaccagtaataatgaaggtggacacttcaagcttcgagtaactataagttcaaataatagagaagtggtttttgactggttacttgatcagtcttgtggttctctttactttggatgctcatttttctatcctggatggaaagtgttagtgttttagatgtttgggtgcttggctttggttttcagggtctaacgtagctgtcctcagcccagcgtagttgtaattgctttaaaaaaaaagttgaattcatctctaacttaggccattggaaagtgtttactggattcattttgtaatattttagcaaaaagagacttcaatgttgtggacaaaatcatacaattcagtcaattttatttttagcatactgttaaatatcacatcacaataaaaatcaaattggcattaaaagtatagaagatataggaagttctatacccttccactgtacttctcaaagttggttattagaccaggaaaacttaatgtaatattatttttaaaatcatcttaaaggatccaagtccatgtaactctttagaacaagaggaataggtcagatagaagaagctgtgtaatgtattaatacatccgttcatgtgctgtccacatgaatgtgttgactgtgctctccatgttcaggtatttgtaagcagtgttgacttttatcccctcttcagtaatctttaagtccccaaaacattataactttttctttttttgttgagacggagtctcactcttgtcactcaggctggagtgcagtggtgtgatctcagttcactgcaacctctgcctcccacgttcaagcgatcctcctgcctcaggctcctgagtagctgggattacaggcgtcggccaccacacctggctaatttttgtatttttagtagagacagggtttcaccatgttggccaggctggtcttgaactcctgacctcaggtgttccacccacctcagccttccaaagtgctaggattacaggtgtgagccactgcagtggaccaatttttgtatttttttaaatgcttgaccaagtgtctaaaataggcaagtagtaccttttgttctttcattgcaatttgatacagtataggctacagtatttttacagggtaaaactagttatggcagtagtatgcacagcagtgttagccatttcatatgtatgtaatatgcacgtgtgtatccaatctgcctgtgacatgcattttactctttgcagagaatgagctgcagtccagtttaatgtcagtttaataagtggtctctttttagcagagcaaaaaaatatagcgtaaatacttattttttttaaaaacttacttaaatttgtgtgtaaaatatttatttgaaggactttaatatgtaaaaataattgtcttctatgccaccctacagattttattttaatgtgaattatttttttcatttcatttttaccagtatagtaaaaaagtagaaaagcaagtatgatatttttgtaagataatttatttggggattcatgttccctgttagacaatcatgaccttttctacttgtctttttatatataagtagtagatttccacttgtttagggattaagaagatgttctagaatgtagataccttgtccagccataggaatcaaaataaaaaactaaaaaagttaaaaaaaaaaaaaaaaaaa

SEQ ID NO: 26451 - DNA, 1814 bp, Homo Sapiens
cacgctgcgacagcccataggcttgcccccccgggcattcgggtggactacgaacacaaactgaagccctaggacttgtcgcccgtttgcgctctcgccgaggcacaggctgctcgcggaccaccctgctccgaaaactaagaggtaggtggtagcccattcatctggttactgatactggccggcatcagtggactgtcggcaggtccttgagcaactggtgtgtgaaatgggacggacgtcaaaggacaagcgggatgtctactaccgcctggccaaggagaatggctggcgtgctcgcagcgccttcaaactgctacaactggataaggaattccaactcttccaaggcgtgacacgggcagttgacctgtgtgcagccccaggcagctggagccaggtgctgagccagaagatcgggggccaagggtccggccacgtggtggctgtggacctgcaggctatggctccactaccaggtgtggtacagatccagggggacatcacccagctgtccactgccaaggagatcatccagcactttaagggctgccctgcggacctagtggtgtgtgacggggctcctgatgtaaccggtctccatgatgttgatgagtatatgcaggcccagctcctcctagctgctctgaacattgctacacatgtcctgaagccagggggctgctttgtggccaagatattccgaggccgggatgtgacgctcctctacagccagctgcaggtcttcttctccagcgtgctgtgtgccaagcccaggagcagccggaactctagcatcgaggccttcgctgtctgtcagggctatgaccctcccgagggcttcatcccggacctgagcaaacccctgctggaccattcttacgacccagatttcaaccagctggatggtcccacccgcatcattgtgccttttgtgacctgtggggacctgagctcctatgattcggaccgcagttacccactggacctagagggcggctcagagtacaagtacactccacccacacagccccccatctcgccaccataccaggaggcctgcacgttgaagaggaaggggcagctggccaaggagatccgcccccaggactgccccatcagcagagtggacacgtttccccagcccctggccgcccctcagtgccacaccctgctggcccctgagatggaagacaatgaaatgagttgttcaccttaacccattacgctggcaaactgatacaactcagaaactgctcaatgtcaggaaaaccggaacttgttgatgaacttgttttcaaaatatcatctcatcaacgaggcctggacaaacaagccctgaggagggatctgcaacaaccctgaagacaacaaggaaagaaaccatgaaagtctgtctgtactgcagtgggaattcttgagtgaggtcttacctcttctttaaacctcttcaggagtgtcctgattatgtccagaattttccctaaaggcagggattcttaacctggatagaagccaggggtaaccatgaacttgatggaagaaaatgttacatctttattttcagcaatgaaactgaaatttagccttactcccaagttataaatgctggcaacaaatcacagtagtaaaagcagtacctgggattttcccaccaatacaaaccagttacagcaactgtaatgtaacataaaaagggcatcttgaagtattgttcatatttgtcacctcttggaatgatagcagatcctgtaagttgatgtattaattaaaaagcccatatattactgcatctcaaaaaaaaaaaaaaaaaa

SEQ ID NO: 26452 - DNA, 2659 bp, Homo Sapiens
gcgcccagccgctgaacggcgtgggcaggtgggcggtggggttccagggcgccccgaggacagggggccccgacttcaggggaaccccaaccctgaggggcgtacatagtaatcacgccccagccgcaccggaccttgcgctcatcccttgcgtcccccacttctgcacaaacttttctgacgccctggctcgtgggggtcgtggagagcgctggggctaccaggtgggctcccaccccgccggaccctagccacgctgacctcctgcctctcctaacctcagtggcgacctctccaggccgggccgggctcggcactcggagcgagtgcggcaaccactgtcgctctccgaaggctcctgcgccccccggggcagctgggcggggtaatgccctcagtgatggagaagccgagcgcgggctctgggatcctgtcccgtagccgggccaagacggtgcccaacggcggacagccccactcggaggatgacagcagcgaggaggagcactcgcacgacagcatgatccgcgttggaaccaattaccaggccgtaattccggagtgcaagcctgagagccccgcacgctacagcaacaaggagctgaaggggatgctggtgtggtcacccaaccactgtgtgtcagatgccaagcttgacaagtacattgcgatggccaaggagaagcatggctacaacattgagcaggcgctgggcatgcttctgtggcataagcacgatgtggagaagtcgctggccgacctggccaacttcaccccattccctgacgagtggacagtagaggacaaggtgctgtttgaacaggcctttggcttccatggcaaatgcttccagcggatccagcagatgctgcctgacaagttgattcccagcctggtgaaatactactactcttggaagaagacccgcagccgaactagtgtgatggacagacaggcccggcggctggggggccgcaaggacaaagaagacagtgatgagctcgaagagggtcgaggaggcgtgagtgagggagagcccgatcctgcagatcccaagagagagcctctaccctctcggcccctgaatgcacgcccaggccctgggaaaaaggaggtccaggtgtctcagtaccgccaccatcccttgcgaacccggcgtcgcccacccaagggcatgtacctgagccctgagggcctcacggcagtgtcaggaagcccggaccttgccaacctcacgctccgaggtcttgactctcagctcatctccctcaagcgccaggtacagagcatgaagcagacgaacagcagcctgcgccaagccctggagggcggtattgatccactacgccccccggaggccaacaccaagttcaactcccgctggaccacagatgagcagcttttggctgttcaagccatccgtaggtatggcaaagactttggggctattgcagaggtgattgggaacaagactctgacccaggtgaagactttctttgtgagctaccggcgccgcttcaatctggaggaggtgctgcaggaatgggaggctgagcaggatggggcccctggagccccagtccccatggaggaggctaggagaggggctccattgccagccccagccctagaggaagatgatgaggtccagattacatcggtctccacgtccgtgccccgatcagtgccccctgcgccaccaccccctccacctcccacctcgctgtcccagccacccccgctgctgaggccacctttgcccacggctcccactctgctccgacagccacccccactgcagcagggccgcttcctccagccccggctggcccccaaccagcccccaccgcctctcatccgccccgctctggctgccccccgccacagcgcccgccctggccctcagcccccacccaccctgattggagcccctctggagcccccagcaccctcactctgagccctgacgtcctccaccaaccacgggctccaggacccctttgctggccatccccaggcatctctggtgtcactgaggacagaagggactagggctctggcggggtctttgtaagaccagagtttcggacagcccagccccgccctttgggttctgcatgtgttcctggcagctgggcctgtctcctggggccatggccgggctcaggggcctttgagctggcctgagggcactttcgcttcctggccggtactggaatggctgtgtcctagtctgctggggcttggcctctgggtcctgccctttgtgtgtccggggtagtgaccttagcgtggagtggggagagggcagttgggtgtgctggctgttctcattcctctttcccttcttttagcaataagtctggggtgaggtggggagggaggctgcagggggggaggtgggcagaggggccttacagcagcagaggctggaagagaagctctgtcttcaggggccagctgggaaatgctaaggagctgagggtgcccaccaagcccaccttccagaaacttggagaaatgggggttgggaacttatgcagacatggatttatttttcaacattttttaaaaattaaaaaaaataaaatctaaaaaaaaaaaaaaaaaaaaaaaaaaaaaaaaaaaaaaaaaaaaaaaaaaaaaaaaaaaaaaaaaa

SEQ ID NO: 26453 - DNA, 1160 bp, Homo Sapiens
ctggcggccgcggagacgcagagtcttgagcagcgcggcaggcaccatgttcctgactgcgctcctctggcgcggccgcattcccggccgtcagtggatcgggaagcaccggcggccgcggttcgtgtcgttgcgcgccaagcagaacatgatccgccgcctggagatcgaggcggagaaccattactggctgagcatgccctacatgacccgggagcaggagcgcggccacgccgcggtgcgcaggagggaggccttcgaggccataaaggcggccgccacttccaagttccccccgcatagattcattgcggaccagctcgaccatctcaatgtcaccaagaaatggtcctaatcctgagtcgtcacccttggattttatggatcacggagctgaccatctttacctggtcctggaactgaaaaactgtagcttgtgtgaaaatgagcctttggaccagtctttattaaaacaaacaaacatgagtagtctgcatatcgaatatctagagctctaaaccccccaatacttaaaagtctaattgctgtcctgtggtttcattagtctgataggaagatagggatttcctcagtcacagatgatattttgaaggaaagctgcaataaagccacaatgatttgaggtctttgcttaagtatgagatacttgatgggggctttatcatgcaacattagtttgcttaccttaagaattgcccaaaaatgaaagaaaatatgagcttttcagttaaacatactcctaaaaacattttccgggattttactactaaaattggacatttaagcgaagtaaaagaggccgggtgcggtggctcacgcctgtaatcccaacactttaggagtccaaggcgggcggatcacttgaggtcaggagttcaagaccagcttggccaaggtgataaaacccgtctctactaatacaaaaaaaattagctgggtatgttggtgcaggcttgcaatcccagctacttgggacgctgaggtgggaggatcgcctgaacctcagaggcagaggttgcaatgaagcggaggttgcagtgagccgagagcatgccgctgcactccagcctgggagactgcatctcaaaaaagaaaaataaacgaagtaaaagatatttatcaaaaaaaaaaaaaaaaaa

SEQ ID NO: 26454 - DNA, 2130 bp, Homo Sapiens
gcggagcgggcggcagacccggagcagcatgtggactctcgggcgccgcgcagtagccggcctcctggcgtcacccagcccggcccaggcccagaccctcacccgggtcccgcggccggcagagttggccccactctgcggccgccgtggcctgcgcaccgacatcgatgcgacctgcacgccccgccgcgcaagttcgaaccaacgtggcctcaaccagatttggaatgtcaaaaagcagagtgtctatttgatgaatttgaggaaatctggaactttgggccacccaggctctctagatgagaccacctatgaaagactagcagaggaaacgctggactctttagcagagttttttgaagaccttgcagacaagccatacacgtttgaggactatgatgtctcctttgggagtggtgtcttaactgtcaaactgggtggagatctaggaacctatgtgatcaacaagcagacgccaaacaagcaaatctggctatcttctccatccagtggacctaagcgttatgactggactgggaaaaactgggtgtactcccacgacggcgtgtccctccatgagctgctggccgcagagctcactaaagccttaaaaaccaaactggacttgtcttccttggcctattccggaaaagatgcttgatgcccagccccgttttaaggacattaaaagctatcaggccaagaccccagcttcattatgcagctgaggtctgttttttgttgttgttgttgtttattttttttattcctgcttttgaggacagttgggctatgtgtcacagctctgtagaaagaatgtgttgcctcctaccttgcccccaagttctgatttttaatttctatggaagattttttggattgtcggatttcctccctcacatgataccccttatcttttataatgtcttatgcctatacctgaatataacaacctttaaaaaagcaaaataataagaaggaaaaattccaggagggaaaatgaattgtcttcactcttcattctttgaaggatttactgcaagaagtacatgaagagcagctggtcaacctgctcactgttctatctccaaatgagacacattaaagggtagcctacaaatgttttcaggcttctttcaaagtgtaagcacttctgagctctttagcattgaagtgtcgaaagcaactcacacgggaagatcatttcttatttgtgctctgtgactgccaaggtgtggcctgcactgggttgtccagggagacctagtgctgtttctcccacatattcacatacgtgtctgtgtgtatatatattttttcaatttaaaggttagtatggaatcagctgctacaagaatgcaaaaaatcttccaaagacaagaaaagaggaaaaaaagccgttttcatgagctgagtgatgtagcgtaacaaacaaaatcatggagctgaggaggtgccgtgtaaacatgaaggggcagataaaggaaggagatactcatgttgataaagagagccctggtcctagacatagttcagccacaaagtagttgtccctttgtggacaagtttcccaaattccctggactctgcttccccatctgttaaatgagagaatagagtatggttgattcccagcattcagtggtcctgtcaagcaacctaacaggctagttctaattccctattgggtagatgaggggatgacaaagaacagtttttaagctatataggaaacattgttattggtgttgccctatcgtgatttcagttgaattcatgtgaaaataatagccatccttggcctggcgcggtggctcacacctgtaatcccagcacttttggaggccaaggtgggtggatcacctgaggtcaggagttcaagaccagcctggccaacatgatgaaaccccgtctctactaaaaatacaaaaaattagccgggcatgatggcaggtgcctgtaatcccagctacttgggaggctgaagcggaagaatcgcttgaacccagaggtggaggttgcagtgagccgagatcgtgccattgcactgtaacctgggtgactgagcaaaactctgtctcaaaataataataacaatataataataaaaaaaaaaaaaaaaaaaaaaaa

SEQ ID NO: 26455 - DNA, 2029 bp, Homo Sapiens
caagaattcctctgcctcccatcctaccattcactgtcttgccggcagccagctgagagcaatgggaaatggggagtcccagctgtcctcggtgcctgctcagaagctgggttggtttatccaggaatacctgaagccctacgaagaatgtcagacactgatcgacgagatggtgaacaccatctgtgacgtcctgcaggaacccgaacagttccccctggtgcagggagtggccataggtggctcctatggacggaaaacagtcttaagaggcaactccgatggtacccttgtcctcttcttcagtgacttaaaacaattccaggatcagaagagaagccaacgtgacatcctcgataaaactggggataagctgaagttctgtctgttcacgaagtggttgaaaaacaatttcgagatccagaagtcccttgatgggttcaccatccaggtgttcacaaaaaatcagagaatctctttcgaggtgctggccgccttcaacgctctgagtaagcattgctgggtgtcaggagagaaaagccaaagaagcgggtgccagacagctctgtgcaacctctaggccatgagtgggatagataccactgctgctttaaaaaatgggagaccatagaccctcaggagagaagaatcccttctaccctggactcgctctcttctctggaactaacttctcccccataccctgattgtctttggagaaaatgttctggattctagaatctaaggcagagccttttaagccatactgtacacataaattacctggaaccttgttaaaatgcagatcctgactcaggaggtctgagttagagcccaggatttcatatttctagccagctccatgatgagctgctggtccgcagatcatgcttgcaggttttgaccagagtcagtgttggttagagtaagaggatgaggcagacatctgggaaaagtccagctggggcaagcatttgaagtctgccttcctaccaggtcaaaatcaaggcaacgaccttccatagataactatcaaagcttgagggggtgccttgaacccaactcctaaatccctaagacctgcccacctcttgtgtctcctgtctcagcaaacattcccacactcttgcatattgttaaagtaacctctgcttaccaggcttctggtttaataaaagatggctagagtgactccatcttaaagcaagtagctaggcactcaaaaggaacctacaggcttaatacttgggtctgaaaatagccacagtctaagctgaccaccaattataattgcagaatatttaaggccatacaaaacatctcccactaagcctacaaaatgtccaggtgtcctaaaagttcagcccacttaaaggcagcattaatgagcaggtttaggttgaaggattaatggtcatcaataccactgttaagaagaaaattcttggccaaattgaatttaatggagtttaactgagcagacaattcacaaatctagaagcctcctgagccagagtaggttcagagagtcttgaacacagccacgtggtggaagaagatttatggacaggaaaaggaaaatgatgtactgaaaatgaaagtgaggtacagaaacagccagactggttatagctcagcattggccttatttgaacgagatttgaacagttggccacctttgattggccgaaactcagtgattggcacaagagtaggttgcagtctgtttacacatccttttaggttatagttcaccatgtacagagaaattttaggccaaacttaaaatatgtaaggaggcagctttaggctaaacttgatttaacagcaccaataccccctacctttagtgagcacatctgcacattccaattttaatgacagctccttagaatttcttatcaacgaagacactaacaaagaatggcgcattcctccttctcctttctgaggatgccctaccctgtaacaaagtcgtttctaataaatttgcttctttcaccataaaaaaaaaaaaaaaaaaaaaaaa

SEQ ID NO: 26456 - DNA, 1546 bp, Homo Sapiens
gcagcatgtcggcaacagcggctgctcgtaagcggggaaagccggcctctggggccggggctggcgcgggggccggcaagcggcggcgaaaggccgactctgcgggggacaggggcaaatccaagggtggcggcaagatgaatgaggagatctccagcgactctgagagcgagagcctagctccaaggaagcctgaggaggaggaggaggaggagctggaggaaactgcacaggaaaagaagctgcgcttggccaagctctacctagagcagctccgtcagcaagaggaggagaaggctgaggcccgtgcatttgaggaggaccaggtggcggggcgcctgaaggaggatgtgcttgagcagaggggcaggctgcagaagttggtggcaaaagagatccaggccccagcctcagctgacattcgcgttttacgggggcaccagctctctatcacatgtttggtcgtcacccccgatgactcagccatcttctctgctgccaaagactgcagcatcattaagtggagcgtggagagtggacggaagctgcatgtgattcctcgagccaagaagggtgccgagggaaagccccctggccacagcagccacgtcctctgcatggccatctcctccgacggcaagtaccttgcctctggtgaccgcagcaagctcattctcatttgggaggcccagagctgccagcacttgtacaccttcacaggacaccgggatgcagtgtcgggtctggcattccgcagaggcacccaccagctctacagcacatcccacgatcgctccgtgaaggtgtggaatgtggcagagaactcctacgtggagacgctcttcggacaccaggacgctgtggctgcactggatgccttgagccgggagtgctgtgtgacggctgggggccgggatgggactgtacgtgtgtggaagatccccgaggagtcccagcttgtcttctatggccaccagggctccatcgactgcatccacctaatcaatgaggagcacatggtgtccggcgcggacgatggctctgtggccttgtggggtctctccaagaagcgaccacttgccctgcagcgtgaagctcacgggctgcggggagagccaggcctggagcagcccttctggatatcgtcggtggcagccctcctcaacacagaccttgtggccacaggctcccacagctcctgtgtgcggctttggcagtgtggggaaggcttccggcagcttgaccttctctgtgacatccccctggtgggttttatcaacagcctcaagttctccagctctggggacttcctggtggctggggtagggcaggagcacaggcttggccgatggtggagaatcaaagaggctcggaattctgtctgcatcatcccactccgcagggtccctgtacccccagctgctggttcctgacactcttatcctccttatttaagtccttcccaggctatgccccaccctctttgtattaaaagcctcctcttttgggaaaaaaaaaaaaaaaaaaaaaaaaaaaaaaaaaaaaa

SEQ ID NO: 26457 - DNA, 2815 bp, Homo Sapiens
caccggtctgcatctcccagcagaaggcgcagccatgaatccgttattcggccccaacctcttcctcctgcagcaggagcagcagggcctggccgggccactgggggactcactgggaggcgaccacttcgccgggggaggagacttgcccccggcgcctctctcgccggccggccctgctgcctactcgccgcccgggccgggcccggccccgcctgccgccatggccctccgcaatgacctgggctccaacatcaacgtgctcaagaccctgaacctccggttccgctgcttcctggccaaggtgcatgagctggagcgccggaaccggctgttggagaagcaactgcagcaagcgctggaggagggtaagcagggccggcggggcctgggtcgtcgcgaccaggcagtgcagaccggcttcgtcagccccatccggcccctggggctgcagctgggcgcccggccggccgctgtctgcagcccttcggcgcgcgtgctgggctcgcccgcgcgctccccggccggccccctcgcgccctccgcggccagcctctcgtcgtcctccacctccacctccaccacctattcctcgtcggcccgcttcatgcccggcaccatctggtcgttctcgcacgcccgccggctcgggccgggactggagcccactctggtgcaagggcctggcttgtcgtgggtgcacccggatggggtgggcgtccagatcgacaccatcacgcccgagatccgcgctctctacaacgtgctggccaaagtgaagcgggagcgggacgagtacaagcggagatgcttttacagggttaaatgataccacaagaggcagggcagcgggctcgacgagctctgttctggtgcgggcaggaggcgggagcccggatctgtgcgactgaaggtgggaagaggagtacacggtgcggatccagctgcaagaccgtgtaaatgagctccaggaggaagcccaggaggctgatgcctgccaggaggagctggcactgaaggtggaacagttgaaggctgagctggtggtcttcaaggggctcatgagtaacaacctgtcggagctggacaccaagatccaggagaaagccatgaaggtggatatggacatctgccgccgcatcgacatcaccgccaagctctgcgatgtggctcagcagcgcaactgcgaggacatgatccagatgttccaggtcccatccatgggggggcggaagcgggagcgcaaggctgccgtcgaggaggacacctccctgtcggagagtgaggggccccgccagcccgatggggatgaggaggagagcacagccctcagcatcaacgaggagatgcagcgcatgctcaaccagctgagggagtatgattttgaggacgactgtgacagcctgacttgggaggagactgaggagaccctgctgctttgggaggatttctcaggctatgccatggcagctgcagaggcccagggagagcagcaggaagatagcctggagaaggtgattaaagatacggagtccctgttcaaaacccgggagaaggagtatcaggagaccattgaccagatagagctggagttggccacggccaagaacgacatgaaccggcacctgcacgagtacatggagatgtgcagcatgaagcgcggcctggacgtgcagatggagacctgccgccggctcatcacccagtctggagaccgaaagtctcctgctttcactgcggtcccgcttagcgacccgccgccgccgccaagcgaggctgaggactccgatcgcgatgtctcatctgacagctccatgagatagagacctgcctcccccttgcacccgaggccctcgcagcagggagctcagcgaggcagagggtggggctgcacagaggggaacatcagctgcagctctgcaccaggccggtccctggggactggggcgctcctccctcaggctttctccctcagtcttggcttctccagggctctggggtgtctggagctaggcttggccctaccattctggggccatttccaccacagttggggctctcctgccttcacgcgtgggtgtctgctacttccccatctttaaaatgctgccagagcgattgcggcccctcaccttgtccacgtatcaggaatgtgaatgtgggacctttcctccatccctgttgtccggagccagctcactgtcttccacactggtgctaactggcccaggcactggagtggaatagaatgcagctggaggctacgcatggcctctgcagcacacgcagctggagagggcttctgtccctgtcagcggcagagggcgttggggctggccggggcaccttgtccctgctatggtccacatgctcacgctgtccacctgccaggtggagtgtatgtggctgtggccctccctcgtggaggtgccgtgctttaaagaggccttagtgcccgggatgggcacagtgttttgaagggaggtgggagctcttgctctcctggtcactgcagaatgacagagaaggtgaagctccatgcatgtgtgcgcgggtgtatgtgcgctcagggtctctgtttaagtatcagctaaagatgtgcttcctccgtgtctgtcatacactgagaccaacaggctacagtgtccctgattcttggaaaagcctggagaagctggggagatgcggttcacaatgcctcggtataggaggctgtgttgagctgacattcaaatggattctttaataataatgaaactggcgagtaaaaaaaaaaaaaaaaaaaaaaaaaaaaaaaaaaaaaaaaaaaaaaaaa

SEQ ID NO: 26458 - DNA, 2189 bp, Homo Sapiens
ggagaacctgctgaaaaacagaaatttctggatcctgcggctgccccccggcagcaatggagaagttcccaaggtccctgtcacatttgatgatgttgctgtgcacttctcggagcaggagtggggaaacctgtctgagtggcagaaggagctctacaagaacgtgatgaggggcaactacgagtccctggtttccatggactatgcaatttccaaaccagacctcatgtcacagatggagcgcggggagcggcccaccatgcaggagcaggaagactctgaggagggcgaaacgccgacagatcccagtgctgcgcacgatgggatcgtgattaagatcgaggtacagaccaacgacgagggctcagaaagtttggagacacctgagcccctgatgggacaggtggaagagcacggcttccaggactcagagctgggtgacccctgtggggaacagccagacctggacatgcaggagccagagaacacgctggaggagtccacggaaggctccagcgagttcagcgaactgaagcagatgctggtgcagcagaggaactgcacggaggggatcgtgatcaagacagaggaacaagacgaggaggaagaagaggaggaggaggatgagctgccgcagcacttgcaatcccttgggcagctgtccgggagatatgaggccagtatgtaccagaccccgctgcccggggagatgtcccccgagggcgaggagagccccccgcccctgcagctaggaaaccccacagtgaaaaggctggcgccctccgtgcacggtgagcggcacctgagcgagaaccgcggggcctcgagccagcagcagcggaaccggcgcggcgagcggcccttcacatgcatggagtgcggcaagagcttccgcctgaagatcaacctcatcatccaccagcgcaaccacatcaaggaggggccctacgagtgcgccgaatgcgagatcagcttccggcacaagcaacagctcacgctgcaccagcgcatccaccgcgtgcgcggaggctgcgtctcacccgaacgcgggcccacgttcaaccccaagcacgcgctcaagccgcgtcccaagtcacccagctctggtagcggcggcggtggccctaagccctacaagtgccccgagtgcgacagcagcttcagccacaagtccagcctgaccaaacaccagatcacgcacacgggtgagcggccctacacgtgccccgagtgcaagaagagcttccgcctgcacatcagcttggtgatccatcagcgcgtgcacgcgggcaagcatgaggtctccttcatctgcagcctgtgcggcaagagcttcagccgcccctcgcacctgctgcgccaccagcggactcacacaggcgagcggcccttcaagtgccccgagtgcgagaagagcttcagcgagaagtccaagctcaccaaccactgccgcgtgcactcgcgcgagcggccgcacgcctgccccgagtgcggcaagagcttcatccgcaagcaccacctcctggaacaccggcgcatccacacaggcgagcggccctaccactgcgccgagtgcggcaagcgcttcacgcagaagcatcacctgctggagcaccagcgcgcgcacacgggcgagcggccctacccctgcacgcactgcgccaagtgcttccgctacaagcagtcgctcaagtaccacctgcggacccacacgggcgagtgagcgcgcgccccgccgccgccgcccggccaggtgcgcgggccgtgccccccctcggacaccgccaggcccgagcccagcgggcgggggcggggcgccccccagcccctttgccgtgagctccccctctcctctcgtccctcctcccaaggacatgggggcagtgagaccaggtcccttgctgccgcgtttccccgggggccccaggggggagggcgcggacctggggaaccctttcgggctgttaatttccttgacaataaaatggatgaaaccaatcagcacggggggcgtgatttggccgccggccactcagaggggcggtgtagggcccatctagttggggatagaactttataattaccttttggatactgtggttctatttgataataatagagtaatttttaaaagaaaaaaaaaaaaaaaaaaaaaaaaaaaaaaaaaaaaaaaaaaaaaaaaaaaaaaa

SEQ ID NO: 26459 - DNA, 1380 bp, Homo Sapiens
gggggcggctcccaccatggctgaagaagaggaaactgctgctctcacggagaaggttatccggacccagagggtgtttataaacctgttggattcctacagcagcggaaacatcgggaagtttctatctaactgtgtagttggggcttcgcttgaagaaattacagaggaagaggaagaggaagatgaaaataagtcagctatgctggaagcttcctcaaccaaagtgaaggaaggcacattccagattgtgggcacgctgtccaagcctgacagcccgcggcctgactttgcggtggagacgtactctgtaagtcccggaggctctggccaggagtagacagagggaagagtcaccttccgctccaacgccttgacaacttgttttactgtttgcctcccctcccctctcttccacagacatggccaggttgagggaatggctttctcctgtaatggagatttacctcacagaccccacttttaattttcggccaaagcaaagagtttaaattagatagtgttggaaaggatggatctaagttggactttcagactcatacagttctcctcttcagcatattctgccttgcattatccaagacgagtctgtgccatgatgggtgccatctgtgaaggagaaataggccaggcgcggtggcttacgcctgtaatcccagcactttgggaggctgaggagggaggatcgcttaaggccaggggttcgagaccagcctgggcaacatagcaagatcctgtctcttatatttatgaaaataattttttaagagaaacatcctttggtaatgcaccactcaggaataatataccactgctgtctccagaaacaatgctgtctccacgtgacaaattcaacacagtcctagtcctgagacatttaaatgtctgagaagaagtggccctcttcttctcctgggccaactcctcccttaccctgcctgctactctctggagcctaccatacagctttccacatgctgtaccctggagtggccttctctctttttttttttattcatccttcaagagttgtgtctcttcctccaggaagccgttcatgattcctacttctccctcactcccagtttggattctgagctcttttctgagctcccatatcatcctttgcctgcctagatcatagtgcttttcacactcgttgttatcacctgtctatcgtgggggtccatggacactgactgtcagctccttgagggtggagaccgtgacttgtttatccctgtgtttatccatgtatctgtggcacctaacacagccactgccacaaagtggcctcaataaacacttgtggaatggaaaaaaaaaaaccaaaaaaaaaaaaaaaaaaaaaaaaaaaaa

SEQ ID NO: 26460 - DNA, 1510 bp, Homo Sapiens
agcggataacctccactctgaaagcagtcttcacagaaacttttcacagaagtcaaatagttaaagcaaattctagatacatggtagagaccaggagaaaatatgaataactttcttctaaacaaggagctcagtggataaaccatacctctagattccttgcttccattttcccagaaacaagatgaggaagagaaagatcagtgtgtgtcaacaaacttgggccttattatgcaagaactttcttaaaaaatggagaatgaaaagagagtccttaatggaatggctgaattcattgctcctactactttgtttgtatatatatcctcatagtcatcaagtaaatgatttttcttcactgcttaccatggacctgggacgggtagatacatttaatgaatccagattttctgttgtatacacacctgtcaccaacacgacccaacagataatgaataaagtagcctctactcccttcctggcaggtaaagaggtcttgggactgccagatgaggaaagtattaaagaattcacagcaaattatcctgaagaaatagtaagagtcacctttactaatacatactcatatcatttgaagttcttgctaggacatggaatgccagcaaagaaggagcacaaggaccatacagctcattgttatgaaacaaatgaagatgtttactgtgaagtttcagtattttggaaggaaggttttgtggctcttcaagctgccattaatgctgctattatagaaatcacaacaaatcactcagtgatggaggagctgatgtcagttactggaaaaaatatgaagatgcattccttcattggtcaatcaggagttataactgatttgtaccttttttcctgcattatttcattttcctcattcatttactatgcatctgttaatgtcacaagagagaggaaaaggatgaaggccttgatgacaatgatgggtcttcgggattcagcgttctggtgagtcaaacgcagcacaaataaataaacggaggaactcaggaaaactgggaatcttcaatgcatctttttttttttgaaatggagtctcgctctgtcgcccaggctggagtgcagtggcgtgatctcagctcactgcaagctccgcctcacaggttcacgccattctcctgcctcggcctcccaagtagctgggactacaggtgccggccaccatgcctggataattttttgtattttctgtagagacggggtttcaccgtgttagccaggatggtctcgatctcctgacctcgtgatccacccacctcggcctcccaaagtgctgggattacaggcgcgagccaccacgcccggcctcttcaatgcgtctttattaaaacctgtttctccacaaccaaggggtacaaatgagagatacctacacagaataatttcagatcatgaacaaatttccacttagttaatttcagtggggagaaatgctctgcagtgatgggcaaaaaaaaaaaaaaaaaaaaaaaaaaaa

SEQ ID NO: 26461 - DNA, 1301 bp, Homo Sapiens
gctcggcgttgagctcctgcagccgccgccgctgcagtggtcgtccctgccctccccggccccggggtgcaccccgcaaggctcccgctggtgtccctggagcatgggaggctgctgagcgtgagtggcggtgtctggcaggagctgcgtggcagggagggcgtccatggctgcagccaacaagggcaacaagcccagagtccggagtatccgctttgcggcaggccacgatgcagaaggatcccacagccacgtccactttgatgagaagctgcatgactcggtggtcatggtcacccaggagagtgacagcagctttctggtcaaggttggcttcctgaagatcctgcacaggtatgagattaccttcactctgcccccagtgcacaggctgagcaaggatgtccgcgaggcacctgtccccagcctgcacctcaagctcctcagcgtggtgcccgtccctgaaggttatagtgtcaagtgtgagtactcggcgcacaaagagggcgtcctcaaagaggagatactgctagcctgcgaaggtggcactggcacctgtgtgcgcgtgacggtgcaggcccgcgtcatggaccggcaccacggcacgcccatgctgctggatggtgtcaagtgtgtgggcgccgagctggaatacgactcagagcacagcgactggcacggctttgactgaggcccgaggccccgcctgccccgggcccctcagccttaaaccccgccttgtccccccgacatgctgcgtgatggtgtggcttcctcgcccctctctggggtgggtgtgggggtggagtggccttgcccacgcctctcacctctgccttcatttgtgctgccaccctgcccctccctcgtcctcctctcccgcttcctcctctctgtgtgcctcagtctcctgccggaagaaatgggttgagcccgaaaggaggctgtctgaggaagggagagggagggcctggggtgggtcccccactccccaccccaagccacaggggctcccaccagggtctgggagaggacggagctggctctgtggcgtcgtggccccattactgctgccttgcttcagccacctctcctgcccctccctagtccccactgctgtccaccatgagtaggagggaggtgcagtccccagcccccacccctcaggtctgtgttacttggtttttaagcgactggttgggatagaaccctaaagaaataaacttccagtggataccgaaaaaaaaaaaaaaaaaaaaaaaaaaaaaaaaaaaaaaaaaaaaaaaaaaaaaaaaaaaaaa

SEQ ID NO: 26462 - DNA, 2394 bp, Homo Sapiens
caggccaggactccacaaggctggtcccctgccctggagcaacttaaacaggccctctggccagcctggaaccctgagatggcctccagctcaggcagcagtcctcgcccggcccctgatgagaatgagtttccctttgggtgccctcccaccgtctgccaggacccaaaggagcccagggctctctgctgtgcaggctgtctctctgagaacccgaggaatggcgaggatcagatctgccccaaatgcagaggggaagacctccagtctataagcccaggaagccgtcttcgaactcaggagaaggctcaccccgaggtggctgaggctggaattgggtgcccctttgcaggtgtcggctgctccttcaagggaagcccacagtctgtgcaagagcatgaggtcacctcccagacctcccacctaaacctgctgttggggttcatgaaacagtggaaggcccggctgggctgtggcctggagtctgggcccatggccctggagcagaacctgtcagacctgcagctgcaggcagccgtggaagtggcgggggacctggaggtcgattgctaccgggcaccctgctccgagagccaggaggagctggccctgcagcacttcatgaaggagaagcttctggctgagctggaggggaagctgcgtgtgtttgagaacattgttgctgtcctcaacaaggaggtggaggcctcccacctggccctggccacctctatccaccagagccagctggaccgtgagcgcatcctgagcttggagcagagggtggtggagcttcagcagaccctggcccagaaagaccaggccctgggcaagctggagcagagcttgcgcctcatggaggaggcctccttcgatggcactttcctgtggaagatcaccaatgtcaccaggcggtgccatgagtcggcctgtggcaggaccgtcagcctcttctccccagccttctacactgccaagtatggctacaagttgtgcctgcggctgtacctgaatggagatggcactggaaagagaacccatctgtcgctcttcatcgtgatcatgagaggggagtatgatgcgctgctgccgtggcctttccggaacaaggtcaccttcatgctgctggaccagaacaaccgtgagcacgccattgacgccttccggcctgacctaagctcagcgtccttccagaggccccagagtgaaaccaacgtggccagtggatgcccactcttcttccccctcagcaaactgcagtcacccaagcacgcctacgtgaaggacgacacaatgttcctcaagtgcattgtggagaccagcacttagggtgggcggggctcctgagggagctccaactcagaagggagctagccagaggactgtgatgccctgcccttggcacccaagacctcagggcacaaagatgggtgaaggctggcatgatccaagcaagactgaggggtcgacttcgggctggccatctggttaggatggcaggacgtgggctgggcccacaaaggcaaagggtccagaaggagacaggcagagctgctcccctctgcacggaccatgcgacactgggaggccagtgagccactccggccccgaatgttgaggtggactctcaccaaatgagaagaaaatggaaccaggcttggaaccgtaggacccaagcagagaagctctcgggctaggaagatctctgcagggccgccagggagacctggacacaggcctgctctctttttctccagggtcagaaacaggaccgggtggaagggatggggtgccagtttgaatgcagtctgtccaggctcgtcattggaggtgaacaagcaaacccagagggctccactaggacttcaaattgggggttggatttgaagacttttaagtttccttccagcccagaaagtctctcattctaggcctcctggcccaggtgagtcctagagctacaggggttctggaaacattcaggagcttcctgtcctcccagctcctcactcaccttcagtaacccccactggactgacctggtccacagggcacctgccaccctgggcctggcagctcagcttccccaacacgcaggagcacacccagcccccacatcctgtgcctccatcagctaaacaccacgtcacttcatgcaggtgaaacccagtcactgtgagctcccaggtgcagccagaggcacctcaagaagaagaggggcataaactttcctcttcctgcctagaggccccacctttggtgctttccagaatcccgtaacacctgattaactgaggcatccacttctttcagcagactgatcaggacctccaagccactgagcaatgtataaccccaaagaaataatttttagaaaaaaaaaaaaaaaaaaaa

SEQ ID NO: 26463 - DNA, 3329 bp, Homo Sapiens
ctcttgggagcgggacttctgctcaaatcctgtccaggggcttgaaaaggaggagaattgggggtggttgccgggaggaccagcacctccagttactggagggttgataggggccttctcctttccgtccccctttactagggggtatcccttgcagataaatgagattttttgatttcttaaaaagccagctgcagtgaagaagaactgctgcaggtcgaggggaagagaggaagtgcacggctgtctataacgtgctgccgggtctcaggatggaggagtgaagtctcctgtcgccgtggttccagcctccggagctcgcccaagccgcgtccccagagagcgccctgagagaacagggtggccgcttggtccaggaatgtttacccttgcggaagttgcatcacttaatgacattcagccaacttaccgaatcctgaaaccatggtgggatgtgtttatggattacctagctgttgttatgttaatggtagccatctttgcaggaaccatgcaacttaccaaagatcaggtggtctgtttgccagtattgccatctcctgtaaattcaaaggcacatacaccaccaggaaatgccgaggtcaccaccaacatcccaaagatggaagcagccaccaaccaagaccaagatgggcggacaacaaacgacatttcctttgggacatctgctgtgacacctgacatacctctcagagccacatatcctcgcacagatttcgcacttccaaatcaggaggcaaagaaagagaagaaagatccaacaggtcgaaaaacaaacttggattttcagcaatatgtatttattaatcaaatgtgttaccatctggcccttccgtggtattctaagtactttccatacctagctcttatacatactattattctcatggtcagtagcaacttttggttcaaatatcccaaaacatgctcaaaagtagaacattttgtttcaatattaggaaagtgctttgaatccccttggacgacaaaagcgttgtctgagacagcatgcgaagactcagaggaaaacaagcagagaataacaggtgcccagactctaccaaagcatgtttctaccagcagtgatgaagggagccccagtgccagtacaccaatgatcaataaaactggctttaaattttcagctgagaagcctgtgattgaagttcccagcatgacaatcctggataaaaaggatggagagcaggccaaagccctgtttgagaaagtgaggaagttccgtgcccatgtggaagatagtgacttgatctataaactctatgtggtccaaacagttatcaaaacagccaagttcatttttattctctgctatacagcgaactttgtcaacgcaatcagctttgaacacgtctgcaagcccaaagttgagcatctgattggttatgaggtatttgagtgcacccacaatatggcttacatgttgaaaaagcttctcatcagttacatatccattatttgtgtttatggctttatctgcctctacactctcttctggttattcaggatacctttgaaggaatattctttcgaaaaagtcagagaagagagcagttttagtgacattccagatgtcaaaaacgattttgcgttccttcttcacatggtagaccagtatgaccagctatattccaagcgttttggtgtgttcttgtcagaagttagtgaaaataaacttagggaaattagtttgaaccatgagtggacatttgaaaaactcaggcagcacatttcacgcaacgcccaggacaagcaggagttgcatctgttcatgctgtcgggggtgcccgatgctgtctttgacctcacagacctggatgtgctaaagcttgaactaattccagaagctaaaattcctgctaagatttctcaaatgactaacctccaagagctccacctctgccactgccctgcaaaagttgaacagactgcttttagctttcttcgcgatcacttgagatgccttcacgtgaagttcactgatgtggctgaaattcctgcctgggtgtatttgctcaaaaaccttcgagagttgtacttaataggcaatttgaactctgaaaacaataagatgataggacttgaatctctccgagagttgcggcaccttaagattctccacgtgaagagcaatttgaccaaagttccctccaacattacagatgtggctccacatcttacaaagttagtcattcataatgacggcactaaactcttggtactgaacagccttaagaaaatgatgaatgtcgctgagctggaactccagaactgtgagctagagagaatcccacatgctattttcagcctctctaatttacaggaactggatttaaagtccaataacattcgcacaattgaggaaatcatcagtttccagcatttaaaacgactgacttgtttaaaattatggcataacaaaattgttactattcctccctctattacccatgtcaaaaacttggagtcactttatttctctaacaacaagctcgaatccttaccagtggcagtatttagtttacagaaactcagatgcttagatgtgagctacaacaacatttcaatgattccaatagaaataggattgcttcagaacctgcagcatttgcatatcactgggaacaaagtggacattctgccaaaacaattgtttaaatgcataaagttgaggactttgaatctgggacagaactgcatcacctcactcccagagaaagttggtcagctctcccagctcactcagctggagctgaaggggaactgcttggaccgcctgccagcccagctgggccagtgtcggatgctcaagaaaagcgggcttgttgtggaagatcacctttttgataccctgccactcgaagtcaaagaggcattgaatcaagacataaatattccctttgcaaatgggatttaaactaagataatatatgcacagtgatgtgcaggaacaacttcctagattgcaagtgctcacgtacaagttattacaagataatgcattttaggagtagatacatcttttaaaataaaacagagaggatgcatagaaggctgatagaagacataactgaatgttcaatgtttgtagggttttaagtcattcatttccaaatcatttttttttttcttttggggaaagggaaggaaaaattataatcactaatcttggttctttttaaattgtttgtaacttggatgctgccgctactgaatgtttacaaattgcttgcctgctaaagtaaatgattaaattgacattttcttactataaaaaaaaaaaaaaaaaa

SEQ ID NO: 26464 - DNA, 2931 bp, Homo Sapiens
ggcgcgtgagaaggtggcggtgtaggcacctgcgctcggggaaggctggcggcggcggccgggccatggccagagaccccctcctctgggctccctgaagtcctggggagccgtgacccatgggatcgtcgagcagccgggtgctgggccagccgaggcgagcccttgcccagcaggaacagggtgccagggccaggggctcggcccggaggccggacactggagacgatgcggcgagctacggcttctgttactgccagggcagtcacaagcgcaagcggagcagcggggcctgccgctactgtgacccggactcgcacagggaggagcatgaggaggagggggacaagcagcagccgctcctcaacacccctgcaaggaaaaaattaaggagtacatccaaatatatttatcaaacattatttttgaatggtgaaaacagtgacattaagatttgtgctctaggagaagaatggcgattacacaaaatatatttatgtcaatctggctacttttctagtatgttcagtggttcttggaaagaatccagcatgaatattattgaactggagattcctgaccagaacattgatgtagacgcactgcaggttgcgtttggttcactgtatcgagatgatgtcttgataaaacccagtcgagttgttgccattttggcagcagcttgtatgctgcagctggatggtttaatacagcagtgtggtgagacaatgaaggaaacaattaatgtgaaaactgtatgcggttattacacatcagtagagatctatggattagattctgtaaaggaaaagtgccttgaatggcttctaaacaatttgatgactcaccagaatgttaaactttttaaagaactcggtataaatgtcatgaaacagctcattggttcctctaacttatttgtgatgcaagtggagatggatgtatacaccactctaaaaaagtggatgttccttcaacttgtgccttcttggaatggatctttaaaacagcttttgacagaaacagatgtctggttttctaaacagagaaaagattttgaaggtatggcctttcttgaaactgaaccaggaaaaccatttgtgtcagtattcagacatttaaggttacaatatattatcagtgacctagcttctgcaagaattattgaacaagatggtatagtaccttcagaatggctgtcttctgtgtataaacagcagtggtttgctatgctgcgggcagaacaagaccatgaggtagggcctcaagaaatcaataaagaagacctagagggaagtagcatgaggtgtggtagaaagcttgccaaagatggtgaatactactggtgttggacgggttttaacttcggctttgacctacttgtaatttacaccaatggatacatcattttcaaacgcaatacactgaatcagccatgcagcgggtctgtcagtttacggcctcgaaggagcatagcatttagattacgcttggcttcttttgatagtagtggaaaactagtatgtagtagaacaactggctatcaaatacttatacttaaaaaggatcaggaacaagtggtgatgaacttggacagcaggtttctgaccttccctttatatatctgctgtaacttcttgtatatatcaccagaaaaaggaattgaaaataatcgccacccagaagatccagaaaactgaagatctcatcagttggaaacagtagcactttgaaaactttcaggccagctttaatttaatggccctactgatattcacatctaaggtgactaacaatgacaaaggccttatgaactgtacggacaatacagaagactattcttatcctcattgcatttctatgcatatacaaaaaaaaccattttaaagccaagaaaatatctgtcaaaccatttctgtcagtacgatgtaaactcatgcttttaattcagcatcagcagaaaatgactgtaggtaaatctcacatttatctgcaacaaaatatagatttaatttttagcttaaactttgtttctaccttatgttagtggacctcagttatctatctgtaaatttatttttatttggctaaaataatctaaaagaataatttggatggccaattagcaatgctcttttgagctggggcatttaaagctttcctttaatatttttacctgctcattatgattcctccttttagtctaatatctttccagttcatacttgtttttaatcattaaatactttcttcctggtttggagactaagctgagaaactttttttaaacttaagcattgtcatatgctatttttttaaaatttggctttcctaggattttaagaacaatgaaagttagcttcacaccttcaaatgatcttgaatgagtgaaaaatcagtttgattccagggatatttcttgtcttacatggtcttttctttgacagtctgtacacctttattattagtttttgagttatttatgtaccagatattatacttttaaacattttaatattctctgatctttacaattatttatgttcaaattttagttgggagttttgtttcctacttaagctcaggacttgataccctctgagttgagtggctttgagtgacatgctaacagcaatttcatagtaaatgtaaataaggtcagaggatctaacatagaagctgatgacgcattaatgtaaaaatggaacttatttttgtcaaaaataagatgtacacttgtcatgttttatatacgttgaccttttgtgtttattgctgttttgaatagagccatgttcattttctttccagttagagtaagtacttctgtggttaatgtatatttttattctggcttttaaaatgggaataatttgtatgtatctgtgcaaataataaatgcgcatttggaaaaagaaaaaaaaaaaaaaa

SEQ ID NO: 26465 - DNA, 2191 bp, Homo Sapiens
ccgccgccggagccgcgcgcagccatggccgagaaccccagcttggagaaccaccgcatcaagagcttcaagaacaagggccgcgatgtggaaacaatgcgaagacatagaaatgaagtgacagtggaactgcggaagaacaaaagagatgaacacttattgaaaaagagaaatgttccccaagaagaaagtctagaagattcagatgttgatgctgattttaaagcacaaaatgtaaccctagaagctatattgcagaatgccacaagtgataacccagtggtccaattgagtgctgtccaggcagcaagaaaactgttatccagtgacagaaatccaccgattgatgacttaataaaatctgggattttaccaattctagtcaaatgtctagaaagggatgataatccttcattacagtttgaagctgcttgggcattaactaacatagcatcaggaacttctgcacagactcaagctgttgtgcagtctaatgcagtacctctttttctgagacttcttcgttcaccacatcagaatgtttgtgaacaagcagtatgggctttgggaaacattataggtgatggtcctcaatgtagagattatgtcatatcactgggagttgtcaaacctcttctgtccttcatcagtccctccatccccatcaccttccttcggaacgtcacatgggtcattgtcaatctctgcaggaataaggatcccccaccgcctatggagacagttcaggagattttgccagctttatgtgtcctcatataccatacagatataaacattcttgtagacactgtttgggctctgtcatacttgacagatggaggtaatgaacagatacagatggttattgattcaggagttgtgccctttcttgtgccccttctgagccatcaggaagtcaaagttcaaacagcagccctcagagcagttggcaacatagtgactggcaccgacgagcagacccaggttgttctcaattgtgatgtcctgtcacacttcccaaatctcttatcacacccaaaagagaagataaataaggaagcagtgtggttcctttccaacataacagcaggcaaccagcaacaagttcaagctgtaatagatgctggattaattcctatgataattcatcagcttgctaagggggactttggaacacaaaaagaagctgcttgggcaatcagcaacttaacaataagtggcagaaaagatcaggttgagtaccttgtacagcagaatgtaataccaccgttctgtaatttactgtcagtgaaagattctcaagtggttcaggtggttctagatggtctaaaaaacattctgataatggccggtgatgaagcaagcacaatagctgaaataatagaggaatgtggaggtttggagaaaattgaagttttacagcaacatgaaaatgaagacatatataaattagcatttgaaatcatagatcagtatttctctggtgatgatattgatgaagatccctgcctcattcctgaagcaacacaaggaggtacctacaattttgatccaacagccaaccttcaaacaaaagaatttaatttttaaattcagttgagtgcagcatctttcccacattcaatatgaagcaccaccagatggctaccaaatgataagaacaacagcaacaaaaggctccaaaacacacatgcctctttgttttgatgcttctaaagcaagccatgtctcagtcactttgcagttgccaaaagtcactatcacatggactgtaaatgcatatgcatgatttcctaaactgttttagaactctccttaacaatctcaactaccctatttttccctgttccctggtgccacaggctgacaactgcagtctccagtttagaataaatattccatagtggtgacatgtcagctgcccactgatactcctttggaaaatggtgcgctgtggatcaagacactttggtatgatgcatatacaagttggaagactaaagaggtgcagtgtgatctgagcctccatcattgtcctccacaaacatattttcatattctttatgtggaagaatagattttaaagtacaagccaaatgattttcattggtggaactgacacaaaaaaagtaacttaaaaacaagaaacttggttattgaataaacagataagttttaaaaaaaaaaaaaa

SEQ ID NO: 26466 - DNA, 864 bp, Homo Sapiens
gggtaatttttgtatttttggtagagacggggtttcaccagtgttggccaggctggtctcgaactcctgacctcaggtgatccacccacctcggcctcccaaagtgctgggattacaggcatgaaccaccgtgcccggccgtgatgcgcaactttctaataacatacttttgaaagtgcccagacatacatccctcctctggtaccacagtggccatcagttgccagagaacatgaaattatccagccctcagctctgcagcaggattctgaggagtaaagcaggcctgtaaagtactctaaagtacttcagagaggtaatgccacaaagcgaagaacacctcttggaggcagagcccctcagccctatccaggccagcagtgtccacttgaaatctgaaagcagcctccctcaccaaaccagcaagatggaaaacctccctgggttggcaagtggccctgggaagtacatgccccatctctgtcaggatagcagtggagaggtttcgtgccagtgccagctccacccacccagatggtactcaagactccaagcctgtcaatggggtggaaactttctggcattttctgtcagaagggtgagttagcactgaaccatctcatgtgtcttttcactgagtaacagcccatatccattccatgaaatgagtgactgctttgttgaatcagatagtaacaaacatttatttgtagtctggttgtgtcatatcatggttgaattgcaaacaggttggatagaagagtcagcaaaaatcaacaaaagcattctgtaaaaaacttttctagaattacaataaatggcattgtatattgtaaaaaaaaaaaaaaaaaaaaaaaaaaaaaa

SEQ ID NO: 26467 - DNA, 2607 bp, Homo Sapiens
cacgattcatttcattgaagagatgatgccggagaatttttgtgtgaaagggcttgaactcttttcactgttcctattcagagatattttggaattatatgactggaatcttaaaggtcctttgtttgaagacagccctccctgctgcccaagatttcatttcatgccacgttttgtaagatttcttccagatggaggaaaggaagtgctgtccatgcaccagattctcctgtacttgttaaggtgcagcaaagccctggtgcctgaggaggagattgccaatatgcttcagtgggaggagctggagtggcagaaatatgcagaagaatgcaaaggcatgattgttaccaaccctgggacgaaaccaagctctgtccgtatcgatcaactggatcgtgaacagttcaaccccgatgtgattacttttccgattatcgtccactttgggatacgccctgcacagttgagttatgcaggagacccacagtaccaaaaactgtggaagagttatgtgaaacttcgccacctcctagcaaatagtcccaaagtcaaacaaactgacaaacagaagctggcacagagggaggaagccctccaaaaaatacggcagaagaatacaatgagacgagaagtaacggtggagctaagtagccaaggattctggaaaactggcatccgttctgatgtctgtcagcatgcaatgatgctacctgttctgacccatcatatccgctaccaccaatgcctaatgcatttggacaagttgataggatatactttccaagatcgttgtctgttgcagctggccatgactcatccaagtcatcatttaaattttggaatgaatcctgatcatgccaggaattcattatctaactgtggaattcggcagcccaaatacggagacagaaaagttcatcacatgcacatgcggaagaaagggattaacaccttgataaatatcatgtcacgccttggccaagatgacccaactccctcgaggattaaccacaatgaacggttggaattcctgggtgatgctgttgttgaatttctgaccagcgtccatttgtactatttgtttcctagtctggaagaaggaggattagcaacctatcggactgccattgttcagaatcagcaccttgccatgctagcaaagaaacttgaactggatcgatttatgctgtatgctcacgggcctgacctttgtagagaatcggaccttcgacatgcaatggccaattgttttgaagcgttaataggagctgtttacttggagggaagcctggaggaagccaagcagttatttggacgcttgctctttaatgatccggacctgcgcgaagtctggctcaattatcctctccacccactccaactacaagagccaaatactgatcgacaacttattgaaacttctccagttctacaaaaacttactgagtttgaagaagcaattggagtaatttttactcatgttcgacttctggcaagggcattcacattgagaactgtgggatttaaccatctgaccctaggccacaatcagagaatggaattcctaggtgactccataatgcaactggtagccacagagtacttattcattcatttcccagatcatcatgaaggacacttaactttgttgcgaagctctttggtgaataatagaactcaggccaaggtagcggaggagctgggcatgcaggagtacgccataaccaacgacaagaccaagaggcctgtggcgcttcgcaccaagaccttggcggaccttttggaatcatttattgcagcgctgtacattgataaggatttggaatatgttcatactttcatgaatgtctgcttctttccacgattgaaagagttcattttgaatcaggattggaatgaccccaaatcccagcttcagcagtgttgcttgacacttaggacagaaggaaaagagccagacattcctctgtacaagactctgcagacagtgggcccatcccatgcccgaacctacactgtggctgtttatttcaagggagaaagaataggctgtgggaaaggaccaagtattcagcaagcggaaatgggagcagcaatggatgcgcttgaaaaatataattttccccagatggcccatcagaagcggttcatcgaacggaagtacagacaagagttaaaagaaatgaggtgggaaagagagcatcaagagagagagccagatgagactgaagacatcaagaaataaaggagggcatgcaagtgtggagtatttacttgctcagtaactgtgactgttgtctattgagacctagcctagttttcctgcagacaatgaacgaagtgtgctcattgaaataaaatacagagtcaaatcgctattgttgttttaatgatctgtttttagctggatggtctttattacaaagtattagatttttcttctatttaacggaaaacttgactttggtgaatgtgcattacttccttttattttgctctttaaataataaaattcaagaagcatattctaaaaaaaaaaaaaaaaaaaaaaaaaaaaaaaaaaaaaaaaaaaaaaaaaaaaaaaaaaaaaaaaaaaaaaaaaaaaaa

SEQ ID NO: 26468 - DNA, 2825 bp, Homo Sapiens
gaggagagctggttgcgtgagtctcctcagctctgcttaccggtgcgactagcggcagcgacgcggctaaaagcgaaggggcgagtgcgagtcccctgagctgtacgaacgcggtcgccatggaccgcccagatgaggggcctccggccaagacccgccgcctgagcagctccgagtctccacagcgcgacccgcccccgccgccgccgccgccgccgctcctccgactgccgctgcctccaccccagcagcgcccgaggctccaggaggaaacggaggcggcacaggtgctggccgatatgaggggggtgggactgggccccgcgctgcccccgccgcctccctatgtcattctcgaggagggggggatccgcgcatacttcacgctcggtgctgagtgtcccggctgggattctaccatcgagtcggggtatggggaggcgcccccgcccacggagagcctggaagcactccccactcctgaggcctcgggggggagcctggaaatcgattttcaggttgtacagtcgagcagttttggtggagagggggccctagaaacctgtagcgcagtggggtgggcgccccagaggttagttgacccgaagagcaaggaagaggcgatcatcatagtggaggatgaggatgaggatgagcgggagagtatgaggagcagcaggaggcggcggcggcggcggaggaggaagcagaggaaggtgaagagggaaagcagagagagaaatgccgagaggatggagagcatcctgcaggcactggaggatattcagctggatctggaggcagtgaacatcaaggcaggcaaagccttcctgcgtctcaagcgcaagttcatccagatgcgaagacccttcctggagcgcagagacctcatcatccagcatatcccaggcttctgggtcaaagcattcctcaaccaccccagaatttcaattttgatcaaccgacgtgatgaagacattttccgctacttgaccaatctgcaggtacaggatctcagacatatctccatgggctacaaaatgaagctgtacttccagactaacccctacttcacaaacatggtgattgtcaaggagttccagcgcaaccgctcaggccggctggtgtctcactcaaccccaatccgctggcaccggggccaggaaccccaggcccgtcgtcacgggaaccaggatgcgagccacagctttttcagctggttctcaaaccatagcctcccagaggctgacaggattgctgagattatcaagaatgatctgtgggttaaccctctacgctactacctgagagaaaggggctccaggataaagagaaagaagcaagaaatgaagaaacgtaaaaccaggggcagatgtgaggtggtgatcatggaagacgcccctgactattatgcagtggaagacattttcagcgagatctcagacattgatgagacaattcatgacatcaagatctctgacttcatggagaccaccgactacttcgagaccactgacaatgagataactgacatcaatgagaacatctgcgacagcgagaatcctgaccacaatgaggtccccaacaacgagaccactgataacaacgagagtgctgatgaccacgaaaccactgacaacaatgagagtgcagatgacaacaacgagaatcctgaagacaataacaagaacactgatgacaacgaagagaaccctaacaacaacgagaacacttacggcaacaacttcttcaaaggtggcttctggggcagccatggcaacaaccaggacagcagcgacagtgacaatgaagcagatgaggccagtgatgatgaagataatgatggcaacgaaggtgacaatgagggcagtgatgatgatggcaatgaaggtgacaatgaaggcagcgatgatgacgacagagacattgagtactatgagaaagttattgaagactttgacaaggatcaggctgactacgaggacgtgatagagatcatctcagacgaatcagtggaagaagagggcattgaggaaggcatccagcaagatgaggacatctatgaggaaggaaactatgaggaggaaggaagtgaagatgtctgggaagaaggggaagattcggacgactctgacctagaggatgtgcttcaggtcccaaacggttgggccaatccggggaagagggggaaaaccggataagggttttccccttttggggatcacctctctgtatcccccacccactatcccatttgccctcctcctcagctagggccacgcggccccacattgcacttctggggggtgaccgacttcgtacacgggtttaaagtttatttttatggtttagtcattgcagagttcttattttggggggagggaaagggggctagtccccttcttttggccctccgcccccgcaggcttctgtgtgctgctaactgtatttattgtgatgccttggtcagggcccctctacccacttctcccagtcagttgtggccccagcccctctccctgtgctgtgtggagtggacaccctgacccccgaagcggggagggccgctgtggccttcgtcacagccgcgcagtgcccatggaggcgctgctgccaccttcctctcccaagttctttctccatccctctcctcttcccgccgcgccgctagcccgcctcggtgtctatgcaaggccgcttcgccattgcggtattctttgcggtattcttgtccccgtcccccagaaggctcgcctctccccgtggaccctgttaatcccaataaaattctgagcaagttcaaaaaaaaaaaaaaaaaaaaaaaa

SEQ ID NO: 26469 - DNA, 1651 bp, Homo Sapiens
aagagatcgagctccctggctgccggctcgccttctgcgtggagttctcgcggtctgggtttcgctgtctgctcttggcccggggtcattttgtcggcgtcgggtgccctctcttgcccagctggggcacagcgaggcggccccttctcccgacgacgttcgatggagtagggtcccagaccgttgtcccgaagagcgagatcgagcttggccccctcccccccctccttccctccctccttccttccgccgcaacatggctaacaacagccccgcgctgacaggcaactcgcagccgcagcaccaggcggctgcagctgcggctcagcaacagcagcagtgcggcggcggcggcgctaccaagccggcggtctccggcaagcagggcaatgtgctcccgctctggggcaacgagaagaccatgaacctcaaccccatgatcctgaccaacatcctgtcgtcgccttacttcaaagtacagctctacgagctcaagacctaccacgaggtggtggacgagatctactttaaggtcacgcacgttgaaccatgggagaaaggaagcaggaaaacagcgggccagacagggatgtgcggaggggttcgaggtgttggaacaggaggaattgtttctacagcattttgcctgttatacaaattatttaccctgaagttaactcgaaagcaagtgatgggtcttataacacacacagactctccatatattagagcgcttggatttatgtatataagatatacacagccccctacagatctgtgggactggtttgaatccttccttgatgatgaagaggacctagatgtgaaggctggtggaggctgtgtaatgaccattggagaaatgctacgatcttttctcacaaaactggagtggttttctaccttgtttccaagaattccagttccagttcaaaagaatattgatcaacagattaaaacccgacctagaaaaatcaagaaagatgggaaggaaggtgctgaggaaatagacagacatgttgaacgcagacgttcaaggtctccaaggagatctctgagtccacggaggtccccaagaaggtcaagaagtagaagtcatcatcgggagggccatgggtcttctagttttgacagagaattagaaagagagaaagaacgccagcgactagagcgtgaagccaaagaaagggagaaagaacggcgaagatcccgaagtattgaccgggggttagaacgcaggcgcagcagaagtagggaaaggcatagaagtcgcagtcgaagtcgtgataggaaaggggatagaagggacagggatcgagaaagagagaaagaaaatgagagaggtagaagacgagatcgtgactatgataaggaaagaggaaatgaacgagaaaaagagagagagcgatcaagagaaaggtccaaggaacagagaagtaggggagaggtagaagagaagaaacataaagaagacaaagatgataggcggcacagagatgacaaaagagattccaagaaagagaaaaaacacagtagaagcagaagcagagaaaggaaacacagaagtaggagtcgaagtagaaatgcagggaaacgaagtagaagtagaagcaaagagaaatcaagtaaacataaaaaaaaaaaaaaaaaa

SEQ ID NO: 26470 - DNA, 2474 bp, Homo Sapiens
gcgaagtgggcctcgctctcccgggttcgcagccgtagccagatccgttgaaaggagtgcagagaggtctcattgcgctcccgaacagacctgacgtagatccgaagtggcccgcgccatctcaactatgaggggacacccgtaggcggcgggagagggacgccgcgaggagccaataaagctccgcaaccggaagtgtcttctgggaggggtcgtacccggaagtgtggcacctcccgggccgcacccggaagtgtgatgccaccgccgctacggggaagtaatggtatccggccaattgagattcggagttaaaacagggatgtgcagatggaggtcggaggagacactgctgccccggcccccgggggcgcggaggacttggaggacacgcagttccccagtgaggaagctagagaaggtggaggggttcacgcggtcccgccggatcccgaagacgagggcctggaggaaacaggatccaaggacaaggaccagccacccagcccatcaccaccgccccagtcagaggccctgtcaagcacctctcggctctggagtcctgcagcccctgagaatagtcccacatgtagccctgagagtagctctggaggccagggcggggaccccagtgatgaggagtggcgcagccagcggaagcatgtgtttgtgctgagtgaggctggcaagcccatctactcgcggtatggtagtgtggaggcgctgtcggctaccatgggtgtaatgaccgccctggtgtcctttgtgcagagtgcgggagatgccatccgtgccatctacgctgaggaccacaagctggtgttcctacaacagggcccactgttgctcgtggccatgtcacggacttctcagtcagcagcccagctgcggggggagctgctagctgtgcacgcacagatcgtgagcacacttacacgtgcaagtgtcgcccgcatcttcgcacacaagcagaactatgacctccgccgcctgctggctggttcagagcgcacactggaccgacttctggacagtatggagcaggacccaggagccctgctcctgggtgccgtgcgctgtgtgccccttgcccgcccgctgcgagacgcactaggtgcgctcctccgacgttgcacagcgcctggcctggcgctgtcagtgctggcagtaggcggtcgacttataacagcagcccaggagcggaatgtgctggccgagtgccggctggacccagctgacctgcagttgctgctcgactgggtgggtgcaccagcctttgcggcgggtgaggcttgggcacctgtgtgcctgccccgcttcaaccctgatggttttttctacgcctacgtggcccgcctggatgctatgcctgtctgcctgctgctgcttggcacccaacgtgaagccttccatgccatggccgcctgccggcgcctggttgaagatgggatgcatgcccttggtgccatgcgtgcccttggggaggctgccagcttctctaatgcctcatcagccagtgctcctgcctacagcgtgcaggctgtcggggcgccgggcctccggcacttcctgtataagccgctggacatccctgaccaccaccgccaactgccccagtttaccagccctgagctagaggccccctacagcagagaggaggagcggcagcggctgtcggacctgtaccaccgcctgcatgctcgtctccacagcacctcccgacccctgcgcctcatttaccacgtggctgagaaggagacactactggcctgggtgacctccaaattcgagctctatacctgcctcagccctctggtgaccaaggcaggtgcaatcttggtagtgaccaaactcctgcgctgggtgaagaaagaggaggaccggctcttcattcgttacccacccaagtactccacaccaccagccacctctacggaccaagctgcccataatggcttgttcactggactctgatagttggagctcccagaccaggcagtgctgggagcaaccacctttgttttttaccttctgtctaccctggaaatgtgtgtgggggtgtgtctgtggccagtcattgtctccctaagcaatggggcaaggtctgagggcccaccgatgagagagatggtggcagccgccaggcgagcaggctgctttccctgcccagtcatgcacctccccctctggggaaatccttaggcctccctctcccttccctctgtctcatctcctccacttggatgatgctctagcctctgtcagggactgtcccctccaaacttgcttccgtggtctgcctcctagttgaatctcagccctgagtgtccagatctggccaaggtgtctagggtggcccacgggggtgctggaattggcacttcagggccaggctatgcttgggactggcctgagggtattttaaagaaaaaaactacataaaaggcctaaaagtaaaaaaaaaaaaaaaaaaa

SEQ ID NO: 26471 - DNA, 2172 bp, Homo Sapiens
gcagcccggagacagcctccctggctgggaatgaacgcagggcagagctcggctccgggcttcctccccagggactcacaggacgctgtgcagccccaccccccaacccaggcccggctttctgggactcacaagctatggtcaggagcgagacgccgaccatggggaaaaacagattctgtctagacccggccgggagctttcccgagagggctccgagacggacggcagtcgatgctacttagggtggacggaaggacggcggggtttggaagctgggcccagaagagtgggtttgcctgtgtcgttgtgggttctctgatggggacacagaactgtggggtcccgggcagtaactcgagcccgcggaagacaggcatgtgtgggggctgcggcaccaggctgggcagcatctcaggaagcaagtgagtacctgtgcttggttccaaggcggccatgaacttacctcactgttcaggaaacagtagaggacggccaccaccaggccctgcaatgagaagagatggtcaggcaggacccgcgctcgggggagggcggccgcctccgcacacctacctggaacgacccgaggcacagctcaaacagtatctggtatttggaggagatgctgatgggaaacacggcaaacaccatgtagtggacgccgaacagcgggataagcaggagcgtggacttggccagcctcctgcacagaaggagatgagccagctcagctgctggaccctcggaccctctgcaagcctggctgggtccttctcaggagggggcagctgggtgtgggaggggctccacacctcctctccactgctggagtccccgcccaacaagaaaaaccactgtttctttacgtttatgtctgaggcccctgtgcatatctagcactcagggcctgggaacgtgcattccggaagtgtccgtttctcccaaattccctcacaaggacacacgctgtgtcctggggttcatggctggcaggggcaagattccctgtgagtgaccccaaacctacacaggccccgcctgggagcccggcccatcctgaggcaggcatgggacaagaaggctggcctccaccgctgccacacgcaggtttaaatgatgagaaccgatcctgctcccggacctgcagctcgtaacagctgggctccgtgggagccaggtccctcagtcagcggcagaggacctgcctgattccctctattaacgcatctgaagtttgctggaaaagaggcctatctgcggctgagctcttggcccctatccagggaggttttgctacttctgtgaccagagttacacagaaaggacctcgtgtggcctcaagggtgtctcggccttttctgttgtcctggaaagggaacagattttgtttccaaataaaagcatccatctccaagtccaatttaacaaacactcccaaagaaccaatgcaaaggtcagcatagaaactaaacaagattcacaggaaatccaagttcaacctgaaaggcaaccaagaacgatcttattcgggggtctctgccacacaggcaccaccggactcccctgagcagggacaaggtcatgctgccatgcggggtctgacatggaatcccatccctcgtgtgggcaagcagagacgggatactccctggatttagacactacacagcagaattagattctctggtttaccagactcttttgcaatactctggtgccaggcagcaaatatccggcaaatatagactgcattgatcctcctgaccttagtgacattattacttccatgttacagatggggaagctgaggcatggagtggcaaagtgacttccctcagggcactggccggtatctgcacccagctttggggctgttggccatgctcctgtctaaccgcccctccccaaatccatccctgttttctaaggtgggagaaaagggaaatgcaggccaggcaccctcctaggctgggcggcagggttcctgccatggtacagctctgtgcacagccgcccttccacccccggtcagtctgagcccgaggcaccttctgggctgggccaaccacttccacaccaagccagtgtttagtttatacttgaattttggtttttacctttttaaaaaaaaaataaattcttgatataaaaaaaaaaaaaaaaaaaaaa

SEQ ID NO: 26472 - DNA, 4565 bp, Homo Sapiens
attgttcctcagtgaacttccaccacatccctaaaatcttggaggggcagaccactggacaagagcaagacacaaatgtgaacatatgtgaggatggtaaagaccatatgcagagttcagctttagtagaaagtctaattacagtaaaaatggcagctgagaatagtgaggaaggcaatacctgtattattcctcaaagaaatttgttcaaagctttatcagaagaggcttggaactcagggtttatggggaactcatctagaactgctgacaaagagaatactttacagtgtccaaaaacacctttgcgccaggatttagaggcaaatgaacaagatgcaaggccaaagcaagagaaccatcttcactctctgggaagaaataaggtgggttaccatttacatcccagtgataagggccagtttgatcattccaaagatggttggttaggccccggccctatgccagctgtacacaaagcggcaaatggacactcaagaaccaagatgatatcaacctccatcaagacagctcggaaaagtaaaagggcatcagggctgaggataaatgattatgataaccagtgtgatgttgtttatatcagtcaaccaataacagaatgccactttgagaatcaaaaatcaatattatcttctcggaaaacagccagaaagagtactcgaggatactttttcaatggtgactgttgtgagctgccaactgttcgtacactggccagaaatttacactcccaggaaaaagcaagctgctcagcattggcatcagaggcagttttcactcctaagcagacccttacaattccagcccctagacatacagtagatgtgcagcttcccagagaagacaaccctgaagaacctagcaaggaaatcacctctcacgaggaaggaggtggagacgtttcacctcgaaaagaacctcaagagcctgaggtttgccccacaaagattaagccgaacctgagcagctcccctaggtcagaggaaacgacagcctccagcctggtgtggcctctccctgctcaccttcctgaagaggacctgccagaaggtggctccacagtctcagctcccacagcaagtgggatgtcttctcctgaacacaaccaaccaccagttgcactgttggatacggaggagatgagtgtaccccaggactgtcacctccttccctccactgaaagcttttccgggggagtcagtgaagatgtcatttctaggcctcattctcctcctgaaatagtcagtagagaagaaagtcctcagtgctcagaaaatcagagttccccaatgggcttggagccccccatgagtctgggaaaggctgaggacaaccaaagcatcagtgctgaggttgagtctggagacacccaggagctaaatgtcgacccactcttgaaggaaagcagcacttttactgatgaaaaccccagtgaaactgaggaaagtgaggcagcaggtggtataggaaaattagagggagaggacggtgatgtaaaatgcctgtcagaaaaagacacgtatgatacaagcattgactcactcgaagagaatttggacaagaagaaaaaaggtaaaaaattccctgaggcctctgataggtgcctaagaagtcaactttcggattcttcctctgctgacagatgcctaagaaatcagagttcagattcttcctcagcttgtcttgaaatcaaagttcctaaaaatcctagtgcaaaacgttcaaaaaaagaagggcaccctggtgggacaacacctaagggccttctacctgacagtttccacacggaaactctggaggacacagaaaagccaagtgtcaatgaacgcccctctgagaaagatgctgagcaggagggcgaaggcggggggatcatcaccaggcagactttgaaaaacatgctggacaaagaagtcaaggagttacgaggagagattttccccagcagggaccccataaccacagctggacagccactgcctggagagagattggaaatctatgttcagtctaaaatggatgagaagaatgctcatatcccctcagaaagtattgcttgtaagagggacccagaacaggcaaaagaagagccagggcatattcccacacagcatgtggaggaggctgtgaatgaggtagacaacgaaaacacccagcagaaagatgatgagagtgatgccccatgcagctctcttgggttgtcgagtagtggaagtggtgatgctgctagggcaccaaaatcggtgccaaggcctaaaagattgacctcttcaacctacaacctaagacacgctcattctctgggctccttggatgcttcaaaagtgacttcagaaaaggaagctgcacaagtaaaccccataatgccaaaggaaaatggagcttcagagagtggagaccccctagatgaggacgatgttgacaccgtggtagatgaacagccaaagtttatggaatggtgtgctgaggaggagaaccaagagctcatcgccaacttcaatgcccagtacatgaaagttcagaagggctggatccagttggagaaagaaggacagccaacaccaagagcaaggaacaaatcagataaactgaaagagatttggaaaagcaagaaaaggtcacggaaatgtaggagttcattggagagtcagaagtgttctcctgttcagatgctctttatgacaaactttaaattatctaatgtttgtaaatggttcttagagacaactgaaacccggtctctagtcattgtgaagaagctcaatactcgccttccaggagacgttccccctgtcaagcatcctcttcagaaatacgctccttccagcctatatcccagttcactacaggctgagcgcttgaaaaagcacttgaagaaatttcctggagctacccctgctaagaataattggaaaatgcagaagctctgggccaaatttcgagagaatcctgatcaagtggagccagaagatggcagtgatgtcagccccggccctaattctgaagacagcatagaggaagtcaaggaagatagaaacagtcatcctccagcaaacctgcccactccagccagtacccggattcttagaaaatattccaatattcgaggaaagctcagagcccagcaacgtttaatcaagaatgagaaaatggaatgcccagatgctctggctgtggaaagtaagccaagtcgtaagagcgtatgcatcaaccctctgatgtcccccaagcttgccctgcaagtggatgcagatgggtttcctgttaagcccaagagtactgaaggaatgaagggaaggaaggggaagcaggtgtctgaaatcttgcctaaagcagaagttcagagtaaacgcaagagaacagaaggcagcagccctccagatagtaagaacaaggggcctacggtgaaagccagcaaagaaaagcatgctgatggagccaccaaaacccctgctgccaagaggccagctgcaagggacagaagcagccaaccccccaaaaagacgtctttgaaagagaataaagtgaagatccctaaaaagtccgctgggaagagctgccctccctccaggaaagaaaaagagaatacaaacaaaaggccttcccagtctattgcctcggaaacactgacgaaacctgcaaaacagaagggggccggtgaatcctcttcaaggcctcagaaagccacgaataggaagcagagtagtggaaagactcgggccagaccctcaacgaaaaccccagagagcagtgcagctcagagaaagcgaaagctgaaggcaaagctggactgttcgcacagcaaacggaggcggctggatgcaaagtgattggaaagatggtagccaagagtaaaactgttctatagaagtaaccttttattttgcattaactaaatctgcttttataagcttatcaagcctttcaaatttacagttaatggagaacaccgtaatttgagatgtcagaaaatgcatctcagatggagaagggaacttgcagagtccttctctgaggctaagggaagttatatattatattctggttgttccttgggttttaaacttggaaccaagcagttttcgtttttaaaagtacagtgccttatttatcctttttgtttttaaatttacaaaagctaaaaagctgatctatgtgattaaaggcttgtattttatacttgatgcacaagcacttgtactgtagccgagaagaccaccatcatgcacataaaaggagcttttcagcagccaccctgcagcatctgcccacgaacagatgcccttctttgcaaaccccagcagtgaacttccctctctgtcttgtttgtttgtttagatgatgtttgaaagctaaaccaaatcattttatggtatgcagaggatttataattataaaagattactatttctgttacccccttttaaaaaagatcatgttcattgttggtccctcctctcacctttgatgttttgtcatttgagagcatgtattctaaattatgtgcccatgggacaagagataaaaaaaaaaaaaaaaaaaaa

SEQ ID NO: 26473 - DNA, 5293 bp, Homo Sapiens
aatcatttcaattatatctacatcaaataaaataaaaatgagtgaagcccccagattcttcgttggaccagaagatacagaaataaatcctggaaattatcgacatttcttccaccatgcagatgaagacgatgaggaggaagatgattctccaccagaaaggcagattgtggttggaatatgttccatggcaaagaaatccaaatccaaaccaatgaaggaaattcttgaacggatctccttatttaaatatatcacagtagtagtatttgaagaggaggttattttgaatgaaccagtggaaaactggcctttatgtgattgtcttatttctttccattctaaaggatttccactggacaaagcggttgcctatgcaaaactcaggaatccatttgtaatcaatgacttgaatatgcagtatctcatacaagataggagagaagtatatagtattcttcaagctgaaggtattttacttcctcgttatgctattttgaaccgtgacccaaataatcccaaagaatgtaatctgattgaaggggaagatcatgtagaagtaaatggggaagtttttcaaaagccatttgtagaaaagccagtcagtgcagaagatcacaatgtttacatttattacccaacttctgctggtggtggaagtcaaagactctttagaaagattggcagtagaagtagtgtttattctccagaaagcaatgtacgaaaaacaggctcatatatatatgaagagtttatgcccacagatggtactgatgttaaggtttatacagtgggtccagattatgcccatgctgaagctcgaaaatctccagcacttgatggcaaggtggaacgagacagtgaaggaaaagaagtaagataccctgttattctcaatgcacgagagaaattaattgcttggaaagtctgccttgcttttaagcaaacagtttgtggctttgatttgttacgggccaatggacagtcctatgtctgtgatgtcaatggcttcagttttgtgaaaaattccatgaagtattatgatgactgtgcaaaaatacttggaaatattgtaatgcgagaacttgctccacaatttcatattccatggtcaatacccttagaagctgaagatatcccaattgtaccaactacatctggaactatgatggaacttagatgtgtcatagctgttatacgtcatggggatcgaacaccaaaacaaaaaatgaaaatggaagtgagacatcagaaattttttgatctttttgaaaagtgtgatggatataaatcagggaaattaaaactcaaaaaaccaaaacagttacaggaagtgctagatattgcacgacagcttcttatggagctagggcaaaataatgattctgaaattgaagaaaacaagccaaaacttgaacaacttaagactgtattagagatgtatggtcatttttctggaataaatcgtaaggttcagttgacctatctccctcatggttgtcctaaaacatctagtgaagaggaggacagccgaagagaagaaccatctttacttttggttctaaaatggggaggtgaattaactcctgcaggcagggtccaggctgaagaacttggaagagccttcaggtgtatgtatcctggaggtcaaggagattatgcaggatttcctggttgtggtttacttagattacatagcacctacagacatgacctcaaaatatatgcctctgatgaaggacgagtccagatgactgcagctgcttttgcaaaggggcttttagctttggaaggagagcttacacccattcttgttcaaatggtgaaaagtgcaaatatgaacggtcttttggatagtgatagtgactctctgagcagttgtcagcaacgtgtgaaggcaaggcttcatgaaatacttcagaaagacagagattttactgctgaagattatgaaaagcttactccatctggaagcatttctcttatcaaatcaatgcatttaattaaaaaccctgtgaagacctgtgataaagtttattccttaattcagagtttgacttctcaaatcagacatcgaatggaagatcctaaatcatcagatattcagctttaccatagtgaaacattggagcttatgctacgtagatggtccaagttagagaaagactttaaaacaaagaatggaagatatgatattagtaaaatccctgacatatatgactgtataaaatatgatgtccagcataatggttccttgaaattagaaaacacaatggaattatataggctttcgaaggcattagcagatattgttatccctcaggaatatggtataactaaagctgaaaaactggagattgccaaaggctactgtactcctctggttagaaaaattcgctcagaccttcagaggacacaagatgatgacactgtaaataaacttcatcctgtgtattctagaggtgttctgtctcctgaacgtcatgttcgtactagattatattttaccagtgaaagtcatgtacattctttgctgtctattcttcgctatggtgccttatgcaatgaatcaaaggatgaacagtggaaacgagctatggattatttaaacgttgtcaatgagctcaactacatgactcagattgttatcatgctttatgaggatcctaataaggatctttcctcagaagaacgctttcatgttgaattacactttagtccgggagccaaaggttgtgaagaagacaaaaatttgccatctggctatggatatagaccagcttccagagagaatgaaggcaggagaccttttaaaattgataatgatgatgaaccacatacttctaaaagagatgaagttgatcgagctgtgatattgtttaaaccaatggtatcagagccaattcatatacacaggaagtctccacttccaagatctaggaagacggctacaaatgatgaagagagccccctgagtgtgtctagcccagagggtactggtacctggctgcattataccagtggtgtgggtactgggcgtcgaagacgcagatcaggggaacaaatcacttcttcccctgtctcccccaaatcattggctttcacatccagtatttttggctcatggcaacaggttgtatctgaaaatgctaattacctgcgaacaccaagaactcttgtggaacagaagcagaatcctactgtagggtctcactgtgcgggcctgtttagcacctcggtgctcgggggttcttcaagcgcacctaacctacaggattatgctcgtactcatcgtaaaaagctgacctcttctggctgcatagatggctttgaattgtattccatggtgccatctatttgtcctctagaaactcttcataatgccctatctttaaagcaagtggatgaatttcttgcttccattgcttctccatcatctgacgttccacggaagaccgctgaaatttcctctacagctttacgttccagtccaataatgagaaaaaaagtatctttaaatacgtatacacctgcaaagatcctcccaacaccaccagctaccttaaagagcactaaagcaagcagcaaaccagctacaagtggaccttctagtgcagttgttcctaatacctcatctcggaaaaagaatataactagcaaaacagaaacgcatgaacacaaaaaaaacactgggaaaaagaaatgaaatcttagcagaagctggaactttttatacttataaaaatagtgtgttcttatgtttctccttatgcatttatgtgttcacttaaaaatgtttttaaatctaaggttttctttgtttatgttcaggtaaggaactgttgtcatgatctggaaatgtttaaaacaatgtttgttagcattctgtgagcagcaaaacttatagtgataaaaatcgattgttgttaatatgatgtttaccatgtgcacatagtaatgaaaaggaacataaaagcccagcaggctcgtaccaaagtcacagcagtaatgctatgtactgcagagtctgatgagctggcctttgtgcacacttttattttcatgggattgcatcttagctgttaaaacttctagattgaaatttgacagccagggttacatattggggacttttaaagtgtctttccaaagagatttcattaaccgtttagattagaatatctttcccaattgttacagtgacatatatgctgcaatatttaacaactggagtattagccacatgggttattttttcaatctgtgttttgaatttttttattgtgtgttatttaaaatattacatatgcagctgggagaactacacctttgtgcacatagatttatatattaatttgtagaaaatattttctttatatatttccttaccatacaaggtgccttgttcatcaggaaaacttttgttttgtattttgacaagaaaggcaccttcagagtttctttttaagtatagttgacaagtgtataaatgttacacttactttcagagttctttttagatctaaagaagtcagttcaaaaatggaaatcaacaatgttaggagaaatctgaattctgttaagttagtaagtattatgtatagcatctgtttttaaccatttccattcttatccctagtgtatcagttgatcacactaagaaagcttaaagattgagcatttgaaataaatgctctttataaatgattagatttttgaagggatattgaaatcattgcgctgtgatttcatctgtgatgtgaaaaatcaatttattatccttggtgctttcccccccaccaatgcacaaataattgtgaacagcttgaaatgacttaaactgtaatccaaatgggacaatctgataagaatttcatgcattggtagttaaataacttaaattgctaaagctttagcttgaaatttatgtttagaaaaactattgatttcccatggtatgaatataactattgtaattcttcaaatgagactcttctcaccttaaatagtcatatattaattaacttataggaaataagcatactatatgttagctgttttaaaaggtaccagatgtaagagtcataaatatatgcaattaaagaagttcatagatttcacacgaatgtaaatgtgttatatggagacatgtcttgtaaacagttgaatgtatgtaagttttctgtttgtgaaaatgtagttaatgtactcactgtggaggtcataaggaagctactttttttttaaagtggaacctaattaaaatatttccagaatcaaaaaaaaaaaaaaa

SEQ ID NO: 26474 - DNA, 1390 bp, Homo Sapiens
ctctgccaaggcgcctatgagagcctcttggcttttacctggtctgcgagaaatcaaactttgggcacaagtcatgaagccgacaagcccgggagacacagtgtcagaattacaaggtgagatcagccgcccggccaagctatcttctcgctagcaggtcccgcatctggggctcgatctcgtgcagaggagcatttccgaagacactggccgctcccacaatggctccgaagaccccagcgaccagcgggttcatgagtttgttggggctgtccactcggtaccagctgcgcagggatgtcaggacaaagaaacaagttgcctggttccagccctgcttcagcacggggcctgtggggccccggtaagtcccggtgttcccgcacaatctcctaaccctgtggaagaatcccctgtacttggatttggagaggtctggccatggattaacttcaccttgatggtctccatgggacataggaccaccacggcctcggccacgctagctcactggccgcaccgctgcccgccttgctgttcaccagtccctgggcatcccgcatctggttgctgaggaacgcctgacgccgccttgtggatgaagccgcagagcagggagctgaggctgcggcccaggcccaggctgccttggctgcgactgtgtgcctgcaggccccatgcccggtatccggtggatgcgagtgctagtccagctgcagctgcatcttcacgaactcggtggggaacgggatgcagattttttttttcttttccttccttccttccttccttccaacttccttccttccttcccctttctttctttcttttttttttttttttgacataattttgctcttgtcccccaggctggagtgcagtggcgcgatcttggctcactacaacctggattcaagcgattctcctgcctcagcctcccgagtagctgggattacaggcatgtgccaccattcccggctaatttttttgtctttttagtagagacggtgtttccccatgttggtcaggctggtctcaaacgcctgactcagatgatccgcccgcctcggccacccaaagtgctgagattacaggcttgaaccaccgcgcctggccctgtgatgtagattttgatgctgccagccaggctgcctgccgggatcgcctgccctggagcaggagcatcagccgtgcgttccaggacgcaggcatggcatgaccggcaggaggcggagtgcccggcgtctcttgggatcggagcctcctgaattccacgctgggaccttaatttggttttaacacaaataaagatctcacataaagataaaaaaaaaaaaaaaaaaaaaaaaaaaaaaaaaaaaaaaaaaaaaaaaaaaaaaaaaaaaaaaaa

SEQ ID NO: 26475 - DNA, 4104 bp, Homo Sapiens
gaagtgtataagtctgaggacagattagaaagacttcaggaaattctaaggaaatttctgtacctggagagagagtttaggcaaataacaatcagcaaggaaaccttcaccagtgagaagaacaatgaatgtcatgaacccgaaaaaagcttcagtctggactctactattgatgcagatcagagagttcttagaatacagaataccgatgacaatgataagtatgacatgagcttcaaccagaattcagcctctggtaaacatgaacacttaaatctaacagaggattttcagagtagtgaatgtaaggaaagcttaatggatctctcccaccttaataaatgggagagcatccctaacactgagaaatcctataaatgtgatgtatgtgggaaaattttccatcagagctcagcccttactagacatcagagaatccatactagagagaagccctacaaatgtaaagaatgtgaaaagtctttcagtcagagctcaagtcttagtcgacataaaagaatacacactagagaaaaaccttacaaatgtgaagcatctgataaatcctgtgaagcgtctgataaatcctgtagtccaagctcaggcataattcagcataagaaaattcacaccagagccaaatcttacaaatgtagcagttgtgaaagagtcttcagtcgtagtgtccaccttactcaacatcagaaaattcacaaagagatgccctgtaagtgtactgtatgtggcagtgacttctgccatacttcatacctacttgaacatcagagggtccatcatgaagagaaagcctatgagtatgatgaatatgggttggcctatattaaacaacaaggaattcatttcagagaaaagccctatacgtgtagtgaatgtggaaaagacttcagattgaattcacatcttattcagcatcaaagaattcacacaggagagaaagcacatgaatgtaatgaatgtggaaaagctttcagtcaaacctcatgccttattcagcatcacaaaatgcataggaaagagaaatcgtatgaatgtaatgagtatgagggcagtttcagtcatagctcagatcttatcctgcaacaagaagtcctcaccagacagaaagcctttgattgtgatgtatgggaaaagaactccagtcagagagcacatctagttcaacatcagagcattcataccaaagagaactcatgaatgtaatgaagatgggaagatatttatcaaattcaggcttcattcagcatctgagagttcacaccagggagaaatcatgtatgtactgcatgtggtaaagccttcagtcatagctcagccattgctcagcatcagataattcacaccagagagaaaccctctgaatgtgacgaatgaagaaaaggtattagtgttaaactcttaatcgactcctgcaaatctataccagtgagaaatcttataaatgtattgaatgtggcaaatttttcatgctattagtattttcataccttagtcacatttggagaattcacatgggaataaaattccattgctgcaatgaatgtgaaaaagccatcagtcaaagaaactaccttgtttagtatcaaattcacgccatgcaaaaagattataaatgtaataagcatgtatgtgtgtgaggagattcagtcataacccaacgctcattcaacatcaaagaatttatacctaagagaacttatttgggtgtagtaaatggcagatctttcaataggagtttaactagtctttgtcatatcagaatatccatagtagacaagaatttgatgtaacgcaaatggaaaaactcgacaccacatttcaggctttacccaacatcgaaataatggagagaaaattgttgattatttgtttatgaaattgttaatacatagtcccaatctttttcattgcacaaaaatctagggttgacttggtaaatgcagtgacattttctcatggagttcctttatttaatatgtattctaagtaggtacgtttatttttacttttttattataattttgatattaaaaagaacagagatggggtcttgctttgttgcccaggctggtcttgaactcctggcctcaagcgatcctcccacctgtcctcccaaagtgctggggttacaggcgtgtgtcactgtgctgggcctattttatttatagaactcatttaagctgtttttattttaatatgccctataaacatttttatattttttgaaattggttcttagtgttcacaacttccataagatactgctaatgcaccagtattaaaacacatcgacgtaagtagctcatttagctttttctgctgttcttggcccaagttctttccaaaaccaactcttaggcctgctctttactagggatcttatgtcgtattgctttacagccacaacacttggattcctgttgattaacttctccattctcttaagcacctttagaagatttagaagtttcctagtttttagtgtttcaccagcaagtattccatacctacttgatgttgctggtctggtgtcttatttcctaaagtgaagcatctttttttaaaaaagaatttgattgacaatatatccagtccaatataagtatgaaggattctctctcctgagattgtagcaggcagccaaacattttcaaatgatgcccaaggttttagctgtcttgtgtgcatccacagtctgcgaagaagacatgataaggacatcagggagccaacaagactcctaatagcctcactacattcatccagtgcctattctgcatgcctaagcttagagttcttttatatacctctacggccagcaaaatgctcaggtctgctcttggtagggtaaacataaagaagatacacaggccgggcatggtggctcacacctgtaatcccagcactttgggaggctgaggcggatggatcacgaggtcaggcagtcgagaccatcctggccaacatggtgaaaccccgtctctactaaaaatacaaaagttagccgggtgtggtggcacgcgcctgtaatcccagctactcaggaggctgaggcaggagaactgcttgaacctgggaggcggaggttgcagtgagccgagattgcaccactgcactccagcctgggcgacagagcaggactctctctcaaaaaaacacaaaaaaacaaaaacaaaaaaccatacacacacacacacacacacaaatcagcatcataagggaatgtagccttccaacagagatgatgctgttcgtatgttaatctcagagacagtatttcaagagagtggcaggtctgttcctggtaaaattttaaccattaggattgcagataaatgtttgaattctgctcctctctcatcaatccaggacagtatttgaagtgtgagggctttgtgtatagttgtttatccattaccacatttttgtattttaatagtctacaggctatataaaagaacatggctttttgactgataaaagtgattacagatgttggctcaagttcagggccaccatcatatacctaacaagagttcatgattctttaggtaatgtcaaaacattttgtatttttccatcttaagctttataacattttgtgagtaagacaaatgttatttaaaattcttgttgtcagtccagcaattgaggctttcatagttcagtgttataatattcagtagggaccctcaacaaatatataaaaatatgttgctcactctataatcctcctatggctaacctctaggatagttctgccactatattttacttctttgccatcagcaagagtaggatttcatcaaggcaaggtaggaatctaaatgaaattgatatataaatgaattgatctaaatgtaaaagcaaatgaaaaatgcatgtgttttttcctgtcaaacatgtatacccttatgtatagagaccagtagtcacgtatggtgactgaaacaggattatgtaatccctaaaaagcagaatatgtaaaaatcacatgtatgcgtttggtttaggaatgtgcttttgtacttccacttgaataaaggtgtgtttggtattctgagaaaaaaaaaaaaaaaaaaaaaa

SEQ ID NO: 26476 - DNA, 2536 bp, Homo Sapiens
ggcaaggcttgtttactatggccgatgatctggagcagcagtctcaaggctggctgagtagctggctgcccacgtggcgccccacttccatgtctcagctgaagaatgtggaagccaggatcctccagtgtctccagaataagttcctggccagatatgtatccctcccaaaccagaataagatctggacggtgactgtgagccccgagcaaaacgaccgcacccccttggtgatggtgcatggttttgggggcggcgtgggtctctggatcctcaacatggactcactgagtgcccgccgcacactgcacaccttcgatctgcttggcttcgggcgaagctcaaggccagcattcccaagggacccggagggggctgaggatgagtttgtgacatcgatagagacatggcgggagaccatggggatccccagcatgatcctcctggggcacagtttgggaggattcctggccacttcttactcaatcaagtaccctgatagagttaaacacctcatcctggtggacccatggggctttcccctccgaccaactaaccccagtgagatccgtgcacccccagcctgggtcaaagccgtggcatctgtcctaggacgttccaatccattggctgttcttcgagtagctgggccctgggggcctggtctggtgcagcgattccggccggacttcaaacgcaagtttgcagacttctttgaagatgataccatatcagagtatatttaccactgcaacgcacagaatcccagtggtgagacagcattcaaagccatgatggagtcctttggctgggcccggcgccctatgctggagcgaattcacttgattcgaaaagatgtgcctatcactatgatctacgggtccgacacctggatagataccagtacgggaaaaaaggtgaagatgcagcggccggattcctatgtccgagacatggagattaagggtgcctcccaccatgtctatgctgaccagccacacatcttcaatgctgtggtggaggagatctgcgactcagttgattgagctgctctctgaagaggaagaggagaaagccagagagtcactcttacctccctgtctgcttactcacccactctgtcctttcctcaccaactaacatgtgccagccaggcagagtcttgtgctgttcccagaacaggacgacagtgaaaagaacactcttgaccctacactgaaggctgaaggcagaagccacaagaggccttgagtgccacccccagggaagaacataaagggttgcacaatgccacccatccactccttgccaagtgttacccagatggtggaggatgtgaagggattgcaccaagccacattcactctctctgtggcctttcttcctctgggcaaagaagggcttccagtggcctttcctcactctgtagtgtttgtggggataggttccatgcaagaacaccttcctcctccatcccccacttcaccccatcccataccagttccatccagggtctgcttaactgccaagagcaggtcctggagttcccttcacctgcagagtccttttcatgacctaggaggtcttattcaaagccctcattgacagaggaggaaacaggccaaggcaggacatggctggaccatggtgatacagctctgtgtgattcaagttctggcagagcttgtaaggctagagcccaggtctgccgacaccctgtgcttgttgcacacttgatttgctaaggctggagacaggcaccattgccatggggctggtcctagtcactggccgaggataagcccgtccctgtcccacattctagccccactatgcgggggtgctgttgtcctgcctgtgtctcatccccggctgcctaagctagggacactcaagtgcttccttccttgccccatcttcctcccaactggaggcctctgagcctcccctgtgccttgggccctgaagccccatatgtagtatagagcaaaggtggctcctggtgaagagagggtggaaaggcccttcagccccagggccatgtctgggttctccatgcccatcagtctctgcagtttctctacctgcccccagagctgaggccatctgcaagcccctgcccatggcccaatggggagcctccagccacaagttccctgtccttatcagccactgggtggttcccactgcatgaccctctatccctgccatctgttcccatggtttccagctcaatccacccctgacccatctgtcagctttttcccagggagccgtttcaggggttctgggcagtaggctgggcctggcctcagaacctggtggctcctgcctgctccttcacttttgtaaaaccatccccttcaccagaatggtattaactcctggtgctttgtactactggtccagctgccctgggctccttttctatattaataaagaaacgagtaaaaattaaaaaaaaaaaaaaaaaaaaaaaaaaaaaaaaaaaaaaaaaaaaaaaaaaaaaaaaaaaaaaaaaaaaaaaaaaaaaaaa

SEQ ID NO: 26477 - DNA, 1127 bp, Homo Sapiens
atggccgcgggagccgggacggcgggccccgcttccggcccgggcgtcgtgcgtgacccagcggcgtcacagccgaggaagcggcccggccgggagggcggggagggcgcgcggcgatcggacacgatggcgggaggaggcgggagtagcgacggcagcgggcgggcagctggcaggcgggcgtcccgcagtagcgggcgggcccggcgggggcgccacgagccggggctggggggcccggcggagcgcggcgcgggggaggcacggctggaagaggcagtcaatcgctgggtgctcaagttctacttccacgaggcgctgcgggcctttcggggtagccggtacggggacttcagacagatccgggacatcatgcaggctttgcttgtcaggcccttggggaaggagcacaccgtgtcccgattgctgcgggttatgcagtgtctgtcgcggattgaagaaggggaaaatttagactgttcctttgatatggaggctgagctcacaccactggaatcagctatcaatgtgctggagatgattaaaacggaatttacactgacagaagcagtggtcgaatccagtagaaaactggtcaaggaagctgctgtcattatttgtatcaaaaacaaagaatttgaaaaggcttcaaaaattttgaaaaaacatatgtccaaggaccccacaactcagaagctgagaaatgatctcctgaatattattcgagaaaagaacttggcccatcctgttatccagaacttttcatatgagaccttccagcagaagatgctgcgcttcctggagagccacctggatgacgccgagccctacctcctcacggtgcgccttggcccttctcccataaccatggtgtgcccttgaggatgtgcggggaatcagaatatctgaagtgaaaagagttgatgtgtgaaaaagacattgaattgtatgcactagctttcttaattaaatgccttaaaaatgcaaaagcaggccaggcgcaatggctcacgcctgtaatcccagcactttgggaggcccaggggggtggatcacctgaggtcaggagttcgagacctgcctgagcaacatggtgaaaccccatctctactaaaaaaaaaaaaaaa

SEQ ID NO: 26478 - DNA, 1673 bp, Homo Sapiens
caagtgagctgactgccttggcctcccagagtgctgggattagtcgtcatcttttgttaaaccaggatttgatttttttcttttcttttcttttcttttcttttttttttttttttgagacagagtctctctctgttgcccaggctggagtgcagtggcacaatctcggctcactgcagcctccgcctgccgggtcaagcgattctcctacctcagcctcctcagtagctgagattacaggcatgcaccaccatgcccggctaatttttttgtgtttttagtagagatggggtttcaccgtgctggccaggctggtctagaactcctgactgcaaatgatcagcccgcctcagccacccaaagtgttgggattacaggtgtgagccactgtgcccagcgtgattttttttttttttaaagcaaacttgtcctttggttttgcagaacaggcctgctccctctcatctagcccatcatttcttggggcctgaaccccagtggtccaaagtattgcttgtgaaatttaaaaaatgtgaatatgatgtggggatgggcctcttctacattaccttggcccagggggatcagctggctgggaggattagtgagcacctctgtattttgaggtctgagtcttctggagctgtgtagttaatcttcggtttctgataacccctgggtccatctggccatcagcctcagcagtgagcaaagcaataccatactcatttctatgttcctgttccttcctctgctcctcctttggagaagcaataattcatgggggatgatacagtagcactttacaaatggctccatgtcattcatcccaggggccataatctcttgcaccacctattcttacttcctgttcagctcctttacagcttttattttcaactgcttcccaacttggtggggcctcctttaaggatgagccaatagtaagaatgtggctgtaatcagcagagacccctctgaggggtatctgttctgcagcccctagtgaaatcatgtgatgtgagacagaaacctaaacatggtacttgattctaaacctgtgccagtctatagcctctgcctccccaagcagagctcaagccaaacgcttctgtcctctttccttctgcattaaccctttgctgatcctcaggggccactcccccaacacccctgtacttgggtgagggatgttggacagagcctgttttcatgtactgcaggtgggggtgtgctgacatgtttgctcttggttgatggagaaggtacagaggccagggagtgaaaatggttgacagaagagggaagagttaggtgtctcatagtcactcatagtggggtggtcaggggtaatggcatctccccactttaggcttctcaaacagacttttgacacctctcaagttcagagctctgatgtggaaagacaggaggtgtggggaaggagggggatttcgtgtgtttgcatgagtgtgcgcttcaggccttgggagttggcaagagggagggaaggaaggagagcaaaatcttcggaaggtgtttcttgtacctgagggatcctgccctgaatctccatagtctccactgtgaactgaggaggggaggggtgtgctggggaataaatcttgtatgagaccaaaaaaaaaaaaaaaaaaaaaaaaaaaaaaaaaaaa

SEQ ID NO: 26479 - DNA, 1413 bp, Homo Sapiens
caccttctgagcccattctcagctatgagaacattttaaagtgtgcttttcaagaaataacagtccagcaggcagctgaagacgtttccaccatagaccatttcctagaaataagcagtgaagaaaaacctggcgttgaacgtgtacataaattgtgggacacactttcaactgagcattgaaagacagacagcgctcgagtggattaggccgcagtggttgagaagctcgagtaacgaatccagaaaactctggagagcccttcagagcatacacaccacgtctacttctcagcgcctctggagcgagtcccgttgccaggagaacttctttcttgttctcggaatagatgctgcgcagaagaacctttctggaggccagggccacatcatggaagattgtgacctcaaagagcctgaaggactcctcactgtcagcagcttctgtctccagcattgcaaagccctgatccagaccaagctctcggggccgcctggcagcaaacaggggaggctgatgacatgcagccgcttcctgaagaccccctcatgcggaggtggccagcacatcactattccaaggaaaaggatgttcactccacgcaagctcaaattgacactctttaatagcgacgtttgctaaaatcaggaggactttgtacctttatgaggaatttttcattttcttcctggctgggttgatgtggaaaccagagctgtctgtggagctgttttccagaccccaggcccattcctgggatctctccaacaggacctgtcctgtgttctgggcttgtctcgggtctgaccaggagatggaggatgtgtccttggcagagccaaggggagacagaggtttctggatgccatgacaggctgtcggggtccaggtggcactcatgggccccctgccccatgtgaatgctgctggcacctggtggggggttgcccagggatggaccctgggcatggcttctgggctgcttagtccagggggagcaacttgtggccaaatccatgagttcagaggaaaaggggaaggcactgaaacgtcaccagagagacagctgttgagaccgctcagaaaccctctgtctgtcacactctgccctggctgctgtgtggtcagggcaccatgagggtgtacagatgtgctgtgtcctcagagcctcgcaggtgccctcacttactgcctgggcccctgcccagcagcctcaaggacaggcctttgtccctcacggttgtggacaggaggtcgcaccactggcctgcgagagcctctggtgggcccgtggcttcccccagttatctgctaaggaaaactgtgctcttcgaagggcagagccaagaagtcagccctgacttttgtaaaattttattaaataaaaccacctggataaaaaaaaaaaaaaaa

SEQ ID NO: 26480 - DNA, 1253 bp, Homo Sapiens
ggcaaacatcctccgagactcaaagggcaaggccatgggcgctttattccggctgctgctccaggaacgtgggaaagcagcggagttttattctaggggaaggaaacaaaggcggccgagtgccagctgcacgtttggtgggatttggtcatcaggggtggacatgccgcccaatggagctgtcggcagtttgacccagcttggtccgtcgcgtcctgttctaggaatcgattattcaaagaaggaatttagagggactgcagaaaatgttacaggtcttaacatcattttgcatttccgcaaacgaacaagaagttaatccctgtgttagtgatttctaagcccatttgccttgtggcccaagaacgttgagtttgaaatttgatgaaacttgccttaaggctcaagtacgaggccagctttcaaaaatggttttgtgccttgattgaaaacactgtatcttctagttgttggatttatcgtactctgcggctctattggttcaagcttgtgcgttgggccttttaaaatgtgtgtttcctgataattcccttcagcttgtcaactgggggtgatgtggcagggagaaagagagagaggagagagagagactgtactggcaggttttccttgtgctattcaatttttgcttcctatgttttgaagttttattattaactgcaggtttcattactgaatagatatagccaaattccttcccccaaaagattataaagtttcctagtcctaccagcaaaatcattaagttcattaaggcaaatcccctccagcgctggatgttgatgctgtctttaattttgtatttttctgactactttgtgcaattgaggattgttttggtctattggccatttggcttttctcttttgcaaatgttcatatcctttgtccagttttctttagggtgatttttccttttcgtatcaatttgtaaacagtgtacaaattacattgtacattagggatattaacagtctgtcagttacactgtacattagggatattacattagagatattaacatctttgtccattaaggatattaaccatctgtcagttacattgcagtatttttccctaaactctttttgtcttttgcattttatgtttttttaaatgtgcaattagaaaaattttatatgggctgggcacagtaatcccagcacccatctctactaaaaataaaaaaaaaaatagccaggcgtggtatctcaactaaaaaaaaaaaaaaa

SEQ ID NO: 26481 - DNA, 1420 bp, Homo Sapiens
ctttcaccagcacacaagagtttgattgtacaaatatatcttctgcattaacatctctgcctgttgcttaagatcagttgcttttatactcagaatggaaatacctgatcttggctagttttgttataagatattgatttcatttagatttccctccacgaggtcagcaaactatcatgttcttatgtaaacttaggccaaggccagagttatcatagtccctaggttgctacggcttatcatgtgcttggtaaaaggtgatcgcaggttctcagacgagtttactttacatgagatggaatcaggcagagaggctgggatgatggagaaagctcgaggtgaagttttaaaaaaaaagttgtggaaaggaaagttccaaagaggtggtttctgaggaagtcagagcgcccagggccagagcagtcagtaatgggtgaatgaggttgtttggaaagtcggtgtgacagacacatggatgccatctacttctaggttgctggtgggtattaaatatgcacaatattccatagctcactgaggattttaaaattataagcataggattttatattttggggtgaaagaattatctggcacattaggtattggagtttaaaaaaaaagccaaatttcacagtcttaataactttttttaaaaaaaactaaaaggcgcttcatgtccagtgtgtggcccttctgaaacttatggtcatctctcccactgaaaccaaggtcttttcaaatgtggctaaatggggatgaggagacacgggtaggactttcttggtgtgtgtgcattctttaaagagccaagttgcttcggggaaacagccaggaaaatggtcaagattatttttagaggttattttattggggattttaagaactaataacatcttgagttatttttaattcagggggatgtggaaaggtttgcaattgtcaagtgttttgttgtagcttagtatccataagggaaacttagactatagacataactacaaagccagtgcagcttttgttttctgtatgttgttgggggatcaactttcacacatagcaagcacatggcctccctgatgtcaggatgcctttgttaggatctgtatttgcccttaattttgttgaaatcttttttccttcttcctcttgaaaagttccaaaatatagtttattgtatctttcatcactaaaaatttgttcctttttcactatgggcagttcacacaaggcaaaaactattgaacagttggttttagtgtgttgtataactttgctgtatatcaaactaattttgacaagttttcatcctaagcctcaaatcatgtaattaataatttgcctgtttatttatgacctaattgtgattcttttattaataaaagctaatgggaaaaggaaaaaaaaaaaaaaaaaaaaa

SEQ ID NO: 26482 - DNA, 2861 bp, Homo Sapiens
ctgccgctgtgcagtttgttcaggggcttgtggtggtgagtccgagaggctgcgtgtgagagacgtgagaaggatcctgcactgaggaggtggaaagaagaggattgctcgaggaggcctggggtctgtgaggcagcggagctgggtgaaggctgcgggttccggcgaggcctgagctgtgctgtcgtcatgcctcaaacccgatcccaggcacaggctacaatcagttttccaaaaaggaagctgtctcgggcattgaacaaagctaaaaactccagtgatgccaaactagaaccaacaaatgtccaaaccgtaacctgttctcctcgtgtaaaagccctgcctctcagccccaggaaacgtctgggcgatgacaacctatgcaacactccccatttacctccttgttctccaccaaagcaaggcaagaaagagaatggtccccctcactcacatacacttaagggacgaagattggtatttgacaatcagctgacaattaagtctcctagcaaaagagaactagccaaagttcaccaaaacaaaatactttcttcagttagaaaaagtcaagagatcacaacaaattctgagcagagatgtccactgaagaaagaatctgcatgtgtgagactattcaagcaagaaggcacttgctaccagcaagcaaagctggtcctgaacacagctgtcccagatcggctgcctgccagggaaagggagatggatgtcatcaggaatttcttgagggaacacatctgtgggaaaaaagctggaagcctttacctttctggtgctcctggaactggaaaaactgcctgcttaagccggattctgcaagacctcaagaaggaactgaaaggctttaaaactatcatgctgaattgcatgtccttgaggactgcccaggctgtattcccagctattgctcaggagatttgtcaggaagaggtatccaggccagctgggaaggacatgatgaggaaattggaaaaacatatgactgcagagaagggccccatgattgtgttggtattggacgagatggatcaactggacagcaaaggccaggatgtattgtacacgctatttgaatggccatggctaagcaattctcacttggtgctgattggtattgctaataccctggatctcacagatagaattctacctaggcttcaagctagagaaaaatgtaagccacagctgttgaacttcccaccttataccagaaatcagatagtcactattttgcaagatcgacttaatcaggtatctagagatcaggttctggacaatgctgcagttcaattctgtgcccgcaaagtctctgctgtttcaggagatgttcgcaaagcactggatgtttgcaggagagctattgaaattgtagagtcagatgtcaaaagccagactattctcaaaccactgtctgaatgtaaatcaccttctgagcctctgattcccaagagggttggtcttattcacatatcccaagtcatctcagaaattgatggtaacaggatgaccttgagccaagaaggagcacaagattccttccctcttcagcagaagatcttggtttgctctttgatgctcttgatcaggcagttgaaaatcaaagaggtcactctggggaagttatatgaagcctacagtaaagtctgtcgcaaacagcaggtggcggctgtggaccagtcagagtgtttgtcactttcagggctcttggaagccaggggcattttaggattaaagagaaacaaggaaacccgtttgacaaaggtgtttttcaagattgaagagaaagaaatagaacatgctctgaaagataaagctttaattggaaatatcttagctactggattgccttaaattcttctcttacaccccacccgaaagtattcagctggcatttagagagctacagtcttcattttagtgctttacacattcgggcctgaaaacaaatatgaccttttttacttgaagccaatgaattttaatctatagattctttaatattagcacagaataatatctttgggtcttactatttttacccataaaagtgaccaggtagaccctttttaattacattcactacttctaccacttgtgtatctctagccaatgtgcttgcaagtgtacagatctgtgtagaggaatgtgtgtatatttacctcttcgtttgctcaaacatgagtgggtatttttttgtttgttttttttgttgttgttgtttttgaggcgcgtctcaccctgttgcccaggctggagtgcaatggcgcgttctctgctcactacagcacccgcttcccaggttgaagtgattctcttgcctcagcctcccgagtagctgggattacaggtgcccaccaccgcgcccagctaattttttaatttttagtagagacagggttttaccatgttggccaggctggtcttgaactcctgaccctcaagtgatctgcccaccttggcctccctaagtgctgggattataggcgtgagccaccatgctcagccattaaggtattttgttaagaactttaagtttagggtaagaagaatgaaaatgatccagaaaaatgcaagcaagtccacatggagatttggaggacactggttaaagaatttatttctttgtatagtatactatgttcatggtgcagatactacaacattgtggcattttagactcgttgagtttcttgggcactcccaagggcgttggggtcataaggagactataactctacagattgtgaatatatttattttcaagttgcattctttgtctttttaagcaatcagatttcaagagagctcaagctttcagaaaaaaaaaaaaaaaaaaaaaa

SEQ ID NO: 26483 - DNA, 2849 bp, Homo Sapiens
cttggtgcgccgggccgtggtgagtccgggctcccgtggccgcgtgctgggaggagactggagcccggttaggaagaatggagttggcgactcgctaccagatccctaaagaagtggctgacatctttaacgcccccagtgatgatgaagagtttgttggcttccgagatgatgttcccatggaaaccctctcgtcagaggagagctgcgatagttttgactcactagagtcagggaaacaggatgtgcgctttcattccaaatacttcacagaagagctaagaagaatttttatagaggacactgactcagagactgaggattttgcaggatttacgcagagtgatctgaatggaaagactaacccagaagtaatggtcgtggagtcagatttgagtgatgatggcaaagcatctttggtgagcgaggaagaggaagatgaagaagaagataaggctacccctagaagaagcaggtctagaagaagtagtattggtcttcgagtagcctttcagttccccaccaagaagctggccaacaaaccagataaaaacagttcttccgagcagttgttttctagcgcacgcttacagaatgagaaaaaaacaattcttgaaagaaagaaagactgtagacaggtgatacaaagggaagattctacctctgagtctgaggatgactctcgggatgagagccaggagagttcagatgctttgctgaaaaggaccatgaacatcaaggagaacaaagccatgcttgcccagttattggcggaattgaactcgatgccagatttcttcccagtacgaaccccaacctcagcttctaggaagaagacagtgaggcgggccttctcggagggacagatcacgcggcgtatgaacccaacccggagtgcgcggcctcctgagaagtttgctctagagaacttcactgtctcagccgctaaatttgcggaagagttttacagcttccgaagaaggaagacaattggggggaaatgccgggagtacagacgacgtcaccgtatatcttcttttcggccagtggaggatatcaccgaagaggacttagaaaatgttgccataactgttcgagataaaatctatgataaagttctgggtaacacgtgccatcagtgtcgacaaaagaccatcgacaccaagacagtgtgtcggaaccagggttgctgtggtgtgcgaggacagttctgtggaccatgcctgcggaaccgctatggggaggatgtcagatcggcattgctggacccggattgggtgtgtcccccctgtcgtgggatctgcaattgcagctactgtcggaagcgtgacggccgctgtgccacaggaatcctcattcatctggccaagttttatggttatgacaatgttaaggaatatctggagagcttacaaaaggagctggtagaagacaattaagaggaaaacaaacagaaccagccacctcaccatagagtactccaacaagacatgcataccattggtgcctaagatttttttacagttgtgtttttatacagaaattctttgtagaaattactattttttgttaaagattgtttatatgcttacaaagatttctcaggaagacagcagagcagaggaatctatatagatgtatgcacagacctgtctgtatgctgaactttgttaaaaatatctgccagttattaaaaagcacagtttaaatggggtggggttaaagttcaggtaagtaagttagagagaaaacattgtatgatcagctcctgcacttgatctatctttggcttcccaaacagtaactcactccaggccaagtgtgccttagcacgagtgaccacagtttaatagaccacacacatcgtttaacctgctcttggtcattggaaatttacactgaacaaagtgcaattaactgtagaacagtttcatttttattaaaacttgactgaacaaaaggggaccatcaacattgtagacactggaggccttacagagtgctagcctcttccttcaggactcacctggggcctgctgcttttatattttgaaagagtttaagggctaataatttaatttgttgtttgttaaaaattaaaatctccgttctttccggctgcattgcttttgcatgttcacatatgatgtacttttatgatgtactttttttttttttgagatggagtcttgttctgttgcccaggagggagtgcagtggtgcaacctcggctcactgcaacctttgcctcctaggttcaagtgattctcctacctcctgagtaactgggattacagtcgtgtgccaccacgctcagccctgagttagtttctagtatttttttctgactttcactctaaggatagcgttgaaaaaagaatgcacgtgtgagttactaaaaagttagaataatgtgcatgggaacagtgcagcaacatgctagaaaatcctcactgcactccagcagaggctagaggaatgccagtgttaccttacgcttctagaagcagagccactccagccagaacccattttgcagtcttctcttcgctcttcagcctgaaggtccagatgtagctggggcctctcagtttggttctatacacagggcactcgtaggtctgtttggtttcttgtctgtccacgggggtggcttttgcaaagatgaccggcatagggcatgccagctccttgagacgggcttcaacaatggttcctgcttgggtgtcccagcgggcgcctatggcaaaaacacagcggttgcaattgtgtggcagcttgctactaatgataatgatcaagttgtttgatgcaataaacattcaacattcaaaaaaaaaaaaaaaaaa

SEQ ID NO: 26484 - DNA, 2716 bp, Homo Sapiens
cccagatatcaccctggagatcttaaagactctcgagaaaagccacgtggggggctggttcccctggggcttcctgccgtcccccgactgcctcattctttggagcgtccccgatgtctgcaaagatgtggatttggacgtcctcgtggaagccctaaagcccgtggggacatttaagaagatcggcaaggtgttccgcaaggaggaggactccacggtggggatgctgcagatcggggaggacgtcgactatttgctcatcccccgggaggtcaggctggctgggggcgtctggagagtcatctctaagcccgccaccaaggaagcagaatttcgggagcggctgacccagttcctggaagaagagggccgcaccctggaggacgtggcccgcatcatggagaagagcaccccgcacccgccccagccccccaaaaagcccaaggagccccgagtgaggaggagagtgcagcagatggtgactcctccgccccggctggtcgtgggcacgtacgacagcagcaacgccagcgacagcgagttcagcgacttcgagacctccagagacaagagccgccagggcccgcggcggggcaagaaggtgcgcaaaatgcccgtcagctacctgggcagcaagttcctgggaagcgacctggagagtgaggatgatgaggaactggtcgaggccttcctccggcgacaggagaagcagcccagcgcgccgcctgcccgccgccgcgtcaacctgccagtgcccatgtttgaggacaacctggggcctcagctgtccaaagcggacaggtggcgggagtatgtcagccaggtgtcctgggggaagctgaagcggagggtgaagggttgggcgccgagggcgggccccggggtgggcgaggcccggctggcctccaccgcagtggagagcgcaggggtatcatcggcgccagagggcaccagcccgggggatcgcttgggaaacgcgggagatgtttgtgtgccccaggcttcccctaggcgatggaggcccaagatcaactgggcctcctttcggcgccgcaggaaggagcagacagcacccacaggtcagggggcagacatcgaggctgatcaggggggagaggctgcagatagtcaaagggaagaggccatagctgaccagcgggaaggggctgcaggtaatcagagggcaggggccccagctgaccagggggcagaggctgcagataatcagagggaagaggctgcagataatcagagggcaggggccccagctgaggagggggcagaggctgcagataaccagagggaagaggctgcagataatcagagggcagaggccccagctgaccagaggtcacagggcacagataaccacagggaagaggctgcagataatcagagggcggaggccccagctgaccaggggtcagaggttacagataatcaaagggaagaggccgtacatgaccagagggaaagggccccagctgtccagggtgcagataatcagagggcacaggcccgggctggccagagggcagaggctgcacataatcagagggcaggggccccaggtatccaggaagctgaagtctcagctgcccaagggaccacaggaacagctccaggagccagggcccggaaacaggtcaagacagtgaggttccagacccctggacgcttttcgtggttttgcaagcgccggagagccttctggcacactccccggttgccaaccctgcccaagagagtccccagggcaggagaggccaggaacctcagggtgctgagggccgaggccagagcagaagctgagcagggagagcaagaagaccagctgtgaggtgagggctagagacagcccacgggccctccctccaagtgtgggagggagagatgctctgcctctgaacttcaaagtggaggtggagtgctggccacgtctccacctaacaaccctctttattctcttgttaaagttttgttcatgctttgatttttttttaaattttttagagacagggtctcactctgttgcccaggctggagtgcagtggcatgatcataactcactgcagcctcaaacttctggcctcaagtgatcctcctgcctcggcctcccaaaatgctgggattacagatgtgagccaccacacacaccatctgattaaaaaaaaaaatactgattccttgtagcaacccaaaaaatgtaaagaaagaattcgacacaatggggttgcgtcacctatagttttcatttcctcaaatgcaactcaaggtgctcagcttgataaagggagagagggagggcaggggagaaactgactcctttttccatctcttttttgcctgcacacttaatgtggactgcctccttggacttaaaaagagttgagccaacatgcaaatcaaaaaacatttatgaactgatttcttagctttggacttgacaactgacgaatgctctgggggtgacctggcccttgctgtccgttccactcccatccttgatgatggagacacctgtgtttatgttgtcacttcgcttgccatcctcatgccccgggctctgctggtttggaggggacagggcccttggtttgcacacctcacccgatcttggttataaggtacagtaaaagcgtctgaaaaatgcattcaaaaaaaaaaaaaaaaaaaaaaaaaaaaaaaaaaaaaaaaaaaaaaaaaaaaaaaaaaa

SEQ ID NO: 26485 - DNA, 2820 bp, Homo Sapiens
ccagaaaggggcaggctgaggctgggggaggggctcaagggagcccagctgggagggcccaggcaggcagtgcggagctggccgtgggctgcctaccctttcatctctgcaactccttcctccctgggcctcccttctggagaagggccagagaatgtcgtcccagccagcagggaaccagacctcccccggggccacagaggactactcctatggcagctggtacatcgatgagccccaggggggcgaggagctccagccagagggggaagtgccctcctgccacaccagcataccacccggcctgtaccacgcctgcctggcctcgctgtcaatccttgtgctgctgctcctggccatgctggtgaggcgccgccagctctggcctgactgtgtgcgtggcaggcccggcctgcccagccctgtggatttcttggctggggacaggccccgggcagtgcctgctgctgttttcatggtcctcctgagctccctgtgtttgctgctccccgacgaggacgcattgcccttcctgactctcgcctcagcacccagccaagatgggaaaactgaggctccaagaggggcctggaagatactgggactgttctattatgctgccctctactaccctctggctgcctgtgccacggctggccacacagctgcacacctgctcggcagcacgctgtcctgggcccaccttggggtccaggtctggcagagggcagagtgtccccaggtgcccaagatctacaagtactactccctgctggcctccctgcctctcctgctgggcctcggattcctgagcctttggtaccctgtgcagctggtgagaagcttcagccgtaggacaggagcaggctccaaggggctgcagagcagctactctgaggaatatctgaggaacctcctttgcaggaagaagctgggaagcagctaccacacctccaagcatggcttcctgtcctgggcccgcgtctgcttgagacactgcatctacactccacagccaggattccatctcccgctgaagctggtgctttcagctacactgacagggacggccatttaccaggtggccctgctgctgctggtgggcgtggtacccactatccagaaggtgagggcaggggtcaccacggatgtctcctacctgctggccagctttggaatcgtgctctccgaggacaagcaggaggtggtggagctggtgaagcaccatctgtgggctctggaagtgtgctacatctcagccttggtcttgtcctgcttactcaccttcctggtcctgatgcgctcactggtgacacacaggaccaaccttcgagctctgcaccgaggagctgccctggacttgagtcccttgcatcggagtccccatccctcccgccaagccatattctgttggatgagcttcagtgcctaccagacagcctttatctgccttgggctcctggtgcagcagatcatcttcttcctgggaaccacggccctggccttcctggtgctcatgcctgtgctccatggcaggaacctcctgctcttccgttccctggagtcctcgtggcccttctggctgactttggccctggctgtgatcctgcagaacatggcagcccattgggtcttcctggagactcatgatggacacccacagctgaccaaccggcgagtgctctatgcagccacctttcttctcttccccctcaatgtgctggtgggtgccatggtggccacctggcgagtgctcctctctgccctctacaacgccatccaccttggccagatggacctcagcctgctgccaccgagagccgccactctcgaccccggctactacacgtaccgaaacttcttgaagattgaagtcagccagtcgcatccagccatgacagccttctgctccctgctcctgcaagcgcagagcctcctacccaggaccatggcagccccccaggacagcctcagaccaggggaggaagacgaagggatgcagctgctacagacaaaggactccatggccaagggagctaggcccggggccagccgcggcagggctcgctggggtctggcctacacgctgctgcacaacccaaccctgcaggtcttccgcaagacggccctgttgggtgccaatggtgcccagccctgagggcagggaaggtcaacccacctgcccatctgtgctgaggcatgttcctgcctaccatcctcctccctccccggctctcctcccagcatcacaccagccatgcagccagcaggtcctccggatcactgtggttgggtggaggtctgtctgcactgggagcctcaggagggctctgctccacccacttggctatgggagagccagcaggggttctggagaaaaaaactggtgggttagggccttggtccaggagccagttgagccagggcagccacatccaggcgtctccctaccctggctctgccatcagccttgaagggcctcgatgaagccttctctggaaccactccagcccagctccacctcagccttggccttcacgctgtggaagcagccaaggcacttcctcaccccctcagcgccacggacctctctggggagtggccggaaagctcccgggcctctggcctgcagggcagcccaagtcatgactcagaccaggtcccacactgagctgcccacactcgagagccagatatttttgtagtttttatgcctttggctattatgaaagaggttagtgtgttccctgcaataaacttgttcctgagaaaaaaaaaaaaaaaaaaaaaaaaaaaaaaaaaaaaaaaaaaaaaaaaaaa

SEQ ID NO: 26486 - DNA, 1312 bp, Homo Sapiens
ggaagctggcggcagcggcggtggcggtggctgagcagaggacccggcgggcggcctcgcgggtcaggacacaatgtttgcacgaggactgaagaggaaatgtgttggccacgaggaagacgtggagggagccctggccggcttgaagacagtgtcctcatacagcctgcagcggcagtcgctcctggacatgtctctggtgaagttgcagctttgccacatgcttgtggagcccaatctgtgccgctcagtcctcattgccaacacggtccggcagatccaagaggagatgacgcaggatgggacgtggcgcacagtggcaccccaggctgcagagcgggcgccgctcaaccgcttggtctccacggagatcctgtgccgtgcagcgtgggggcaagagggggcacatcctgctcctggcttgggggacggccacacacagggtccagtttctgacctttgcccagtcacctcagcacaggcaccaaggcacctgcagagcagcgcctgggagatggatggccctcgagaaaacagaggaagctttcacaagtcacttgatcagatatttgaaacgctggagactaaaaaccccagctgcatggaagagctgttctcagacgtggacagcccctactacgacctggacacagtactgacaggcatgatggggggtgccaggccgggcccctgcgaagggctcgagggcttggctccggccaccccaggccctagctccagctgcaagtccgacctgggcgagctggaccacgtggtggagatcctggtggagacctgagcaggagccctgagtgctcacagccgcctctgacgcattgacacgtgagcactggctcccacggagggtgcgcctgccgccagcggcccagccttgctgccctgtctgctgattctgagaaatcccagaacagcccattaccagtggggctgcagccctaggcccgtcccactcacctcccccctgtggagggccaggcagaggctgttctggaaggcttcttgtcttctgacgtccccacagccctgggcccctcgtgtctctttgtgtcccccactgtagaggacggtgagccgcagctgcatcaacctccttttacctttagataggtgaatttttacaattcagttttacatgttttgggcagtattttgtcttaagatatattttttaaactttttataccttatctctttagattttttcagctattttcttaaaagtatattttttctataaacatcctttgctgctacattagaacttttatagcctaaaaaaaaaaaaaaaaaa

SEQ ID NO: 26487 - DNA, 2812 bp, Homo Sapiens
gtcagcactgactttcagctatggaatcgacggttgatgatgaagcgccggccgtgtaaatgaagatcgggtgaggagcaggacgatgcccaagggtgggtgccctaaagcaccacagcaggaagagcttcccctcagcagcgacatggtggagaagcagactgggaaaaaggataaagataaagtttctctaaccaagaccccaaaactggagcgtggcgatggcgggaaggaggtgagggagcgagccagcaagcggaagctgcccttcaccgcgggcgccaatggggagcagaaggactcggacacagatgcctccagcccagtccctgttgtggtgctgcaaggctggtacgctcctcgaagcaccatggcatgagatggaggttcctagaagcaagaagaaagagaagcagggccctgagcggaagaggattaagaaggagcctgtcacccggaaggccgggctgctgtttggcatggggctgtctggaatccgagccggctaccccctctccgagcgccagcaggtggcccttctcatgcagatgacggccgaggagtctgccaacagcccagtggacacaacaccaaagcacccctcccagtctacagtgtgtcagaagggaacgcccaactctgcctcaaaaaccaaagataaagtgaacaagagaaacgagcgtggagagacccgcctgcaccgagccgccatccgcggggacgcccggcgcatcaaagagctcatcagcgagggggcagacgtcaacgtcaaggacttcgcaggctggacggcgctgcacgaggcctgtaaccggggctactacgacgtcgcgaagcagctgctggctgcaggtgcggaggtgaacaccaagggcctagatgacgacacgcctttgcacgacgctgccaacaacgggcactacaaggttggcatccccccgttcttcacacatccggcctgtcctggcatctgggtggttctgtagctttgtttccccgtagctagccggttccatgatgtggggcacaggaaagcgagttttcgccttgcccaccctcaaggccgagctgtgccctctgtctgcccccagctttccccttctgggtcagcctggacggcctctcacaggtttcccagcaagtgccatctatgaaaggctcgtatccgctagccgtgtaggtctggttggatttgagcaggtgaaggattacaccaagtggaaggaggcctgcaggagttgctgccggtccccgtcaccactgtgggactgttagacctgcaaggcagacccaccctcgtctggaatgaggtaacaccaagaggtgtggccagtgcacagaaccatagactcaagctttagaaagtggccattgtggccggcccaggagcagtgggcactgagaggtctcagcctctgtgggggtcgagagaggtcgtggtgtgcctgacagccccgtcctgccggaaagcaggggtgctgcctggagatgcggcgggtctcactgatgtcttcatcagagctccgtggagagcccctggttgcaggcaggacagcaaggctgaggggtcacacggggccacatctgctggtgcccgtcgtgctcctctgcagcaagcccagcctggccattgctggaggtcctggagcccacagtgccttggccttaaagagctcacttgagaaacggcttgttccggtggggtggggggtggattgaagactctgagacgagcagggaactcagaacactgagtccctatttgatgttaaaatatgaccgttaaacttctgggtaagataatgaatggcactatggtttatactgtttctgttttatgggctcttccagagacgtgaactggaaaaggctctgcagtgtctgggattcgctcagtgctgcaggggagggcaggtgtgaggggaatggccctggagggtgatggggctggggcatccgatgcagctttatagttctgtaattaccacttttaaactttttattacgaaaaatgtcaaggaccctggaattacggtgaggtaggcaggataatggcccccaagatgcccgtgttgtgacccccagaccttgtgagtgcctcacatggggagattgtcctaggtcatcttgcaggcccagggcagccccatgggcccttaaagcttgagagcctttcctgctgagtctgagagatgccagaagcaggagaggttagaacccgaggagggccgcacctgcgctgctggccttagaggagggccgaggagtgtggtggcccctaagcagctgggactggggacctccgtcccagccctgcaagaaactgaattctgccagcagcccccatgatggaggaaaggaaggatcctgccctgccagcaccttgacctctgacctccacaattgtaagcctgaggttttgtgtagtcaccatagaaaactcacacacataagaactctgtactgattcaacaatagaacatgtcacacacgaactggaaactgattctgtgggcgacaagagtctatagtaaacgttatgacagattctttgaatgcgctaatctcagactggactaaagttgggattaaatttaatttgtacttgagttcagtgcattgctgttctgggcataggaaatccaggttgctggtgatgaacagctgaaaagagctgtgtcaccatggttgtctctgtcagtcatgtgaccacccttacccttgtaaaatcaagcaagggagagattattttctaatgtaaatgaaaataaaaaataaagcagcttgcagaaaaaaaaaaaaaaaaaaaaaa

SEQ ID NO: 26488 - DNA, 2610 bp, Homo Sapiens
ccagacggaagcgcgctgggactgacacgtggacttgggcggtgctgcccgggtgggtcagcctgggctgggaggcagccccgggacacagctgtgcccacgccgtctgagcaccccaagcccgatgcagccacccccagacgaggcccgcagggacatggccggggacacccagtggtccaggtggaaccaccctgtgtatgcatgaccctgacaagcaggcgccaggacagtcaggaggccaggcccgagtgccaggcatggacggggacgctgctgctgggcacgtgccttctgtactgcgcccgctccagcatgcccatctgcaccgtctccatgagccaggacttcggctggaacaagaaggaggccggcatcgtgctcagcagcttcttctggggctactgcctgacacaggttgtgggcggccacctcggggatcggattgggggtgagaaggtcatcctgctgtcagcctctgcctggggctccatcacggccgtcaccccactgctcgcccacctgagcagtgcccacctggccttcatgaccttctcacgcatcctcatgggcttgctccaaggggtttacttccctgccctgaccagcctgctgtcgcagaaggtgcgggagagtgagcgagccttcacctacagcatcgtgggcgccggctcccagtttgggacgctgctgaccggggcggtgggctccctgctcctggaatggtacggctggcagagcatcttctatttctccggcggcctcaccttgctttgggtgtggtacgtgtacaggtacctgctgagtgaaaaagatctcatcctggccttgggtgtcctggcccaaagccggccggtgtccaggcacagcagagtcccctggagacggctcttccggaagcctgctgtctgggcagccgtcgtctcccagctctctgcagcctgctccttcttcatcctcctctcctggctgcccaccttcttcgaggagaccttccccgacgccaagggctggatcttcaacgtggttccttggttggtggcgattccggccagtctattcagcgggtttctctctgatcatctcatcaatcagggttacagagccatcacggtgcggaagctcatgcagggcatgggccttggcctctccagcgtctttgctctgtgcctgggccacacctccagcttctgtgagtctgtggtctttgcatcagcctccatcggcctccagaccttcaaccacagtggcatttctgttaacatccaggacttggccccgtcctgcgccggctttctgtttggtgtggccaacacagccggggccttggcaggtgtcgtgggtgtgtgtctaggcggctacttgatgtagaccacgggctcctggacttgcctgttcaaccttgtggccatcatcagcaacctggggctgtgcaccttcctggtgtttggacaggctcagagggtggacctgagctctacccatgaggacctctagctcccaaccccacagcctctccaaggacccaggcgccagcagccccgggacacaggggactcagtgtgtgggacttggtcactccatgtcagacacacgagcagagaggaacacaaaccactgtggagcctgaagctccttaagaagagtccacaacagctggtgggagggtggggtgggcctgggtccagaccaggctcgctgctctctgggcctcagtttccccacctgccagcgggctcggccctgtcctcctcacaggctggtgtggccgtcagggtgggtggggttattgttagtaggcgcagcctcattcccaccacgatctgttccgcgtggttcccgccaaacctccctcggtcgccgtgttctccgcaagcctcctgcagcgcccgcctgccaatgtgaggctggcaccaggctgcagcctccccaatcccagcccactttgctgtgtctctggcgggctgtcctccttggtgggagctgtcctgcacactgtaggatgcttaaaggtatccctggcctccacccacccctagccagcagctcccagtcagacaacagccagaaatgtctccagactctgcccagcctccccaggtagccaccctcgagacacgacctcagagtctctgtgtctcctagaagcctgacagagacccccagggcagtgggtgggtggcgggctagagacccttgcctgtgtccgggaccctggcgccgctctcccctcctgtggatccctccgcactaacagtgttctcagtgggcagacgcctgggcaccccttgggccctgcccagcatggccatggcgcaggctctcgaacccgcatggctttcccaggcctggtgattctgctctccagggacggttggcaccttcctcgggggcgggccccacgcaccccagaacacacagacccacctttctggcgttctttctacctcccttttcgttgcctgaggagctggtggtttcatgagttaatgatacatcttgcaaggtgtacacatagagaaaaaaacctaaaaatgtggaaaagcacgccaaagccttatttaaataataactattaaactattcaaaaagaaaaaaaaaaaaaaaaaa

SEQ ID NO: 26489 - DNA, 1194 bp, Homo Sapiens
ccgaggtcccagacgcccggcgcagcgggagcggcggggcgtgcctggcctgcgggacgcgactgatcgcagtggggcgaagcggggccggagccgcccgcggtcaggagcagcaatgtctgtgcaggtagcggctcctggaagtgcagggctgggcccagagcgcctgagccctgaggagctggtgcggcagacgcggcaagtggtccaggggctggaggcgctgcgggcagagcaccatggcctggctgggcacctggcggaggccctggcgggacagggcccggcagccggcttggagatgctggaggaaaagcagcaggtggtgagccactcgctggaggccatcgagctggggctgggcgaggcccaggtgctgctggccctgtcggcacatgtgggtgcactggaggcagagaagcagcggctgcgctcgcaggcccggcggctggcccaggagaacgtgtggctgcgggaggaactggaggagacgcagcggcggcttcgggccagcgaggagtccgtggcccagctggaggaggagaagcgccacctggagttcctggggcagctgcgacagtacgacccaccggcggagagccaggtgccacgggcagggcgaggcggggggtgctgggcccttcatagagccccacagtcccccagaccctccttagaatcccacagtccccaagatcctccttagaatcccacagtcccccagaccctccttagaatgccacagtcccccaaccctccacagagcccccagacccaccagaacttccacagacgcccccactagctactccacgaagcccccgagcctcgccagacccccagggggcctctgacgctcgtgaccaccacctccctcaaaccttgagataggctgggtgcggtggctcacgcctgtaatcccaacactttgggaggccgaggcgagcagatcacctgaggtccggatttcaagaccagcatgaccaacatggagaaaccccgtctctactaaaaatacaaaattagccgggtgtggtggcacatgcctgtaatcccagctactccggaagctgaggcaggagaatggcttgaacccaggaggtggaggttgctgtgagccaagatcgcaccattgcactccagcctgtgcaacaagcgaaactccgtctcaaaaaaaaaaaaaaaaaaaaaaaa

SEQ ID NO: 26490 - DNA, 1430 bp, Homo Sapiens
gacgtcccagcgagaaatgaaaggatctatgtttatgaaaataaaaaggaagcattgcaagctgtcaagatgatcaaagggtcccgatttaaagctttttctaccagagaagacgctgagaaatttgctagaggaatttgtgattatttcccttctccaagcaaaacgtccttaccactgtctcctgtgaaaacagctccactctttagcaatgacaggttgaaagatggtttgtgcttgtcggaatcagaaacagtcaacaaagagcgagcgaacagttacaaaaatccccgcacgcaggacctcaccgccaagcttcggaaagctgtggagaagggagaggaggacaccttttctgaccttatctggagcaacccccggtatctgataggctcaggagacaaccccactatcgtgcaggaagggtgcaggtacaacgtgatgcatgttgctgccaaagagaaccaggcttccatctgccagctgactctggacgtcctggagaaccctgacttcatgaggctgatgtaccctgatgacgacgaggccatgctgcagaagcgtatccgttacgtggtggacctgtacctcaacacccccgacaagatgggctatgacacaccgttgcattttgcttgtaagtttggaaatgcagatgtagtcaacgtgctttcgtcacaccatttgattgtaaaaaactcaaggaataaatatgataaaacacctgaagatgtaatttgtgaaagaagcaaaaataaatctgtggaactgaaggagcggatcagagagtatttaaagggccactactacgtgcccctcctgagagcggaagagacttcttctccagtcatcggggagctgtggtccccagaccagacggctgaggcctctcacgtcagccgctatggaggcagccccagagacccggtactgaccctgagagccttcgcagggcccctgagtccagccaaggcagaagattttcgcaagctctggaaaactccacctcgagagaaagcaggcttccttcaccacgtcaagaagtcggacccggaaagaggctttgagagagtgggaagggagctagctcatgagctggggtatccctgggttgaatactgggaatttctgggctgttttgttgatctgtcttcccaggaaggcctgcaaagactagaagaatatctcacacagcaggaaataggcaaaaaggctcaacaagaaacaggagaacgggaagcctcctgccgagataaagccaccacgtctgtggagatgcggtttcaccgtattgaccaggctggtctcgaactcctgacctcgtgatccactagagtgctgggaaggttaatgttaaatgggttgtgtgtcggggagggtacatgaaaaataatggcatcgctttgagcagtaaaaaaaaaaaaaaaaaa

SEQ ID NO: 26491 - DNA, 1277 bp, Homo Sapiens
gtccagaggtagggttagcagggatagatggacttcctgcttattttctgttcacatttccactgaccttcaatcctgtagactgcaaagattgagccagctgagcccccaaagagactcagcagtgcagaatgtgggcctgagtgggaggactgcccagccgcccaccttccagctctgttcttcccgggccctggatgcttcttgccacgctgtcctctgaaatgacgctctgccccagcagacctgtggtaggtgagctagtgaggaagcacacctgggctcttcccaccaggcatcccagccctggtgtggggtatccgcatggttgcaggcatcccctggccaggcctgggtgctcattctccctctctcttcttgtctcctcccctctccctgctttctctgccctgtcctcctgctttttgctgttttcccccggactcctgccatgcccccagactttctttttcccacggatatgggctcattccaaggaaagggtggcatttggacacaaggccctagatcccacgatggaggactggggggtacctgatgcccctcagaaagaggcctgcagggacagcacatgggaaagccccatggctttgtgatccatctggggatgtgatccatttgggtaaggacttgggtttcagggcatgagttggcttccttgcaggatgcaggtccttaggtgggtggcctctgtctccagctgtagggccctgccaggaagcctctatatgagcctacctccctcctgcaggaccagagaggggttgttatgaacagcccaggggattggttgcactaagcttgtcttgaagcttttgctggggagtccaggtgcccatgtctctcacctgctccccatacacatctctgcacacctggctgaggcattcccagacctaacctcagataatgtgcatgtgatgaacactcccaagtggctaggcctcttgcacctgagcaggtggattctgccccagcactggggctttctctgggctgtccatcatgggtatatctctggattccaggattgctagttagcacctcacatttgagggtctgtgctattcagtctagaatcagagttggatgagaaatcaactttgaacaccacctttggggtggctgcattggctcacacctgtaatctcagcactttgggaggctgaggcaggaggatagcttgaggccaggagttcgagactaaccggagcaacatagtaaggccacatctgtacaaaaaaaaaaaaaaaaaa

SEQ ID NO: 26492 - DNA, 2644 bp, Homo Sapiens
gagaggccgtgtagcgtcgccgttactccgaggagataccagtcggtagaggagaagtcgaggttagagggaactgggaggcactttgctgtctgcaatcgaagttgagggtgcaaaaatgcagagtaataaaacttttaacttggagaagcaaaaccatactccaagaaagcatcatcaacatcaccaccagcagcagcaccaccagcagcaacagcagcagccgccaccaccgccaatacctgcaaatgggcaacaggccagcagccaaaatgaaggcttgactattgacctgaagaattttagaaaaccaggagagaagaccttcacccaacgaagccgtctttttgtgggaaatcttcctcccgacatcactgaggaagaaatgaggaaactatttgagaaatatggaaaggcaggcgaagtcttcattcataaggataaaggatttggctttatccgcttggaaacccgaaccctagcggagattgccaaagtggagctggacaatatgccactccgtggaaagcagctgcgtgtgcgctttgcctgccatagtgcatcccttacagttcgaaaccttcctcagtatgtgtccaacgaactgctggaagaagccttttctgtgtttggccaggtagagagggctgtagtcattgtggatgatcgaggaaggccctcaggaaaaggcattgttgagttctcagggaagccagctgctcggaaagctctggacagatgcagtgaaggctccttcctgctaaccacatttcctcgtcctgtgactgtggagcccatggaccagttagatgatgaagagggacttccagagaagctggttataaaaaaccagcaatttcacaaggaacgagagcagccacccagatttgcacagcctggctcctttgagtatgaatatgccatgcgctggaaggcactcattgagatggagaagcagcagcaggaccaagtggaccgcaacatcaaggaggctcgtgagaagctggagatggagatggaagctgcacgccatgagcaccaggtcatgctaatgagacaggatttgatgaggcgccaagaagaacttcggaggatggaagagctgcacaaccaagaggtgcaaaaacgaaagcaactggagctcaggcaggaggaagagcgcaggcgccgtgaagaagagatgcggcggcagcaagaagaaatgatgcggcgacagcaggaaggattcaagggaaccttccctgatgcgagagagcaggagattcggatgggtcagatggctatgggaggtgctatgggcataaacaacagaggtgccatgccccctgctcctgtgccagctggtaccccagctcctccaggacctgccactatgatgccggatggaactttgggattgaccccaccaacaactgaacgctttggtcaggctgctacaatggaaggaattggggcaattggtggaactcctcctgcattcaaccgtgcagctcctggagctgaatttgccccaaacaaacgtcgccgatactaataagttgcagtgtctagtttctcaaaacccttaaaagaaggaccctttttggactagccagaattctaccctggaaaagtgttagggattccttccaatagttagatctaccctgcctgtactactctagggagtatgctggaggcagagggcaagggaggggtggtattaaacaagtcaattctgtgtggtatattgtttaatcagttctgtgtggtgcattcctgaagtctctaatgtgactgttgagggcctggggaaaccatggcaaagtggatccagttagagcccattaatcttgatcattccggttttttttttttttttgtccatcttgtttcatttgcttgccccgcccccgagacggagtcttactctgtcgcccaggctggagtgtagtggcatgatctcggctcactgcaatctctgcctcccgggttcaagcttgtccaggttgatcttgaactcctgacctcgtgatctacccacctcggcctcccaaaatgctgggattacaggggtgagccaccgtgcccaacctcacttgcttcttatccttacactcccccagccccagagaaactgccacatacaccacaaaaaccaaacatcccccaatgaccttagccccattgctccattcactcccaggtgagaattcaggcaaacgtccacaaaggtcacaggcagcgtacatacggttctgttataccccatatattaccccttcatgtcctaaagaagacattttctcttagagattttcattttagtgtatctttaaaaaaaaatcttgtgttaacttgcctccatctttttcttgggtgaggacacccaggaatgacccttttgtgtctatgatgttgctgttcacagcttttcttgataggcctagtacaatcttgggaacagggttactgtatactgaaggtctgacagtagctcttagactcgcctatcttaggtagtcatgctgtgcattttttttttcattggtgtactgtgtttgatttgtctcatatatttggagtttttctgaaaaatggagcagtaatgcagcatcaacctattaaaatacattttaagccttttaaaaaaaaaaaaaaaaaa

SEQ ID NO: 26493 - DNA, 3697 bp, Homo Sapiens
gccaggctgcggagcggacggacgcgcctggtgccccggggaggggcgccaccgggggaggaggaggaggagaaggtggagaggaagagacgccccctctgcccgagacctctcaaggccctgacctcaggggccagggcactgacaggacaggagagccaagttcctccacttgggctgcccgaagaggccgcgaccctggagggccctgagcccaccgcaccaggggccccagcaccaccccgggggcctaaagcgacagtctcaggggccatcgcaaggtttccagttgcctagacaacaggcccagggtcagagcaacaatccttccagccacctgcctcaactgctgccccaggcaccagccccagtccctacgcggcagccagcccaggtgacatgccggtgctctccaggccccggccctggcgggggaacacgctgaagcgcacggccgtgctcctggccctcgcggcctatggagcccacaaagtctaccccttggtgcgccagtgcctggccccggccaggggtcttcaggcgcccgccggggagcccacgcaggaggcctccggggtcgcggcggccaaagctggcatgaaccgggtattcctgcagcggctcctgtggctcctgcggctgctgttcccccgggtcctgtgccgggagacggggctgctggccctgcactcggccgccttggtgagccgcaccttcctgtcggtgtatgtggcccgcctggacggaaggctggcccgctgcatcgtccgcaaggacccgcgggcttttggctggcagctgctgcagtggctcctcatcgccctccctgctaccttcgtcaacagtgccatccgttacctggagggccaactggccctgtcgttccgcagccgtctggtggcccacgcctaccgcctctacttctcccagcagacctactaccgggtcagcaacatggacgggcggcttcgcaaccctgaccagtctctgacggaggacgtggtggcctttgcggcctctgtggcccacctctactccaacctgaccaagccactcctggacgtggctgtgacttcctacaccctgcttcgggcggcccgctcccgtggagccggcacagcctggccctcggccatcgccggcctcgtggtgttcctcacggccaacgtgctgcgggccttctcgcccaagttcggggagctggtggcagaggaggcgcggcggaagggggagctgcgctacatgcactcgcgtgtggtggccaactcggaggagatcgccttctatgggggccatgaggtggagctggccctgctacagcgctcctaccaggacctggcctcgcagatcaacctcatccttctggaacgcctgtggtatgttatgctggagcagttcctcatgaagtatgtgtggagcgcctcgggcctgctcatggtggctgtccccatcatcactgccactggctactcagagtcagatgcagaggccgtgaagaaggcagccttggaaaagaaggaggaggagctggtgagcgagcgcacagaagccttcactattgcccgcaacctcctgacagcggctgcagatgccattgagcggatcatgtcgtcgtacaaggaggtgacggagctggctggctacacagcccgggtgcacgagatgttccaggtatttgaagatgttcagcgctgtcacttcaagaggcccagggagctagaggacgctcaggcggggtctgggaccataggccggtctggtgtccgtgtggagggccccctgaagatccgaggccaggtggtggatgtggaacaggggatcatctgcgagaacatccccatcgtcacgccctcaggagaggtggtggtggccagcctcaacatcagggtggaggaaggcatgcatctgctcatcacaggccccaatggctgcggcaagagctccctgttccggatcctgggtgggctctggcccacgtacggtggtgtgctctacaagcccccaccccagcgcatgttctacatcccgcagaggccctacatgtctgtgggctccctgcgtgaccaggtgatctacccggactcagtggaggacatgcaaaggaagggctactcggagcaggacctggaagccatcctggacgtcgtgcacctgcaccacatcctgcagcgggagggaggttgggaggctatgtgtgactggaaggacgtcctgtcgggtggcgagaagcagagaatcggcatggcccgcatgttctaccacaggcccaagtacgccctcctggatgaatgcaccagcgccgtgagcatcgacgtggaaggcaagatcttccaggcggccaaggacgcgggcattgccctgctctccatcacccaccggccctccctgtggaaataccacacacacttgctacagttcgatggggagggcggctggaagttcgagaagctggactcagctgcccgcctgagcctgacggaggagaagcagcggctggagcagcagctggcgggcattcccaagatgcagcggcgcctccaggagctctgccagatcctgggcgaggccgtggccccagcgcatgtgccggcacctagcccgcaaggccctggtggcctccagggtgcctccacctgacacaaccgtccccggcccctgccccgcccccaagctcggatcacatgaaggagacagcagcacccacccatgcacgcaccccgcccctgcatgcctggcccctcctcctagaaaacccttcccgccctcgggaaagtagatgtggagggtggcgccctgcgtaaccctcgccctgtccctcccactccctgggggcgctgttccacagtgactgggccctgtccagggcagtgagtcctctactttgctccgtggaggaagctggggtacaaggggcccagtgctggccacacagcagcgcagccgagccccaggagcccgtcaggccacagcccctggcactgcaggtggcctccctccagagactcgagtccccatgattccctcctcatcagtctctcaaagaccccatggtccatcccctgagggtggtcagccaaggctcccgttccgtgggatgccataaaagccgcccagtgggacccacagtcacacagagcgcctcacctgcatcctctcccccacaagagccccaaagatcccacgggagaggggagagggacgcacagcactgcctgccaagcgagaatgcaggccccgccccctcggcccctcaccacctctttctacagcctaatttattggattccctattcgtagccatctccgtggccaatgtgactaccgtgccagcagcgggggcggcccagcctctgagtcccgtggggccccggctcccaccggtgccaaacccagcccctgcggccgtcaccccgccagcctacactgccagccgccaccggggcacacgggcctctgcttgccagccaggagtgcggacaccatgttcccagctcagtgccaaagaggggtcaccagggggagctgtctgcggagccagcgcctgcccgagagagaccccaccgccaccgtgtgcctttcccgggccctcagccctcgggccgggcaccacccccagtccccccagtaaaagcctccactggcaaatgcagtccttcctccctgcaaaaaaaaaaaaaaaaaaaaaaaaaaaaaaaaa

SEQ ID NO: 26494 - DNA, 2785 bp, Homo Sapiens
gtcgtggaagctggcctggcccccggagctccctggagtcggtactgggggcttcgttttgtacgcaccgttttctctctgtgctatgggagatgtcaaggaatcaaagatgcaaataacaccagaaactccaggaaggatccctgttttaaatccttttgaaagtcctagtgattattctaatctccatgaacaaactctcgccagtccttctgtttttaaatcaacaaaattaccaactccagggaaatttagatggtctattgatcaactagctgtaataaatcctgtagaaatagacccagaagatattcatcgtcaagctttatacttaagtcattctcgaatagataaagatgtggaagacaaaagacaaaaagccattgaagagtttttcactaaagatgtcatcgtaccctctccttggactgatcatgaagggaaacagctttcacaatgtcattccagtaaatgcactaacataaatagtgactctccagttggaaaaaagctgaccattcattctgagaaaagcgatgctgcttgtcagacattgctgtctcttcctgtggattttaatttagaaaatatattaggtgactattttagagctgatgaatttgcagatcaatctcctggaaacctcagttcttcatccctcagaagaaagctgtttttagatgggaacggaagcatctccgactccttaccttcggcttctcccggaagtcctcacagtggtgttcaaacatcactagagatgttttattcaatagatttgtctcctgtaaagtgtaggagccccttgcagacaccaagttcggggcagttttcttctagccctattcaggctagtgcaaaaaaatacagcttgggaagcataactagtccttcgcctatttcttcacccactttctcaccaattgaatttcagataggagagactccactctcagaacaaaggaagtttactgttcattctcctgatgcttcatctggaacaaattctaatgggataactaatccgtgtatcagaagtccttatatagatggctgctcgccaattaaaaattggtctcctatgagacttcagatgtatagtggtggtactcagtatcggacctcagtgattcagataccttttactcttgagactcaaggtgaagatgaggaagataaagagaatattccttccacagatgtctcatcacccgccatggatgctgctggaatacacctacggcagtttagtaatgaggcttctacccatggtacacatttggttgtgactgccatgtctgttacacaaaatcagtccagtgcttctgagaaagaattagcactgttgcaggatgttgaaagggagaaagacaataacactgtggatatggttgatcctatagagatagcagatgagaccacttggattaaggagccggttgataatggcagtttacccatgactgattttgtaagtggcattgccttcagtattgaaaactctcatatgtgcatgtcacctcttgctgaaagcagtgtcattccttgtgaaagcagtaacattcagatggatagtggctataatacgcagaattgtggaagcaatattatggatacagttggggcagaaagttactgcaaagaaagtgatgcacaaacatgtgaagttgagagtaaatctcaagcatttaatatgaagcaagaccacacaacacagaggtgttggatgaaaacagcaagcccttttcaatgcagcagtccatagaatacctctgtcagaatcaaagactaagcttaagagttcctcgcatatatcgttgtgcacaggatcaacatgatggtgactgggaaaaaattacttcaagtaacatgcttagctttccctccttaatgtgaaaaatcaagggcttactgacataggaacaacagaaatgctcctggaacttcaagttgctgaattataagtttattttttatcaataaatatttttatacttacattgagtgatgtgtttaacaacaaattgtgacagagctgagtgctcctatcttacagggtcaatgaactacttattaagccttactggtagcactgaatttagcagttctgagaacatgtgaaactatgttaaaactgaaggcactatatatttttacataaaagcttgaacatacagatgaattataacctatgtgaagaaatcttagatataaaactaacttttcaaagatacaaaagaaattaaacaggtttcctgaaattttagttcttggtctgttcacctctgtggggaaaattcttagttccagtgataactgttctagttactacttttaagtatgtaaatactagaaaggtagtactagtgacatcatcacgtgtattgttatctatggggcaaatgtgtggtgcccagaataaaatatacctcatgcctagggtagggacatcctttccagctcaaacgtgggtagggatgtgggagaataagaatgtgggagaaccaagagaaaaagtggggctgggagagtggagttcccgtagggcataggcctgtgaagtaacactggggcagatatgtatgttatatacaactatttttttaaaaaacttatatccatgttgggagtagatgggtatataacagtttggaaatactatctttggagaatgtatttttgtatttataaatcaacttttaaaaactgtctcattcaaaagggaataattcatatgtacccttaggaaataaagacctgtgttatcaaaaaaaaaaaaaaaaaa

SEQ ID NO: 26495 - DNA, 1607 bp, Homo Sapiens
cctcgtgccgcgagctcggcggcgggtttgctgagatctgtggccggcggcagctggtgcggggggcagctgagagcgagaggtggatcggggcggtgtgtggccagggccatgacgggcaatgccggggagtggtgcctcatggaaagcgaccccggggtcttcaccgagctcattaaaggattcggttgccgaggagcccaagtagaagaaatatggagtttagagcctgagaattttgaaaaattaaagccagttcatgggttaatttttcttttcaagtggcagccaggagaagaaccagcaggctctgtggttcaggactcccgacttgacacgatattttttgctaagcaggtaattaataatgcttgtgctactcaagccatagtgagtgtgttactgaactgtacccaccaggatgtccatttaggcgagacattatcagagtttaaagaattttcacaaagttttgatgcagctatgaaaggcttggcactgagcaattcagatgtgattcgacaagtacacaacagtttcgccagacagcaaatgtttgaatttgatacgaagacatcagcaaaagaagaagatgcttttcactttgtcagttatgttcctgttaatgggagactgtatgaattagatggattaagagaaggaccgattgatttaggtgcatgcaatcaagatgattggatcagtgcagtaaggcctgtcatagaaaaaaggatacaaaagtacagtgaaggtgaaattcgatttaatttaatggccattgtgtctgacagaaaaatgatatatgagcagaagatagcagagttacaaagacaacttgcagaggaacccatggatacagatcaaggtaatagtatgttaagtgctattcagtcagaagttgccaaaaatcagatgcttattgaagaagaagtacagaaattaaaaagatacaagattgagaatatcagaaggaagcataattatctgcctttcattatggaattgttaaagactttagcagaacaccagcagttaataccactagtagaaaagtttgagaaacactttgagaagacactactaggcaaataaaattttggaccattaacttaaagacgagaatacatgggaaaataggataaaagaacaaggtgtgagaaggaatagaaggaaacaaacaggaaagatatggctgcaccatgcagtgctactatatgctgagattctacaggatgagatttttgaatagctgaggcagttgcctataatctgtgatgacataaaagtatttgacctaaaatctttttatttgcaaaataataaataaaaagtgattctccctcggcatggctataatgaacttggttagaacctataaatgtttttgttatgtgagactttttaaccgatgaattcgttgaatacacaccacatttaaaaactgcctaggaggtaatccaaaaatatatagttataaaacttcttgtattatgtaccaaatctctttcttaaaatataaaataaaattatctagtttaagattaaaaaaaaaaaaaaaaaaaaaaaaaaaaaaaaaaaaaaaaaaaaaaaaaaaaaaaaaaaaaaaa

SEQ ID NO: 26496 - DNA, 1580 bp, Homo Sapiens
agcggggaggggcgcgcggccgcgagcaaaggagggagggaaggaaggaagagagggaggcgggcaagcaggcgggcgcgggggtcggggactgaggcagtagagggaggcgagagcccggcagccgcttcgcgctgtttgctgcgcgggcttttggagggggcggccgtttagtcggccgaggagaagcggacaccagcggcgttggtgatagcgcctgggggagggggactggagaggcgagaaggggggtcgctgcggtggttctctcgctgtcgctctctctttgcctcgctcccggctcggcgggctcctcccggcgtctctctcgcctccggggtcccgctccccgccccccgcggtatgtcttgatcccgagcagcgggtttcatggggctcctcaggattatgatgccgcccaagttgcagctgctggcggtggtggccttcgcggtggcgatgctcttcttggaaaaccagatccagaaactggaggagtcccgctcgaagctagaaagggctattgcaagacacgaagtccgagaaattgagcagcgacatacaatggatggccctcggcaagatgccactttagatgaggaagaggacatggtgatcatttataacagagttcccaaaacggcaagcacttcatttaccaatatcgcctatgacctgtgtgcaaagaataaataccatgtccttcatatcaacactaccaaaaataatccagtgatgtcattgcaagatcaggtgcgctttgtaaagaatataacttcctggaaagagatgaaaccaggattttatcatggacacgtttcttacttggattttgcaaaatttggtgtgaagaagaaaccaatttacattaatgtcataagggatcctattgagaggctagtttcttattattactttctgagatttggagatgattatagaccagggttacggagacgaaaacaaggagacaaaaagacctttgatgaatgtgtagcagaaggtggctcagactgtgctccagagaagctctggcttcaaatcccgttcttctgtggccatagctccgaatgctggtaggggagataaagttggctcagattgattatcatccttattgtctctataatctgtgtttcatttcacaagggctagatatagggaaatcggtgaaagactagactaaaaataacatgtaattcagtaatatctagttttgcagttacttttaaatgcatttaaaagattcctcatgtagagtgatatcctaatatccttgcattgttttctgagatgccggtttttagtatttcttatttttggtgttatgttttgctgtattccagcagagctcttagagactgggggtgggggtgggggtcataaatcttattttgtccaaagcttactgttttagctattcatgttaaattaagaaaaggcttagtgggttaaaattcacctggttttactgttaaactgattttgactttaagagaagccaaggttatggctgtggtttagtttgctagtaaatatcaagtggaaaataaagatactttaataaaaaaaaaaaaaaa

SEQ ID NO: 26497 - DNA, 4317 bp, Homo Sapiens
agcgggtatctatggccgggctcaggcggctgctggggagccaggagaccgcgcgggacggcggatgaggcgcggcggctgcggcccagggcacctcccctctggcttcccgaacccggccaggtccgacccgagggggaggatggaaacacctgccgcgctctgagccccccagaagagaacacccttcccgccatatcaccccacggtcctgcggaggccaccgcctggtccccccaagtctccatcgcgcagcgtggggccgagaggaatagtgagcgatggcggaaaacctgaaaagactggtctcaaacgaaactttacgaacgttgcaggaaaagctagacttctggctgaaggagtacaacacaaacacgtgtgatcaaaatctaaaccattgccttgaactcattgagcaagttgccaaggtgcagggacaactctttgggatcctcacagcagcagcccaagaaggaggacgtaatgatggtgtggaaacaatcaagtcacgccttttgccttggctggaggcttcctttactgctgcttccctgggaaaatctgttgacagcaaggtcccctctctgcaggacacgtttgatagggagagacataaagatcccagtcctcgggatcgggatatgcaacagttagactctaatttgaactcaacccggagtcaatgcaaccaggttcaagacgatctggttgaaactgaaaagaatcttgaagaaagcaagaacagatcggccatatcccttttggctgcagaggaggaaataaatcagctgaaaaagcagcttaaatctcttcaagctcaggaggatgcccgccacagaaacacagatcagaggagctcagagaataggcggtcagagccttggagcttggaggagcggaagcgtgagcagtggaactcactcaagcagaatgcagaccagcaggacacagaagccatgtccgattataagaaacagctccgaaacctgaaggaggagatagctgttctgtctgctgagaaaagtgcactccaaggaaggtcctccaggagccggtctcccagccctgcccctcgcagccgtagctgcagccgcagcagatctgccagcccctccaccgctgtcaaggtcaggagaccgtccccaaaccgctccaagctgtccaatgtggcgcgcaaggctgccctcttgtcccggttcagcgattcctattcccaggcccgcctggacgcgcagtgcctgctgcggcgctgcatcgacaaggctgagaccgttcagcggatcatctacatcgccacagtggaggcattccatgtagcaaaaatggcattcagacacttcaagatccatgtgagaaaatcgttgacaccatcttatgtggggtcgaatgactttgagaatgctgtcttggattatgtcatttgtcatcttgatctatatgattctcaaagcagtgtcaatgatgtgatccgagccatgaatgtcaatcccaagatttcattccctcctgtcgttgacttttgccttctcagtgacttcatccaggagatatgttgcattgcctttgcaatgcaggccttagaaccacccctagatattgcatatggagcagatggagaagtttttaatgattgcaaataccgccgcagctacgactcggatttcactgctcccttagtcctctatcacgtgtggcctgctctcatggagaatgactgtgtcattatgaagggagaagctgtcaccaggagaggggctttttggaattcggtgcgatctgtaagtcgttgtcgaagcaggagtttaagtcccatttgcccccgtagccaaattggtttaaacacgatgtctcgaagtcggagtccttctccaataagatgtggattgccaagattttaaaagcaccagacctgctcctttgacccagtgcgtggaaacagctgctttctccagtgccgccatctgtcttctgtgtctgcctcagacctcacttaagataatgtcaaaaggcaattctgtgtatcaccccacacagagagttaaatgttttggcttggcgcatttgtaactttagatatattgcattctattttattttatagatactaattccattaatttcataaaaatgattgtataggcatttaggatcatattcattcgaagcaaagtccgttacaaaggttcaagatttccatctcaaaacactacgctcttttatgggaactgtgtgaactgaagtggaaagcatctaccatgctgaggctaaaagaaaagatgaatcattttagtttgcagatggatcgtaaatataattgttggtatcagctttagctcaaaaccaatattaggtgttttaatttccttttaaggtttggaagacagccctaatctcaggttggggagctcatgttagtagcagtgacttaaggctaagtgtagaagataatttaagatacattttctttatatattagccaacaaattatatttattggttggcttgcttttccgttctgattttgagagtgcccagtttggtttagttgaccaatgaatgtcaaagctacttagttgagagaatttccttgttcataaatgtagagcagtgatttgattagaagccagctttgagataaatgttaattacctcatgcatatctcctgggaatatttcaaactgttttaatgcatgtgttatatataaaagtttcttgggacatgctcttcacctgttctacctagttatttgcaaattcagacctcctattgaactctgtctgaccaaaactacttaaactcaaggcccaaaactaggggcaccatttactgattttaaattgagtatatatcccttgacttcttcactgtcaaatacttttgaaacttcacgttcaagataagaatggaatgttgctttcttgcaataagtaatgttctttctgcctttttttcacttttaagtcagccttaaacacatgcctcacaaacatctactttctccacatacctttgagagagacactgaattggcctcagctcagttttgcataagcttagtgccagaaccagcacctgatgcttttcaggtgaaaataaaacaaacagcttctctaaagcatcttacccctgtgctggaggtttgagggacctcttcagtgcctgccccttgagtctaatggtcaccacctcattctgaagtatgagttgaattttttgccctctttgcatatttacattagtcatcactttgaagcaatgcagtgtgctggaaggagcactatctgcctaggtaactgctagtcatgacctggtcatcagcttgctttgtggcactgagcaagttacttcacttctctgagccttggttttatcatagggtgaggaggttggatacaattagtgccccccttaaccctgcagactcaatgttcccttttataacaagtattttattctgaatatgaaatgaaaattaaagttaatataatcatctatgtgcatgtataattttaagcagtgaacatagtaccctaactataatataaagcagaaaaaaaggcaacttttaataaaataaaatgtatttcaataaaaaagcttgggtataaccaccctagaagataaaattaagtcattagatggctgaacctgcatgtagagccaccagctacaaatgaaaatcaatgtgtgtattggcaacagaaaatcacggtgttgtcattggatgtgactttctgaagtggtgggcaattcttgttaatgttttaaacaaaaaaaaaaacaccttacagtcttgccctgatttacacagcagtcacattcctggaaaattcaagtgtttattaaaactatgcaacagttactgtgtgttatacgttgaaaggtcttcactaatatctcactaagtaatgagaatgcctacatatcagaattttttttttcaggagccaagcacatatactgatttggaaaaaggcacaggtagctcagtttatttgctttctaccctgcctggccacttgctgtttcttcagtttctaatttgagctgtaactacacaaggaaagctaaatagtctggaaaatttttggaaagaatccacaaagccaaaggagactggcctatactcattttatctggggatgtaccttacccttagagactttgaaaaatgtgaagctcttattttgtaacctgggtaaatgttagtttctagattttcggcttaacatctaataataacatttaaaaagtgcttttgtaactattagttatttgcaataaaatgctttccttctacaaaaaaaaaaaaaaa

SEQ ID NO: 26498 - DNA, 1707 bp, Homo Sapiens
agcgggcggacgccgcggccggcgatgaggatggaggccggggaggcagcgccgccggcgggggcgggcggccgcgccgcaggcggctggggcaagtgggtgcggctcaacgtggggggcacggtgttcctgaccacccggcagacgctgtgccgcgagcagaagtccttcctcagccgcctgtgccagggggaagagctgcagtcggaccgggatgagaccggggcctacctcattgaccgtgaccccacctacttcgggcccatcctgaacttcctccggcatggcaagctggtgctggacaaggacatggctgaggagggggtcctggaggaagccgagttctacaacatcggcccgctgatccgcatcatcaaagaccggatggaagagaaggactacacggtcacccaggtcccacccaagcatgtgtaccgcgtgctgcagtgccaggaggaggagctcacgcaaatggtctccaccatgtctgatggctggcgcttcgagcagctggtgaacatcggctcctcctacaactacggcagcgaggaccaggcagagttcctgtgtgtggtgtccaaggagctccacagcaccccaaacgggctgagctcagagtccagccgcaaaaccaagagcacggaggagcagctggaggagcagcagcagcaggaggaggaggtggaggaggtggaggtggaacaggtgcaggtggaggcagatgcacaggagaaaggttcccgtccgcaccctctcagacctgaggctgagcttgcagtgagggcttctcctcggcccctcgcccgcccccagagctgccatccctgctgttacaagccagaggcacccggatgtgaggccccagatcacctccagggacttggggttcccatctgaaatcctttatttttgtaccatggggtgggccccgggcctgagaaggaagaagcaccctctccccggcctcctctgtctgcacccgtggggctgtgacttactcctgcctccaggggcggggcggggcccccctgggacctcttaaggcccaaggtgggccccaggacctctgggcagagtggactgctcatggcagatgtgtggcaatgtctggctgtgtctctccggcacctgcgtcccctctcccgggctcccctgctgcatggtggatgtgctccttcctggcccggtcacattgcctccttgagccttagtccagggggtcactcctcccaccccacctacctcacagggttgttgtgagggtgcacagaggagcaaagtccctgaaggccctcaggcagtatataggggccgcccaccttcagctgccctgggatgggaaggacccagcccgacccctgggcataacactgtgtttgcaaatggagattcaggtattggggatgcaggttgtggggagctggcctggcagagtaggggtagttggcttggccttctctttggtgatcccacccccagccatttgcattgctggcccagcgcctggcctggggggcggggagaggcagcagaaggggctgggcaggggcggtggaggactcaggaactgcccggggagagtgggtatggcggctgagccaggggccctcctgtgtttgacttcccgggatgggtccttgcttctcagctgtgtccgaccccaccatgtaataaaacccaaaggaacagcaaaaaaaaaaaaaaaaa

SEQ ID NO: 26499 - DNA, 2096 bp, Homo Sapiens
gagccggcggcgcaccaccatgacccagtcggtggtcgtacaggtcggccagtgcggaaaccagatcggctgctgcttctgggacctggcactaagggagcacgccgcggtcaaccagaaaggaatttatgatgaggcaataagcagcttctttagaaatgtggacaccagagtggttggtgatggtggaagtatttccaagggaaaaatatgttctttaaaagcacgagcagtcttgattgatatggaagaaggggtagtgaatgaaattctgcagggaccactgagagatgtatttgatacgaaacagctcatcactgatatttctggctcaggaaataattgggccgtgggtcacaaagttttcggcagtctttaccaagaccagattttagagaaattcagaaagtcggcagagcactgtgattgcttgcagtgtttctttataatacattccatgggaggaggaacaggatctggacttggcacatttcttttaaaggtgcttgaagacgaattcccagaagtatacagatttgtgacttccatttatccttctggtgaggatgatgtcataacctcaccttataatagcatcttggcaatgaaggaacttaatgagcatgcagactgtgtattgcccattgacaatcaatctttatttgacatcattagcaaaatcgacctcatggtgaattctggaaagttgggtacaactgtgaagccaaagagtctggttacttcaagttctggggctttaaaaaagcagcataagaagccctttgatgcaatgaataacattgtggcaaatttgctcctcaacctaacgagctctgcaagatttgaagggtcccttaatatggaccttaatgaaatcagcatgaatttagttccttttcctcaacttcattatctcgtgtcaagcctaacacctctgtatacactgacagatgttaacattcctcctagaagattggatcagatgttttcagatgcctttagtaaagatcaccagctgcttcgggcagaccccaaacacagtctttacctcgcctgtgcactcatggttagaggaaatgtacaaatttcagatcttcgtagaaatattgaaagattaaaaccatctctacaatttgtctcctggaatcaagaaggctggaagaccagcctgtgttccgtacctcctgtgggccattctcattcgttattagctttagcaaataacacatgtgtgaagcccaccttcatggaactgaaagagagattcatgaggctctacaagaaaaaggctcaccttcatcactatctacaagttgaagggatggaagaaagctgtttcacagaagctgtgtcatctttatcagcactcatacaggaatatgaccaactggacgccacaaaaaacatgcctgtgcaggatttacccagactaagcatagctatgtgaaaaagaaaccctcaaaaatactttcttaatttcacattgttttttctgacctttctgtttcaacatttttgtaatttggaaactccagttttttcatattatcgggaaatatttttgtctaaaagagtgatttctgtttaatcgcaatttgttggtaataccaatgtgtgaaattagtgaaatcttagtaccttaacttcaaacatttctcttcagaaaagttcccttttctaaaattgagataacatagttcttgaatattttgctgtatttatagcctcatatttaggcatttatgcactgatgtgtcttcaataaaaatcttgtacagatatatttttataattatttataatttatattttgatattctatttaagttatcctgattctttaaaagtagttattgggagtagaagaacacaatataaatatttccgtgtaatagccaccaacttttcaggcataggttttattacaactgttaaggaggttttgcttcttctttagataacaacttgtttgcccaaaagaatcctaatttgtacacttaacatgtatttgtattaaactttttaaataattgctttcttatcaaaccaattgattttataataaatgtctatatttttcaaaaaaaaaaaaaaaa

SEQ ID NO: 26500 - DNA, 2925 bp, Homo Sapiens
gtctcaagatggcggccaatgtgggatcgatgtttcaatattggaagcgctttgatttacagcagctgcagagagaactcgatgccaccgcaacggtattggcgaaccggcaggatgaaagtgagcagtccagaaagcggcttatcgaacagagccgggagttcaagaagaacactccagaggatttgcgcaagcaggtagcgccgctgctgaagagtttccaaggagagattgatgcactgagtaaaagaagcaaggaagctgaagcagctttcttgaatgtctacaaaagattgattgacgtcccagatcccgtaccagctttggatctcggacagcaactccagctcaaagtgcagcgcctgcacgatattgaaacagagaaccagaaacttagggaaactctggaagaatacaacaaggaatttgctgaagtgaaaaatcaagaggttacgataaaagcacttaaagagaaaatccgagaatatgaacagacactgaagaaccaagccgaaaccatagctcttgagaaggaacagaagttacagaatgactttgcagaaaaggagagaaagctgcaggagacacagatgtccaccacctcaaagctggaggaagctgagcataaggttcagagcctacaaacagccctggaaaaaactcgaacagaattatttgacctgaaaaccaaatacgatgaagaaactactgcaaaggccgacgagattgaaatgatcatgacggaccttgaaagggcaaaccagagggcagaggtggctcagagagaggcggagaccttaagggaacagctctcatcggccaatcactccctccagctggcctcacagatccagaaggcaccagacgtggccatagaggtgctgacccgctccagcctagaagttgagttggccgccaaggagcgggagatcgcacagctggtggaggacgtgcagagactccaggccagcctcaccaagctgcgggagaattcggccagccagatctcacagcttgagcagcagctgagcgccaaaaacagcacactcaaacaactggaagaaaaactcaaaggccaggctgactatgaagaggtgaagaaagagctgaacattctgaagtccatggagtttgcaccatccgagggcgctgggacacaggatgcggccaagcccctggaggtgctgttgctggagaagaaccgctcgctgcagtccgagagcgccgcgctgcgcatctccaacagcgacctgagcggacgctgtgcggagctgcaagtccgtatcactgaggctgtggccacagccactgagcagagagagctgatcgcccgcctggagcaggacctgagcatcattcagtccatccagcggcccgatgccgagggtgccgctgagcaccgcctggagaagatcccagagcccatcaaagaggccactgccctattctacggacctgcagcaccagccagcggtgccctcccagagggccaggtggattcactgctttccatcatctccagccagagggagcgcttccgtgcccggaaccaggagcttgaggccgagaaccgcctggcccagcacaccctccaggccctgcagagtgagctggacagcctgcgcgccgacaacgtcaagctctttgagaagatcaagttcctgcagagctaccctggccggggcagcggcagtgatgacacggagctgcggtactcgtcccagtacgaggagcgcctggaccccttctcctccttcagcaagcgggagcggcagaggaagtacctgagcttgagtccctgggacaaggccaccctcagcatggggcgtctggttctctccaacaagatggcgcgcaccatcggcttcttctacacactgttcctgcactgcctggtcttcctggtgctctacaagctggcatggagcgagagcatggagagggactgtgccaccttctgcgccaagaagttcgctgaccacctgcacaagttccacgagaatgacaacggggctgcggctggtgacttgtggcagtgataccccggggcctcccccgtgacagtgacggctgcgcctccaccccgactgctcagtgcatctaatcacttagactcccctgaagaatcccccatggaaactgcccttatccgctgtccagcagctgccagaggccccaggtcacctcgggtccccttgaaagaatgtctcggtcacatcaggcccgctaggtccagagagcgagcccccaatgcccggccaggctaagccgcagagaccctctcagcccccacctcaggttagggctctgcccgcagcctgacctctagccctggtggcagaggtccctcagctgcgaggctaattgggtgaccaccgattccagctgcggttaatccagcttgggcctgtctgcactgcgatcctcttgggctctcctaggatccccccatgccccgtaagaggtggaagacgcttccttccaggacagcaggctttgagtccagcacccccagcctgcctttgccaccagccccaccctgcagagtatatgaggcttgacagagtctgccccctcccccactgcaccccaagagagagagccccagccagcggaacagtttctattaccccctccctgcccccagacccatgtgatttctgctttcttctttagcaagatattctggtttctagataaggaagagtctctaatgagcccccgagccccagtctcttcagactcatggattggtctgaggggtctgaacgtctcctagccaatcagaactggctgtggaccaccctagcacggccacctctcagggccactggcaggccttcctgagttagatttgtagttgcatatttagctttgcacatttgaaataaaccacggttgcagccaaaaaaaaaaaaaaaaaaa

SEQ ID NO: 26501 - DNA, 1868 bp, Homo Sapiens
cgcacagggcgcacccggacgctctaccgctcccgccgcagtcgccgggccatgggcctcgagcccgccccgaacccccgcgagcccgccttgtctgcggcgtgactggaggcccagctgccgcccctccctgtgtccttccaagaagtgccacatgcactgatctcttgtgtccccagatggtcatcatgggccagtgctactacaacgagaccatcggcttcttctataacaacagtggcaaagagctcagctcccactggcggcccaaggatgtggtcgtggtggcactggggctgaccgtcagcgtgctggtgctgctgaccaatctgctggtcatagcagccatcgcctccaaccgccgcttccaccagcccatctactacctgctcggcaatctggccgcggctgacctcttcgcgggcgtggcctacctcttcctcatgttccacactggtccccgcacagcccgactttcacttgagggctggttcctgcggcagggcttgctggacacaagcctcactgcgtcggtggccacactgctggccatcgccgtggagcggcaccgcagtgtgatggccgtgcagctgcacagccgcctgccccgtggccgcgtggtcatgctcattgtgggcgtgtgggtggctgccctgggcctggggctgctgcctgcccactcctggcactgcctctgtgccctggaccgctgctcacgcatggcacccctgctcagccgctcctatttggccgtctgggctctgtcgagcctgcttgtcttcctgctcatggtggctgtgtacacccgcattttcttctacgtgcggcggcgagtgcagcgcatggcagagcatgtcagctgccacccccgctaccgagagaccacgctcagcctggtcaagactgttgtcatcatcctgggggcgttcgtggtctgctggacaccaggccaggtggtactgctcctggatggtttaggctgtgagtcctgcaatgtcctggctgtagaaaagtacttcctactgttggccgaggccaactcactggtcaatgctgctgtgtactcttgccgagatgctgagatgcgccgcaccttccgccgccttctctgctgcgcgtgcctccgccagtccacccgcgagtctgtccactatacatcctctgcccagggaggtgccagcactcgcatcatgcttcccgagaacggccacccactgatggactccaccctttagctaccttgaacttcagcggtacgcggcaagcaacaaatccacagcccctgatgacttgtgggtgctcctggctcaacccaaccaacaggactgactgactggcaggacaaggtctggcatggcacagcaccactgccaggcctccccaggcacaccactctgcccagggaatgggggctttgggtcatctcccactgcctgggggagtcagatggggtgcaggaatctggctcttcagccatctcaggtttagggggtttgtaacagacattattctgttttcactgcgtatccttggtaagccctgtggactggttcctgctgtgtgatgctgagggttttaaggtggggagagataagggctctctcgggccatgctacccggtatgactgggtaatgaggacagactgtggacaccccatctacctgagtctgattctttagcagcagagactgaggggtgcagagtgtgagctgggaaaggtttgtggctccttgcagcctccagggactggcctgtccccgatagaattgaagcagtccacggggaggggatgatacaaggagtaaacctttctttacactctaaaaaaaaaaaaaaaaaaaaaaaaaaaaaaaaaaaaaaaaaaaaa

SEQ ID NO: 26502 - DNA, 2084 bp, Homo Sapiens
cgcgatggcaggtgtcggggctgggcctctgcgggcgatggggcggcaggccctgctgcttctcgcgctgtgcgccacaggcgcccaggggctctacttccacatcggcgagaccgagaagcgctgtttcatcgaggaaatccccgacgagaccatggtcatcggtcaggcgggctgagggtggggaggccctttgtacccagctcagccctcggcggcgctccctcctcccgagcccagccgggtcgctggctcccccagtacctagcctgagggtgccccgaggacgccaggccccctgcctagagctccgggccgcacgtcggagggggccgggcggagaggcggcccactagggccggtcgtgactatgtgtctgccccgcaggcaactatcgtacccagatgtgggataagcagaaggaggtcttcctgccctcgacccctggcctgggcatgcacgtggaagtgaaggaccccgacggcaaggtggtgctgtcccggcagtacggctcggagggccgcttcacgttcacctcccacacgcccggtgaccatcaaatctgtctgcactccaattctaccaggatggctctcttcgctggtggcaaactgcgtgtgcatctcgacatccaggttggggagcatgccaacaactaccctgagattgctgcaaaagataagctgacggagctacagctccgcgcccgccagttgcttgatcaggtggaacagattcagaaggagcaggattaccaaagggcaagtgcatatctccttgtaatttgagagggcagttgacctttatacccactatacctactcaagtttctgcttgggagatcagctctgcagagaatggaatgagaagtattggtttagataggttgtttgtttgttgtttttgagacggagtttcactcttgttgcccatgctggagtgcaatgccatgatcttggctcactgcaacctccgcctccccaggttcaagcgattctcctgcctcagcctcctgagtagctgggattacaggcatgcgccaccatgcctggctaattttgtacttttagtagagacgggggtttctccatgttggtcaggctggtctcgaactcccgacatcaagtgatccgcccgcctcagcctcccaaagtgctgggattacaggtgtgagctaccgcgccctgcctgttttgcttttttatcaaaacattttattgtggtaaaatataacaccaaatgtgtcattttaactgtctatatagttcagtggtattaagtgccttcataatgttgtgctaccaacaccatcatccagctccagaactttttcatcttctcaaactaaaaatctgtacttattttgttttgtttttgagatggagtctcgctctgttgcccaggctggagcgcagtggcgccatctcggctcactgcaccctccgcctcccaggttcaagcgattctcctgcctcagcctcccaagtagctgggattacaggcaagtgccaccatgcgtggctcatttttgtgtttttagtagagactgggtttcaccatgttggccaggctggtcttgaactcctggcctcaggcaatccactgccgcagcctcccaaagtgttgggattacaggcgtgagccactgcacccagcaaatctgtacttattataaacaataacttcccgtttccttttgtcctgacacccaccattctactttctgtctctatgatcctgactaccctatctcatataagtggaatcattcagtatttgtccttttgtgactggcttatttcactgagtataatgttctcacagttcatccatgttatagcatgtgtcagaatttcttaaggctaatattccattgtatgcatgtgccacatttcgctttcagtagtcatttttaagctctataaaataaaatgaagaaaggacagttcaaaaaaaaaaaaaaaaaaaaaaaaaaaaaaaaaaaaaaaaaaaaaaaaaaaaaaaaaaaaaaaaaaaaaaaaaaaaaaaaaaaaaaaaaaaaaaaaaaaaaaaaaaaaaaaaaaaaaaaaaaaaaaaaaaaaaaa

SEQ ID NO: 26503 - DNA, 2631 bp, Homo Sapiens
gcccatcccgccgcagcggcccggggccgagcaggggctaggcggggagggagcggcgcccagcggggcccggagcgtggccagaatggtgctggaaggaaaccctgaagtggggtccccccgaacctcagacctccagcaccgggggaacaagggctcttgcgttctctcctctcccggtgaagatgcgcagccaggcgaggagcccatcaagtatggtgaactcatcgtcctgggctacaatggttgtctggcaagtggggacaagggccgccggcgaagccgcctggcactgagccgccggtcgcacgccaacggggtgaagccagacgtcatgcaccacatctccacgccgctcgtctccaaggcactgagtaaccgtggtcagcacagcatctcgtatacactgtcccggagccactcggtcatagtggagtatacacatgatagcgacacagacatgttccagattggccgctccacagagaacatgattgacttcgtggtaacagacacgtcccctggaggaggggctgccgagggcccttctgcccagagcaccatctcccgctatgcctgccgcatcctctgtgaccgccggccaccctatactgcccgcatctatgccgctggcttcgatgcctctagcaacatcttccttggagagcgagcggccaaatggcggaccccagatggcctgatggatggactgaccaccaatggagtcctggtgatgcacccggcaggcggcttctccgaggactcagccccgggtgtctggcgggagatctcggtctgtgggaatgtgtacacattgcgggacagccgctcagcccagcagcggggcaagctggtggaaaacgagtccaacgtgctgcaggacggctctctcatcgacctgtgtggggccacactgctgtggcgcacaccggcggggctgctgcgggctcccacactgaagcaactggaggcccagcggcaggaggcaaatgcagcgcggccccagtgccccgtgggcctcagcactctggccttccccagcccagcccgtggccgcacagcgcccgacaaacagcagccctgggtctacgtccgctgcgggcacgtccatggctaccacggctggggctgccggcgggagcggggcccccaggagcgcgaatgtcctctctgccgccttgtggggccttatgtgcctctatggcttggccaggaggccggcctctgcctggaccctgggccgcctagccatgcctttgcaccttgcggccacgtctgctctgagaagactgcccgctactgggcccagacaccactgccccacggcacccatgctttccatgccgcctgccccttttgcggggcctggcttaccggcgagcatggctgcgtccgcctcattttccagggcccgctggattaggctccctggggccccctgctgctgtgcccacctgcccacccaggtccccacctcctgcagcccagagggagctctgcatgtgggacactccctgctggcacagccacaccagatggacatgttggatgggctgtgcccttccccccaactgtggccccccaaggaggtccccaagatctccaccccagtcatgctgatggggccttcagcaccagctctgtcctgggtcgatggaggaaagcccagccccatggccttgcccttcctggggcatcccacatcgtgccgccgacactgtgtgcccctgggggagtgaaggggccaggggcctttgacccccagcttaggctggctatgccctgagcctgccaacccagtttcagacactcatccttcatccttcctgctgccgccctgggttcctctataaacctcgctgctcagctgcccccacaagtcccacatgccccgcatgcgtgcaatgcctccagcccccaagtgagtggtgggtgggtggcaggctgggcctagcacttgctgatagccactatgggctcgactctgtgctaagtggtatctggggacacagaggcaatcagacctggttccccccctggtggagttcacagtctagtggaggacagactgttaacaaatggcaacacggcttcatgcgtgccaggatcagagtacaaatcaggctgtggcaggcctcactggtaatggaaaagtgagggaggcttcacggaggaggtgtcataggagctcagcctcaacggctgctcggaaccctccgagtccacaagatgggaagcaagtccacaagatgggaagcgtgctctatacagaagggagggcctgtgcacaggctcaggtgtcagtaagccagaaatccagggacagagtcaggatggctggagcatggactgcggggggaacagagaagggggtggagcaaaaggttgggaccatgtgaccagggaagatgctggatggaggattctgaacctcatttgtggacggtcaggagtcaacaaagggaggagagaggactcactggtcaagagtgtcggctgtgacacaagggccatcatccctgaatgcccaccatgtgccccgcactgtgctgatgatgataataataactacgtccattgagcaaaaaaaaaaaaaaaaaaaaaaaaaaaaaaaaaaaaaaaaaaaaaaaa

SEQ ID NO: 26504 - DNA, 1780 bp, Homo Sapiens
ggattctgggctctgctcagagtcaggctgctgctcagcacccaggacggagaggagcagagaagcagcagaagcagccaagagctggagccagaccaggaacctgagccagagctggggttgaagctggagcagcagcaaaagcaacagcagctacagaagttggaacgatgctggtcaccttgggactgctcacctccttcttctcgttcctgtatatggtagctccatccatcaggaagttctttgctggtggagtgtgtagaacaaatgtgcagcttcctggcaaggtagtggtgatcactggcgccaacacgggcattggcaaggagacggccagagagctcgctagccgaggagcccgagtctatattgcctgcagagatgtactgaagggggagtctgctgccagtgaaatccgagtggatacaaagaactcccaggtgctggtgcggaaattggacctatccgacaccaaatctatccgagcctttgctgagggctttctggcagaggaaaagcagctccatattctgatcaacaatgcgggagtaatgatgtgtccatattccaagacagctgatggctttgaaacccacctgggagtcaaccacctgggccacttcctcctcacctacctgctcctggagcagctaaaggtgtctgcccctgcacgggtggttaatgtgtcctcggtggctcaccacattggcaagattcccttccacgacctccagagcgagaagcgctacagcaggggttttgcctattgccacagcaagctggccaatgtgctttttactcgtgagctggccaagaggctccaaggcaccggggtcaccacctacgcagtgcacccaggcgtcgtccgctctgagctggtccggcactcctccctgctctgcctgctctggcggctcttctccccctttgtcaagacggcacgggagggggcgcagaccagcctgcactgcgccctggctgagggcctggagcccctgagtggcaagtacttcagtgactgcaagaggacctgggtgtctccaagggcccgaaataacaaaacagctgagcgcctatggaatgtcagctgtgagcttctaggaatccggtgggagtagctggtggaagagctgcagctttatcaggcccaatccatgccataatgaacagggaccaaggagaaggccaaccctaaaggattgtcctcttggccagctggtgctgcgaatcctgcctgctctgatcctcttgacccttctgggaatgtttgcacacctgacactcttgtgagactggcttatggcatgagttgtggacacctatagagtgttcttctctaagacctggaaagtcagcaaccctctgggggcagcaggactgggcagatcccaggctgggcatgggggtggcagaagagcccgagaaattgggtcagttccctcatcagcaccagaggctcagctgaggcaagaagagcaccatcactgcctatttctaggggctatacactccaactcttggttgatctctttctttttaaaaatatttgccaccaccctggagtctagaccaacacacaaagatcctggctaaccctggcctatttagattccttcctctcacctggaccttcccatttcaatcatgcagatggtttctttttgtaaagagttccgtttgcctttcaatttttagagaaaataaagactgcattcatctcaaaaaaaaaaaaaaaaaaaaaaaaaaaaaaaaaaaaaaaaaaaaaaaaaaaaaaaaa

SEQ ID NO: 26505 - DNA, 1577 bp, Homo Sapiens
gaggagatacgagctggacgcctggcccttccctcccaccgggtcctagtccaccgctcccggcgccggctccccgcctctcccgctatgtaccgaccgcgagcccgggcggctcccgagggcagggtccggggctgcgcggtgcccggcaccgtgctcctgctgctcgcctacctggcttacctggcgctgggcaccggcgtgttctggacgctggagggccgcgcggcgcaggactccagccgcagcttccagcgcgacaagtgggagctgttgcagaacttcacgtgtctggaccgcccggcgctggactcgctgatccgggatgtcgtccaagcatacaaaaacggagccagcctcctcagcaacaccaccagcatggggcgctgggagctcgtgggctccttcttcttttctgtgtccaccatcaccaccattggctatggcaacctgagccccaacacgatggctgcccgcctcttctgcatcttctttgcccttgtggggatcccactcaacctcgtggtgctcaaccgactggggcatctcatgcagcagggagtaaaccactgggccagcaggctggggggcacctggcaggatcctgacaaggcgcggtggctggcgggctctggcgccctcctctcgggcctcctgctcttcctgctgctgccaccgctgctcttctcccacatggagggctggagctacacagagggcttctacttcgccttcatcaccctcagcaccgtgggcttcggcgactacgtgattggaatgaacccctcccagaggtacccactgtggtacaagaacatggtgtccctgtggatcctctttgggatggcatggctggccttgatcatcaaactcatcctctcccagctggagacgccagggagggtatgttcctgctgccaccacagctctaaggaagacttcaagtcccaaagctggagacagggacctgaccgggagccagagtcccactccccacagcaaggatgctatccagagggacccatgggaatcatacagcatctggaaccttctgctcacgctgcaggctgtggcaaggacagctagttatactccattctttggtcgtcgtcctcggtagcaagacccctgattttaagctttgcacatgtccacccaaactaaagactacattttccatccaccctagaggctgggtgcagctatatgattaattctgcccaatagggtatacagagacatgtcctgggtgacatgggatgtgactttcgggtgtcggggcagcatgcccttctcccccacttccttactttagcgggctgcaatgccgccgatatgatggctgggagctctggcagccatacggcaccatgaagtagcggcaatgtttgagcggcacaataagataggaagagtctggatctctgatgatcacagagccatcctaacaaacggaatatcacccgacctcctttatgtgagagagaaataaacatcttatgtaaaataccaaaaaaaaaaaaaaaaaaaaaaaaaaaaaaaaaaaaaaaaaaaaaaaaaaaaaaaaaaaaaaaaaa

SEQ ID NO: 26506 - DNA, 2266 bp, Homo Sapiens
caggctctgggcactcgcgcggctcccgttcgcggagcacacatcccggcgcgacgaggttccttcggagagcgagcgggagtcggtgctgcctcctgcggggagcagcccgaggaatctgcagggagaggtcgggaggtgacaacgccagcatgccagtgctatcggaggactctggtttgcatgaaaccctggccctgctgacctcccagctcagacctgactccaaccacaaggaggagatgggcttcctgagggatgttttcagtgaaaaaagcctcagttacttaatgaagattcatgagaagcttcgctattatgaaaggcaaagtccaaccccagttctgcacagcgctgtggccctcgctgaggacgtgatggaggagttgcaggccgcctccgtgcacagtgatgagagggagctgctccagctgctgtccaccccgcacctgagggctgtgctcatggtacatgacacggttgcccagaagaattttgaccccgttctcccgcctctgcctgacgatatcgatgaggattttgatgaggaatcggtgaagatcgtccgcttggtgaagaacaaggaacccctgggtgccaccatccggcgggacgagcactcaggggctgttgtggtggccaggatcatgcgaggaggcgcagcagacaggagcggcctggtccacgttggagatgagctccgagaagtgaacgggatcgcagtcctgcacaagcggcccgacgagatcagccagattctggcccagtcccagggatccatcaccctaaaaatcatcccagccacccaggaggaagatcgcttaaaggagagcaaggtgttcatgcgcgccctcttccactacaaccctcgggaggaccgggccatcccttgccaggaggcgggcctgcccttccagcgcaggcaggtcctggagggcaggcctgcgctggaagggcaggcaggtcctggaggtggtgagccaggacgaccccacgtggtggcaggccaagcgagtcggggacaccaaccttcgagccggcctcatcccctccaaggggttccaggagagacgactaagctaccggagagccgcgggcaccctgccgagcccccagagcctcaggaagcccccctagacctgtgactgtgagggctacctcaaagggcactatgtggctggtcttcggaggagcttccggctgggctgtagggagagactgggtggctcgcaggaaggaaagatgtcctccggagctgagtctccggagctgctgacttacgaagaggtggccaggtaccaacaccagcccggagagcggccccgcctggtggttctgatcgggtctctgggagcccgactgcacgagctgaagcaaaaggtggtggctgagaacccacagcactttggcgtcgctgttccacataccaccaggccccgaaagagccatgagaaggaaggagtggaatatcactttgtgtctaagcaagcatttgaggccgacttacatcacaacaagttcctggaacatggtgaatataaggaaaatctgtatggaaccagcctggaggccattcaggctgttatggccaaaaacaaagtttgtttggtggatgtggagccagaagcactgaaacaactgaggacctcagaatttaaaccctatattatatttgtaaagcctgcaattcaggaaaaaagaaaaacgccacctatgtccccagcttgtgaggacacagcagccccatttgatgagcagcagcaagagatggccgcttctgccgccttcatagaccggcattacgggcacctggtagacgccgtgctggtgaaggaggatctccagggtgcctacagccagctcaaagtggtcttagagaagctgagcaaggacactcactgggtacctgttagttgggtcaggtaactttatcccagaacatccaagctggacgggaccttgaagatcatctagtccagactccctcattttaccatcaaggaatctcaagcgcagagagggagagaattctccacaaattccatcatcgagaagagtataagtgggaagtcttgtttgttgttggtttttgtctgttgtttttcactgcacctctttggatcatgatttgaaaggggcatatcagaaaacaacacatttcatttattaaagtatcacaggcaaaaaaaaaaaaaaaaaaaaaaaaaaaaaaaaaaaaaaaaaaaaaaaaaaaaaaaaaaaaaaaaaaaaaaaaaaaaaaaaaaaa

SEQ ID NO: 26507 - DNA, 2130 bp, Homo Sapiens
gctccggcggcttcgctgctagctcgcggcgacgtcgggccgattttcccaggatgacagagctgaggcagagggtggcccatgagccggttgcgccacccgaggacaaggagtcagagtcagaagcaaaggtagatggagagactgcatcggacagtgagagccgggcagaatccgcacccctgccagtctctgcagatgataccccggaggtcctcaatagggccctttccaacttgtcttcaagatggaagaactggtgggtgagaggcatcctgactttggccatgattgcatttttcttcatcatcatttacctgggaccaatggttttgatgataatcgtgatgtgcgttcagattaagtgtttccatgagataatcactattggctacaacgtctaccactcatatgatctgccctggttcaggacgctcagctggtactttctcctgtgtgtaaactatttcttctatggtgagacagtgacggattacttcttcaccctggtccagagagaagagcctttgcggattctcagtaaataccaccggttcatttcctttactctctatctaataggattctgcatgtttgtactgagtctggtcaagaagcattatcgactgcagttctacatgtttggctggacccatgtgacattgctgattgttgtaacacagtcacatcttgttatccacaacctatttgaaggaatgatctggttcattgtccccatatcttgtgtgatctgtaatgacatcatggcctatatgtttggctttttctttggtcggaccccactcatcaagctgtccccgaagaagacctgggaaggcttcattgggggcttctttgctactgtggtgtttggccttctgctgtcctatgtgatgtccgggtacagatgctttgtctgccctgtggagtacaacaatgacaccaacagcttcactgtggactgtgagccctcggacctgtttcgcctgcaggagtacaacattcctggggtgatccagtcagtcattggctggaaaacggtccggatgtaccccttccagattcacagcatcgctctctccacctttgcctcgctcattggcccctttggaggattcttcgcaagtggattcaaacgagcctttaaaatcaaagactttgccaataccattcctggccatggaggcatcatggatcgctttgactgccagtatctgatggccacctttgtcaatgtatacatcgccagttttatcagaggccctaacccaagcaaactgattcagcagttcctgactttacggccagatcagcagctccacatcttcaacacgctgcggtctcatctgatcgacaaagggatgctgacatccaccacagaggacgagtaggggccacccagggccaggagaacaggaacagaactgagcaggggcaggtctccaagaaatccctgcttggagctgcagaagggttgccttctgtaggtcggaggaatggaggcttactaaccaggtaagccttctatgcatccacaccaaaatcctgcagaatgtaagtaagctctgctttataagatgggttcaccttcatcgcagactgaaagtttcagtttttatttttttcagaaagcacgaaaaattatttataatagtctggagaaaaaacacactgtaatatttcaagtgtatgcagtagaatgtactgtaactgagccctttcccacatgtctaggctccaatgtctcctgtaggtccacctaactgtgtgttttcagggacaatgccatccatgtttgtgctgtagacttgctgctgctgaatcctttctggggactttctcatcgggcagggagcagagggcttctcgttcatgcaccctttgcctgaacacccatgtagctgctgtgttgtgtatatattactcttaagaggagtgtgtgtgtctgtgtttgttttaaaagtcacttatttcttacagtgatttcaattgcaccatgacttcttcactaaaaccacaaagtcctgcttaaaactatggaaaacctaacctgattagagccttgactattttgaagattaaatgcacactttttatataaaaaaaaaaaaaaaaaaaaaaaaaaaaaaa

SEQ ID NO: 26508 - DNA, 1661 bp, Homo Sapiens
cggtgctggaccagcacctgaggcccccagcccgccgacccggaaccacaacgccggcccgtgttgatctacagcagcaaattatgaccattatagatgaactgggcaaggcttctgccaaggcccagaatctttccgctcctatcactagtgcatcaaggatgcagagtaaccgccatgttgtttatattctcaaagacagttcagcccgaccggctggaaaaggagccattattggtttcatcaaagttggatacaagaagctctttgtactggattatcgtgaggctcataatgaggtagaaccactttgcatcctggacttttacatccatgagtctgtgcaacgccatggccatgggcgagaactcttccagtatatgttgcagaaggagcgagtggaaccgcaccaactggcaattgaccgaccctcacagaagctgctgaaattcctgaataagcactacaatctggagaccacagtcccacaggtgaacaactttgtgatctttgaaggcttctttgcccatcaacatcggccccctgctccctctctgagggcaactcgacactctcgtgctgctgcagtcgatcccacgcccgctgctccagcaaggaagctgccacccaagagagcagagggagacatcaagccatactcctctagtgaccgagaatggggactcccccaggtctggtagcccaaagctgctgctacagccgccatgggggggtgaattcctcatcccccaatacaggcaaccaagactccaagcagggagaacaggaaacaaagaataggtgaggtctaaacccctcccctaacagcctcccaccaccatctgactcccttcctaacatcattctcagtcacttcctactcttaaatcttattgtatgaactggacaccagctcctcccacaattccttctaccttacatcctgcaagcccctttcccccacaggttcaactctggtacttccctttggaatacggattctctgagaggttttaaatttggacatagcactaatggttccagcttcatacccatcatgtgtcctacattaaaacctggcccgagaccttgaagagtctgtaatcttaatttcctctttagtattcctataacccactctccatctccccacctaccaggtctgccagtgaggagcaggccttgtcacaggatgggtctggggagaagcccatgcacacagctcctccacaggccccggccccgccagcccagtcctggacagtgggtggggacatactcaacgccaggttcattcgaaacctgcaggaacgtcgcagcaccaggccttggtgaccgcagccccgtcaaacatcttcaaagtattatttctccctcactacaggaaagagccaaagcccaaccctcataatagatggatacattcattcattcattcattcagcaggcttatcagattcaagtcatttgtatcttttaaccagaccaataaaagtatttatttttatcacaaaaaaaaaaaaaaaaaaaaaaaaaaaaaaaaaaaaaaaaaaaaaaaaaaaaaaaaaaaaaaaaaaaaaaaaaaaaaaaaaaaaaaaaaaaaaaaaaaaaaaaaaaaaaaaaaaaaaaaaaaaaaaaaaaaaaaaaaaaaaaaaaaaaaa

SEQ ID NO: 26509 - DNA, 3763 bp, Homo Sapiens
cgcggcccaggtggtgcgggcggccctagcccggctgcggagcgctgcgcgagcggcgggctggctgaccccgagggacccccagcgcagcgggtgcggcgatgatcctggaggagaggccggacggcgcgggcgccggcgaggagagcccgcggctgcagggctgtgactccctgacgcagatccagtgcggccagctgcagagccgcagggcccagattcaccagcagattgacaaggagctgcagatgcggacgggcgctgagaacctctacagagccaccagcaacaaccgggtgagagagacggtcgccctggagctgagctacgtcaactccaacctgcagctgctgaaggaggagctggaggagctcagcggtggcgtggaccctggccggcatgggagcgaagctgtcactgtccccatgatccccctgggcctgaaggagaccaaggagctggactggtctacaccgctgaaggagctgatctcagtgcactttggagaggacggcgcctcctacgaggcagaaatcagggagctggaggccctgcggcaggccatgcggacccccagccggaatgagtcgggcctggagctgctcacagcctattacaaccagctgtgcttcctggatgcgcgcttcctcacccctgccaggagcctcgggctcttcttccactggtacgactcgcttactggggtcccggcccagcagcgtgccctggccttcgagaagggcagcgttctcttcaacatcggtgccctccacacgcagattggggcgcgccaggaccgctcctgcaccgagggtgcccgccgcgctatggaggccttccagagggccgctggggccttcagcctcctgagggagaacttctcccatgcgccgagcccagacatgagcgctgcgtccctctgcgcactggagcagctcatgatggcccaggcccaggaatgtgtgtttgagggcctctcaccacctgcctccatggccccccaagactgcctggcccagctgcgcctggcgcaggaggccgcccaggtggcagccgagtacaggctagtgcaccggaccatggcccagccacccgtccacgactacgtgcctgtctcctggactgccctggtgcatgtcaaggccgagtacttccgctccctggcccactaccacgtagccatggccctctgcgacggctccccagcgaccgagggagagctccccacgcacgagcaggtcttcctgcagccccccacctcctctaagccccgaggccctgtgctgccgcaggagctggaggagcgcaggcagcttggcaaggcacacctgaagcgtgccatcctggggcaggaggaggcgctgcggctgcacgccctgtgccgcgtcctgcgcgaggtggacctgcttcgggctgtgatctcccagacgctgcagcgctcactggccaagtatgcggagctcgaccgtgaggatgacttctgtgaggctgccgaggccccggacatccagcctaagacccaccagaagccagaggccaggatgccacgcctgtcccaggggaaggggcctgacatcttccatcggctggggcccctgtctgtgttctcagccaagaaccggtggcggctggtggggcccgtccacctgacccgaggagagggcggctttggcctcacgcttcggggagactcgcctgtcctcatcgctgccgtcattccagggagccaggccgcggcggctggcctgaaggagggcgactacattgtgtcagtgaatgggcagccatgcaggtggtggagacacgcggaggtggtgacggagctgaaggctgcgggagaggcgggcgccagcctgcaggtggtgtcgctgctgcccagctctagactgcccagcttgggggaccgccggcccgtcctgctgggccccagggggcttctaaggagccagagggagcatggttgcaagaccccggcatccacgtgggccagtccccggcccctcctcaactggagccgaaaggcccagcagggcaagactggaggctgcccccagccctgtgccccagtgaagccagctccgccctcatccttgaagcacccagggtggccgtgagggccaggatccctgcacgcctcagccctggctccagctggcagcaagcaccgagcatgccctccccacccagaggacctccgggcaatgcctgtcccgcctcatgctggaggctgcctcgggcacctgcctgcccattaaagactggtcagacctgtctgagcccagtgatgggagctgtggcctcttcacccacacacagaaggatgccagtccctctgtcggtctgaggtcagcttcctggggctgccccaccctgagggctccttacagggtgctcctcacagccatcccatctgtacccccgggctctgtccaccctgctgctgccctgggcacagaccctgaggtctcagtcctgcctccagccaagtttctgcctggtgcccagtgattcctgctgggcaccccttcgctcactgcccctccaccatgcagcagccagacacacccacagcacccgcagacctctaggccgggtcccagacatggccttcccccaaaatacttcctgctgtcctgtctgtgcacagagcaagggactccccacctctgcgccctgtcctggtcatcatgggctctgtgctggtcaacccagcaagtgtcccgtttgcccaggagtccctggtgtcgtggcccaggtctcatggtggccctaagcctgccagccctgctgcccgccttgctgtcctgctctgagcatgggtgccaccctccagctcctgggcgtgtcacttctctctgagcctggggcctgcatgggcccccagccctccccagcctgcttgggccactcctgctggcctccacaggccgtgagctgtcagtgtctcaagcaggggaagtgagggctgcctccaggcctccgtgtactgggtggacaatggcccccaaaggccgtcggcaagaacaccacctccaggacccctacagcagtgggctcaggacttgggcaccaagaggagagggtgggaagggctgcagagtcagggctgcacccaagaggagccacggagccggagccggagcggaggcccccaccgagggccccagggcctggcaggttccggaagagacagggccagcgggagtcattccctgcagccactagggggcagccgccacccgctcagcagccctgggaggcggcacgggcaggtgcgccttgggagggctgaggcaaagaccccgggtagaaaggcggcccccagctctgcgagacccctgccctcttgtccagtcccttccgagggtccgcaggtgagagcagcctgccctgcatcccaggctctggttccagggtccagggccctgcgctgccacctccctcgtgcttcagccaagaaaatgggggtgcaagtagggtgtttggggtcccagagacgcaggcgccgcggcgcgatcttcctgggcaggagggcagggctccccaacctgcctgagccggggtgggggtccaggtcccccacttgcccttgtgggaaaatccctgtctcagcagaatgggccaaggtcatgcaggtctccccagcacgtgttaatttggttaataaaactgtggatcaaggaaaaaaaaaaaaaaaaaaaaaaaaaaaaaaaaaaaaaaaaaaaaaaaaaaaaaaaaaaaaaaaaaaaaaaaaaaaaaaaaa

SEQ ID NO: 26510 - DNA, 3878 bp, Homo Sapiens
caggctgtggccgcggtggaggcactggaacgggagcccgggagaccctggcagtggctcaagcactgtgaagaccctgtggtgattgatgatggggacagccctctggaccaggagcaggagcagctgccggtagagccccacagcgaccttgcaaagaaccaggatgcccagcccataaccctggcacagtgcctggggctcccaagcagaccaccaagccagctcagcggggacccagttctgcaagatgctttccttcttcaggaagagaatgtgcgggacacacagcaggtgaccaccctccagctacccccgagaatttttcaatttaataatcatcgcagcaatggttatattttagaaatgttaggaagtggagggaagaaagcacagataatttcagtcctgtcacagatctacgtgagtcgggtttctccattcaaggacatgattttatgcttctctgaagaggattggtcccttctagatcctgcccagactggcttctatggagagttcatcattggggaggattacggggtctcaatgcctccaaacgacctagctgcccagccagatctctcccagggagaggagaatgagccacgcgttccagagttgcaggatctccagggcaaagaagtgccccaggtctcctacttggactctccaagtctccagccattccaggtagaagaaagaaggaaacgtgaggagctgcaggtgccagagttccaggcctgcccacagacggtggtgcctcaaaacacctacccagctggcggcaacccgcgatctctagagaacagcctggatgaagaagtgaccatcgagatcgttctctccagctctggggacgaggactcccagcatggcccgtactgcacagaagagctggggagccccacagagaagcagcgcagcctccccgcctcccaccggagcagcaccgaggccggaggcgaggtgcagacctccaagaagtcctacgtgtgtccgaactgtgggaaaatcttccgctggagggtcaacttcatccggcatctgcggagccgcagggagcaggagaagccgcacgagtgctcggtgtgcggggagctgttcagcgacagcgaggacctggatgggcacctagagagccacgaggcccagaagccttaccggtgtggtgcctgcgggaagagcttccgcctgaactcccacctgctctcccaccggcggatacacctgcagccggacagactccagccggtggagaagagagagcaggcggcatccgaggacgcggacaagggtcccaaagagccgctggaaaacggcaaggccaaactgagcttccagtgctgtgagtgtgggaaggccttccagcggcacgaccacctggctcggcaccgcagccactttcacctgaaggacaaagcccggcccttccagtgccggtactgcgtcaagagcttcacgcagaactatgacctcctccgccacgagcgcctgcacatgaagcgccgttccaagcaggctctgaactcctactgagcctctccgcctggggcggcctcaccctggctggtgctgccccctcaccttggtactgatcagcgcccccacccaggacataccttccccaggatagagagcacacctccctcctgtccttgctctcaggtagtgagcgttcgggtggtgccatgggagcactctccctcccccaggtaatgaaagagtggccaagtgagtgttctgtttctgctgtgccaaaaaacgggggggatgtgccatcaccaggttggacatgccaggtgttctgcgtcttagagacccttggcccatgctccccaagctcggggagtaaaactgggctatcccccgtcagggcggcaccctggtcaccagccaaacctcagtatactccctcccctccttccctgtctgaacgctaggatctgctcctgaagctccaggatgcctgcacttccactgagaagctgctggcggatgttggactagaggaaagaagaaggcagggtgggactgatgggctcagtggggagcagggccaggcacactgagccagacatgtcatgtctgagccccagattcgtggccatcaggtaggcaggagcaccccgcagatccaagatgatcaggcagcccttttgggctggcctctgtggcaggggtctgcagagctccttcttgaggtttggaaacagtcgtcatacctgttgattttcctgggggccaatcactagggatctggagctcaccaaaaacaaagcttacattttaatttgtgttgcacacctaccccataatgtctttataccccaaagatccttggtaaatgcttgtgggttggaagcggagttgtcatcgtttaaaaggcacttaagtcccttcttccaatctgtcctgtctaggaatgtggagctctgcccccagtgaggggttctcctgtctgggtgagccaagctccagaacagaaccttgcctgacaacacacttgatagatacattagcttggagtgctggtgtgtccaaacactggctggcttagaacaacaggagtgtattccctgacagttctgggaggtgcacgtccaagatcagggtgtcctcagagttggtgccttccgagagctgtgagggagaagcggcttcatgcctttgctggcagttgccattccttggtgtgtggaagcgtcacccagtctctgccttcatctccacatggcactcttgctgtgtgcgtgtctgtctccaaacctccctttgtttaaggacaccagtcatatcggattagagcccatcccaccgactccagtataacctcatctgtatccgcagcaaccgtttaccaataaggtcacattctgaggtactagaggttgggacttcaacatcggaatttgaaagggacagcattcagcccatgactccagataaacgtgaggtatgctatatcattcctaatttacagatgagtcaatacaaacttgagtgagcttgctcacaattccatcaaaggcagggttcagacccaagtttcagcatttagggcaggtgtcctctgcatggaagaaccatactcaatagccgtaaacgctgacaaattccccttcctccctgccttctgatgggggctgggcaggccagctggagctgtgtctcctgctgggattccggactgagagtgacagcaggtagtgaaacctcaagcaatttaaaacatggtattgttcctggaagactggttatgttggctagggtcagcaagagagggcatcaaggctgtagtctagcagtgacttaatctgcaagtcaaaccagacgggtattttgtattattcatatgtcacatcctaccaacagacagtaagtcaggcaaggctcctggtgctccttgtcactcacgtaattttcacatcaggaaaactctgggctgggtgcagtggctcacacctgtaatcctagcactttgggaaaccaaggtgggtggattgcctagctcagtgacaccagcctgggccacatggcaaaaccccgtctgtaccaaaaatgcaaaaaattagctgggtgtggtgttgacgtttgcggtcccagctactctggaggctgaggtgggaggattgcttgagtctgggaggcagaagttgcagtaagccgagatcatgccactgcacaagctaggtgacagaatgagactctgtctcaaaaataattaaaaagcctctgccccaaactcgttaaaagattttataaccacaactgctgtttctgtgtagatgcatctgcatgcccaggagcagtaaatgcaataaaatcatttggttatactttgaacacaaaaaaaaaaaaaaaaaaaaaaaaaaaaa

SEQ ID NO: 26511 - DNA, 2516 bp, Homo Sapiens
gagaggactacccccaggcaatccctgagctggaaggcattgaaatcctcaactcaagtgccgtgctggtcaagtggcggccggtggacctggcccaggtcaagggccacctccgcggatacaatgtgacgtactggagggagggcagtcagaggaagcacagcaagagacatatccacaaagaccatgtggtggtgcccgccaacaccaccagtgtcatcctcagtggcttgcggccctatagctcctaccacctggaggtgcaggcctttaacgggcgaggatcggggcccgccagcgagttcaccttcagcaccccagagggagtgcctggccaccccgaggcgttgcacctggagtgccagtcgaacaccagcctgctgctgcgctggcagcccccactcagccacaacggcgtgctcaccggctacgtgctctcctaccaccccctggatgaggggggcaaggggcaactgtccttcaaccttcgggaccccgaacttcggacacacaacctgaccgatctcagcccccacctgcggtaccgcttccagcttcaggccaccaccaaagagggccctggtgaagccatcgtacgggaaggaggcactatggccttgtctgggatctcagattttggcaacatctcagccacagcgggtgaaaactacagtgtcgtctcctgggtccccaaggagggccagtgcaacttcaggttccatatcttgttcaaagccttgggagaagagaagggtggggcttccctttcgccacagtatgtcagctacaaccagagctcctacacgcagtgggacctgcagcctgacactgactacgagatccacttgtttaaggagaggatgttccggcaccaaatggctgtgaagaccaatggcacaggccgcgtgaggctccctcctgctggcttcgccactgagggctggttcatcggctttgtgagtgccatcatcctcctgctcctcgtcctgctcatcctctgcttcatcaagcgcagcaagggcggcaaatactcagtgaaggataaggaggacacccaggtggactctgaggcccgaccgatgaaagatgagaccttcggcgagtacaggtccctggagagtgacaacgaggagaaggcctttggcagcagccagccatcgctcaacggggacatcaagcccctgggcagtgacgacagcctggccgattatgggggcagcgtggatgttcagttcaacgaggatggttcgttcattggccagtacagtggcaagaaggagaaggaggcggcagggggcaatgacagctcaggggccacttcccccatcaaccctgccgtggccctagaatagtggagtccaggacaggagatgctgtgcccctggccttgggatccaggcccctccctctccagcaggcccatgggaggctggagttggggcagaggagaacttgctgcctcggatccccttcctaccacccggtccccactttattgccaaaacccagctgcaccccttcctgggcacacgctgctctgccccagcttgggcagatctcccacatgccaggggcctttgggtgctgttttgccagcccatttgggcagagaggctgtggtttgggggagaagaagtaggggtggcccgaaagggtctccgaaatgctgtctttcttgctccctgactgggggcagacatggtggggtctcctcaggaccagggttggcaccttccccctcccccagccactccccagccagcctggctgggactgggaacagaactcggtgtccccaccatctgctgtcttttctttgccatctctgctccaaccgggatgggagccgggcaaactggccgcgggggcaggggaggccatctggagagcccagagtccccccactcccagcatcgcactctggcagcaccgcctcttcccgccgcccagcccaccccatggccggctttcaggagctccatacacacgctgccttcggtacccaccacacaacatccaagtggcctccgtcactacctggctgcggggcgggcacacctcctcccactgcccactggccggcctcttccagccgcccccaccccccaggaccccttagcagccctgccctccctatcgtctgaacagttgtcttcctcagcctcctcccgcccccaccttgggaatgtaaatacaccgtgactttgaaagtttgtacccctgtccttccctttacgccactagtgtgtaggcagatgtctgagtccctaggtggtttctaggattgatagcaattagctttgatgaacccatcccaggaaaaataaaaacagacaaaaaaaaaggaaagattggttctcccagcactgctcagcagccacagcctccctgtatgcctgtgcttggtctactgataagccctctacaaaaaaacaaaagtatatatatatatgtacataatatcagaattataacaggcaaataaaacctgaaaatcaaaaaaaaaaaaaaaaaaa

SEQ ID NO: 26512 - DNA, 2177 bp, Homo Sapiens
ctgcggcgggacccgtgttctggaggcgactgctgggcctcctgcctggccgcccagggctggccgcgctcctgggacgcctgtccgaccgcctcggcaggaaccgggaccgccagcgcaggaggtcaccatggctgttattggctcccttgctgtccccagctgttccccaggtcacctccccaccttgctgcctgtgtccagaaggcgtgcaccggttccagtggatcagaaacctggttccagaatttggagtctccagttctcacgttagggtgctttcttccccggcagagtttttcgagctcatgaaggggcagataagagtagccaagaggcgggtcgtgatggcatccctctacctggggacaggtcctttggaacaggagctggtggactgcctggaaagtactctagaaaagtcactccaagcaaagtttccttcaaatctcaaggtctccattctcttagacttcacgcggggctcacgaggtcggaagaactcccgcacaatgctgctcccactcctgcggaggttcccagagcaggtccgagtctccctctttcacacgccgcacctccgtgggctgcttcggctcctcatccctgagcgcttcaacgagaccatcggcctccagcacattaaggtgtacctcttcgacaacagcgtcatcttgagcggtgcaaacctgagtgactcctacttcaccaaccgccaggaccgctacgtgttcctgcaggactgtgcggagattgccgacttcttcacggagctggtggacgcggtgggggatgtgtccctgcagctgcagggggacgacacggtgcaggtggtggatgggatggtgcatccttacaaaggggaccgggccgagtactgcaaggcagccaataagagggtcatggatgtgatcaactcagccaggacccgccagcagatgctgcatgcccagaccttccacagcaactctcttttgacccaggaagatgcagcagctgctggggatcgcagaccagcccctgacacctggatttatccgctgattcagatgaagcccttcgagattcaaatcgatgagattgtcactgagaccctgttgactgaggcggagcgcggggcaaaggtctacctcaccactggctatttcaacctgacccaggcctacatggacctggtcttgggcactcgggctgagtaccagatcctgctggcctcaccagaggtgaatggcttctttggggccaagggggtggccggcgccatcccagcggcctatgtgcacatcgagcgacagttcttcagtgaggtgtgcagcctgggacagcaggagcgggtccagcttcaggagtactggcggaggggctggacgttccacgccaaaggcctctggctgtacctggcagggagcagcctgccctgtctcacgctgattggctctcctaattttgggtacaggtcagttcaccgggacctggaggcccagattgcgatcgtgacggagaaccaggccctgcagcagcagcttcaccaggagcaagagcagctctacctgaggtcaggtgtggtgtcctctgccaccttcgagcagccgagtcgccaggtgaagctgtgggtgaagatggtgactccactgatcaagaacttcttctgaggacagacaggaatggccttgatgaagatgacaggcatggccggggtcagctctttcagccgcgcttcagcgatgactccagtctgggtgtcccagcgagcccctgcagggacagtatggctgagggtcaggtgtgctgccagtaagtgagggaggggctggcaggaagggtggggtcctcacactccccgccctctgcagagctgggctctaccccaaaaggcttcaggccagctgccacagctggaagcagaggccttcgtaggtgatggcctgcatgttgtaactaccccgtcccgctgggctcaaggaacagctcagctaaagccctcgggttccatccgtttaaatctgtggcattttcagagcctcatctgtcagccttaatgtcagtggcaggaagtcataactccagctaaaaattacagagtaaagttccctgattcttaatgtgtaatgtctgccctatgtgtacatacacaatataattatacatctgtgcatataaaaaaaaaaaaaaaaaaa

SEQ ID NO: 26513 - DNA, 2491 bp, Homo Sapiens
gcggtggctgaggcggttccggaggttctagtgtcggagttgggtgcaggcaggtgccatgggcccgcttgaggcacactgaggggacgcggggctgggccatggccggcgctcgggccgccgccgccgctgcctcggcggggtcctcggcctcttcaggcaaccagccgcctcaggagctggggcttggggagctgctggaggagttctcccggactcagtaccgggccaaggatggcagcgggaccggcggctctaaggttgagcgcattgagaagagatgtctggagctgtttggccgagactactgtttcagcgtgattccaaacacgaatggggatatctgtggccactatccccggcacatcgtgttcctggagtatgagagttctgagaaggagaaagacacgtttgagagtaccgtacaggtgagcaagttgcaagacctcatccaccgcagcaagatggcccggtgcagaggacggtttgtctgcccagtaatcctgttcaagggcaagcacatttgcaggtcggccacactggctggatggggagagctgtatggacgctcaggctacaactattttttctcagggggtgcagatgatgcctgggcagatgtggaggacgtcacggaggaggactgtgctcttcgaagtggtgacacgcatctttttgataaggtcagaggctatgacatcaagctgcttcgatacctgtcagtcaaatacatctgtgacctgatggtggagaacaagaaggtgaagtttggcatgaatgtaacctcctctgagaaggtggacaaagcccagcgctatgccgacttcactctcctctccatcccgtatccaggctgtgaatttttcaaggaatataaagatcgggattacatggcagaagggctcatatttaactggaagcaggactacgttgatgccccattgagcatccccgacttcctgactcactctctgaacattgactggagccagtatcagtgttgggatctggtgcaacaaacacaaaactacctgaagctgctgctttccttagttaacagtgatgatgacagcgggctgctggtacactgtatctcaggctgggatcggacccccctcttcatctccctcctgcgcctttccttgtgggctgatgggctcatccacacgtccctgaagcccactgagatcctctacctcactgtggcctatgactggttcctcttcgggcacatgttggtagatcggctcagcaaaggggaggagattttcttcttctgcttcaattttttgaagcatattacctccgaggagttctctgctctgaagacccagaggaggaagagtttgccagcccgggatggaggcttcaccctggaagacatctgcatgctgagacgaaaggaccgtggcagcaccaccagccttggcagcgacttctccctggtcatggagagttccccaggagccactgggagcttcacctatgaggccgtggagctggtcccagcaggagcgccaactcaggcagcttggaggaagagccactcatcctctccacagagtgtcctctggaaccggccacaaccctcagaggaccgcttgccttcccagcaggggctggcggaagccaggtcttccagctcctcttcctcaaaccattctgataactttttcaggatgggtagcagtcccctggaggtccccaaacccagatcagtggaccatcccctgcccggatcctctctctccacagactatggcagctggcagatggtaacgggctgtggcagtattcaggagcgggctgtcctgcacacagactcctctctccctttcagcttcccggatgagctccctaacagttgtctgcttgcagccctgagtgatcgagagactcggctgcaggaggtgcgctcagccttcttggctgcgtacagcagcacagtggggcttcgggcagtagcccccagtccttccggtgccatcgggggcctgctggagcaatttgcccgtggtgttggactccggagcatcagcagcaatgccttgtgaagaagccagcccatgacattttcctgctcctctctcagctgagcccttagcagagaatcaaagccatgcctggccgaaggggtacttccaggtcaggggaaatttcagtcccccatctccatcatgaacatggcagccccaaagctgagcaaggccaaagacagggttttccaacccccagcctcttgactggtgaccaccaccccttcttgtcactgtctcccacccaccccatctttgctgggattcccatcaactctcagaactgtgtggggtttccctggggccttgtggaagccatgacttcacaaagaccctacctgtcagttcttgtttctggggaggagggatcacctgcactgagaatgaggcagtttgacacagatcacaaaataaaatcaaagtctttttgaataaaaaaaaaaaaaaaaaaaaaa

SEQ ID NO: 26514 - DNA, 2782 bp, Homo Sapiens
ggacagtgaaatgaggaggctgcaagacttcaaccgggatcttagagagagattggaatctgcaaatcgccgcctggcaagcaagacacaggaggcccaggccggcagtcaggacatggtggccaagctgcttgctcagagctacgaacagcagcaggagcaagagaagctggagcgagagatggcactgctgcgcggcgccatcgaggaccagcggcggcgtgccgagctgctggagcaggctctgggcaatgcgcagggccgggcagctcgagccgaagaggagctgcgcaagaagcaggcctatgtggagaaagtggagcggctgcagcaggcgctcgggcagctgcaggcagcctgtgagaagcgggagcagctggagctgcgtctgcggactcgcctggagcaggaactcaaggccctgcgtgcacagcagagacaggcaggtgccccaggtggtagcagtggcagtggtgggtctccagagctcagcgccctgcgactgtcagaacaactgcgagagaaggaggagcagatcctggcgctggaggccgacatgaccaagtgggagcagaagtatttggaggaacgtgccatgaggcagtttgccatggatgcggctgccacggctgctgctcagcgtgacaccactctcatccgacattccccccagccctcacccagcagcagcttcaatgagggtctgctcactggtggccacaggcatcaggagatggaaagcaggttaaaggtgctccatgcccagatcctggagaaggatgcagtgatcaaggtccttcagcagcgctccaggagagaccctggcaaggccatccagggctccctgcggcctgccaagtcggtgccatctgttttcgcggctgcggcagcaggaacccagggctggcaagggctctcttctagtgagcgacaaacagcagacgcccctgctcggctgactacagacagagcacccacagaggagccagtggtcacagctccccctgctgcccatgccaaacacgggagcagagatgggagcacccagactgacggccccccagacagcacctccacctgcctgccaccggagcctgacagccttctggggtgcagcagtagccagagagcagcctctctggactctgtagctacatccagagtccaggacttgtcagacatggtggagatactgatctgaaggaggtggtgcttcaggactctgagccattctctcccctcctctgccctgtgccactctcagccatttcagcagccccgtcaaccgctgctccgtccctttccccagccagacactcattcccattgaccatctggtcccaggagctcaggaggaggaccccaggggagaggagagctgtgagagcaccggcacccccagaagactctgcttcttagcccacattcctccgggccttatggagaatgaggattcagccttgacttcttgcccaaggcctgctactggggtagcaactgacagctcagaaaggagctgagctccctctgccctgccagttgtcagtcaggcagggagggagtggctgtgttggtttggggaactaatttccaaggacggctgcccgtggacaccaggtggactggttcactaatcaagtcagccatattgttctctggctaagtttggttccagccaacgtcatctgctcttcagttcctcactgccttcttgggatactaagacttgaattttttggggactattaagggtgttagtcttggagaagacacagcctcaccttctcacttgctgtgggtgaggggccatttaagtggactgggagacagtgcgcagtttgtatataattccctttcttgtggaacagaagactgaggcctgcaggttccgatgtgtctccatgggctgtgctcccctcttcctactgtcagtttctgaaacttctgactggcctcccagttatgcctcctcctcaagttcctggcccgtggatgttaaagctgctcgattcccaggatctcggctgccttttcctctatcttgagccctataaatgcccacgggacccccaccaccagcctcttgaagtggctccacagctcctgtccctggaacatcctgtcagtttggtcataaaccctgagccagatgaaatgagccaccgtgaacagacatctgccatgcccccaggtgggcttcggtggccctacccggtaccagttctctctgagaaactggagatgtcttgttagcataagtgtcttcattcccacctggagggtttgggagaggagcaaagcagttgaaaactagttaatgagctacaagagtcaaatagtcctctgaatggagcccccatcacaaaacagtgcccaggaggctggctcctcaagctacccatgcccagcgccctaaagcaggaccagatgctttggaattggggtgaaacacccacatggcagcctgctagcagcagtgactttgacttctggtcttaaagagtccctcacttcagccccaggagctattggtgggttttagcagttttgtctttaccgtttttagttctccttgattctttgttttcttcctttatcgtttttaggtttggtatgtgttgttttatttccatggttcctcaagtttcctttttaaacatttgcatttgctggacaattgcaattttttttaaaaaattcccctacccctgtttaaagctgaaaaatacatttggttcatgtgcattgtttacaaagcaaaaagaaaaaaaaaaaaaaaaaa

SEQ ID NO: 26515 - DNA, 4226 bp, Homo Sapiens
gctgttttgacaacatggcggcgcccatggtccgtggcccggcagtgctcgcctaaaggtggagaacgaggagtagaggagccacaggccagagcctgtgagcagatccagacctacagataaaaaacattatttaatctatctgggatttactccggcttatgatttgagggccttctcaccttctgaagaatggcttctgtttggcagagattgggtttttatgcctctcttctgaaaagacagctaaatggtgggccagatgtcatcaagtgggaaaggagagtaattcccggatgtaccagaagcatctacagtgccacgggaaagtggacaaaagagtatacattgcagacaagaaaggatgttgagaaatggtggcatcaacgaataaaagaacaggcctccaaaatttcagaagctgataaatcgaagccaaaattttacgtgctttccatgttcccttatccttctggtaagctgcacatgggccatgtgcgtgtctacaccatcagcgacaccatagcacggttccagaagatgagagggatgcaggtcatcaaccccatgggatgggatgcttttggattgcctgctgaaaatgccgcagtcgagaggaatctacatccacaaagttggacacaaagtaatattaaacacatgaggaaacagcttgatcgtctgggcctgtgtttcagctgggatagggaaataactacgtgtttgccagattactacaagtggactcagtatctctttattaaactgtatgaggctgggctggcctatcaaaaggaggccctggttaactgggacccagtggatcaaacagtgcttgccaatgagcaggtggatgaacatggctgttcatggcgttctggagcaaaggtggaacagaagtacctcagacaatggtttattaagacaaccgcttatgcaaaggccatgcaggacgcgttggcagaccttccagaatggtatggaataaaaggcatgcaagcccactggattggggactgtgtgggctgccacctggacttcacattaaaggttcatgggcaagccacgggcgaaaagctgactgcctatacggccacccctgaagccatttatggcacctcccacgtggccatctcgcccagccacagactcctacatgggcacagctctctgaaggaagccttgaggatggcccttgtccctggcaaagattgcctcacgcctgtaatggctgtgaacatgctcacccagcaggaggtccctgtcgttattttggccaaagctgacttggaaggctctctggattcaaaaataggaattcccagtactagctcagaggacaccatcttagcccaaaccctgggcctggcctactctgaagtcattgaaactttgccagatggcacagagagactgagcagctctgctgagttcacaggtatgacccggcaggatgcttttctagccctgactcagaaagcccgggggaagagagtgggtggagacgtgacaagtgataaactgaaagactggctgatttcacggcagcggtactggggcacaccaatccccattgtccactgcccagtctgtggccccacacctgtgcccctggaggacttgcctgtgaccctgcccaacatcgcatctttcactggcaagggaggccccccactggccatggcttcagagtgggtgaactgctcctgcccaaggtgcaagggagcagccaagagagagacagacacgatggatacctttgttgattctgcttggtactacttcagatacactgaccctcataatccacacagcccttttaacacagcagtggccgattactggatgcctgtggatttgtacattggagggaaagaacatgccgtcatgcacttgttctatgcaagattctttagtcatttttgccatgatcaaaaaatggttaaacatagggagccttttcataagctgctggcccaaggccttatcaaggggcagacattccgcctaccatctggacagtatctacagagagaggaagtggatctcacaggttccgttcctgttcatgcaaaaacgaaagagaagttagaggtgacgtgggagaagatgagtaagtccaaacacaacggggtggacccagaggaagttgtggagcagtatgggatcgacacgattcggctctacatcctttttgctgcccctcctgagaaggatatcttgtgggatgtgaaaactgatgctctccctggggtgctgagatggcaacaacgactgtggaccttgacaactcggtttattgaggccagggcttctgggaagtctccccagcctcagctgctgagtaacaaggagaaagccgaggccaggaagctctgggagtacaagaactccgtcatctctcaggtgaccacccatttcacagaggacttctcactgaattctgcaatttctcagctgatgggactcagcaatgccctctcgcaagcctctcagagcgtcattctccacagccccgagtttgaggatgctttgtgtgccctgatggtgatggctgctccactggcccctcatgtaacctcagagatctgggcaggcctggcgctggtgccgaggaagctctgtgcccactacacttgggatgccagtgtgctgctccaggcatggcctgctgtggacccggagttcctgcagcagcctgaggttgtccagatggcagttctgatcaacaataaagcttgtggcaaaattcctgtgccccaacaagttgcccgggaccaggacaaagtccacgaatttgttcttcaaagcgagctgggtgtcaggcttttgcaaggacgaagcatcaagaagtccttcctttccccgagaactgccctcatcaacttcctggtgcaagattgacagccagtaggctgcagctaccacgagggcctctgaggaacctccttccaggcctgggatgagggggcgatgtctgctggcccaggggaagggaaaagacaaatgtcttgactgttgacctcggtcctgtggcagactgcagtcaacagtgtgcctctgtagtgtggcctggtgctggggtgaaggtgagctgggcaaaggagaaatatgagctactgaggagggggttggacatcctgcccctcaccccccacccacactgcaggtagaggaggccatctgatcccatgggaagccatcagagacactgctggtgggagcaggaaggagcagtgcccctcgagcagccaggaagcctgcggatctgggaaatggctctgccttaggcgcttctcgggaatttgaggccagcctgaggaactgcaggactcaggtgcaatgtgccagccacttggaactgctaactgagcctccagatggtagtgaatggtctctttgccttcaggctggatgaggaagtcatttaggaaatgttcaaataaccaatatgtggaaatggacacagggatcttctgaagttgctttgaatcaaaaggcaggcagtgctggttcctctgcctgtgtccccaccactccccagctctgtcatgcaggcctgtcctccccaaccccagctggacgtgcctcccaggcctgctgtggttctgacacacaggatcccaggcaaggcaccacttcctcacatgaatgaggagcagcaagtcataaccactcccttgggtatacaatttgctgtgtagtgaagtggaaccaggctcaggctgctggtcccaacctcagagccccaccgcagcccagtagggatgcagcacgccccagagggctcatgtgggccccagatggcaatgccaccattgttgatgtgactccagagccagttattaggaagagcaagctcaccacagaggagtggaactgaggccccccagatgttgcctccggtgtccaagccacagcggtctggctgttgggaagatggccaggaatggactcataccattggcacattaggctaatcctggttttatgtgaagtcagcaattaagtgttcccactagaactgacctaagccactgattaatatttaatgagggaaggtaggggagaatctagccattttataatgccagaaatctatatatgttatctgatgccatttttctgaagtagcctcacatgtggtccccctgcagttcagcagttaacagatgacttttttagtgtaataaaatgtttatcatctacgaaaaaaaaaaaaaaaa

SEQ ID NO: 26516 - DNA, 1607 bp, Homo Sapiens
ggggatttctgtaatcatctgatactcttaggatgccactgaagaggaataactctaaataccctccgcttgaattgccgtctttctacatgactccatctcatcgccaagttgtgtttgaaggagacagccttcctttccagtgcatggcttcatatattgatcaggacatgcaagtgttgtggtatcaggatgggagaatagttgaaaccgatgaatcgcaaggtatttttgttgaaaagaacatgattcacaactgctccttgattgcaagtgccctaaccatttctaatattcaggctggatctactggaaattggggctgtcatgtccagaccaaacgtgggaataatacgaggactgtggatattgtggtattagagagttctgcacagtactgtccgccagagagggtggtaaacaacaaaggtgacttcagatggcccagaacattggcaggcattactgcatatctgcagtgtacgcggaacacccatggcagtgggatatatcccggaaacccacaggatgagagaaaagcttggcgcagatgtgatagaggtggcttttgggcagatgatgattattctcgctgtcagtatgcaaatgatgtcactagagttctttatatgtttaatcagatgcccctcaatcttaccaatgccgtggcaacagctcgacagttactggcttacactgtggaagcagccaacttttctgacaaaatggatgttatatttgtggcagaaatgattgaaaaatttggaagatttaccaaggaggaaaaatcaaaagagctaggtgacgtgatggttgacattgcaagtaacatcatgttggctgatgaacgtgtcctgtggctggcgcagagggaagctaaagcctgcagtaggattgtgcagtgtcttcagcgcattgctacctaccggctagccggtggagctcacgtttattcaacatatccacccaatattgctctggaagcttatgtcatcaagtctactggcttcacggggatgacctgtaccgtgttccagaaagtggcagcctctgatcgtacaggactttcggattatgggaggcgggatccagagggaaacctggataagcagctgagctttaagtgcaatgtttcaaatacattttcgagtctggcactaaaggggaaattccggtgaatatggaattagaagaagacaggttagaagccaagaaaaagattgtacaataaattcttcaactatggaatgtttttagatcgttaattgttcacttctttggtatatatatattttttactgaatgctgaataatttgttatttaaaaatcctcaataaagaaatctgaaaaaattcagtgatcagtcagcattttcagttgttcctatgtgttattattttttttttctaaatgtgtttcctagtctcaaggaaatttctgctaagtgtactgaatctaaacctctattatgtttgtataatttcattcttttgttgtgtggaggtttgaattcatcataaatcaccttaaagttccataagcccaaattaattatactcatatttatgatatgctcaaaaaaaaaaaaaaaaaaaaaaaaaaaaaa

SEQ ID NO: 26517 - DNA, 2261 bp, Homo Sapiens
aacactgtagccgccaccggcaaggggtgcgcgctggggagcggacgctgcatcccctttctgctgcaggaacctctcatcagaccgcctgagggaagcggcgcccggagacccgccccggcccggtccacattctccccaggaagccggactctatggggcgggaccctgggggagcctgagccgagcccggagccagccccgaacccctgaacctccagccaggggcgccccgggagcagccagcccgtgggcgagccgcccgcccgccgagcagccatgagcagcgagacggtcatctgttccagccgggccactgtgatgctttatgatgatggcaacaagcgatggctccctgctggcacgggtccccaggccttcagccgcgtccagatctaccacaaccccacggccaattcctttcgcgtcgtgggccggaagatgcagcccgaccagcaggtggtcatcaactgtgccatcgtccggggtgtcaagtataaccaggccacccccaacttccatcagtggcgcgacgctcgccaggtctggggcctcaacttcggcagcaaggaggatgcggcccagtttgccgccggcatggccagtgccctagaggcgttggaaggaggtgggccccctccacccccagcacttcccacctggtcggtcccgaacggcccctccccggaggaggtggagcagcagaaaaggcagcagcccggcccgtcggagcacatagagcgccgggtctccaatgcaggaggcccacctgctccccccgctgggggtccacccccaccaccaggacctccccctcctccaggtccccccccacccccaggtttgcccccttcgggggtcccagctgcagcgcacggagcagggggaggaccaccccctgcaccccctctcccggcagcacagggccctggtggtgggggagctggggccccaggcctggccgcagctattgctggagccaaactcaggaaagtcagcaaggaggaggcctcaggggggcccacagcccccaaagctgagagtggtcgaagcggaggtgggggactcatggaagagatgaacgccatgctggcccggagaaggaaagccacgcaagttggggagaaaacccccaaggatgaatctgccaatcaggaggagccagaggccagagtcccggcccagagtgaatctgtgcggagaccctgggagaagaacagcacaaccttgccaaggatgaagtcgtcttcttcggtgaccacttccgagacccaaccctgcacgcccagctccagtgattactcggacctacagagggtgaaacaggagcttctggaagaggtgaagaaggaattgcagaaagtgaaagaggaaatcattgaagccttcgtccaggagctgaggaagcggggttctccctgaccacagggacccagaagacccgcttctcctttccgcacacccggcctgtcaccctgctttccctgcctctacttgacttggaattggctgaagactacacaggaatgcatcgttcccactccccatcccacttggaaaactccaagggggtgtggcttccctgctcacacccacactggctgctgattggctggggaggcccccgcccttttctccctttggtccttcccctctgccatccccttggggccggtccctctgctggggatgcaccaatgaaccccacaggaagggggaaggaaggagggaatttcacattcccttgttctagattcactttaacgcttaatgccttcaaagttttggtttttttaagaaaaaaaaatatatatatatttgggttttgggggaaaagggaaatttttttttctctttggttttgataaaatgggatgtgggagtttttaaatgctatagccctgggcttgccccatttggggcagctatttaaggggaggggatgtctcaccgggctgggggtgagacatccccccaccccagggactccccttccctctggctccttccccttttctatgaggaaataagatgctgtaactttttggaacctcagttttttgattttttatttgggtaggttttggggtccaggccattttttttaccccttggaggaaataagatgagggagaaaggaaaaggggaggaaacttctcccctcccaccttcacctttagcttcttgaaaatgggcccctgcagaataaatctgccagtttttataaaaaaaaaaaaaaaaaaaaaaaaaaaaaaaaaaaa

SEQ ID NO: 26518 - DNA, 1229 bp, Homo Sapiens
cagcgtcgtgtggttcgccaaggggctgcgcgagtacaccaagagtggctatgaatctgcatgtaaagactttgtccctcatgacttggaggtccagattcctggaagagtctttttggtcactggaggaaacagcggcattggcaaagcaactgcccttgaaatcgccaagcgaggtggcacagttcacctggtttgtcgagatcaagccccagcagaagatgccaggggtgagatcatccgggagagcggtaaccagaacatttttctgcacattgtggacttgtctgatcccaagcaaatctggaaatttgttgaaaatttcaagcaggaacataaactccatgttctgatcaataatgcaggttgcatggtcaataaaagagagctcacagaagatggacttgaaaaaaactttgctgccaatactctgggtgtgtacattctcacgaccggcctgatccctgtgctggagaaagaacacgacccccgagtgataaccgtctcctcaggaggaatgttggttcagaaactgaacaccaatgatctccagtccgaaagaacaccatttgatggaactatggtctatgcacaaaacaagaggcagcaagtggttctgacggagcggtgggcccaagggcacccggccatccatttttcttccatgcatcctggctgggccgacaccccaggtgtgaggcaggcgatgccggggttccacgccaggttcggggaccgcctgcgctccgaggcccagggcgcggacaccatgctgtggctggccctctcctctgccgcagccgcacagcccagcggccgcttctttcaagatcggaagccagtttctacacacttgcctctcgctacagcgtcctcctcaccggccgaagaggagaaactcattgaaatcctggaacagctggctcagacatttaaataggccaacccagacacagtgcggtaccagaattgccttagaagataccagaaggtgcggtctagggaccagtgaataagaagaccccacttcaacttcccctcgaagacgttgtgccttacagcgaggcctacaagggatgggaacttttatttcaaaataaatactaccgaggctgtgatcaggctcaccttgaaaaaaaaaaaaaaaaaaaaaaaaaaaaaaaaaaaaaaaaaaaaaaaaaaaaaaaaaaaaaaaaaaaaaaaaaaaaaaaaaaaaaaaaaaaaaaaaa

SEQ ID NO: 26519 - DNA, 3431 bp, Homo Sapiens
gggggaggagggcggtcgtccggggttaggttgagggggggcgtcggtccgttctgggcgggggatgactcacagcccatcccatctccccgacgccgcccgcccgcgcagtgctagctccatggcttagcggaggaggcggcagtggcgagctggggggaggggggactcttattttgttagggggaccgggccgaggcccgaccggcctggcagggctcgcccggggccgggcgtcatgtctcatgcggccgaaccagctcgggatggcgtagaggccagcgcggagggccctcgagccgtgttcgtgctgttggaggagcgcaggccggccgactcggctcagctgctcagcctgaactctttgcttccggaatccgggattgttgctgacatagaattagaaaacgtccttgatcctgacagcttctacgagctcaaaagccaacccttaccccttcgctcaagcctcccaatatcactgcaggccacaccagccaccccagctacactctctgcatcgtcttctgcagggggctccaggacccctgccatgtcgtcatcttcttcatcgagggtcttgctgcggcagcagctaatgcgggcccaggcgcaggagcaggagaggcgtgagcgtcgggaacaggccgccgcggctcccttccccagtcctgcacctgcctctcctgccatctctgtggttggcgtctctgctgggggccacacattgagccgtccaccccctgctcaggtgcccagggaggtgctcaaggtgcagacccatctggagaacccaacgcgctaccacctgcagcaggcgcgccggcagcaggtgaaacagtacctgtccaccacactcgggcccaagctggcttcccaggccctcaccccaccgccggggcccgcaagtgcccagccactgcctgcccctgaggctgcccacactaccggccccacaggcagtgcgcccaacagccccatggcgctgctcaccatcgggtccagctcagagaaggagattgatgatgtcattgatgagatcatcagcctggagtccagttacaatgatgaaatgctcagctatctgcccggaggcaccacaggactgcagctccccagcacgctgcctgtgtcagggaatctgcttgatgtgtacagtagtcaaggcgtggccacaccagccatcactgtcagcaactcctgcccagctgagctgcccaacatcaaacgggagatctctgagaccgaggcaaaggcccttttgaaggaacggcagaagaaagacaatcacaacctaattgagcgtcgcaggcgattcaacattaacgacaggatcaaggaactgggcactctcatccctaagtccagtgacccggagatgcgctggaacaagggcaccatcctgaaggcctctgtggattatatccgcaagctgcagaaggagcagcagcgctccaaagacctggagagccggcagcgatccctggagcaggccaaccgcagcctgcagctccgaattcaggaactagaactgcaggcccagatccatggcctgccagtgcctcccactccagggctgctttccttggccacgacttcggcttctgacagcctcaagccagagcagctggacattgaggaggagggcaggccaggcgcagcaacgttccatgtaggggggggacctgcccagaatgctccccatcagcagccccctgcaccgccctcagatgcccttctggacctgcactttcccagcgaccacctgggggacctgggagaccccttccacctggggctggaggacattctgatggaggaggaggagggggtggtgggaggactgtcggggggtgccctgtccccactgcgggctgcctccgatcccctgctctcttcagtgtcccctgctgtctccaaggccagcagccgccgcagcagcttcagcatggaagaggagtcctgatcaggcctcacccctcccctgggactttcccacccaggaaaggaggaccagtcaggatgaggccccgccttttcccccaccctcccatgagactgccctgcccaggtatcctgggggaagaggagatgtgatcaggccccacccctgtaatcaggcaaggaggaggagtcagatgaggccctgcaccttccccaaaggaaccgcccagtgcaggtatttcagaaggagaaggctggagaaggacatgagatcagggcctgccccctggggatcacagcctcacccctgcccctgtgggactcatccttgcccaggtgagggaaggagacaggatgaggtctcgaccctgtcccctagggactgtcctagccaggtctcctgggaaagggagatgtcaggatgttgctccatcctttgtcttggaaccaccagtctagtccgtcctggcacagaagaggagtcaagtaatggaggtcccagccctgggggtttaagctctgccccttccccatgaaccctgccctgctctgcccaggcaaggaacagaagtgaggatgagacccagccccttcccctgggaactctcctggccttctaggaatggaggagccaggccccaccccttccctataggaacagcccagcacaggtatttcaggtgtgaaagaatcagtaggaccaggccaccgctagtgcttgtggagatcacagccccacccttgtccctcagcaacatcccatctaagcattccacactgcagggaggagtggtacttaagctcccctgccttaacctgggaccaacctgacctaacctaggagggctctgagccaaccttgctcttggggaaggggacagattatgaaatttcatggatgaattttccagacctatatctggagtgagaggcccccacccttgggcagagtcctgccttcttccttgaggggcagtttgggaaggtgatgggtattagtgggggactgagttcaggttaccagaaccagtacctcagtattctttttcaacatgtagggcaagaggatgaaggaaggggctatcctgggacctccccagcccaggaaaaactggaagccttcccccagcaaggcagaagcttggaggagggttgtaaaagcatattgtaccccctcatttgtttatctgatttttttattgctccgcatactgagaatctaggccaccccaacctctgttccccacccagttcttcatttggaggaatcaccccatttcagagttatcaagagacactcccccctccattcccacccctcatacctacacccaaggttgtcagctttggattgctggggccaggccccatggagggtatactgaggggtctataggtttgtgattaaaataataaaagctaggcgtgtttgatgcgcttttaactttgaaaaaaaaaaaaaaaaaaaaaaaaaaaaaaaaaaaaaa

SEQ ID NO: 26520 - DNA, 2231 bp, Homo Sapiens
ggcacgaggctacgccgctttttcggcgactttttgctcttccgctttttgccaccgcccccaaccttctatatccttgcagcccctaccttttcttgtgttgctcctcccctggcagccgtgaggggggttagatctcagccggagccggagctgggcctagctgtcccacgggccaccactacctcctttggttcgggagaaagctacgaccaagtacgcccagctcgggccttagaacttctgaacgggcagtgcgggaccaaaagaggaagatagtcttgggacccttgcatggtgtttcaaagggtggtgaagaactaaggggctccagagcttgatatatttctgggaatttggaatatgctaaactagatttctgccctagactaaacatctggctgtggactcaatgtagaagaatacatgttcacttccagtgaacaagagcatgttcccaaactcaattttgggtcgcccacccttcactccaaatcatcaacaacataataacttctttaccctgtcacctactgtttattcacaccagcagcttatagatgcacaattcaactttcagaatgcagacttgtctagagctgtgtcattacagcagctgacatatggaaatgtcagtccaatacagacctcagcttccccattatttcgaggaaggaagagattaagcgatgaaaaaaaccttcctcttgacggtaaacggcaacgtttccattcaccccaccaagagccaactgtagttaaccagatagtgcctttatcaggtgaacgaagatactcaatgccaccattgtttcatacacattatgtaccagatatagtcagatgtgttccaccttttcgagaaattgcatttttagaacctagagaaatcacactgcctgaggccaaagataagttgagtcagcagatactggagttatttgaaacatgtcagcagcaaataagtgatttaaagaagaaagaactctgtcgaacacagctgcagagagaaattcagctgttatttccacaaagcagactttttttggttgggtcctctttaaatggatttggtacccggagcagtgatggtgatttatgcctagttgttaaggaagaaccatgtttttttcaggtaaatcagaagactgaagcacggcatatactcaccttagtccataaacacttctgtactagactttcgggctacattgagagacctcagctgattcgagcaaaagtgccaattgtgaagttcagggataaagtcagttgtgtggagtttgacttgaatgtaaacaatattgttggaataagaaacacattccttctcagaacttatgcataccttgaaaatcgagttcgtccgttagtgctggtgattaagaagtgggcaagtcaccatcagataaatgatgccagtcgtggtactttaagcagctatagtcttgtattgatggttttgcactatttacaaaccctacctgaacccatccttccatccctccaaaaaatttacccagagtcttttagtcctgctatacagctgcaccttgtacatcaagctccatgtaatgttcctccttacctctcaaagaatgaatcaaaccttggggacctcttactgggctttcttaaatattatgctacagaatttgactggaatagtcaaatgatttcagttcgtgaagccaaagccattccaaggcctgatggtattgaatggagaaataaatacatctgtgtagaagaaccttttgatggaacaaatacagccagagcagtgcacgaaaagcagaaatttgatatgatcaaggatcaatttttaaagtcatggcacagattgaaaaacaagagagatttgaacagtatactacctgtaagagctgctgtcctgaaaagataactggcctctatttcttaataaattcttccaagaaataaagaacaatagtttcatcataatacattatgtttacctccatcatagttgcttttttcatagttcttgttttcatgttttatttttaaaaagacatataaagattgcatattttattatgacatttcctaataaacccctttgatttaaaaatgtatttttaaaaatgtttacattgatgatgagtaatattgcatgtgttttcaggtgatcagataaaatatattttgggaaattaactgaacaaataaaaagtttttgatataacttcaaaaaaaaaaaaaaaaaa

SEQ ID NO: 26521 - DNA, 1825 bp, Homo Sapiens
cggtgctcagcggtgttggaacttcgttgcttgcttgcctgtgcgcgcgtgcgcggacatggcctcaaacgattatacccaacaagcaacccaaagctatggggcctaccccacccagcccgggcagggctattcccagcagagcagtcagccccacggacagcagagttacagtggttatagccagtccacggacacttcaggctatggccagagcagctattcttcttatggccagagccagaacacaggctatggaactcagtcaactccccagggatatggctcgactggcggctatggcagtagccagagctcccaatcgtcttacgggcagcagtcctcctatcctggctatggccagcagccagctcccagcagcacctcgggaagttacggtagcagttctcagagcagcagctatgggcagccccagagtgggagctacagccagcagcctagctatggtggacagcagcaaagctatggacagcagcaaagctataatccccctcagggctatggacagcagaaccagtacaacagcagcagtggtggtggaggtggaggtggaggtggaggtaactatggccaagatcaatcctccatgagtagtggtggtggcagtggtggcggttatggcaatcaagaccagagtggtggaggtggcagcggtggctatggacagcaggaccgtggaggccgcggcaggggtggcagtggtggcggcggcggcggcggcggtggtggttacaaccgcagcagtggtggctatgaacccagaggtcgtggaggtggccgtggaggcagaggtggcatgggcggaagtgaccgtggtggcttcaataaatttggtggccctcgggaccaaggatcacgtcatgactccgaacaggataattcagacaacaacaccatctttgtgcaaggcctgggtgagaatgttacaattgagtctgtggctgattacttcaagcagattggtattattaagacaaacaagaaaacgggacagcccatgattaatttgtacacagacagggaaactggcaagctgaagggagaggcaacggtctcttttgatgacccaccttcagctaaagcagctattgactggtttgatggtaaagaattctccggaaatcctatcaaggtctcatttgctactcgccgggcagactttaatcggggtggtggcaatggtcgtggaggccgagggcgaggaggacccatgggccgtggaggctatggaggtggtggcagtggtggtggtggccgaggaggatttcccagtggaggtggtggcggtggaggacagcagcgagctggtgactggaagtgtcctaatcccacctgtgagaatatgaacttctcttggaggaatgaatgcaaccagtgtaaggcccctaaaccagatggcccaggagggggaccaggtggctctcacatggggggtaactacggggatgatcgtcgtggtggcagaggaggctatgatcgaggcggctaccggggccgcggcggggaccgtggaggcttccgagggggccggggtggtggggacagaggtggctttggccctggcaagatggattccaggggtgagcacagacaggatcgcagggagaggccgtattaattagcctggctccccaggttctggaacagctttttgtcctgtacccagtgttaccctcgttattttgtaaccttccaattcctgatcacccaagggtttttttgtgtcggactatgtaattgtaactatacctctggttcccattaaaagtgaccattttagttaaaaaaaaaaaaaaaaaaaaaa

SEQ ID NO: 26522 - DNA, 1980 bp, Homo Sapiens
agcgggggcggaactcctagcggacacctcgtggagtccggccggaagagcaaccgagatgaaggtgaagatgctgagccggaatccggacaattatgtccgcgaaaccaagttggacttacagagagttccaagaaactatgatcctgctttacatccttttgaggtcccacgagaatatataagagctttaaatgctaccaaactggaacgagtatttgcaaaaccattccttgcttcgctggatggtcaccgtgatggagtcaattgcttggcaaagcatccagagaagctggctactgtcctttctgggtcgtgtgatggagaggttagaatttggaatctaactcagcggaattgtatccgtacaatacaagcacatgaaggctttgtacgaggaatatgtactcgcttttgtgggacttcttttttcactgttggtgatgacaaaactgtgaagcagtggaaaatggatgggccaggctatggagacgaggaagagccattacatacaatattaggaaagacagtgtatactgggattgatcatcactggaaagaagctgtttttgccacatgtggacagcaagtagacatttgggatgaacaaagaactaatcctatatgttcaatgacctggggatttgacagtataagtagtgttaaatttaacccaattgagacatttctcttgggaagttgtgcatctgacaggaatatagtactgtacgatatgaggcaagctactcctttgaaaaaggttatcttagatatgagaacaaatacaatctgttggaaccctatggaagctttcatttttacagcagcaaatgaagattataacttatatacttttgatatgcgtgcactggacactcctgtaatggtccatatggatcatgtatctgcagtgcttgatgtggattactctcccactgggaaggagtttgtgtctgctagtttcgataaatctattcgaatctttcctgtagacaaaagtcgaagcagggaggtatatcatacaaagagaatgcaacatgttatctgtgtaaaatggacttctgacagcaagtatattatgtgtggatctgatgaaatgaacattcgcctgtggaaagctaatgcttctgaaaaattgggtgtgcttacatcacgagaaaaagcagccaaggattataaccagaaattgaaggagaaatttcagcattatcctcatataaaacgtatagctcgtcatcgacatctaccaaaatctatctatagccagattcaggaacagcgcatcatgaaagaagctcgtcgacgaaaggaagtgaatcgtattaaacacagcaagcctggatctgtgccacttgtgtcagagaagaagaaacacgtagtggcagttgtaaaataattggtattcctaacaatcctgatgtataattatttgttacttttgatttgagaactctacaaataaaagtgctgggactagattaattgcaaacattttagttatatgtgtagagctttattgttactccttttagctaccctgaaaaatgatccttaaaggtggcctagttggtaagactgttttatccttaatctgcattcttctttcattgtagaatacagtatttgcaactcattttttcttgtttttattacagatatacttactttctctttgatctattattgtagacactatacattcaaattgacatttaagaccaaacatctcttatgttatctttaatattactttgaataatgattgcaatgatgtttcttcctgtgattccacataacatttagaataatgatgtcaattttttacaactgaatttatttctagtgctttacttatatttggctttttgactcttttaaaacaatcagcctgcatttatataacttttataaataataatataatttgggtcaagttaagatattaaaagttcctttcagcatcgaaaaaaaaaaaaaaaa

SEQ ID NO: 26523 - DNA, 2371 bp, Homo Sapiens
agcgggggcgacagctcatggcgttcagggcctgacggttgctagggtgacagggacacaacatggcggcgggatctctaacgctctccttcgagggaccaccacggagatcctagtgcgggaccccgcctcagggaagtggaaagcagggggacaaccttcctgcttctttcttttccgtccagtgtcggcaaggggttgtcaccggcttccgcatccaagatgaagaactataaagcaattggcaaaataggagagggaacgttttctgaagttatgaagatgcaaagcctgagagatggaaactactatgcatgtaaacaaatgaagcagcgctttgaaagtattgagcaagtcaacaacctacgagagatccaagcactgaggcgcctgaatccgcacccaaacattcttatgttgcatgaagtggtttttgacagaaaatctggttctcttgcactaatatgtgaacttatggacatgaatatttatgagctaatacgagggagaagatacccattatcagaaaaaaaaattatgcactatatgtaccagttatgtaagtccctggatcatattcacaggtatgctctcggagatttgacagctctgaaattagtaaaatgtgttaacattcagattcaagaatttgaataaatgaagtgtaattctatttttcctttatactgaatgcagaaatggaatatttcacagagatgtaaaaccagaaaatatactaataaaggtaagagcttttacatgaaagctgggtatcagaataaaagctgaatagaaaatctttcccgaaaggttttctcctcctaccagaggaactttcagtccatgcggctagacagcctgtttgttacagtaatttttttccctctcaggttgtaaaaaatggtttatttaataaatgccatcaacataactgactgcacctggaagaaaataattgaaagcaccattttcacaccgcagacaaaaatgaaccctattcagacggccgttcaaaccttctagagggaaatgtggcagaggcaggatttgagctcaggatgtcctgaaattaggggactttggctcctgccggagtgtctattccaagcagccgtacacggaatacatctccacccgctggtaccgggccccggagtgtctcctcactgatgggttctacacgtacaagatggacctgtggagcgccggctgtgtgttctacgagatcgccagtctgcagcccctctttcctggagtaaatgaactggaccaaatctcaaaaatccacgatgtcatcggcacacccgctcagaagatcctcaccaagttcaaacagtcgagagctatgaattttgattttccttttaaaaagggatcaggaatacctctactaacaaccaatttgtccccacaatgcctctccctcctgcacgcaatggtggcctatgatcccgatgagagaatcgccgcccaccaggccctgcagcacccctacttccaagaacagaggaaaacagagaagcgggctctgggcagccacagaaaagctggctttccggagcaccctgtggcaccggaaccactcagtaacagctgccagatttccaaggagggcagaaagcagaaacagtccctaaagcaagaggaggaccgtcccaagagacgaggaccggcctatgtcatggaactgcccaaactaaagctttcgggagtggtcagactgtcgtcttactccagccccacgctgcagtccgtgcttggatctggaacaaatggaagagtgccggtgctgagacccttgaagtgcatccctgcgagcaagaagacagatccgcagaaggaccttaagcctgccccgcagcagtgtcgcctgcccaccatagtgcggaaaggcggaagataactgagcagcaccgtcgtctcgacttcggaggcaacaccaagcccgaccgggccaggcctgggtgatctgctgctgagacgccacggagggctggggatgcgcctgcgtccgtttcgcgctggccggggctctgggtgctgccctgcgccctgccgcacccgcggcccgcgcagctgcctaggatgttctgggctaatatacttgtaaaaccaccgcattctagggttttctttcattttcgttaagaatttggggcaggaaatactttgtaactttgtatatgaatcaaaacaaacgagcaggcatttctgtgatgtgttgggcgtggttggaaggtgggttctgcgtgtcccttcccagcgctgctggtcagtcgtggagcgccatcatgtcttaccagtgacgctgctgacacccctgacttttattaaagaataagctgtcgttacagtaaaaaaaaaaaaaaaa

SEQ ID NO: 26524 - DNA, 2392 bp, Homo Sapiens
agcggggcagcggctgcgccctgcgccggggcggagccgggggcgggccggcggccggcaggcgggggctggggcccgaggccgggagtgcctgagcgccggcggcgacgacggcagcggcggcccagcgggctcggtggttgggtccgcggcggctcggggtccgcccgcgggctgcggtgcgagcgggcggcccggctcccctcctcccccgcccgccgccgccgctgtgattgggtggaagatggcgctggccggatggaaatcctaatgacagtctccaaattcgcctccatctgtaccatgggcgccaatgcttcggcattagagaaagagattggtccagaacagtttccggtcaatgagcactattttggattagtcaattttgggaatacctgctactgcaattcagttcttcaagcactttatttttgtcgtccatttcgggaaaaagttcttgcgtataagagtcaacctaggaaaaaggagagccttcttacatgcttagcagatctcttccatagcatagccactcagaagaaaaaggttggagtaataccccctaagaagttcatcacaagattacggaaagaaaatgagctttttgacaactacatgcaacaagatgcccatgaattcttaaattacctactaaatacaattgctgatattttacaagaagagagaaagcaggaaaaacaaaatggtcgtttacctaatggtaatattgataatgaaaataataacagcacaccagacccaacgtgggttgatgagatttttcagggaacattaactaatgaaaccagatgtcttacttgtgaaactataagcagcaaagatgaagattttttagacctttctgttgacgtggaacaaaatacatcaattactcactgcttaaggggtttcagcaacacagaaactctgtgcagtgaatacaagtattactgtgaagagtgtcgcagcaaacaggaagcacacaaacggatgaaagttaaaaaactgcccatgattctagctctacacctgaagagatttaaatatatggatcaacttcatcgatatacaaaactctcttaccgggtagtttttcctttagaacttcgtctgtttaacacttcaggtgatgccaccaatccagacagaatgtacgaccttgttgctgttgtggttcactgtggaagtggtcccaatcgaggccattatattgcaatagttaagagtcatgatttttggttgttgtttgatgacgacattgtagaaaaaatagatgcacaagctattgaagaattctacgggttgacatcagatatctcaaagaactctgagtctggttacatccttttctatcagtctcgggactgagagggaaccgtgatgaagagacactttctgcctcatttcttctctggttattttggaaaggatcaagcactgatttttcaagaaaagagaaatgcaggaagctcagggggcagtagcacactttgcacacgataaagcaaagacgatggattgacaagcccttccgatcatggtagttgatttatttgctcaggtatcatgctgtctgtacagttccatacaacaaggaggtgaaatcagagataccagctcctcttttaaaacagccttccagtcattggcacgcattttctctttattaattgcaccaataatgctttgaattccttgggggtgcagtagaaagaatcggaatctgtgccgtattgataaggagatgatgttgaacacactgcataaatttgcctggttcagtatgtatagaagcatattcagtggtcttttcaagagtaaaccagaaatacttttgggcccaacacttgcagttgccttcctgatgtaaaaactaacatgctagataatccagtgtcgggaagacaaagatgttttgcttctctgaagaagcttataataatatacagtatatgtatatgtagggagcaattggtcaaaagtggctttttgtttccccaaggggaaagactggctttgtaattataattttttccttatttattttacttaaaactggtagagtctaagtattatatgaagtgcccatgattctgtcagtaaatttgaacatatttttattagttaatgtcagtttaagttgtccttttgtttgtttctatttttaaggtgaattttaatttctatctgaaatcagttaagataccttgagaaaaactgcagtgagaggagataaatatcctttttcaggaggaactgatatctctggctaaatatttgtccttttattatggtttctaaatcagttattttcttcagctttaatttcataaaattaaaaaactattttaaaaaaaaaaaaaaaaaaaaaaaaaaaaaaaaaaaaaaa

SEQ ID NO: 26525 - DNA, 1667 bp, Homo Sapiens
gctctcgtagttagagaggcccggatggaggacgcagaggcacgctgttgccatggcagtgtggtcctggctgccgcggaggcaggtgccggggtctcctttgcctcaatgtgaagagcttagaaagaggaggagaggagaactcccccggccatctctgtgatcccagccgccgcattttacacagcatatttccttcacaaacagaaaatgaatgaaaataaagatactgattcaaagaaaagtgaagaatacgaagatgactttgaaaaggacctggagtggttaattaatgaaaatgaaaaaagtgatgccagcataatagagatggcttgtgagaaggaagagaatattaaccaagacttaaaagagaatgagacagtaatggagcacaccaaacggcattctgatcctgacaaatctttgcaggatgaggtctcaccaagaagaaatgacatcatttctgtaccaggtattcaacctttggatcccatatcagattcagatagtgaaaactctttccaggaatccaaactagaaagccagaaagacttggaggaggaagaggatgaggaagtaaggagatatattatggagaaaattgtacaagctaacaagcttctacagaatcaagaaccggtgaatgataaaagggagcgaaaacttaagttcaaggaccagttagttgatttggaagttcctccactagaagacactactacttctaaaaattattttgaaaacgaaaggaatatgtttgggaaactgtcacaattatgtatttccaatgattttggacaagaagatgtgctcctgtcacttactaatggaagctgtgaagaaaacaaggataggacaatactggtagagagagatggaaaatttgaacttctgaatttacaagacattgccagtcaggggtttttgcctcccattaataatgcaaatagtacagaaaatgaccctcagcagttgttacccagatcttccaactcctctgtcagtggcaccaagaaagaagattctacagcaaagattcatgctgtcactcactcatcaacaggagagccgctggcttatatcgctcagccaccactcaaccgcaagacttgtccaagctctgctgtcaactcagatcgaagtaaagggaatgggaaatctaatcacaggacacagtctgcacatatctcaccagtgacttcaacatactgtctttcccctcgacagaaagaactacaaaaacaactagaagaaaagagagaaaaactgaaaagagaggaagagcgacgaaaaatagaagaagagaaagaaaaaaaagagagagaatgacatagtatttaaagcgtggttgcaaaagaaaagagagcaggtcttagaaatgaggagaattcagcgagcaaaggaaattgaagacatgaacagtagagtaagtaaaacttctctgaaaaataagttcatacagatatgaaagctgaacttatttatagaagggagtctggatatcagactaacagcctatggaagaagtagaaaagttgttcaagaactacccttgcaaaagatgcaacatgcagataactacaattaggttctaagaggtcttgtgaaaataaaatgattcctattttgttcagactttgatggaacagaaaaaaaaaaaaaaaaaa

SEQ ID NO: 26526 - DNA, 1973 bp, Homo Sapiens
gggggttgctggctttttcaggagctgctcgctcgcagccagagacgctgctttttttttccgggttcggagccgttccggatgctttaggctgccggatgtctgatctccggataactgaggcgtttctgtacatggattatctgtgttttagagcactttgctgcaagggaccaccacctgcacgaccagaatatgacctggtttgcataggcctcacaggttctggcaaaaccagtctgttgtccaaactctgcagtgaaagccccgataacgtcgtgtcgaccacaggttttagtattaaagcagtgccattccagaatgccatcttgaatgtaaaagaacttggaggggctgataacatccggaaatactggagccgctactaccaaggatctcaaggggtaatatttgtattagacagtgcctcttcagaggatgatttagaagctgctagaaatgagctgcactcagctcttcagcatccacagttatgcactttaccctttttaatattggccaatcatcaagacaagccagcagctcgctcagtacaagagatcaaaaaatattttgaacttgaaccacttgcacgtggaaaacgctggattctacagccctgctcactggatgacatggatgcactgaaagacagcttctctcagctgattaatttgttagaagaaaaagaccatgaagctgtaagaatgtgaaatctggcaaagaaaacaggctcccaaaaggccttgaacctatcatgttagtttctcattttaattttattttggtatcaagactatattggcttcagtatctattttcctctggtcatttcagactctcatctctctattaaagtgaatattctgtagatcagatgaattatcatcggcattaacgtcaagtacacactactgagagagaatttattctctgtttaccactaattatcttccccgcatgtctcttccttctgttgttctaagcatctcttctatactctgtgctgaaacggatggaattcatggcttatggaaatcaaatcccttttgaaggactcagaaagactcacaagaccttgatcattttctctgggtttgggagtggagtattatgtgactgggactccacaaaatatttatattattttcaagacctattgggggttttgttttattttatctaatttttttttttttggtatactgagcttatagactatgagagaaaagtgagcaccaaaaacttcattaatcaccttatcaggaaggaatatcctgccatagtaaaattggctctgaagagcttagaggcaagttacacaatgttttcttgattacatctgaagtctcttctcttttaagagcaaagacattgtttcagtttctgagagtggttagaggaaatttaggtacaatgcatgcatcacagactgtatttgattgattcgagtcttcaaatattgtttaatggaatgatgagcctgcataaagtgaagctgcaatgtaacataggtatctttttctaaaaacttcaagtgtttgattaaaatagagaaaataatttttaaaataatagataaaaattttaaaaacagccagaaaaagtataatttatactggttagggtttaagatggcatggatttgacaaagataacaaagacagaatcatctatatattcattcattacgtgttactgtagtttattggaatctgttaatgccttcctctagtagttaaaggtttatcagtatttctattataaacctctattttcaggggtttcaatgtgcccttaaaattgtgctggggctgcagcaaataaataatattgggactcatattcagtctttggaactagttttttttccatttaatttaaatgacaaaattgcatagggataaatgtacagttttactaaggtttagcacctttgatcttttccaaaaaaaaaaaaaaaaaaaaaaaaa

SEQ ID NO: 26527 - DNA, 1914 bp, Homo Sapiens
ggggggaatttcatcaggaatttcaaccggagccttcccttttgggtgacagcaccaactcaggagaagaaagagaccagtttactgatagagcagatggtctccattcggaatttatgaactataaggcaagggcagaagactgtgaagagctgttacggatagaagaggatgtgcactggcaaactgagggcataataagttcatccaaagatcaggacatggatatagcaatgatcgagcagctgagagaagcagtagatttgctgcaagatcccaatggattaagcacagatattacagagagaagtgttttaaacctatatcctatgggatcagcagaagccttagaattacaagattctgcactgaatggtcaaatacagctggagacatctccggtgtgtgaggtgcaaagtgatctaacattacagagtaacgggagccagtattctccaaatgagattagagagaactcccctgcagtctctcctaccacaaacagcacagctccatttggcctgaagcctcgatcagtgtttctaagacctcagagaaatttggaatctatagacccgcagtttacaatccggaggaaaatggagcagatgagagaagagaaagagctggtggaacaacttcgtgagagcattgagatgagattgaaggtcagtctacacgaagacctgggggcagccctcatggatggtgtcgtcctctgccatctggtcaaccacatccgcccacggtcggttgtaagcatccatgtcccatcaccagcggttcccaaacttagcatggccaaatgcagaagaaatgtggaaaactttttggaagcgtgccgaaaattaggagtaccagaggaaaagctatgtctcccccaccacatccttgaagaaaaaggcctggtcaaagtgggcattaccattcaagcattactagacatcaccgtaacgaaggctctgttcacatgaaactaccccttctccattgggggctcagactctgctctcatccaggatcctgaactctgctccaggcacctgttcaaccctctctcccacccactgcctgtcacttcactgactccagttacattgaaacaattttcagtctaagggaggattttctacctttcagagctgacctccgactttaagacttgacaggtatttatcttgaaaccagagagggagctggaggaaaaaaaaactgagcagcacatcaatgccttttccaccctccttcatcctttccacactcaccgactgccattaccaaaacgccaagcacaaccgttttgcagcaagacgcattcgttttattaaaaccaaactcgttatgtatttagtggggggaggggggcacaatcaggtttttcaccaccaaatttttcgagaggtttcttgagaccattgccttttaaaaaactattttcgacatacaaaatatttatataaatattatttattagtgagttgttattcatcctttggatgcaaattgtaaattaggaaactattttattactgcttttttgtggttaaacactttattttaatataaatgttgagttattttctatcctctttggtgtgcggtagtttaggtctcagtaatgtttctggtatatatgattccaaaaaaaagcgaaaaacaggtgcttttaggacacaacttttctggggaggcaatattgacactttggtttgtggaacgttggtcttatttatatttctgcattccatccagtttcctacattccagcagccctctgtcccccaatataatgaactgactaaaatcaagagagcaccccaaagttatttgtaaatagctgtgatggaaaaaaaaaagacatattaaacttgaagctaaaatgcgaaaaaaaaaaaaaaaaaaaaaaaaaaaaaa

SEQ ID NO: 26528 - DNA, 1649 bp, Homo Sapiens
agggaagccactagccggttactagctgcgcttttgttccacttgagcgggcactcttctgcggcaagcaggtctaggaattcgcctggttcccacctcgcgtcccttgccttccttactagtctacccactgtagtgccccctgcgtcccgctccctcctagccgactcagagcacaagaaggattgccacggtttccattgcagcagccgtggcgccgctgaccctttttttatatcgcggcgacggcgggctgtcgtcacgacgacgtgcggacgcagcggcgggggtctttcagcttatgtggagaagtcgctgtgaagccacctataaatccatttactgaatttatggagaaggctgtaaatgatggaagtcattcagaagaactcttttgccatcttaaaactatatcagagaaagaagatttaccacggtgtaccagtgaaagtcatctcagctggtattctcatcagtatcaggggaaatctaaatttccgattctaggatttcctgttttgtctataatataaattatttgaatcaaatacagcattcttttaagagtatcttttccaaatctagtatttatttattaaaatatatttaatctgattacaagtgtactcatctagcagaattcaactagtttttttgaatcttaatgaaagcaattaaaaatgaaaacctggccgggcgcaatggatcatgcctgtaatcccagcactttgggaggatgaggcaggtggatcacttgaggtcaggagttcaagatcagcctggccaacatggtgaaaccccatctctactgaaaaaatgcaaaaattagccagatgtggtagcgtgtgcctgttgtcccagctacttggaaggctgtggtagaagaatcacttgaacctgggaggcgaaggtcacagtgagccgagataatgccactgcactcctgggtgacagagcgagactccatctcaaaaaagaaaaagacaaaaaaaatgaaaacctcatctgttaagaatttgtaaaataaagctatttaagataaatgaaaatataatatgtgatatcagaaatgtagttaatgaatgtgaaatcactgtcatttggtatattactatatagcaaatacttgtcatacttctttagagtggggaatacacttgttatttacatgaaatattgccccccgtcaaatggcaatcttagtatataccattactgtcagtatggatagcttagtccagcttctggttgaatttgttatgaatgaaaataatattttatcatctataatcacacttgactttctgcccatggtttttaataagggacaggtgtcgtttatagatagaatgttcttaggctcattactttaagccagttgtgcttaagaacacacagatttttgacatagcctctaagatgccatcagttgttaatgagccgttatgttttacaaagaaagagaaaagctgccaattaaagagtttccatatcacttggaattttatttataaatattgaaaatgctccttcaaacttaactatacgtacatctttaatccaaataacttttgtgattacgtacaagtaaaatataagtaaaataaagtattcttaaaatttgcttacactcaaaaaaaaaaaaaaaa

SEQ ID NO: 26529 - DNA, 2133 bp, Homo Sapiens
agcggaggcggctgaagagttgctgtattctgggaatgggcagggtcactcgtccgaacagagtcctatcctacgcggcggaagagtgtgccctttgacttgcatcgtctacctacctctgccatcctctaccagccgcaactgcgagggctggagccaacttcaggactgattgatcatgacttctataaaggagcaggcagcaattagcaggctcttaagttttttacaggagtgggacaacgctggcaaagtcgcaaggagtcacatcctcgacaagttcattgaaaccaaccaaggcaagactgcccctgaactggagcaggagttttcccagggagccagtttgttcctggtacgcttgaccacctcgcttagaatcacctatatgactgactcatgtttagaaaagcttctcaggtccattggcatcttcttatcagctgtaagcagtaatcggtaccttatagaatttcttgaggttggaggtgtcctaaccctcttggaaatacttgggctagagaagatcaaggaggaggccaagaaggaatctgtcaaactacttcaggttattgcgaactctggcaggacatacaaggaactcatttgtgaaagctatggtgtacgatccatagcagaatttttggcaaagtctaagtcagaagagacccaggaggaagtgcaggttctgttggattctttggtccacggcaatcccaagtaccaaaatcaagtgtataaaggtctaatagctttgctgccctgcgagtccccaaaagcccagcagctgtccctgcagactctcaggactgcccagccaatcattgggaccacacaccccagcatcgtggactgcgtgctgaaggtgctgggcacgatgcacctggaagtccagtatgaagccatcgagttgatcaaagacctggtcggttacgatgtgcgccaggcgctgctcaagggcctcgtggcgctgctgataccgtcggtcaaggagatctccaaactgcaggccaagatcctcagtgacccctcggttctccagctcacccccagcctgccgatgtttttgcagcaggccgcggccgccaaggccatcgggtaagcgggcaggggttagtgggtagctgcagcaagcctggcttggcgctgccggcgggccccgggagcgctccgtgcgccgggtgggcgggggtgtgcgccgggtgagccccagggcgtcgccccagcccgaacccccggcccagggtcctggcgcgcaacgacatgagcatcgccgaggagctgctgtacctgcgcgtggtgcgtggcctaatggccgccatgggcaacacggaccacagcaacagccagcggctggccagcctcacgctggagatgttccccttggtggcggagcacgtgcgcaagtgcatgggggaggaactctaccagctcttcctggtaagtgcgcccttcctgccccgccgcaatgagcagatggcggctcggacagtgtgatgccccttcagacagtccccatcctggagcgcgccacatgcagagtggacctggccaccagctgcaggagggactgctctggcgtaggctcctccacccgccaccttcctgttccctttcctgccctttcggtcaggctgccgacccgcaccccacctgcaacatccctctgccaagcccaactccaagtccagactgccctggcaccccagccgggtcccccttgctcctgtcctcagagcaacgctgaggacttgtacatgaaaatagacagcattcaggcggacatcttggcggccaacacagtcaatgttaccaaagccctgtgcctccatggcagctcctacagcatgaacactctctatggctcgcgcgattcggctcagatggcctacctcacacacttcgaggaggatgtagaatcaaaggagtaacagcccctgtggcaaaccaggaaggccaaggctgcggggcagggaagcctggcaagaggaaggcgcctggggtcaagctcagagccactccacttggctccaggggggagacggggattaggcatcccagaggggcagaggaagagccgctggctgcgaagagtcaataaacagccttgatacctgaaaaaaaaaaaaaaaa

SEQ ID NO: 26530 - DNA, 3039 bp, Homo Sapiens
ggtctaccagtacctaagatggccgccggcccatccaccgtcgcgatcggtgtgaggaaagtgtcacgaacccggaattgcccgactccgtcatggcaggcgccgggggcgtggcttccggcggccacagcttgctagtcgccgcggcggggtcgagcgggggcggcagctgacaggcgctcctcccccgaccgcagcggctggttcccagcgaggcgggcggcccccagctcgcgtccccgagtcctagcccgcgaggcgccagggctgcgcctgggcatggaagaggggaagatggacgagaatgaatgggggtaccacggagagggcaataagagcctggtggtggcccacgcgcagcgctgcgtcgtgctgcggtttctgaagtttcctccaaataggaagaagacctcggaagagatatttcaacacctgcagaacatagtggactttgggaaaaatgtcatgaaggagtttttgggggagaactatgttcattatggggaggtcgttcagctacctttagagtttgtgaaacagctttgtttaaagatacaatctgaaagaccagagtctcgctgtgacaaggacctggatactctcagtggttacgctatgtgccttcctaatttaaccagactccaaacctaccgctttgcagagcaccggccgattctgtgtgtagagattaagccaaaatgtgggtttattcctttctcgagtgatgtcacgcatgagatgaagcataaggtctgtcgatactgcatgcaccagcacctcaaggtagcaactgggaagtggaagcagatcagcaaatactgtccccttgatctctactcaggaaacaaacagagaatgcactttgccttgaagagtttgctgcaggaggcacagaacaacttgaagatatttaagaatggtgagctgatttacggctgcaaagatgcccggagccccgtggctgactggagcgagcttgcacaccacctgaagccgttcttcttcccttccaacggcctggccagtgggccccactgcacaagggctgtgatcagggagctggtgcacgtgatcacacgggtgctgctgagtggctcggacaagggccgggcaggcaccctgagtccggggctcgggcctcagggcccgcgagtctgcgaagccagccctttcagtaggagccttcgctgccaaggaaaaaacaccccagagcgctcggggttaccgaagggctgtcttctgtacaaaaccctccaggtgcagatgttggacctgctggacatcgaaggcctctaccctctgtacaaccgggttgagcgatacctggaagagtttcccgaggagagaaaaaccttacaaatagatgggccttatgatgaagcattttaccagaagctgcttgacctttccactgaggatgacgggacagtggccttcgcgctaacgaaggtgcagcagtaccgcgtcgccatgactgccaaggactgctccatcatgattgcactgtctccctgtctgcaggatgccagctctgatcaaaggcctgtcgtcccttcatcgaggtccaggtttgccttttccgtgtctgtgctggaccttgacctcaagccctacgagagcattccccatcagtataaactggacggcaagatcgtcaactattattcaaagactgtacgtgccaaagacaacgccgtgatgtcgactcggttcaaggaaagcgaagattgcacattagttctccacaaggtctaactctttccctgcagtgtctttgaaacttgaacataatgtgaaggctgaatgatagagatattttctgttgtgttgggtgacctttggttgtgaatgtttttgcttttaaccccttttgaggtgggattgcctcttggagacatggaattgaagagcactagaaacaacttcctggacaaggaatgtaggaagtgagtgctgtgtcccaggaagctgctcacactcttaaaatggaagtgtccgttaagccctgggaagacgttctggatagttcttctttcccaaccagggctcatgtctgattctctaatgcgaaaagccttattctaagacccaaggtttggatctgctaccaccagactcctaacatagaaaacttgaattgtcacatacattttacagtttggacttttaagaaaacatggatactactggaacttcccccagctgagttacatggtcactttttcagtgcaagccacatatcaacacaggtttttaggtggttccctgctgcacagcgtgacctcgtggtcgcgcagatgccgattctgagcagtgtagactcagggtccctgtggaggtgctgaagcccacagttccacacagggcagcagggagcgcaaggctcaggtcaggatggacaccactcatgcgagcattgacctttttttttttgctttacaatttaatctttcacatgagggggagatgagctgttctttcccactaaaaattgctgctgtagaagttggaggtggagctgtgactggctgagctgctgtggccgggctgggcagtgtgccccaacagctcagtgctttcctgacactccagtgtctggggtggttgaggagcgagttctctcttcctcccagaccaagttcctccctcgggtttgccttgagacgtgttgcgtttttgggccccgtggcctctccctgttaggctgccacaggccctgcttctggaaggtgaacagctcctggctgctgccgagagggttctcgttggggtcaccaaagtgtgcccggctgctatgaaaaacgttgggaatcttggtttcagttttttattctatgctaggttgtacagacttatttatatcatcgttttgagggactaatggaggcttattgtaacatataatattagtgaaaccatggaattatatgaaaatgatacatgagaaataaggaaactattttgctgattgtaaatttttgtgggaaattttgtgataacttgagaattatacttgtttgaatcaaaaaaaaaaaaaaa

SEQ ID NO: 26531 - DNA, 4941 bp, Homo Sapiens
agcgtggtgacgcgcgatcttcgcgtcgctctgggcgggcggccgcggcgccgcgctggtgggtgggatcgtggcggagcgccaggcgcccaaagaggggcgagaaagcgccatggcggcggcggcggctgtgtccggtgctcacgccgcggcgaggtgaggggaccgcctcttctccacaactgaggaggccacagctgccggcccacccgccttccacgcgggccgcggctccggcatggccgggatcattaagaagcagatcctgaaacacctgtcccggttcactaagaatctttccccagacaaaatcaacctgagcaccctgaaaggggagggtcagctgaccaacctggagctggatgaagaggttctacagaatgtactggagctgcccacctggttagccatcactcgggtctactgcaacagggcctccatccggatccagtggacaaagttgaagacacaccctatttgcttgtgtctggataaggtagaggtggagatgaagacatgtgaggatcctcggccccccaatggacagtctcccattgcccttgcttcaggacagagtgaatatggctttgccgaaaaggtggtggaagggatgttcatcattgtcaattctatcaccatcaagattcactccaaggccttccacgcttcttttgaattgtggcagctccagggctatagtgtcaaccccaactggcagcagagtgaccttcgccttacccgcatcactgacccctgccgaggagaggttttaacatttaaggaaataacttggcaaacactccgaattgaggcagatgctacagacaatggtgatcaggacccagtcaccactccattgaggcttattacgaaccaaggcaggatccaaatagccctcaaaagaagaaccaaagattgcaatgtgatatcctccaagctgatgttcctgttggatgacctgctctgggtgctgactgactcacagctcaaggctatgatgaagtatgcagagtcactgagtgaagccatggagaagtcagcccatcaaagaaagagcctggcccctgaacctgtgcagatcactccaccagcccccagtgcccagcagtcctgggcccaggcatttggtggcagccagggcaacagcaacagcagcagcagccgcctcagccggtactttgagaaatttgatgtgaaagagtcctcctaccatctgctcatctcccgcctggacctgcacatttgtgatgatagccagtcccgagagccaggtgtctctgccaacagactcatgggtggtgccatgcagcttaccttccgcaagatggcgtttgactattaccctttccattgggcaggtgatagctgcaaacattgggtacgccactgtgaggccatggagacccgaggccagtggcccagaagctggtgatggaatttcagagcaaaatggagaagtggcatgaagagacgggtctgaaaccaccctggcaccttggagtagactctctctttcggagaaaagcagattctctttccagtcctcgaaagaaccctcttgagagaagcccctctcagggcagacagcctgcctttcagcctccagcatggaaccgcttacgctctagctgcatggtggtacgggtggatgacctggacatccaccaggtttccaccgctggacagccaagtaaaaagccatctacactcctttcctgcagtcggaaacttcacaacctccctacccaggtctctgccattcatattgagttcacagagtattacttcccagataatcaggagcttccagttccttgtcctaatctctacattcagttaaatggtctgacatttactatggatcctgtcagtttgctctggggaaacctcttttgcctggatttataccgcagcttggagcagttcaaagctatctacaagctggaagattcaagtcagaaagatgaacacttggacatccgactagatgcattctggttgaaggtgagctttccactggaaaagagagagcgggcagagttgcatcgtccccaggcccttgtcttctctgcgtcaggcatgattgccaccaatacacgtcatgctccacattgtagttgttcagacctccagagtctcttccggggttttgctgctgctgagttctttcattccaattatgatcactttcctaaggttccaggtggctttagccttctgcacatgctttttttgcatcatgcctttcagatggattcctgcctgcctcagcctaataccctccctccccagagacctaaggcttcctgggatctctggtctgtccactttacccagatctccttggactttgagggaacagaaaacttcaaaggccataccttgaattttgtagcccccttccccctgtccatttgggcctgcctacccctccgctggcagcaagcccaggcacggaagcttcttttggcctcagaggggaggctgaaaccatcagccagttttggaagtcctgtccagtctgaggctcttgcccctgactctatgtcccatccgcggtcaaagactgaacatgacttgaaaagcttatcaggacttacagaagtcatggaaattctgaaagaaggcagtagtggtatggacaacaaagggcctctgacagagctggaggatgtagcagatgttcatatgcttgtacattccccggcccatgtccgcgtgaggcttgaccactaccagtacttggctctgcttcgcctgaaggaggtgctgcagaggcttcaggagcagctgactaaggatacagagtcaatgactgggtctcccctgcagaatcagacagcttgcattggagttctctttcccagtgctgaagtggctctgcttatgcatcctgcacccggtgctgtcgatgctgactctgcaggctcagatagcactagcctcgtagattcagagctatctccttcagaggatcgggaactgaagtctgatgcctcatcagaccagggcccagcaagccctgagaaggtcttggaggaaagtagcattgaaaatcaggatgtatcccaggagaggccacatagcaatggagaactgcaggactcaggtccacttgcccagcagctggcagggaagggccatgaggcagtagagtccctacaggccaagaaactgagcagaacccaagcctccagctcaccagctgcattgaagcccccagctggcagggagactgctgtgaatggacagggtgagctcatccccttgaagaacattgagggagaattgtcaagtgctattcacatgaccaaggatgccaccaaggaggctctacatgccaccatggacctcaccaaggaagctgtgtccctgactaaggatgccttcagtttgggcagagatcgaatgacctccaccatgcacaagatgttgtccctgcccccagccaaggagcccatggccaagacagatgagggggtggcagccccagtgagtggaggtgctgcacgactccgatttttctccatgaagaggacggtatctcaacagtcatttgatggtgtctcattggatagcagtggccctgaagaccggatttcagtggacagtgatggcagtgatagctttgtgatgctcttggagtctgagtctggtccagaatctgttccaccaggatctctttcaaatgtctcagataatgctggtgttcaagggagccctcttgtgaataattatggccaggggtcaccagcagccaacagttcagtttcacccagtggagaagacctcatctttcacccggtctcagttctggtcctgaaggtgaatgaggtgtcttttgggattgaggtacgtggtgaggacctgactgtggccctgcaagcagaggaactgaccctccagcagctgggcaccgtgggactctggcagttcctgcatggacagtgcccaggtacatgctttcaggaatcctcaactttgaagactggccacatcaggccagctgtgggccttcgctttgaggtggggcctggagcagctgttcattcccccctggcctcacaaaatggcttcctacatttattgcttcatggctgtgacctcgagctgctcacttcagtgctcagtggcctggggcccttcttggaggatgaggagatcccggtggtagtccccatgcagattgagcttctgaactccagcatcaccctaaaggatgatatcccccccatctatccaacatctccaggccccatccccatcactctggccatggaacatgttgtgctgaagaggagtgatgatggtgtgttccacataggcgctgctgctcaggacaaaccatcagctgaagtacttaaaagtgagaagagacagcccccaaaagaacaggtgtttttggtgcccacaggagaggtttttgaacagcagacatagcaataacaacattctgagacacagaggtgccagtgatggactggatcagcttgaaagaagcacaaagactccgtgatcacaatagtcaaagactggctttggaacacagtaccaagtaattcacagaaaaagtttttggctgcaggattaagtaatgatgagtcttccctttcaactgttgttaaatctgagacatcctgactctcgagctgggaagatgaaagaaactctattatatatttggcctactttccaggcttgggcaaaactcgctctgttgcccaggctggatcatagctcactgaagcctcaagtgatcctcttgtgtcagcctgccaggtagctagatctgcaggcgtgacccactccactaggccctttttctggtttcttgagttaggtgcttatttgcaatatcttctggctgttaataaaaatatgtaaggctatatatttttctgtaaataaagctttggccaaatcccaaaaaaaaaaaaaaaa

SEQ ID NO: 26532 - DNA, 2220 bp, Homo Sapiens
gggggtccaagatggcggcagaagcagctggtgggaaatacagaagcacagtcagcaaaagcaaagacccctcggggctgctcatctctgtgatcaggactctgtctactagtgacgatgtcgaagacagggaaaatgaaaagggtcgccttgaagaagcctacgagaaatgtgaccgtgacctggatgaattgattgtacagcactacacagaattgacgacagccattcgcacataccagagcatcacagagcgcatcactaactcccgaaataaaataaagcaggtaaaagagaacctgctttcatgcaagatgctgctgcactgcaaacgggatgagcttcggaaactgtggattgaaggaattgagcataagcatgtcctgaacttgttggatgaaattgagaatatcaagcaagtgcctcaaaagctggaacagtgcatggccagcaagcactatctcagtgccactgacatgttggtgtcagcagttgagtctttggagggccccctgctccaggtggaaggactgagtgaccttcgactagagcttcacagcaagaagatgaaccttcacttggttctcatagatgaactacaccggcacctgtacatcaaatcgactagccgagttgtgcagcgtaacaaggaaaaagggaaaatcagctccctcgtgaaagatgcttctgttcctctgattgatgttacaaacctccctactcctcgaaaattccttgatacctctcactattctactgctggaagctcaagtgtgagggagataaatctgcaggacatcaaggaagatttagaattggatccagaggaaaacagcaccctgtttatgggtatcctcattaagggcttggcgaaactgaagaagatcccagaaacagttaaggcaatcatagagcgcttggagcaggagttgaagcaaattgtgaagaggtctacaacccaggtggcagacagtggctatcagcggggggagaacgttactgtggagaaccaaccaaggttgcttctagaactgctggagttactgtttgacaagtttaatgctgtagccgctgcacactctgtggtcctgggatacctgcaggacactgtagtgactccactgactcagcaggaagatatcaaactgtatgatatggcagatgtatgggtgaagatccaagatgttctacagatgctattaactgagtacttggatatgaaaaatactcgtacggcctctgaaccatcagctcaactaagctatgccagcactggacgagagtttgcagccttttttgccaagaagaaacctcaaaggccaaaaaattctcttttcaagttcgaatcgtcctcccatgccatcagtatgagcgcctatctgcgagaacagagaagggagctctatagtcggagtggagaactgcaaggtgagtgattgagcttctctggaaaaattaattttctggaggagtatttcctttattacacatgagtttgtgtcctgcattcacacgatcctttcaaggtaacaaacacttagtgacttaataatttgtttcttctgtaatttcccagcatctgctgccaagcaggtaaaactattactgtggccataggacttgtagacctgctactgttcaagtgggaattcaaagcaaaaagagatgaggccaggctcgtcttgcttaaacagaagacctgagtccagtcacaatctaggagaatgttggtcttctgcgactgccactgttacttctaattgttgtttttgacaccttctagaatatgacaggagtacctgagatttgggaaagggaaaatgcaaccactgtcattatttaaagggaaaaagatgcctctaaatagtatgttataatcaatataactgtgatgaacaggctatttgatacccatgtatagttaccaaagagttgtaagctgaagaagaaaatatttagaaaataaattaaatataaataaatatattagactgataacatttccttctgtgacaaaaagatgctgatcatgtaaatgtaatgagttaagaaaggtttggaggtcaggtgtggtgactaacacctgtaatctcagcactttgggagactgaggcaggcagatcacttgagtccaggagttcaagaccagcctgggcgacatggcgaagccctgtctctataaaaaaaatgcaaaaaaaaaaaaaaaaaaaaaaaaaaaaa

SEQ ID NO: 26533 - DNA, 1370 bp, Homo Sapiens
gggggtgggagcccgtggcctttaaagtgccgttcagccttttcctccaggggtgctttgtaaacacggctgtgctcagggctcgcgggtgaccgaaaggatcatgaactagtgacctggaaagggtactagatggaaacttgagaaaggactgcttattgataacagctaaggtattcctggaagcagagtaaataaagctcatggcccaccagctagaaagtattcttgccatgagaaaaagaatgtgataagttattcaacttatgaaattcaagttacatgtgaattctgccaggcaatacaaggacctgtggaatatgagtgatgacaaaccctttctatgtactgcgcctggatgtggccagcgttttaccaacgaggatcatttggctgtccataaacataaacatgagatgacactgaaatttggtccagcacgtaatgacagtgtcattgtggctgatcagaccccaacaccaacaagattcttgaaaaactgtgaagaagtgggtttgtttaatgagttggcgagtccatttgagaatgaattcaagaaagcttcagaagatgacattaaaaaaatgcctctagatttatcccctcttgcaacacctatcataagaagcaaaattgaggagccttctgttgtagaaacaactcaccaggatagtcctttacctcacccagagtctactaccagtgatgagaaggaagtaccattggcacaaactgcacagcccacatcagctattgttcgtccagcatcattacaggttcccaatgtgctgcttacaagttctgactcaagtgtaattattcagcaggcagtaccttcaccaacctcaagtactgtaatcacccaggcaccatcctctaacaggccaattgtgtaagtgattcaggccaatcattgaacatatacatgaattaagtttgttttgtaatgatttttcctaagacatttgattattcaaactaagatcttagttctgtatgtgtgtgcatgcttcaaattttggaaaaagtacttgcgtagtcttctttaatataaatattaactaacagagtgggagataaatacaactaaaaacaaatatagaatgtgaatttaagatagtcttattttcatgctatttcacacaaaatataaaattactgcatcaccagattccatttctttcagttcttactggtagctcccaagagctctctgatgacagtttttctcattttacaaattggagattgtcctaagtaaatccataacttttctcttcttttcaatactgctacacaggttatgcatttatgatgcaattaaaaataattaaattttcaaaaaaaaaaaaaaaaaaaaaaaaaaaaaa

SEQ ID NO: 26534 - DNA, 2618 bp, Homo Sapiens
agcgggggaacggattctccggagccgaggtccgctcggatttgtcttcttagtgcttggatggtgtgagtgaaaacccagaggaatacatttggtggctgagctagtacaatgccatcaccggattccatgaccttcgaggatatcattgtagacttcactcaagaagagtgggccctgctggacacatcccagagaaagctgtttcaagatgtgatgttggagaacatcagtcatctggtctctattggcaaacagctctgcaaatcagttgtgctttcccaattggagcaagtagagaaactttcaacacaaagaataagcttactgcaaggtagagaagttggcattaaacatcaagagataccattcattcatcatatctatcagaagggcacgtccaccatcagcacaatgagatctcatactcaagaggatccttttctatgcaatgacttaggagaagatttcactcaacatatagcattgactcaaaatgtgattacctacatgagaacgaaacactttgtaagcaaaaagtttgggaaaatcttcagtgactggttatcctttaatcaacacaaggaaattcacaccaaatgtaaatcatatggaagtcatctatttgattatgcctttatccaaaactctgcccttagaccacacagtgtgactcacactagagagataacattggaatgtcgtgtgtgtgggaaaacctttagcaaaaattctaatcttaggcgacatgagatgattcacactggagagaaaccacacggatgtcatctatgtgggaaagcctttactcattgctctgatcttcgaaaacatgagagaactcacactggagagaagccatatggatgtcatctatgtgggaaagccttcagtaaaagttctaaccttagacgacatgagatgattcacactagagaaaaagcacagatatgccatctatgtgggaaagccttcactcattgctctgaccttagaaaacatgagagaactcacttaggagataaaccatatggatgtctcctatgtgggaaggctttcagtaaatgttcttaccttagacaacatgaaagaactcacaatggagagaaaccatatgaatgtcatctatgtggaaaagccttctctcattgttctcaccttagacaacatgagcgaagtcacaatggagagaaaccacatggatgtcatctatgtgggaaagcattcactgaatcttctgtgcttaaacgacatgagagaattcacactggagagaaaccatatgagtgccatgtatgtgggaaagccttcactgaatcttctgacctcagacgacatgagagaactcacactggagaaaaaccatatgaatgccatctatgcggaaaagccttcaatcactcttctgtccttagacgacatgagagaactcacactggagagaaaccatatgaatgcaatatatgtggtaaagccttcaatagaagttacaactttagacttcatagaagagttcacactggagagaaaccatatgtatgtcctctatgtgggaaagcctttagtaaattttttaaccttagacaacatgagagaactcacactaaaaaagcaatgaatatgtaagaatcatcagctgtagcgttaacactaaatacaccaaggacaaacatactacaggaatattatgtctgtaatcagtgtggaaaagcctttatttatatttaccactttgctcaacctaaatgaattcaaggtagagagaatccagatgtatttaatgtttatggcacaaacttcagactctaggctgaccatatacaacgtgagagaatgaaactatagatcaaaggaatgtggaggagtcttcatccacagctctgttaaataaatgggagaaatcacatcacgaaaattctgtgcctgtcgtcagtgtgaaaatgcccttgctgataatttatcctctaaacaaatgagtaaaatccacaggcaagcaaccatatgtctgtaattgctgtgcactctcattcagctaagcaccaattttggtgtgtgcaagaaaattcattataaggtaactgataaaaacaggaaatatgtgaaaatattttttattaggtggatgaggcctcttgaacaattccagacattcatagtggagaagttattcaatgaaaactcatgagaaatccttttcttaatacagcagcacttctataatagatcagaattcacatggtgtagaactctcaatgacatgaatggagggtagtcctcagtaaattactcattccttagtcaataccagtatttttccagtgagaaaactatcttgacaggatagtggaaaaaccttcaggcagcttttatgtcaaaaaagtgagacagggatgaaaactctaaaaagccattgatgagatgtatagctgggggacaaaacataaagccatcaagcacgtgcttgagaaaaaaattataattttgaataaagactttctacttaaaatatgtgggttgaaatgtacaattctgaaataacctgggaatattgaatgcagaattatgtaagaagtaataagattaaattagtactgtcaaaaataaaaaaaaaaaaaaaa

SEQ ID NO: 26535 - DNA, 1255 bp, Homo Sapiens
gccacccggcgcccaggcctggggcaccgcgagtgccgaacattcggctggacaccaagatgcctggcgaacagcaggcagaggaagaggaggaggaagagatgcaggaggagatggtgctgctggtgaagggtgaggaggatgagggtgaggagaagtatgaggtggtgaaactcaagatccccatggacaacaaggaggtcccgggcgaggcgcccgcgccgtccgccgacccggcgcgtccccacgcgtgccccgactgcggccgcgccttcgcgcgccgctccacgctggcgaagcacgcgcgcacgcacacgggcgaacggcccttcgggtgcaccgagtgcgggcggcgcttctcacagaagtcggcgctgaccaaacacggccgcacgcacacgggcgagcggccctacgagtgccccgagtgcgacaaacgcttctcggccgcctcgaacctgcggcagcaccggcggcggcacacgggcgagaagccgtacgcatgcgcgcactgcggccgccgcttcgcgcagagctccaactacgcacagcacctgcgcgtgcacacgggcgagaagccgtacgcgtgcccggactgcggacgcgcctttggcggcagctcgtgcctggcgcgccaccgacgcacgcacacgggcgagcggccctacgcttgcgccaactgcggcacgcgcttcgctcagagctcggcgctggccaagcaccggcgcgtgcacacgggcgagaagccgcaccgctgcgctgtgtgtggccgtcgcttcggccaccgctccaacctggcggagcacgcgcgcacgcacacaggcgagcggccctacccctgcgccgagtgcggccgccgcttccgcctaagctcgcacttcattcgccaccgacgcgcgcacatgcggcgccgcctgtatatttgcgccggctgcggcagggacttcaagctgccccctggcgccacggccgccactgccaccgagcgttgcccggagtgtgagggcagctgagtcccgcagggctgcggaggggcgcgctggggcttcgacctggctgcactaacccaggctcctcctcgccccggcctccgggtctgggaaattgaggggacggcaggcccagctgccctggaactgggagacagggagaatcccctgccggggtccctggaaacagtgcccaccccacatcactacattccctcggcccgtgttagtgaataaagtattatatcctcaaaaaaaaaaaaaaa

SEQ ID NO: 26536 - DNA, 2990 bp, Homo Sapiens
cttggctccgcacctgctgggctggcgaacccgaaattgggcttggaacccgggagccagatcttggaccctgaactgcacctctgtcaagagcccagaggagaaagaatggctgtttcagtagcaatgtccaagctctgcattctccagactctgtgctttcctaagataggaacccagaagaggactgatcatttcttgcagctctaaaaaccatggctcggaaattagtgatgttcagggatgttgccattgacttctctcaggaagagtgggaatgcctggactctgctcagagagatttgtatagagatgtgatgttggagaactatagcaacttggtatcactagacttgccttcaaggtgtgcaagtaaggacttatctccagaaaagaacacttatgaaacagaattatcccaatgggaaatgagtgacagacttgaaaactgtgatcttgaagagtccaattccagggattatttggaagccaaaggcaagatggagaagcaacaagaaaatcagaaggaatatttcaggcaagggatgatcatatatgacaaaatgtccattttcaaccagcatacttacttatctcaacattcaagatgtcattctactgagaaaccctataaatgtaaggaatgtgggaaagccttcagacgagcctcacacctaacacaacatcaaagtattcatactggtgaaaaaccctatgaatgtaagcaatgcgggaaggcctttagtcgtgattcacaactcagtcttcatcagagacttcatactggtgagaaaccctatgcatgtaaggaatgtgggaaggcctttactcaaagctcacaacttattttacatcatagaattcatactggtgaaaaaccatataaatgtgaagaatgtgggaaagcctttattcgtagctcacaacttacccgacatcaaaaagttcatactggtgagaaaccttatgaatgtaaagaatgtgggaaggcctttactcagaattcacaacttacactacaccagagacttcatactggtgaaaagctctatgaatgtaaagaatgtaggaaggtctttactcagctctcacaacttattctgcataagagaattcataccggtgagaaaccctatgaatgtaaggaatgtggaaaagcttttatttgtggctcacagctttctcaacatcagaaaattcataatggggaaaaaccatatgaatgtaaggaatgtggaagggcctttattcggggctcactactgatgcaacatcagaggattcatactggtgaaaaaccctataaatgtgaagaatgtgggaaggcctttatccgtggctcacaacttactcaacaccagagaattcacaccaatgaaaagccctatgaatgtaaggaatgtggaaagatgtttagtcatggctcacaacttactcaacatcagagaatacacactggtgagaaaccctatcaatgtaaggaatgtggaaaagcgtttaatcgtggctcactccttacacgacaccagaggattcatactggtgagaaaccctatgaatgtaaagaatgtggaaaaacctttagtcgtggctcagaacttactcaacatgagcgaattcacacaggtgagaaaccctatgaatgtaaggaatgtgggaaatcttttattcgtggttcccagcttactcaacatcagagaatccatactggtgagaaaccttatgaatgtaaagaatgtagaatggcctttactcagagttcacatctttcccaacatcaaagacttcacactggtgagaaaccctatgtgtgtaatgaatgtggaaaggcctttgcgcgtggcttactacttatacaacatcagagaattcatactggtgagaaaccatatcaatgtaaggaatgtgggaaagcctttattcgtggttcacagttgactcaacatcagcgaattcacactggagaaaaaccctatgaatgcaaggagtgtggcaaggcctttagtcatggctctcagcttactctacatcagagaatccatactggtgagaagccctatgaatgcagagaatgtagaaaggcctttactcagagttcacatctttctcggcatcagagaattcatactggtgagaaaccatatcaatgtaaggaatgtgggaaggcctttactcgtggttcacagctaactcaacatcagagaattcatatcagtgagaaatcttttgaatataaggaatgtgggattgactttagtcatggctcacaagtttacatgtgaattgtctgattatttgagatcactatgaagaggttctctggttgttagcagcaaagaattctcacaaatgtgaatatgggcgcacatttgcctcataaagcacagcatcagataatttatgtgagagaaaatggtagtgtcattcatatagaaaaacatcattactggaaacctattaaacattagcaaattggagaatagttttaatatagtaaatgtaggaagccctttagccatattgaaaacaaatatctttttcaacgttatcttagctctactagttgatctttttgttatatgtatcatgatacttaacctctaccttggtttaatcattttaagatagacctaagtatattacctttattgtaagattcttggaagtattatgtaagttattacatgtaaaagctcttagaatggtgccttgaacgtagcataccacaaatattagctaccattttcactagtgttattttagagaatttgcatgagaggagagtacttatgagtataatgaatattgagaaatcttttatcaacacatccaagatgacttggttggggggcactgtatgccataatgaatgtgagaaagctgtcatttaaatctcatccattattgctataagaggaaattcatactgttaaaaaaaaaaaaacccagtggatataatcagtgtattattaaaaaaaaaaaaaaaaaaa

SEQ ID NO: 26537 - DNA, 4395 bp, Homo Sapiens
gtagtcgtggcgctctcgaggccctgccatgagcaagctcttaactcttcaggtctgcacgtcctacgcccaccgtccagtgctactctcagctcggagttcagcttcgggctgccaagagccagcaacctggtgtcagaggctcggtcccacaacgctctgcgggccgcggcgcctgctgggaggtgtagtccccgatctgcgtactgcgttcgccgagggggagggcggagctgccggcggcccgggcgggctggcagctagagtgggtgcgatagccgcctccgcctctgccgcctccgccgtcgcctcctccgcccgggccgttcgctgctgcgcggggagagcgaggcggggccgccggggccgccatggagcccgactcggtgattgaggacaagaccatcgagctcatgaacacttcagttatggaagatcaaaatgaagatgagtccccaaagaaaaatactctttggcagataagtaatggaacatcatctgtgatcgtctccagaaagaggccatcagaaggaaactatcaaaaagaaaaagacttgtgtattaaatattttgaccagtggtctgaatcagatcaagtggaatttgtggaacatcttatttcacgaatgtgtcattatcagcatggacatattaactcttacctgaagcccatgttgcagcgggactttattaccgctttaccagagcaaggcttagatcacatagcagaaaacattctttcgtacctggatgccaggtctctgtgtgcagcagagctggtatgtaaagaatggcagcgagtgatctcagaaggaatgctttggaagaagctgattgaacgaatggtacgcactgatcccctatggaaaggactttcagaaagaagagggtgggatcagtacctgtttaaaaacagacccacagatggccctccaaattcattttataggtcattatacccaaagattatccaggatatagagactatagaatctaactggcggtgtggacgacacaacttgcagaggattcagtgccgctctgaaaatagtaaaggtgtctactgtttacagtacgatgatgaaaaaattatcagtggcctacgagataattctattaagatatgggataaaaccagcctggaatgtttgaaagtgttaacaggacacacaggctctgtcctctgtctgcagtatgatgagcgtgtcattgtaactggctcttcagattctacggtgagagtgtgggatgtgaacacgggtgaagttcttaacacattgatccaccacaatgaggctgtattgcacttacgcttcagcaatggactgatggtgacctgttccaaggaccgctccattgctgtgtgggacatggcttctgcgaccgacatcactttacgccgtgtcctggttggccaccgggctgccgtcaatgtagtagactttgacgacaagtacatcgtgtctgcctctggtgacaggaccatcaaagtctggagcacgagcacctgtgaatttgttcgtactctcaatgggcacaagcggggcattgcctgtctccagtacagggatcgcctggttgttagtggatcatcagataataccattaggctctgggatattgaatgtggtgcctgtttaagagtcctagagggacatgaagaattggtccgatgcatccggtttgataacaagaggattgtcagtggggcctatgatgggaaaattaaagtttgggacttgcaagctgctcttgaccctcgagccccagcaagcacattgtgtttgcgcacattggtggaacattctggacgtgtgtttcggctccagtttgatgagtttcagatcatcagcagctcccatgatgacactattttgatttgggatttcttaaatgtgcctcccagtgcccagaatgagacccgttctccctccagaacatacacttacatctctagataacagtctgcactttcacccgtttcagggttttctagtcttgaactactggctacgtggctaccaaatgcctaagggagttcgttcacagctgagttatgaagctggaattggttctagacgctgggtagatgcaaagcagcctaactcttcaagtaccgacatttctcacctctgattccggctctcctttgagaaggagaccttagcttccccggcttcaagtagaacagaagcccgtttccttccctcatcagtgaaaaaatctaatgtttcaaatgtaaattgttcatagaaaaggaacatagaatctgttttacagaagtaaatcgaccgtcaagagaagacttggcctctaatttatattgctttgcactttggtttgatattaagaaacagcattcttcttcagtgaaattttgggtgccaaacacctacccagaatgtccagggctttcattttcaaaagttagcattctccttttgaccgtccaagtcattatgaattctgacttgttgtattaggaacatgttggacagtggaaaattttctctggattgttttagtaatatttttgggattatacttcctttctgtaccaatttcttttaatttaaagaactataagtcagttatattatctaccaacaggtaatatagctctttcttttattaactgttctctgtcccccaaccatctcctgatatttggtagagtaacacctttatacgtgtgcttgcctcctaatttaaaatactgtattcgcatgtagatataatgtacataacagtttaacctcaaagttgctggagtcagggccccctgtgcttgagacactaatacagagtgtgttcgcacttagccatgggctgggctcaagaacctgatacctgggttgatgtggattacctagaacccttcctgcagtattcatacagtgtttttattttgttgttgtcattgcgtgtgtgtggtttgtgtgtgtttttaatgagaatcttgttttaaaatgtaatttctaaggtttaacaccaaaatgttttatttgttgtggagtatatattatacaatagagaggtaccttaaacattttttgttcttattctttttctcataagtactcctgagtacaagtggtcacctcccatagtattcatttggcttcgctgtcaaaaatcattattctgtgcagtcgtggccctgggaaggggaaataagaaggccctgttgacgggctgtcttggctctggaattcatgcatcctggccttgccaaggttctggcagggcctgctggtgtgttggagcctgcagggcaggtcaggctggttcagaggcccatgctgaggggtgggtgctctgaagtggagtgaagcctcaagcccatgaatgccaccccagtcatctctggtgtcagctgctgctgtggccccagcaggttctcaaagctcccaagtcctccctacgacacagcccaaatgtgtaaatggcactgttgccctgacagtgcatggaaaggacgttggcatccaattggcactccttctcccttattcaatattaggtttgatttgcccttcgccattgtttccaaagatcaaggaatgtcaataacattttaaaggaccaataaacagcctcctataaagtaaacctcttcccgtggaagcacactctactactaaagggaaggcccctgggctctgatttgtcctttgcattgagaacggtgtggggatcagtgtgtgtgtatgtgatttgtttattgagttggctttgcttttttagtttttcttttaaaaataaaatccttccttcccatgttactaaattaatttatgtttttgagaggttgagtctcaaagtgtaaacaataaacctccattcataaggtggatgttgtaagcttgatggtggttgtgaaagtgatttagctttgaccacttttcatcctacagcttcaatatcaaactggttaggaaagcccagggggaagggagggggcaggggaggaggcaattctgaatgaatgaatggattttttgttgtttttgcatgtttaatatagaagttcccctcgttccttgggagatgatggcctttgaatatgcagacaacctttgaattgtgcctactaaattatagcaggggactttggcacccaaggagttctgactttctgggattataatagtaattcccagccatactctggactttattttgctaaccataactgagcaaatgtaaattactgctatattaatgttttaaagcactgggatagtctaattctaacttgtaattaattatgtttgccaattatctgtttgaaataaatttgtgtctgaacagctattgaaactgttaaattgtacagatattattcatgacagctttgtactgtggaatgtgcttaataaaaaaaaaaaaaaa

SEQ ID NO: 26538 - DNA, 4267 bp, Homo Sapiens
ccgggatggctggaccgggcagcacgggggggcagatcggggctgcggccctggcaggcggcgcgcggtccaaggtagccccgagcgtggacttcgaccatagctgctcggacagtgtcgagtacctgacgctcaacttcgggcccttcgaaacagtgcatcgctggcggcgcctcccgccctgcgacgagttcgtgggtgcccggcgcagcaaacacacagtggtggcctataaagatgccatttatgtatttggtggagacaatgggaagaccatgctcaatgacctcctgcggttcgatgtgaaagactgctcctggtgcagggcctttaccactgggaccccaccggccccccgttaccaccactcggccgtcgtctatgggagcagcatgtttgtctttgggggttacactggggacatttattccaattctaacttgaagaataaaaacgacctctttgaatacaagtttgcaactggccagtggacggagtggaaaattgaaggacggttgccagtcgctaggtcagcccatggggccacggtgtacagtgacaagctgtggatctttgctggctatgacggcaacgccaggttgaatgacatgtggacaattggcctccaggaccgagagctcacctgctgggaggaggtggcccagagtggcgagatccccccatcttgctgcaacttccccgtggctgtgtgccgggacaagatgtttgtattctctgggcaaagcggagccaaaataaccaacaacctcttccagtttgaattcaaggacaagacgtggacacgcatcccaactgaacacctgctccggggctccccaccacccccgcagcggcgctacgggcataccatggtggcctttgaccgccacctctatgtgtttgggggtgcggccgacaacacgctgcccaacgagctgcactgctatgacgtggacttccagacctgggaggtcgtccagcccagctccgacagcgaggttggtggggctgaagtgcccgagcgagcctgtgcttccgaggaggtgcccaccctgacctatgaggagcgggttggcttcaagaagtcccgagatgtgtttggcctggactttggcaccacctcagccaagcagcccacccagcctgcctcggagctgcccagtgggaggctcttccacgcggctgctgtcatctcggacgccatgtacatcttcgggggcacggtggacaacaacatccgcagcggggagatgtacaggttccagttctcctgttaccctaaatgcacgctgcacgaggactacgggcggctgtgggagagccgccagttctgcgacgtggagttcgtgctgggtgagaaggaggagtgcgtgcagggccacgtagccattgtcacagcgcggagccgctggcttcgcaggaagatcacgcaggcgcgggagaggctggcccagaagctggagcaggaggccgccccagttcccagggaggcccccggcgtggctgctggtggggcccggccgcccctgctgcacgtggccatccgggaggccgaggcccggcccttcgaggtgctcatgcagttcctctacaccgacaagatcaaatacccacggaaaggccatgtggaggatgtgctgctcatcatggatgtgtacaaactggcactgagcttccagttgtgccgtctggagcagctgtgccgccagtacatcgaggcctccgtggacctgcagaacgtgctggttgtgtgcgagagtgccgcccggctgcagctgagccaactcaaggagcactgcctgaacttcgtggtaaaggagtcccacttcaaccaggtgatcatgatgaaggagttcgagcgcctctcctctccactgatagtggagattgtgcggcggaagcagcagccgccccctcgcactcccttggaccagccagtggacattggcacatctctgatccaggacatgaaggcatacctggagggagcgggcgcggaattctgtgacatcactctgttgcttgacgggcacccacggccagcccacaaggctatcctggccgcccgctccagctactttgaagccatgttccggtccttcatgcccgaagatgggcaggtgaacatctccatcggggagatggtgcccagcaggcaggccttcgagtccatgctgcgctacatctactacggcgaggtcaacatgccgcccgaggactcgctctacttgtttgcggccccctactactacggcttctacaacaaccggctgcaggcgtactgcaagcagaacctggagatgaacgtgacggtgcagaacgtgctgcagatcctggaggcagctgacaaaacgcaggcactggacatgaagcggcactgcctgcacatcattgtgcaccagttcaccaaggtctccaagttgcccaccctgcggtcgctgagccagcagctgctgctggacatcatagactccctggcctcccacatctcagacaagcagtgcgcagagctgggcgccgacatctgaggccctgtggcgcctgcccattgtgaagaatcgccgtgcctgcctgccctgcctactgagaagactaccggctatgcgcatgcctatggcagtgggtgcacctgccaggccaagggtcagggtgcccagagcctccaaagagagctgaggggatgtggggccccaaactcattaattcactgaagacacaggtcccacagggagcggatgatgaagcagaccccctcctgtcatcaccctctcctggtgtagtgtggatgcgaggccacggctcagtgatgggctcaccacccagaagtggggagagactttgggcctcccacccagtggggcttggcctggcttctgtggcctgggcgtgttgtggactcaggcactggggcctgtcaccaaggctcctccaacatgcgggaggaggcttagcagacttgcgctgcaccagcgaatctgcctgggctgctcctgtcccacccaccctcactgagatccatgtaaggggctcctcttcccacctggaacttgtgagtggggacccatgatgtatgggtctcacctgacttgaggtgaattttggagtgaagggccctgaggtcagctcccaggtcggtcgtgctgggccaggcctggttttcacaggggctgaaggatcccagtccacctgtgtgcatgtcagggctcggccgggaagaagccagcaaagtcccccgtgtcccttgctgagtattctgtcacagacaagcctccattaaagccacagcagtgctacccaccacacacaccttgctggcccggccaccactgctggcttcagccccttgagcagcccatggcttagcagacccccagatgtaggtcagtggccttacctgtctctatccatgctgtcaactcctgcctccacctggggtcacccagtcacattgggaagggctgtgaaggcctccaggctggccccttccaggggaatcctggaggcctggggtgggctcctgccccttctgccctgccttgcccctgcactatgctcttggctcctgtggaaggagggctgccctcttgccctagtgagggccccatgtggatccactctagtgctgggagccagcgctcccttactgggaacaggattccaggacccctttcttgttgtggctgccatgaagccacagctccttggggaagtgacctgctctcctttgggtgtatgcaggtgtgtggggggccctgagtggcaagttgcttagctaacaggagatccataggcagcctgcaggctaggaagtggcctagtgcaagatgagctgggaacaagggaggagagagcaggagctggggcagaggctgagccgggaggcccttgaggtgaggacacagcaggcccaggaccatggctggggaggatatgtcagcacctggaagtggagtgcaggctgcagcgcccagccatgtgggccaggtgcattcactcagagtggggccacacacccatctacccagtttccacaagatgtggctcctgccacacccacagggcagcctcctccaaatccctcctggaggggcctacccagaagcctccttgaaccagtctgcaaccctgctctatgctgacccttgtcactgaaccctgatctagacttatatgaataaatgaaattacatgccaagggccctaaaaagcaaaaaaaaaaaaaaaaaaaaaaaaaaaaaaaaaaaaaaaaaaaaaaaaaaaaaaaaaa

SEQ ID NO: 26539 - DNA, 2189 bp, Homo Sapiens
ggcggctggcccagccgggcccccgctgccctctgccctgggcgcttggtcggagcgggctgggcaaagcgggacagggcgagcgcggcggcccgggggctcggaggcgaagatggcgtccggcaggcgcgccccgcgcaccgggctgctggagctgcgcgccggggcgggctcgggggccggcggcgagcgatggcagcgggtgctgctgagtctggcggaggacgtgctgaccgtgagccccgccgacggcgaccctggtcccgagcccggcgctccgcgggagcaggagcccgcgcagctcaacggcgccgcggagccgggcgccgggcccccgcagctgccagaggcgctactgctccagcggcgccgcgtgacggtgcgcaaggccgacgccggtgggctgggcatcagcatcaaaggcggccgggagaacaagatgcctattctcatttccaagatcttcaagggattggcagctgaccagacagaggccctttttgtgggggatgccatcctgtctgtgaatggggaagacttgtcctctgctacccatgatgaggcggtgcaggtcctcaagaagacaggcaaggaggtggtgctggaggtcaagtatatgaaggacgtctcaccgtatttcaagaactctactggtgggacctcggtcggctgggactcacctcctgcctcaccccttcagcggcagccttcctcccctggccccacaccccggaacttcagcgaggccaaacacatgtccttgaagatggcatatgtctcgaagaggtgcacccccaatgacccggagcccaggtatctggagatctgctcggcagatggtcaagacaccctcttcctgagggccaaggatgaggctagtgcgaggtcgtgggcgactgccatccaagcccaggtcaatactctgacgccgcgggtcaaggatgagctgcaggcactgttggcagccaccagcacagctgggagccaggacatcaagcagattggctggctaactgagcagctgcccagtgggggcacagcccccaccctggccctgctaactgaaaaggaactgctcctctacttgtctctccccgagacccgcgaggccctgagccggccagcccgtactgccccactcatcgccaccagactggtgcactcaggcccctccaagggctcagtgccctacgatgcagagctctcttttgccctgcgcacgggcacgcgtcacggtgtggacactcacctgttcagcgtggagtcaccgcaggagctggctgcctggacccgccagcttgtggatggctgtcaccgggccgccgagggtgtgcaggaggtgtctacagcctgcacgtggaatgggcgtccctgcagcctgtctgtgcacatcgacaagggcttcacactgtgggcggctgagccaggtgcagcccgagctgtgctcctgcgacagcccttcgagaagctgcagatgtcttcagatgacggtgccagtctccttttcctggattttggaggtgctgaaggcgagatccagctggacctgcactcgtgtcccaaaaccatagtcttcatcatccactccttcctgtcggccaaagtcacccgcctcgggctgttggcctagaagtcgccggatgcactagccctgaagaggggtgtccatgacatggcctgagctgggcctccaccgactgcctgctcacccctgggctgagggaagggagaggagaggaacaagggcctccgaaaccccaaccctgagggagactggattggtcttggggcccaggacccagacgcaggacagagtggactctgcctgtgatggggtggccttcctgctgcccccctccaccagtgccttttgcagagagatattttgtgtacacagaagccattccgagtctgggacctgcccctgtgcggatcctgaccccagccaacagctgagctgccgggcctcctcgaggcccctaagccacccccagaggtcccatctgaagctggagtaccctggggtcagcagcaagagaaagaagaggagattttctgtttgtttttcccctcagccctgccaccgtggggagtctggtttttctcttcatcctgtctctctcctccttactcttggataaataaacagcctgtgagcacacaggcagcccggaaaaaaaaaaaaaaaa

SEQ ID NO: 26540 - DNA, 4032 bp, Homo Sapiens
tcgacccacgcgtccgccggagaagatggcggtgcggaagaaggacggcggccccaacgtgaagtactacgaggccgcggacaccgtgacccagttcgacaacgtgcggctgtggctcggcaagaactacaagaagtatatacaagctgaaccacccaccaacaagtccctgtctagcctggttgtacagttgctacaatttcaggaagaagtttttggcaaacatgtcagcaatgcaccgctcactaaactgccgatcaaatgtttcctagatttcaaagcgggaggctccttgtgccacattcttgcagctgcctacaaattcaagagtgaccagggatggcggcgttacgatttccagaatccatcacgcatggaccgcaatgtggaaatgtttatgaccattgagaagtccttggtgcagaataattgcctgtctcgacctaacatttttctgtgcccggaaattgagcccaaactactagggaaattaaaggacattatcaagagacaccagggaacagtcactgaggataagaacaatgcctcccatgttgtgtatcctgtcccggggaatctagaagaagaggaatgggtacgaccagtcatgaagagggataagcaggttcttctgcactggggctactatcctgacagttacgacacgtggatcccagcgagtgaaattgaggcatctgtggaagatgctccaactcctgagaaacctaggaaggttcatgcaaagtggatcctggacaccgacaccttcaatgaatggatgaatgaggaagactatgaagtaaatgatgacaaaaaccctgtctcccgccgaaagaagatttcagccaagacactgacagatgaggtgaacagcccagattcagatcgacgggacaagaaggggggaaactataagaagaggaagcgctccccctctccttcaccaaccccagaagcaaagaagaaaaatgctaagaaaggtccctcaacaccttacactaagtcaaagcgtggccacagagaagaggagcaagaagacctgacaaaggacatggacgagccctcaccagtccccaatgtagaagaggtgacacttcccaaaacagtcaacacaaagaaagactcagagtcggccccagtcaaaggcggcaccatgaccgacctggatgaacaggaagatgaaagcatggagacgacgggcaaggatgaggatgagaacagtacggggaacaagggagagcagaccaagaatccagacctgcatgaggacaatgtgactgaacagacccaccacatcatcattcccagctacgctgcctggtttgactacaatagtgttcatgccattgagcggagggctctccccgagttcttcaacggcaagaacaagtccaagactccagagatctacctggcctatcgaaactttatgattgacacttaccgactgaacccccaagagtatcttacctctaccgcctgccgccgaaacctagcgggtgatgtctgtgccatcatgagggtccatgccttcctagaacagtggggtcttattaactaccaggtggatgctgagagtcgaccaaccccaatggggcctccgcctacctctcacttccatgtcttggctgacacaccatcagggctggtgcctctgcagcccaagacacctcagcagacctctgcttcccaacaaatgctcaactttcctgacaaaggcaaagagaaaccaacagacatgcaaaactttgggctgcgcacagacatgtacacaaaaaagaatgttccctccaagagcaaggctgcagccagtgccactcgtgagtggacagaacaggaaaccctgcttctcctggaggcactggaaatgtacaaagatgactggaacaaagtgtccgagcatgtgggaagccgcacacaggacgagtgcatcttgcattttcttcgtcttcccattgaagacccatacctggaggactcagaggcctccctaggccccctggcctaccaacccatccccttcagtcagtcgggcaaccctgttatgagcactgttgccttcctggcctctgtcgtcgatccccgagtcgcctctgctgctgcaaagtcagccctagaggagttctccaaaatgaaggaagaggtacccacggccttggtggaggcccatgttcgaaaagtggaagaagcagccaaagtaacaggcaaggcggaccctgccttcggtctggaaagcagtggcattgcaggaaccacctctgatgagcctgagcggattgaggagagcgggaatgacgaggctcgggtggaaggccaggccacagatgagaagaaggagcccaaggaaccccgagaaggagggggtgctatagaggaggaagcaaaagagaaaaccagcgaggctcccaagaaggatgaggagaaagggaaagaaggcgacagtgagaaggagtccgagaagagtgatggagacccaatagtcgatcctgagaaggagaaggagccaaaggaagggcaggaggaagtgctgaaggaagtggtggagtctgagggggaaaggaagacaaaggtggagcgggacattggcgagggcaacctctccaccgctgctgctgccgccctggccgccgccgcagtgaaagctaagcacttggctgctgttgaggaaaggaagatcaaatctttggtggccctgctggtggagacccagatgaaaaagttggagatcaaacttcggcactttgaggagctggagactatcatggaccgggagcgagaagcactggagtatcagaggcagcagctcctggccgacagacaagccttccacatggagcagctgaagtatgcggagatgagggctcggcagcagcacttccaacagatgcaccaacagcagcagcagccaccaccagccctgcccccaggctcccagcctatccccccaacaggggctgctgggccacccgcagtccatggcttggctgtggctccagcctctgtagtccctgctcctgctggcagtggggcccctccaggaagtttgggcccttctgaacagattgggcaggcagggtcaactgcagggccacagcagcagcaaccagctggagccccccagcctggggcagtcccaccaggggttcccccccctggaccccatggcccctcaccgttccccaaccaacaaactcctccctcaatgatgccaggggcagtgccaggcagcgggcacccaggcgtggcgggtaatgctcctttgggtttgccttttggcatgccgcctcctcctcctcctcctgctccatccatcatcccatttggtagtctagctgactccatcagtattaacctccccgctcctcctaacctgcatgggcatcaccaccatctcccgttcgccccgggcactctccccccacctaacctgcctgtgtccatggcgaaccctctacatcctaacctgccggcgaccaccaccatgccatcttccttgcctctcgggccggggctcggatccgccgcagcccaaagccctgccattgtggcagctgttcagggcaacctcctgcccagtgccagcccactgccagacccaggcacccccctgcctccagaccccacagccccgagcccaggcacggtcacccctgtgccacctccacagtgaggagccagccagacatctctccccctcaccccctgtggacatcacggttccaggaacagcccttcccccaccactgggaccctccccagcctggagagttcatcactacgtaaggaaagctccttccgcccctccaaagccctcaccatgcctaacagaggcatgcatttttatatcagattattcaaggacttctgtttaaaagatgtttataatgtctgggagagaggataggatgggaatgctgccctaaaggaagggctggtgaaaggtgtttatacaaggttctattaaccacttctaagggtacacctccctccaaactactgcattttctatggattaaaaaaaaaaaaaaaaaa

SEQ ID NO: 26541 - DNA, 1474 bp, Homo Sapiens
attgtggcagtaaatcggggcgagtggggaacccggcgcaggaactgcagccgcggctgggagtggtgctgcccggacgggggcccacggaggtcagaggggaggaggactctggagctgacagcgcgcacttcacccgcagttgttctagcgactgcgaagatagctcgctgagctggaaccccacagatcaccaacaaaaatgaaggcggcagatgagcctgcctacctgacagtgggaaccgatgtcagtgccaagtaccgaggtgccttctgtgaggcaaagattaagactgtgaaaaggctggtgaaagttaaggtactcctgaaacaggataataccacacaattggtacaagatgaccaagtaaagggtcctttaagagttggagctattgttgaaacaaggacatctgatggatcttttcaggaagctattatcagcaagttgacagatgctagttggtataccgtggtgtttgatgatggtgatgagcgaacattgagacgtacctcactttgtctgaaaggagagagacattttgcagagagtgagacacttgaccagcttccattaacaaatccagagcattttggaactccagtaattgcaaagaagacgaacagaggaaggagatcttctcttcctgttactgaagatgaaaaggaagaagaaagcagtgaagaggaagatgaagacaagcgccgtctcaatgatgaattactaggaaaagttgtaagtgtggtgtctgcaacggagaggactgaatggtatcctgctttggtaatatctcccagctgtaatgatgacatcacagtgaaaaaggatcagtgtttagttcgatcatttattgattctaaattttactctatagcaagaaaggacattaaggaagtagacattctcaatctaccggaatctgagctctccactaaaccagggcttcagaaagcaagcatcttcttaaaaactagagttgttcctgataattggaaaatggatataagtgaaatccttgagtcatccagtagtgatgatgaagatggcccagctgaagaaaatgatgaagagaaggaaaaggaggccaaaaagacagaagaagaggtgcctgaggaagaacttgatcctgaagagagggacaacttcctccagcagctttataagtttatggaagacagaggtactccaatcaacaaaccacctgttttgggctataaagatctcaatctcttcaaactcttcagactggtttatcatcagggtggatgtgacaatattgatagtggtgctgtatggaagcaaatttatatggaccttggcattcctattttgaattcagctgcttcctacaatgtaaaaactgcttatagaaagtatctctatggttttgaggagtactgccgttcggcaaatattcagttcagaactgttcatcaccatgaaccaaaaaaaaaaaaaaaaaaaaaaaaaaaa

SEQ ID NO: 26542 - DNA, 1936 bp, Homo Sapiens
gaggctgggctgaggcgccgcggtaccatgaggcgccggtacttaagagattatggcatcagaaacccacaatgttaaaaaacggaacttttgtaataagattgaggatcatttcattgatcttcctagaaaaaagatctctaatttcactaataagaacatgaaggaggttaagaaatctccaaaacagttggctgcttacataaatagaacagttggacaaactgtgaaaagcccagataaacttcgtaaagtgatctatcgcagaaagaaagttcatcatccctttccaaatccttgttacagaaaaaaacagtcccctggaagtgggggctgtgacatggcaaataaagaaaatgaactggcttgtgcaggccacctgcctgaaaaattacaccatgatagtcgaacatatttggttaactccagtgattctggttcttcacagacagaaagcccatcatcaaaatatagtgggtttttttctgaggtttctcaggaccatgaaacaatggcccaagttttgttcagcaggaatatgagattgaatgtagctttaactttctggagaaagagaagtataagtgaacttgtagcttatttgttgaggatagaagatcttggcgttgtggtagattgccttcctgtgctcaccaattgtttacaggaagaaaaacaatatatctcacttggctgctgtgttgacttgttgcctctagtaaagtcactacttaaaagcaaatttgaagaatatgttatagttggtttaaactggcttcaagcagtcattaaaaggtggtggtcagaactatcatccaaaacagaaattataaatgatggaaatattcaaattttaaaacaacaattaagtggattatgggaacaggaaaaccatcttactttggttccaggatatactggtaatatagctaaggatgtagatgcttatttattacagttacattgagagatttcatctactaaagagcatttggtttttcaaaacatccctgaactgtataatttacaaaaaaaaaagtctcgtctgagaactgtgaactgtggaagaaatcaaaactattttttcttttaaaaagccacgtaatgaaaccactaatgaaatcccagcaatctgcttcacattgaagtggaaaaatatccaaaaggagcagcttcaatttcattgaggtgaaagtgcactatgaagattgttcacctttgctgcatttgggagttatatggttatttggtaacattaagaactactggattttaatgcaatcctgcataaaaatataatttatactatgtgaaaaaataagacaggacttaccactaggaaccaccaagaccaatcatcattaacttttttaagattgtgttttattaaaaaaaaaaaacacttaaatgtgtgcagctattttcttatgttgaaaagactgaaagtttaaaacatgaaaaaaatcaatattaaacattttttgttcacactgagatactgtgtatgtaaaatgccttaattattaataagccaatgtgttatgataccaatatctgttttaaaaaactaaaaccaaccatgcttctggcatgataaaatcatggaattaaatcaggggtttacattcttgtagagtgttcttgaaacactctctgcaccatttttaaaacttgagaatagttttagtatctctgatattttttgccagaatcatcatgtcatgtatgaatgtgttatccctatctaaggaaaaaggtgaatatgtttttgtatgaatgtttaactggaaatgtccatggacttggctaatttatatttactttttattgtacatagatttctaatatttttcattcctgtatcatttaaacttccttcatttgagtaaattcactaaatatttcgaaaaaaaaaaaaaaaaaaaaaaaaaaaaaa

SEQ ID NO: 26543 - DNA, 2618 bp, Homo Sapiens
aggctattccgggtttgtggctgcttggctccacacgtgggccgccgtaggtattccgaccggtaattcctcctattggtgtgcagcagccacattgaaggatagagtggcagcagaggccaaggatcgtgagttgatggagtttgctgctgaaaatgaagggaagtctgggggaggtctccacagcgtagctgagggggtgcggctaagtccagagcctggcagggagggagtaagggacttagcaggggcggaggagttcggcggcggagaggaggggacagggctgacagggataaaggagataggggatggagaggaaggaagtggacaaaggccagaggaaataccgatggacctaacggtagtgaagcaggaaattatagactggccaggtacagaaggcaggttggctggccagtgggtagaacaggaggtggaggataggcctgaggtgaaggatgagaacgcaggcgtattggaggtgaagcaggagacggatagtagtttagtggtaaaagaagcgaaggtgggtgaaccagaggtaaaggaagagaaggtaaaggaagaggtaatggactggtcagaagtgaaggaagagaaggataacttggagataaaacaggaggagaagtttgttggtcaatgcataaaagaggaattgatgcatggagagtgtgtaaaagaagagaaggatttcctgaagaaagaaatcgtggatgatacaaaggtgaaagaagagcctccgataaatcacccggtgggctgcaagcggaaactggccatgtcaaggtgtgagacttgtggtacagaagaagcaaagtacagatgtccacgttgtatgcgatattcctgcagtttgccctgtgtaaagaaacacaaagcagaactgacatgtaatggagttcgagataaaactgcatacatttcaatacaacagtttactgaaatgaatctcctaagtgattatcgatttttggaagatgtggcaagaacagcggaccatatttctagagatgcttttttgaagagaccaataagcaataaatatatgtactttatgaaaaatcgtgcccggaggcaaggtattaacttaaaacttctacccaatggattcaccaagaggaaggagaattcaaccttttttgataagaaaaaacaacagttttgttggcatgtgaagctccagtttcctcaaagtcaagctgagtacatagaaaaaagagtaccagatgataaaactattaatgaaatcctaaaaccttacattgatcctgaaaagtctgatcctgtaattcgtcaaaggttgaaagcctacattcgctctcagactggggttcagattttaatgaagattgaatatatgcagcaaaatttagtaagatattatgaactagatccttataaaagtctcctagacaatttgaggaacaaagtgatcattgagtatccaacattacatgtggtattgaaaggatccaataatgacatgaaagttcttcaccaagtgaagagtgaatctaccaagaacgttggcaatgaaaattgagcatttttttctggaagaagaaagtgaaaacttccagacaactgcagcagactctgcattgatgggctgttggctgattggggtattgtcaatgggtgattggaattttttctttgtatgaaaaataagcttaactcttttaaaaaatgtattttataacctcttgaattaattgacttgtaagacccatttattcatattaagaactctcctttgcacttgatcagcatagtacttattaggccctggctttttaatatgcttaattgcttaattccataaactgaaaactttttttttcttttttctttctttttttgagatggggtcttggagtgcaagtggtatgagcatagcttcctcaaattcctgggctcgaatggtcctctcactgcagcctcccaacaggctggtaccaccacactcagctaagttttttgttgttgtttttttttggtagagacagggttgcgctctttcgcccaggctggtctcaaatttgtggcctcaagcaatccttccacctcagactccaaagcattgggattacaggcatcagccaccacacctggccttgaacattttttatttgttaatttcatgcgtgacgaaacccaaggatcacccatgtcaaccacaaagttggcattccctttagtagaacctcactaaacggaaaggctgtacaacgcaccgtctagccacaggagaactaatcttctatcagttgccctttcttctttggagtttttatgtaacttacccttgtgagacaagttttctacttgagaaactcctagtacaatgtcttatactagaagcctggataaatactattaactactgtttcttatattcacttcagaaaatcagtggctccacattgtttgagccattagtgataacaaatttggatctacttactcaagtcttatgaattctgtgcctttcatcacattcctagcccactctcatcattactgcagaagggtgttgtgatgaccagttttatactgtgttttgatatgtctagcaataacaaaaaaaaaaaaaaaaaaaaaaaaaaaaa

SEQ ID NO: 26544 - DNA, 1644 bp, Homo Sapiens
gctgtgcagggcagggaagctccaggcaaacagcccagcaaacagcagcactcagctaaaaggaagactcacagaacacagttgaagaaggaaagtggcgatggacctcatcccaaatttggcggtggaaacctggcttctcctggctgtcagcctggtgctcctctatctatatgggacccgtacacatggactttttaagagactgggaattccagggcccacacctctgcctttgttgggaaatgttttgtcctatcgtcagggtctctggaaatttgacacagagtgctataaaaagtatggaaaaatgtggggtatctcttccctgtttggaccacattacccttcatcatatgaagccttgggtggctcctgtgtgagactcttgctgtgtgtcacaccctaatgaactagaacctaaggttgctgtgtgtcgtacaactaggggtatggattacataacataatgatcaaagtctggcttcctgggtgtggctccagctgcagaatcgggctagtgaagtttaatcagctccgttgtccccacacagaacgtatgaaggtcaactccctgtgctggccatcacagatcccgacgtgatcagaacagtgctagtgaaagaatgttattctgtcttcacaaatcgaaggatttgtgcaacgaccagcaccatcaagatgcagacccattccgtcaccatgtggctccctcctgctgtcctacagtcacaacatggagtttgtctttttctctgacaggttctatatcagagcaaacttttatttatttgaggaggccaatgtattaatatttccttttatggattgttcttttggtgttaagtctgaaaatcctttgcttagccctccttcctacattgctttttctaagagttatatagtttaacactttacaaaatgtaactctattacccattttgtgttaatatttgcataagttatgagatttagatcaaggttcattttctgtggactatggctgtccaaatgttccaacaccattttggaaaggtaggcatattgtcaaaactcagctgagtatattttgtgaatctatttcttattgtttactcctccactaataccacactgtggtgactctagtagctgtacagtaactcttaacatcatatagggcaattctttccactttattgatttatattttcagaatggctttagcttttcttgtcccttgcctttccataaaaattcagaataagcttgtaagtgtctacaaacaaacctgccataattttgataagaattaaagcagaggtgtccaatcttttggcttccctgggccacagtggaagaagaagtgtcgtgggccacacataaaatacacacacacacacacacacacacacacacacacacacacacaaatggtctgtgtatagttttcattatatatctaccaccacagataagcaaaaatgtccttgcataataatcctaattatgcactgccccattcagagggtctttcaaaatcattgaacaggttccaagtttgcaatcactgatacagaaaatgtacatatctagctaaacttcactacttttttgatattttttattataaaagaaaaaaaaaaaaaaaaaaaaaaaaaaaaa

SEQ ID NO: 26545 - DNA, 961 bp, Homo Sapiens
aggggcgggggaaaggaggcggcagccaggctgtgtcccctgaccgttggagcgtctgcgacccccgcatccccgcaccctcaaggcacctccaaagatgatgatgggttgtggggagtcagagctgaagtcggcggacggggaagaagccgcggcggtcccggggccacccccggagccccaagtcccgcaactccgagccccagtgcccgagcccggcctggacttgagcctgagcccgcggcccgacagccctcagccgcggcacggcagccccgggcggcggaaggggcgggcggagcggcggggcgcggctcggcagcggcggcaggtccgcttccgcctgacgccgccctccccggtgcggtccgagccgcagcctgcggtgccgcaggagctggagatgcccgtgctgaagagcagcctggccttgggcctggagctgcgggccgcagccgggagccactttgatgctgcgaaggccgtggaggaacagctgagaaagtcgttccagatccgctgcggcctggaggagagcgtgtccgaggggctgaacgtgccgcgctccaagcggctcttccgggacctggtgagcctgcaggtgccggaggaacaggttctgaatgccgcgctcagggagaaattggctctcctgccgccacaggctcgagccccgcacccaaaggagccacctgggcctgggccagacatgaccatcttgtgtgacccagaaacgctattttatgaatctccacacctgaccctggacggtctgccccctctccgacttcaactccggccccgcccttcagaggacaccttcctcatgcaccggacactgaggcgatgggaagcgtagaccccaaagatccctggagggctagttcgtatttttgtgttaaactatttgttagaataaagtaattttgcgaaaaaaaaaaaaaaaaaaaaaaaaaaaaaa

SEQ ID NO: 26546 - DNA, 2884 bp, Homo Sapiens
gcctgacgcggcgttgcgtcccccgggagctgcgctaggcgaacggctgcggcgctttgtgctccagtcgctcctaacgctccctggcccggccggggccgcgcagttagggcatctgaggcggggagaagcggcggggagacgccggctgccagcatgtcgctgcctccggagaaagcctccgagctgaagcagctcatccaccagcagctgagcaagatggatgtccatggtagaataagagaaatccttgctgagactatacgggaagaattggcacctgatcaacagcatttatcaacagaagatttgatcaaagcccttagacgtcgaggaatcattgacgatgtgatgaaagaacttaattttgttactgacagtgttgagcaagaactcccttcctctccaaaacaacctatttgttttgatagacaatcgacattaaaaaaaactaatattgatccaacacggaggtatctttaccttcaggttttgggtggaaaagctttcttggaacatctgcaagaacctgagcctttacctggacaagtttgttcaacgtttactttatgtttacattatcgaaaccaacgttttcgttctaaacctgttccatgtgcctgtgaaccagattttcatgatggctttttacttgaagtacacagagaaagcttgggtgatggaactagaatggctgattcaacaacaatgttatcaataagtgatccaattcatatggtgctaatcaaaacagacatatttggtgagacgactttagtagcatcatattttctggaatggcgatcggttttgggctcagaaaatggagtgaccagtctgactgtggaacttatgggtgtaggcacagaatcaaaagtttctgtgggaattttaaatataaaacttgaaatgtatccaccactcaatcaaacgttatctcaagaagtagtgaacacacagcttgctttggaacgtcagaaaactgcagagaaagagcgattatttcttgtatatgctaagcagtggtggagagaatatttgcaaattcgaccctcacacaactcacgactggttaagatttttgcacaggatgaaaatgggataaatagaccagtctgttcctatgttaaaccacttcgagctggacggcttcttgatactccaaggcaagcagcaagatttgttaatgtccttggttatgaacgagcccctgttattggaggaggaggtaaacaggagcagtggtgcactctgctggcctttctctgtagaaacaagggtgactgtgaagatcacgctaaccttctgtgcagccttcttcttggatatggattagaagcctttgtttgtgttgggaccaaggcaaaaggagtacctcatgcatgggttatgacttgtggaactgatggggccatcactttttgggagagtttaacaggacacaggtacatccataaacctaccaatcctgatgaacctccagttgctgaacagcccaaaccactgtacccatatcgaacaattggttgtgttttcaaccatcagatgttcctgggaaattgtcaaccctctgatgcagtagaaacctgtgtatttgatttgaacgatgaatccaaatggaaacccatgagtgaggaagcaattaaatctgtgtgtgctcctggagctacaacatcccttcctccctttccacctctgtgtgcatccacaattgacgcgtcagtaacaagtaatgaaattgaaatgcagctgaggctcctggtgtcagaacacaggaaggatcttggcctcactactgtttgggaagaccagctctcctaccttttatcaccagctttggcttcttatgaatttgagcgtacaacaagtatatcagcaggcaatgaagaatttcaagatgccataagaagggctgtacctgatggtcacacatttaaagggttcccaatacattttgtgtatagaaatgcaagacgtgcatttgccacatgtcttcgatctcctttctgtgaagaaataatctgttgccgtggagaccaagtgcgactggcagttcgtgtccgagtatttacttaccctgaatctgcatgtgctgtttggatcatgtttgcttgtaaatatcgctcggtattatagggccaatatttatataagatttatacctgtgtttaattggaattttacacattgtacattacttagctatttagaggtttgttattttaaaatcacaatctggcttgaatggcatacttcaattttgtatatacttgactggtaatgtttaaaaaaaatcatgcattcctttaaaaattaaggctgaaaaacttgtataaatctccctggaatttagtataaattaagtgtatattctattttaataaatgctactttgtttacagttatcagtagtttaaatattaatataaaatgcattcagttttctttacacaaacaggtaatcaaagagatgtttgtctaagggtttgagccctagacaaatcagtatgatcattacttttcacaggttaatggaattattttatacagattaggagaaattaacctcatgacagatttatttattgcattggtgaaaataaatgttaatgaattaccacttttgtggtttattcgtggtccttgggatatttgagactgtccagaaatttatggttggaccttgaagcaagagtaggaaaaaactaataccagaaaagcataaatattaataacctcatatgaaagtacatgaatcatttagaaatatttatcactgtgatttgttgtaaaaatgaattgggtattttagaaaaactttattatacctctttgttatgatactgataaattgtgatcttgcagtcgaaaaaaaaaaaaaaaa

SEQ ID NO: 26547 - DNA, 3261 bp, Homo Sapiens
aaaagtggtgagctgcgacgtgactggctagctgcgtgggtactggaacaagcaaacgaggcagcgagcgaaggacgggagccggaccctgggccccgtggaactccagcctgcgccaccacgtcacgcacacgctcggcgctgcgatccgcgcatataacgatatttggatttgacctgcattttggaatttatctacacttaaaatgccaccagcagttggaggtccagttggatacacccccccagatggaggctggggctgggcagtggtaattggagctttcatttccatcggcttctcttatgcatttcccaaatcaattactgtcttcttcaaagagattgaaggtatattccatgccaccaccagcgaagtgtcatggatatcctccataatgttggctgtcatgtatggtggaggtcctatcagcagtatcctggtgaataaatatggaagtcgtatagtcatgattgttggtggctgcttgtcaggctgtggcttgattgcagcttctttctgtaacaccgtacagcaactatacgtctgtattggagtcattggaggtcttgggcttgccttcaacttgaatccagctctgaccatgattggcaagtatttctacaagaggcgaccattggccaacggactggccatggcaggcagccctgtgttcctctgtactctggcgcccctcaatcaggttttcttcggtatctttggatggagaggaagctttctaattcttgggggcttgctactaaactgctgtgttgctggagccctcatgcgaccaatcgggcccaagccaaccaaggcagggaaagataagtctaaagcatcccttgagaaagctggaaaatctggtgtgaaaaaagatctgcatgatgcaaatacagatcttattggaagacaccctaaacaagagaaacgatcagtcttccaaacaattaatcagttcctggacttaaccctattcacccacagaggctttttgctatacctctctggaaatgtgatcatgttttttggactctttgcacctttggtgtttcttagtagttatgggaagagtcagcattattctagtgagaagtctgccttccttctttccattctggcttttgttgacatggtagcccgaccatctatgggacttgtagccaacacaaagccaataagacctcgaattcagtatttctttgcggcttccgttgttgcaaatggagtgtgtcatatgctagcacctttatccactacctatgttggattctgtgtctatgcgggattctttggatttgccttcgggtggctcagctccgtattgtttgaaacattgatggaccttgttggaccccagaggttctccagcgctgtgggattggtgaccattgtggaatgctgtcctgtcctcctggggccaccacttttaggtcggctcaatgacatgtatggagactacaaatacacatactgggcatgtggcgtcgtcctaattatttcaggtatctatctcttcattggcatgggcatcaattatcgacttttggcaaaagaacagaaagcaaacgagcagaaaaaggaaagtaaagaggaagagaccagtatagatgttgctgggaagccaaatgaagttaccaaagcagcagaatctccagaccagaaagacacagatggagggcccaaggaggaggaaagtccagtctgaatccatggggctgaagggtaaattgagcagttcatgacccaggatatctgaaaatattctactggcctgtaatctaccagtggtgctcaatgcaaatagtagacatttgtgtggaaatcataccagttgttcattgatgggatttttgtttgactccttaccaatagcctgaatttgaggagggaatgattggtagcaaaggatgggggaaagaaataggttctgttttgttttgttttaatcttagcttttaatagtgtcataaagattataatatgtgccttaagttttagtctttagaactctagagagccttaacttcttaaaccatttttgctgaattcatctatttcgagtgttgtgttaaaaggaaaaataacaactaacttgtttgaggcaaatctaaaatttaaaattaatcttgcttcattgctacatgtaatatatttcagacattttcactggaagatttatgaacagaaatattggttgaaagttagagattttacaaaatgctgacaaaaatattttcctagcatcagtagatttctggcatatgtttctgctagctatatatttaggaaattcaaagcataaaactttggcaacatcttggctgttctagacacagtgtacttgtcaacccctctcaggtaccttttcttgggatgcttattagaagccaagtaaagtgcttaaggtttgttttcattaaattagctatttctgctcccctgttcaaagatgcattttgagtgtttatagatcactgccctttttgaaatcacctggtattatttttcttactggaaaagttagtattaaaatctacagaactacatatttgtgcctccttggtaaatacaacacatctaattaaatgtagacagatatttcaaacatcagctgaattcacttaagtttttccaaaacctcagttaaactgtgaagctattggaatttttttttcctggaatttttcccctttgattcacagtggtcccatttatatctgcttctagcttagtgctatgtgtgagatatgtgtgtgtttggtgtttttgtttttttgtttttttttttttaaggtttgcaaattaaaaagggccagaaaaatttggcaccaggcaaacgaataaagataggattgggaaagaagttgctaagtgtgcttagttttaataagtaattccttctcttttttcagagaaggccttacagaaaattgttgtgcttagaattgctggatgcatttttaccctccacacaaacctaaaaattttgtgacccctttcacttacctgaaaagtagagaaatggattcagtataaggataaggagggaaggtggaccagaatgaaaactgtaaatatttttttaacctaatatcacttaaatcgaggcagaaagatacagacattcaatgaattatattcaatgcatttaaaataccactgtaattgacagagtaaaagtatagatacaaaaccttgtgtaagaggctgacttttccaaataaacattttttaagaaaacaaaaaaaaaaaaaaaa

SEQ ID NO: 26548 - DNA, 4118 bp, Homo Sapiens
gctcccatcgcgcgcacacacgcacacatcgtctccagctctctgctcgctctgctcgcagtcacagacacttgagcacacgcgtacacccagacatcttcgggctgctattggattgactttgaaggttctgtgtgggtcgccgtggctgcatgtttgaatcaggtggagaagcacttcaacgctggacgaagtaaagattattgttgttattttttttttctctctctctctctcttaagaaaggaaaatatcccaaggactaatctgatcgggtcttccttcatgaacgaatgcaggaatttgggaactgagctgtgcaagtgctgaagaaggagatttgtttggaggaaacaggaaagagaaagaaaaggaaggaaaaaatacataatttcagggacgagagagagaagaaaaacggggactatggggagaaaaaagattcagattacgaggattatggatgaacgtaacagacaggtgacatttacaaagaggaaatttgggttgatgaagaaggcttatgagctgagcgtgctgtgtgactgtgagattgcgctgatcatcttcaacagcaccaacaagctgttccagtatgccagcaccgacatggacaaagtgcttctcaagtacacggagtacaacgagcagcatgagagccggacaaactcagacatcgtggagacgttgagaaagaagggccttaatggctgtgacagcccagaccccgatgcggacgattccgtaggtcacagccctgagtctgaggacaagtacaggaaaattaacgaagatattgatctaatgatcagcaggcaaagattgtgtgctgttccacctcccaacttcgagatgccagtctccatcccagtgtccagtcacaacagtttggtgtacagcaaccctgtcagctcactgggaaaccccaacctattgccactggctcacccttctctgcagaggaatagtatgtctcctggtgtaacacatcgacctccaagtgcaggtaacacaggtggtctgatgggtggagacctcacgtctggtgcaggcaccagtgcagggaacgggtatggcaatccccgaaactcaccaggtctgctggtctcacctggtaacttgaacaagaatatgcaagcaaaatctcctcccccaatgaatttaggaatgaataaccgtaaaccagatctccgagttcttattccaccaggcagcaagaatacgatgccatcagtgtctgaggatgtcgacctgcttttgaatcaaaggataaataactcccagtcggctcagtcattggctaccccagtggtttccgtagcaactcctactttaccaggacaaggaatgggaggatatccatcagccatttcaacaacatatggtaccgagtactctctgagtagtgcagacctgtcatctctgtctgggtttaacaccgccagcgctcttcaccttggttcagtaactggctggcaacagcaacacctacataacatgcaaccatctgccctcagtcagttgggagcttgcactagcactcatttatctcagagttcaaatctctccctgccttctactcaaagcctcaacatcaagtcagaacctgtttctcctcctagagaccgtaccaccaccccttcgagatacccacaacacacgcgccacgaggcggggagatctcctgttgacagcttgagcagctgtagcagttcgtacgacgggagcgaccgagaggatcaccggaacgaattccactcccccattggactcaccagaccttcgccggacgaaagggaaagtccctcagtcaagcgcatgcgactttctgaatgatgggcaacatgatcagattattacttactagtttttttttttttcttgcagtgtgtgtgtgtgctataccttaatggggaaggggggtcgatatgcattatatgtgccgtgtgtggaaaaaaaaaaagtcaggtactctgttttgtaaaagtacttttaaattgcctcagtgatacagtataaagataaacagaaatgctgagataagcttagcacttgagttgtacaacagaacacttgtacaaaatagattttaaggctaacttcttttcactgttgtgctcctttgcaaaatgtatgttacaatagatagtgtcatgttgcaggttcaacgttatttacatgtaaatagacaaaaggaaacatttgccaaaagcggcagatctttactgaaagagagagcagctgttatgcaacatatagaaaaatgtatagatgcttggacagacccggtaatgggtggccattggtaaatgttaggaacacaccaggtcacctgacatcccaagaatgctcacaaacctgcaggcatatcattggcgtatggcactcattaaaaaggatcagagaccattaaaagaggaccatacctattaaaaaaaaatgtggagttggagggctaacatatttaattaaataaataaataaatctgggtctgcatctcttattaaataaaaatataaaaatatgtacattacattttgcttattttcatataaaaggtaagacagagtttgcaaagcatttgtggctttttgtagtttacttaagccaaaatgtgtttttttccccttgatagcttcgctaatattttaaacagtcctgtaaaaaaccaaaaaggactttttgtatagaaagcactaccctaagccatgaagaactccatgctttgctaaccaagataactgttttctctttgtagaagttttgtttttgaaatgtgtatttctaattatataaaatattaagaatcttttaaaaaaatctgtgaaattaacatgcttgtgtatagctttctaatatatataatattatggtaatagcagaagttttgttatcttaatagcgggaggggggtatatttgtgcagttgcacatttgagtaactattttctttctgttttcttttactctgcttacattttataagtttaaggtcagctgtcaaaaggataacctgtggggttagaacatatcacattgcaacaccctaaattgtttttaatacattagcaatctattgggtcaactgacatccattgtatatactagtttctttcatgctatttttattttgttttttgcatttttatcaaatgcagggcccctttctgatctcaccatttcaccatgcatcttggaattcagtaagtgcatatcctaacttgcccatattctaaatcatctggttggttttcagcctagaatttgatacgctttttagaaatatgcccagaatagaaaagctatgttggggcacatgtcctgcaaatatggccctagaaacaagtgatatggaatttacttggtgaataagttataaattcccacagaagaaaaatgtgaaagactgggtgctagacaagaaggaagcaggtaaagggatagttgctttgtcatccgtttttaattattttaactgacccttgacaatcttgtcagcaatataggactgttgaacaatcccggtgtgtcaggacacccaaatgtcacttctgcataaagcatgtatgtcatctattttttcttcaataaagagatttaatagccatttcaagaaatcccataaagaacctctctatgtccctttttttaatttaaaaaaatgactcttgtctaatattcgtctataagggattaattttcagaccctttaataagtgagtgccataagaaagtcaatatatattgtttaaaagatatttcagtctaggaaagattttccttctcttggaatgtgaagatctgtcgattcatctccaatcatatgcattgacatacacagcaaagaagatataggcagtaatatcaacactgctatatcatgtgtaggacatttcttatccattttttctcttttacttgcatagttgctatgtgtttctcattgtaaaaggctgccactgggtggcagaagccaagagaccttattaactaggctatatttttcttaacttgatctgaaatccacaattagaccacaatgcacctttggttgtatccataaaggatgctagcctgccttgtactaatgttttatatattaaaaaaaaaaaaaaaa

SEQ ID NO: 26549 - DNA, 2241 bp, Homo Sapiens
acgcccacctctctcctggagcgctgggccttcgctggccgcaccggcagccatgagctcggagatggagccgctgctcctggcctggagctattttaggcgcaggaagttccagctctgcgccgatctatgcacgcagatgctggagaagtccccttatgaccaggcagcttggatcttaaaagcaagagcgctaacagaaatggtatacatagatgaaattgatgtagatcaggaaggaattgcagaaatgatgctggatgaaaatgctatagctcaagttccacgccctggaacgtctttgaaactccctggaactaatcagacaggagggcctagccaggccgttaggccaatcacacaagctggaagacccattacaggtttcctcaggcccagcacgcagagtggaaggccaggcactatggaacaggctatcagaacacccagaaccgcctacacagcccgccctatcaccagctcctccggaagatttgtcaggctgggaacggcttccatgcttacaagtcctgatggaccatttataaatttatctaggctgaatttaacaaagtattcccagaaacctaagttggcaaaggctttgtttgagtatatctttcatcatgaaaatgatgttaagactattcatcttgaagatgtagttctacatcttggaatttacccattcttattgaggaataaaaatcacattgaaaaaaatgctttggatctggctgccctctccacagaacattctcagtacaaggactggtggtggaaagtacagattggaaaatgttactacaggttgggaatgtatcgtgaagcagaaaaacagtttaaatcagccctgaagcagcaggaaatggtagatacatttctgtacttggcaaaagtttatgtctcattggatcaacctgtgactgctttaaatcttttcaaacaaggcttagataagtttccaggagaagtaaccctgctctgtggaattgcaagaatctatgaggaaatgaacaatatgtcatcagcagcagaatattacaaagaagttttgaaacaagacaatactcatgtggaagccatcgcatgcattggaagcaaccacttctattctgatcagccagaaatagctctccggttttacaggcggctgctgcagatgggcatttataacggccagctttttaacaatctggggctgtgttgcttctatgcccagcagtatgatatgactctgacctcatttgaacgtgccctttctttggctgaaaatgaagaagaggcagctgatgtctggtacaacttgggacatgtagctgtgggaataggagatacaaatttggcccatcagtgcttcaggctggctctggtcaacaacaacaaccacgccgaggcctacaacaacctggctgtgctggagatgcggaagggccacgttgaacaggcaagggcactattacaaactgcatcatcattagcaccccatatgtatgaaccgcattttaattttgcaacaatctctgataagattggagatctgcagagaagctatgttgctgcgcagaagtctgaagcagcatttccagaccatgtggacacacaacatttaattaaacaattaaggcagcattttgctatgctctgattgttccttagaccacatatgttcttatgaagcagcattatgcaaggggaaaaaagcactatgtctgtgtatgtatgtatatagtgtaatacgtatattttaacaaacctgtccttgatattagttaaggtgacacataagggtgacacagaatgtgtaatgcaaatttcatagtaatagtaactttataaaataatattataaaatacaggatttaaacctttctaaatagatcctgaaactgtctctcacattatatagtagatgtttgtttataatgtttacaaaacattttggtgaatttcctcaatgttttataaatgtacattttttaagtccttaagctgactcttagccatcatgtagcttaaggagtctgaaatctgccattaaaactgcacctttaagccaggtgtggtagcatgtgcctatagtcccagctacttgggaggtggaggtgggaggattataaatagagactttccttaagactttaaaaatgtatttaaaactattttttattaaatactttgtgatttcctattaagctttaaaataaatcattgtgtaaaacaccaaaaaaaaaaaaaaaa

SEQ ID NO: 26550 - DNA, 4121 bp, Homo Sapiens
gcggccagcgcttccatccccgccccggcgggtccaagccggtgccgggcgcccaggggttgccgcgctgggcgggagggcagcgcctgagagggcggtggggtggcggggttcctgcgcgcggcccgccatggaggtggaggaggcgttcaggcggtgggggagatgggcatctaccagatgtacttgtgcttcctgctggccgtgctgctgcagctctacgtggccacggaggccatcctcattgcactggttggggccacgccatcctaccactgggacctggcagagctcctgccaaatcagagccacggtaaccagtcagctggtgaagaccaggcctttggggactggctcctgacagccaacggcagtgagatccataagcacgtgcatttcagcagcagcttcacctccatcgcctcggagtggtttttaattgccaacagatcctacaaagtcagtgcagcaagctcttttttcttcagtggtgtatttgttggagttatctcttttggtcagctttcagatcgcttcggaaggaaaaaagtctatctcacaggttttgctcttgacatcttatttgcaattgcaaatggattttccccctcatatgagttctttgcagtaactcgcttcctggtgggcatgatgaatggagggatgtcgctggtggcctttgtcttgcttaatgagtgtgtgggcaccgcctactgggcacttgcaggatcgattggcggcctcttctttgcagttggcattgcccaatatgccctgttaggatacttcatccgctcctggaggaccctagccattctggttaacctgcagggaacggtggtctttctcttatctttattcattcctgaatcacctcgttggttatactcccagggtcgactgagtgaggctgaagaggcgctgtacctcattgccaagaggaaccgcaaactcaagtgcacgttctcactaacacacccagccaacaggagctgcagggagactggaagtttcctggatctctttcgttaccgggtcctgttaggacacactttgatcctgatgttcatctggtttgtgtgcagcttggtgtattatggcctaactctgagtgcgggtgatctaggtggaagtatttatgccaacctggccctgtctggcctcatagagattcaatcttaccctctctgtatctacttgattaaccaaaaatggtttggtcggaagcgaacattatcagcatttctgtgcctaggaggactggcttgtcttattgtaatgtttcttccagaaaagaaagacacaggtgtgtttgcagtggtgaacagccattccttgtccttgctggggaagctgaccatcagtgctgcctttaacattgtttatatctacacctctgagctttaccctacagtcatcaggaatgttgggcttggaacttgttccatgttctcccgagttggtgggattattgctcccttcatcccctcactgaaatatgtgcaatggtctttaccattcattgtcttcggagccacgggtctgacctccggcctcctgagtttgttattgccggagacccttaacagtccgctgctagaaacattctccgaccttcaggtgtattcgtatcgcaggctgggagaagaagcattatctttacaggctttggacccccaacagtgtgtggacaaggagagctctttagggagtgagagtgaggaagaggaagaattttatgatgcagatgaagagactcagatgatcaagtgaagagccccagattccccctaagaagcaaaggatcgtcttttatgcctctggctaaggcaggttcttccatgactcctaagagagttgtaaaaatagaggcttggcttgaatgtacatagatggtacctggcatggactgatgtttttaggcacagaagttggagaagagatttcatgaaagacaacatcactgcattgagagaatagttgttaatttgtttagaatttaagttctactcagaatcataacatctggcagaacagcccaaacccacattccaaagtggtaggctcatttgtttctagagatttcatcatgtcgcttttccttcatcatgatctaaataaaggcagatatgtaaaatttctcaccattttggtggggtaagataagctattattaagatttaatccttataccatgttggacatttgcccctatcagttgctcctcaggaatcttctggtacaggttaacatcagcattttcattttgtatccagggaaaagcacccagaggtcatctgtgtgtcccgagaccctccagctttttcttagctgatgaaatatgagtcctcagcttggttcccagcctgctgattgacttgggctgctggtgccttgagtcccacagatgattcattaggaaaagccagatgtaccaaagcggtttactcagagtcaggggtgtagctctggctgcctgtcagctcccttggatactatattgtatgatttcttcctttcccactaatatgcacatccagaaaaatttccatctgagattctagtacttcaaaatcatgcatagtaaatgagaaagctttaagtagagggcagttaaacagtgacatgttgagcacctggaggaaaaaaaaggtgcagtttttaataagagagaaaatgaaattatctttgataaatttttgtttgttttgctttcagcattgtgccatgagggatttggacaatatttaagaacttcttgtcctagatcagccccaatctgtttaatcaaaatggaaggttcagtaatttcatgggaaaccttggtttttcattaagtgctaccaactttcaagtgaatcttgtatttgatttcctaaaatcatgtcttgaaaacatgttttctcatgaaacttgaatactatctcaaataggaatataaacctggagtcaacaagcttaggcagcattgatttaggtcactttcccagtgaggaaaatttctgtgttttcagaatttccatttctactaacctcttggagaaaaagaaattgaattagaggtaaatagaagacgtcactgtggctgcttctggaagtgctggaagcatcaccccaattggctccaaatactgtcatgttttcttgcacactgacttctggtttccactgtatcagtatgtacctttgtaattgttatttttatgtcttttatgcccttgattattagttgggctcttcataaacagaggccatctctactactgtttatttttccctgctgtgcccagaacattggcgtagacacagtaagaacctagtaaatattactgtttctagccatcagggagattgtggaactcctcccagtataatttttacaaactccaagcaaatctgacccaaactcccaaattgtcaagtcctgcttaactttctctggaaaatagaccccttctcaacatcagaataggaagagaggaagaacttacaaagacacttaaaagttattcttaaatggtggttgggcatttaaaacagtgaactaacatatatataatttttgattagttggagctttctttgtattatgagagtaatatatctcattacagaaaatttggaaactataaatttagaaacgtatcacccatacgtccaacatcgaaagaaaaccagtgttatgactttgttccatttgaagactaattgggagtccatctctctattggcactgggttcgattgcccctggctaatagagttcaattagttctatacctgggtttcctttcttagctatggggtggaagataggagggggagatctacaatttgaatatgtgttacttaataaggctaggctggccatcagttgcttatttcagatgtgtcactaaattttccttctagatggtccttgagcaaaacttaataattactgttttttatttccactgcctttataaaatcaaaattttctccttttgataaaaactgttgaatactattgatgtagagaatgtgtatatgtgtatatttgcattgattaaattattggaaaacttttcaaaaaaaaaaaaaaaaaaaaaaaaaaaaaaaaaaaagaaaaaaaaaaaaaaa

SEQ ID NO: 26551 - DNA, 2363 bp, Homo Sapiens
aagcgatgagtcctcggctcttcctcctccttctccgggacccgctctctgcctccctctccaacgcccggatgatctgagccgcgagggcgccgacagccgggggcccggacgcagcccggctcctcccctcctccgccccttccccagcctgacctggcccgccgctgcagcggtgacccctcccccggctgccgccgtcgccgccgcggtgaccccctccccggctgccgccgccgccgcctcggccgaccagggacctgcccgcctgcggctgctccggacctagaggatcaagacataatgggagcatttttagacaagccaaagatggaaaagcataatgcccaggggcagggtaatgggttgcgatatgggctaagcagcatgcaaggctggcgtgttgaaatggaggatgcacatacggctgtgatcggtttgccaagtggacttgaatcgtggtcattctttgctgtgtatgatgggcatgctggttctcaggttgccaaatactgctgtgagcatttgttagatcacatcaccaataaccaggattttaaagggtctgcaggagcaccttctgtggaaaatgtaaagaatggaatcagaacaggttttctggagattgatgaacacatgagagttatgtcagagaagaaacatggtgcagatagaagtgggtcaacagctgtaggtgtcttaatttctccccaacatacttatttcattaactgtggagactcaagaggtttactttgtaggaacaggaaagttcatttcttcacacaagatcacaaaccaagtaatccgctggagaaagaacgaattcagaatgcaggtggctctgtaatgattcagcgtgtgaatggctctctggctgtatcgagggcccttggggattttgattacaaatgtgtccatggaaaaggtcctactgagcagcttgtctcaccagagcctgaagtccatgatattgaaagatctgaagaagatgatcagttcattatccttgcatgtgatggtatctgggatgttatgggaaatgaagagctctgtgattttgtaagatccagacttgaagtcactgatgaccttgagaaagtttgcaatgaagtagtcgacacctgtttgtataagggaagtcgagacaacatgagtgtgattttgatctgttttccaaatgcacccaaagtatcgccagaagcagtgaagaaggaggcagagttggacaagtacctggaatgcagagtagaagaaatcataaagaagcagggggaaggcgtccccgacttagtccatgtgatgcgcacattagcgagtgagaacatccccagcctcccaccagggggtgaattggcaagcaagaggaatgttattgaagccgtttacaatagactgaatccttacaaaaatgacgacactgactctacatcaacagatgatatgtggtaaaactgctcatctagccatggagtttaccttcacctccaaaggagagtacagctcaactttgttgaaacttttaacatccatcctcaactttaaggaaggggatatgacatgggtgagaatgattacatcagagaacttcagcagtacaacagctagcccagaactgatttttttttttttttttttgtaaatttgagacttatgtaagcgtgatttcaaaccataattcgtgttgtaaatcagactccagcaatttttgttgtatgattttgtttttttgtaaagtgtaattgtccttgtacaaaatgctcatatttaattatgaactgctttaaatcactatcaaagttacaagaaatgtttggcttattgtgtgatgcaacagatatatagccctttcaagtcatgttgtgtttggacttggggttggaacagggagagcagcagccatgtcagctacacgctcaaatgtgcagatgattatggaaaataacctcaaaatcttacaaagctgaacatccaaggagttattgaaaactatcttaaatgttcttggtaggggagttggcattgttgataaagccagtcccttcatttaactgtctttcaggatgttccttcgttgtttccatgagtattgcaggtaataatacagtgtattcataagaatctcaatcttggggctaaatgccttgtttctttgcacctcttttcaagtccttacatttaattactaattgataagcagcagcttcctacatatagtaggaaactgccacatttttgctatcatgattggctgggcctgctgctgttcctagtaagatattctgaattccattttatcaataaagcttgatttaacaaacaagaaaaaaaaaaaaaaaaaaaaaaaaaaaaaaaaaaaaaaa

SEQ ID NO: 26552 - DNA, 2081 bp, Homo Sapiens
agctggggccacgtggccatgagaatgaccagctaggcttccctggaggccaggcctccctggactgggccaggtgcttcctgccagcaaagatgagtaatgtctcagggatcctggagacagccggcgtccccctggtgtcagtgaactggccgcagcccagccccccaccggctgtgccagctgggccgcagatggaccacatggggaacagctcccagggggccccctggctcttcctcacctccgcactggcccgaggcgtctcggggatcttcgtgtggactgccctggtgctcacctgccaccagatctatctgcacctgcgctcctacaccgtgccacaggagcaacgttacatcatccgcctgctcctcatcgtgcccatctacgccttcgactcctggctcagcctcctcctcctcggagaccaccagtactacgtctacttcgactctgtgcgggactgctacgaagcctttgtcatttacagcttcctgagcctgtgtttccagtacctgggaggcgagggcgccatcatggctgagattcgtggaaagcccatcaagtccagctgcttgtacggcacctgctgcctccggggcatgacctactccatcgggttcctgcgcttctgtaagcaggccactctgcagttctgcctggtgaagcccgtcatggccgtcaccaccatcatcctccaggcatttggcaaataccacgacggggacttcaatgtccgcagcggctacctctatgtgaccctcatctacaacgcctccgtcagcctcgccctctacgccctgttcctcttctacttcaccaccagggagctcctgcggcccttccagcccgtcctcaagttcctcaccatcaaagccgtcatcttcctgtcgttctggcaagggctgctgctggccatcctggagcggtgcggggtcatcccggaggtggagaccagcggcgggaacaagctgggggctggcacgctggccgccggctaccagaacttcatcatctgcgtggagatgctgttcgcctccgtggccctgcgttatgccttcccctgccaggtgtacgcagagaagaaggagaattcaccagcccccccggcacccatgcagagcatctccagcggcatcagggagacagtgagcccccaggacatcgtgcaggacgccatccacaacttctcccccgcctaccagcactacacgcagcaggccacgcacgaggcgcccaggcccggcacccaccccggcggcggcggctccggcgggagcaggaagagccggagcctggagaagcggatgctgatcccctcggaggacctgtaggggggcctgggctgccagtgctgtagggacccaggctgcccaggcctctggggaagaacagggtccccccacccaccaactcctgccaaaggtggggcctctcctgagagcccacctgtgaggccctcggagcccacttcccatcctccctccagccagggggtcagggcacctgatggccctggcaggcacccaggtgggcccgccaccgcaggagagggcacctgagccaatcggaagagcctggggaccccctgggatcacccagccatcagccccaggagccactgtggggcggagagtgagtgtggctgcggggccttggctgcacggaccccatgggagctgcgagtgggtcagactccctggttcaggagacagacagcggacggatcccaggctgggcagctggagggaggggcgccggggcgctgggcagccgggctctgacacagtcagcagctccgggcgccgcaggccggcggggtccacacaggctggccggggctgggcctccttggagcctgctacggccctcgtgggcacgtggagaagggcccacgtgtctccacacgccagccacaggggagccctggccaggcgcccagccaggggagcgtgtgcctgggatgggtcacagaaccagcgggcacctgtgaggctggccagcaccgtggggctgtgggaatcgctcttatttatatttaaacaccttggattttcaaaaaaaaaaaaaaaaaaaaa

SEQ ID NO: 26553 - DNA, 2436 bp, Homo Sapiens
gctttggtctcggtgcccagggcccaggccgtgtggttgggaagactggaccctgagcagcttcttgggccctggtacgtgcttgcggtggcctcccgggaaaagggctttgccatggagaaggacatgaagaacgtcgtgggggtggtggtgaccctcactccagaaaacaacctgcggacgctgtcctctcagcacgggctgggagggtgtgaccagagtgtcatggacctgataaagcgaaactccggatgggtgtttgagaatccctcaataggcgtgctggagctctgggtgctggccaccaacttcagagactatgccatcatcttcactcagctggagttcggggacgagcccttcaacaccgtggagctgtacagtctgacggagacagccagccaggaggccatggggctcttcaccaagtggagcaggagcctgggcttcctgtcacagtagcaggcccagctgcagaaggacctcacctgtgctcacaagatccttctggctggcggctccagagaggtttaaacactggccttggcggctgagggaggagggtgaagatgaggcaggggctgctggtgctggcgctggtgctggtgctggtgctagtgctggctgcagggtcccaggtgcaggagtggtaccccagggagtcccacgccctcaactggaacaagttttcagggttctggtacattctggccactgccactgatgcccagggattcttgccggccagggacaagaggaagctgggggcgtccgtggtaaaggtgaacaaagtgggccagctccgcgtgctcctcgccttcagacgtgaaaggggtgaaggccttccacgtgctgtccactgactacagctacggcttggtctacctccgcctggggcgtgcaacccaaaactacaagaacctgctgctcttccataggcagaatgtttcgagcttccagagtctgaaggaattcatggacgcttgtgacattctggggctctccaaggccgccgtcatcctcccgaaagacgcgtcccgtacacacaccatcctgccatgagagccagcgtcctctgctcttccctttcgacgcgtggtcctcccagacccgaggagcgttgttccagatgtcaagtggagaccacggcttgttgagaggtgtttggtgactctaggtcattgacagtgtgaaaatcaagtggctcaagggatcctttatgatcacagaaagatgggggaaggaggatacaggctgaccgggtggcgagatgtcagccaggccccttccccactgtcttctggagcacactgcaggctgctgctattccctgtctgctgtgaaacagaccacaggccggcccaacgcagtcctcgccgtgtgccttgcctctgccctccacgccgccgccaccctccgcgttcctttacatcctgcactttctcaggaagccgttcgcatatccacccaacatggaggagcccccatgacgtgccaggcagcgtgctggcccctgcggctgcgttagggaacagaatcggcaaacgcagtcccagagttgatgcctgatcaggagaagccaacttcagcagtgtggtcacctggatactcgagtatagaccctagatcacctggatactcgagtatagaccctagaagtgtatctaggcgcggccagggccccacaacagcaggtctgactcattccatccagggcagcatcagggagagcttcctgggggaagtggcatttgggctgacctgggaagggtggtgggtgttaagtcagtttgggtggggctggaggagcaggggtgcatccccagaacaggatgtgacttctgaaaagacatcagagtagagaaaatggtttctcaaggagattggggacgccagtatcagaatggcggcggggagagccacagaggagcaggagggggcccaccagaccacggcacctcgaaggctgcggtgaaggcttaggtctcactcaaggggtgatgacgggaggttgtctgagatgaaccccccaactgaatgaatggaccttcttctggccaaggggatcccaaagaaaccctgaacccgagtcctcagccatgacggggtaaggggtcagcccctccttctggcccgagaagagatcagagattggttctgggcagtccatggagaatttgctcagctggaccagtacacgcttctcctttcatgaatattcatgactcctcctgaagcttattgaacatctctatttggccatctccttcagcgtaaattcctgtcccctctgtccctcccctccaagtgtctgttccaggcttctggcctgaggctacgcttcctagcctgtcagaagggctgccctgctggctgcaatctcttatgagaaataaagctctcctgtgtgcaaaaaagtaaaaaaaaaaaaaaaaa

SEQ ID NO: 26554 - DNA, 2087 bp, Homo Sapiens
tagcagcgaatatactttacaccaaatctcagaagattcagaacttagatgagtggggcccaggacaggaaccctggagccttggaaggaggggagccccatctccccagaagagcagtgaccccagcagagaggggcctggtgtatcactggaggaaatagcctgccaaggaatacacgtcttcagaagaaattctgtgtggcttcaagagactgatcaaattgtgagaggaaaacagcctacccggtcctcttttcttcaatacaaaatgagataataggggttggaaggaaaaccttcaagacctatggaagtcagttgcagccagctcatcacatagaggtgcaggtgaggtgtattttcatcacggtggaaaattctggctgcttcatctccatctctagagccaatattggagcttttcaataaaagctatggcctcaaccaccagcaccaagaagatgatggaggaagccacctgctccatctgcctgagcctgatcacgaacccagtaagcatcaactgtggacacagctactgccacttgtgtataacagacttctttaaaaacccaagccaaaagcaactgaggcaggagacattctgctgtccccagtgtcgggctccatttcatatggatagcctccgacccaacaagcagctgggaagcctcattgaagccctcaaagagacggatcaagaaatgtcatgtgaggaacacggagagcagttccacctgttctgcgaagacgaggggcagctcatctgctggcgctgtgagcgggcaccacagcacaaagggcacaccacagctcttgttgaagacgtatgccagggctacaaggaaaagctccagaaagctgtgacaaaactgaagcaacttgaagacagatgtacggagcagaagctgtccacagcaatgcgaataactaaatggaaagagaaggtacagattcagagacaaaaaatccggtctgactttaagaatctccagtgtttcctacatgaggaagagaagtcttatctctggaggctggagaaagaagaacaacagactctgagtagactgagggactatgaggctggtctggggctgaagagcaatgaactcaagagccacatcctggaactggaggaaaaatgtcagggctcagcccagaaattgctgcagaatgtgaatgacactttgagcaggagttgggctgtgaagctggaaacatcagaggctgtctccttggaacttcatactatgtgcaatgtttccaagctttacttcgatgtgaagaaaatgttaaggagtcatcaagttagtgtgactctggatccagatacagctcatcacgaactaattctctctgaggatcggagacaagtgactcgtggatacacccaggagaatcaggacacatcttccaggagatttactgccttcccctgtgtcttgggttgtgaaggcttcacctcaggaagacgttactttgaagtggatgttggcgaaggaaccggatgggatttaggagtttgtatggaaaatgtgcagaggggcactggcatgaagcaagagcctcagtctggattctggaccctcaggctgtgcaaaaagaaaggctatgtagcacttacttctcccccaacttcccttcatctgcatgagcagcccctgcttgtgggaatttttctggactatgaggccggagttgtatccttttataacgggaatactggctgccacatctttactttcccgaaggcttccttctctgatactctccggccctatttccaggtttatcaatattctcctttgtttctgcctcccccaggtgactaaggaaaagagcagaagctccttggtttaaccagcacagagaaaataatataaatcccataagggcagacgtttggtctgttttcttcgctgtcatttccttagtagttagactagtgctgagattttagtggatatataattgatttatgttgaatatatggacttagcaactaaaaataccacagatggttaacctggactggggcaaagcaagataatagtgatgatcgtaaaaaaaaaaaaaaaaaaaaaaa

SEQ ID NO: 26555 - DNA, 1809 bp, Homo Sapiens
ctcaaactgagacgacagtgcagaacaaaacaaaagtgagttagggtcgttaaaattgaagtgttcttcttagggcaaacatgttgactccgagtattgtgtatgaatgtgctacgagaaacttccaaagagcaccattcacaatttggcattttcaaagaatgttccagccctcaaaggggcaactctttaaagtccttgttggcttttatccaaaccttgtagaaattgggaaagctgatagaggtaaggaagacgagtgaaaaggacaagaaggccaaacaccagccaaaaagaaactaggaaaaaaagattttctttgctaatatagatgtaaaagtaacatcagacatctttgaaaattagcctctaaactcttaatacatacgttctgtgtgtctctacctggcgtctttaagaatatcctctctgggctctgaaattttaggagtgattcttatccactccaagttgtaagtatttgtagaaatttgtgcaaacaaacaaaaactatcaaatgaaaagaaaatgtactcaacctaacttatagttagcagctggaattctcaactcttccctgccagcactataccacagtgtggaagaaattagtcaaatgcttgttttcctgcttctcttttcaactgttactgtgctttgtttgaaagtagttttctctctcaaagccgttgcttatatcgttaagaatgaaggtttgtgtttaaaatttattgcattgcaaagggtagtttcactgaagtcatgcaccattaaataagatgaaatatttgtatttattgtcctacttcctaagccgtaacttcttttcctctgtgaatttgcattgagtcactcatgctacactacatcgctttagtatttgagatggcatttatgtttcctctcgtttatcatgaaatggggtcagattccatcagattccacctctgtcaggtggactcttgtctgccttccatgatgagattttttttctccttcccctttctttaagagaggctgacagatctaggtgtcaatcaattggaaaccagtctctgattttttttcattagttattttctatcattagtttcactgtgtaaattagatatcaactgcacttctttaaaaaaaaatacatctccctattacctccttgaaagatttacttctgtaggcctttttcaataggctcatgactgcagacaaggaaaaaaaaagtaaaaacaaaaacagtatgtgcctgaaaatgacaaaaaaaaaatttgtaacatttaaaaaagaaacctgaatagcctttaattctttaataatacacttaaattttatgtaaatcggttttcgccacgtgtgtttgttcacattctaaatgacttaatgggattctcacggtctgtgtctttgtgtcacgtgtataaaatgggcttgtgatgtaagcgtttcatctggtcagtggttcctttgatattgtactgctgctgggagtgggctgtggaacctgccttcgggtaactgggttcctcttgggtagattggagagatgggggtgggcgtgggcaaattctcacacatgttttcttaacctatttgcagaaactttcaaaaggcatttgattaaacctcttggcagtacagtattcttgtatttgttaacgtctgtgtttaggtactggtacctttttgttttaaaatgttctaagtgttggctttaaagtgaatttatctttagtatgatagttatatgaaaattataggatttgtgtgcagagaatttttttataaagtgctttgtaaaaaaaaaaaaaaaaa

SEQ ID NO: 26556 - DNA, 1186 bp, Homo Sapiens
ggggctgtgtttccatctcaaagaaggcatttgcagggtcctcttctgggcctgaccaaacagccaactagcccctggggtggccaccagtatgacagtattatacgctggcaacacagaggcagcccgcacacctgcgcctgggtgttgagagccatcctgcaagtctttttcaacagaacttcacagactgttagagctgctgagaagaatttgctttccgaattcagcctggaaggcgcccagggacagctgtactgagtctagatgactctgacccccgccccaggtcaaggccagcagagcagtcagtgcctctggagaaggcccttgctctcccacctggcccagactccgaggagcctgggtctggagctgccggtctggttcttccctttagagcccggatctgccacctgcggcccctcccaagccgtgaaccagctcatgagagatgaacactgtgggatccactcaggaaggctcggggctggcacaaaggaccacccagcattgccctgtgccacccagcactcagtggacattctggggacctgccttcagccttttcctgccctgtgcctgacatcagcaccctggctggtcagaatgccgccctcccagaggagcagccgagagatcccctgaaggctggaggcattctgctcaggacccctatcccagctcacagtgcccaaccatctcaccaggagaaagagccacatccccacgttaggaccacggagactgaccaccaccctgaccccccaaacccacgcaccagacgcttgcaggacaggcgccgcgcagcgggcaggggcttgcccggccgaccctcccctccccacctcccccactgcgcgttactccaggatatgccgagtgcacgtataaggtcatcttcgtcgtccccgtggacctcccccttcctctgcacgtcgtccaacgtgggactggcgtgtcgggcttccctgggaggatctggaggttgttctctgcagagaaccagcctggctcctggcgcgcacctctgctcccttctcctcactacccacccacgcatgtaccgggaaaaaaactactatgcccttctagaccatgttctgagaaaagatcgaaaatatttaacaagagataataataaatctgatgccggtcaaaaaaaaaaaaaaaaaaaaaaaaaaaa

SEQ ID NO: 26557 - DNA, 2381 bp, Homo Sapiens
ccggaatagggggcgggggcgttggtcatgtttcccttcgggccccacagcccgggcggggacgagacggctggagccgaggagccgccgcctctcggagggccggcggcagcttccagaccgccctctccagctccgcgaccggcgtctccgcagcgaggagctgacgcggcctctcccccgccggtcgccgggagccctcgcctcccgggcggccccgcggtgtccccagccgagcgcgccggagagttcgcggctcccggagctctggagttgtccgccgccaccgcgtcggcgtcgcaggcaaagctgtcaccctcctcctcgccgcgcagacgctcgaggccggactggagggcgggcgggcggagccggcagggcctcggcgcaggcctgggcggccccggggccagactgttcgggtggctgagagagcgaagcctcggtcgcgggctgttcgtggacccggctcgggacaatttccgcacgatgactaacctgtatgggtccatccatcccgcagactcggtgtacctcagcacccgcacccacggtgctgtcttcaacctcgagtactctccggacgggtcagtgctgacagtcgcttgtgaacagactgaagttctgctttttgaccctatatcttcaaagcacataaaaaccctttctgaagcacatgaagattgtgtgaataatatcagatttcttgataaccggctctttgctacctcctctgatgataccacaatagcactatgggatctgagaaaattgaacaccaaagtatgcactttacatggtcacactagctgggtgaagaacatcgaatatgatactaatacaagactcttagtaacatcaggatttgatggaaatgtcattatttgggacactaacaggtgcacagaagatgggtgtccacataagaaattctttcatacacgttttctcatgagaatgagattaacaccagattgttccaaaatgttgatctcaacatcctctggatacctcctgatcttgcatgagctggacttaactaagtctttagaagtaggcagctatcccattttgagagcaagaagaactacttcaagttcagatttgaccactacatcaagttcttctggttctagagtttctggttcaccttgtcatcacaatgattcaaattcaactgagaaacacatgtctcgagcctctcaacgagaaggagtttcaccacgaaatagtcttgaagtgttaacccctgaagttcctggtgagagagatcggggaaactgtatcacttccttacagctgcatcctaagggctgggccacccttcttcggtgctcaagcaacactgatgatcaggagtggacctgtgtctatgaattccaggaaggagctccagtgcgaccagtctcccctcgatgttccctgcggttgactcattacattgaggaagcaaatgtgggcaggggctacatcaaagaactttgtttcagccctgatggacgaatgatttcttccccacacggctatgggattcgcttgttgggatttgacaaacagtgcagtgagcttgttgactgtttacccaaagaagccagtcccctgcgggtgattcgttctctgtactctcataatgacgtggttctgacaacaaagttctctcccacacactgtcagatcgcctcagggtgccttagtggacgggtctctttgtatcagccaaagttttaggcacaacttacatcaaatgaggaactcttctggtgtttggcttataaattacttcaatttaggtgaagtattttcttttttagaagatcttataagtttggatcaagatcttggttcttatgggtcagtggacatatatatgtgtgacctgagtacttggccttccagcgtcatccgggcatctccatttcaaccacgcagcctgttctgtcagcattcctttgctcctgtctgtgccgctgagcttgggttttcctggtcattttgcatgtggctcttgttctccccatccctgtctccaccattcctctctgcctccgtcctcgtttttgatttttggtatgaattttatggacatttggcaggagccttggttgggatgagaaaacccatggcactagtgttaaataaaactcagaagttggatgttggcacactggtgattgaaaaagttcatcttcatttatcagtatacttggcctttaaagttgctgtcagacattgagcacagtaatagcattctcataacttttagaaactcttgcaacaagatagctttttaaagtttcctgttaaaatgacacctttatatctcatgtgggattttgttgtgaaattctagaaaaatattataaccaaaaaaaaaaaaaaaa

SEQ ID NO: 26558 - DNA, 1869 bp, Homo Sapiens
ggggaggggggtccgacccagcgcggacctcgccggagacaccccgcccgccccggcccggtccgcgggggcatgcgaggcaggggagggggcgcgcccggggctcccaccgacctcgcccgggcgcaagggccggagcccccgggttcccgagcctcggagccgccgcggctgtgctgccgccctgtggccgccgcccgcactgcgcctcgggcccggccgcgctccagcgcgtgcaccccgcactccgccctgccccggacctccgcgggccccgagtcttcctgccagcccctcggccccagggaggcggggcgggcgccggggtagacggcggggccatgtgggctttgctagctcgggagcggggcggggtgggaggctgcggggagccgggccccaatgcccggaggtcaggggcgccctggggcagaggaagcggcaggtaccccttagcgactcgtggcttctgcagcccctagaaggacccccagacgagggtctggaaaagtgaccccttcatagtcctaaacaagcagttggcaatggtgtgccgttctccacgcggtccgatgggaaagggaggccctgagccgcaacgagtaagtagatagtcagcaggaccacgtggacgcgaccaaccacaggtcacacttcggacgggagcaggacccggcgcccatccctcaggaccgccgagagccgggccctctgggccgcaggtgccgctaccttagccatggagccgcagcagaggaggccggcgctggaattgcaggctcgtcctggctgccccgccgcactcctctcacggaagtggctgtgccggaggcgcgagaacagaactctgttcagacgctcgcgtgctcggagaatggagcctggagacctggttcacacccgctatgtgtttaaatggataaaacgctcctcaggtctgtgagcctgcaaacaaggtccccactgccatctgctggccccacagacaagaacccacacaggaatgaagcccaaaatatcccataaactttccaaagagaaatgacaaaactgaaatagtagtggtgtcaaaacacagtgtacttctcagcccaatgaagctgggatgggtggcccagggagccccagacttcatggataggcttttcgttcacatggctcaaaatggcaccccagatccagccatcacatctgcactccagccagcagaaaggaggcagggccctcttcttcaaggatgcctcccaaaagttgtgttgccacagctgctcacatcccattggctagaacgtagtcatacgacccacctcactgcaagggaggctgggaaatgtagtctttaatctgtgaaatgtgcccgcttaaaacggagccatggaggaagaaggactagcgatctggggggtaggggttgggtgggcgaaaggctgtgcctccctcggtggcgtcaacatcctggccatgttgtcacatgcacttgctggcaaaattcccaagccatgcgctcacagtttgtgcagtgatgagtgtggcaaacacagctcagttaaaaataaacatcattttatagattagctgaagaatacaatgtcccacgagactatgtggccatcaggaaattaacttttctgacctaatggcccaggaagcactgcgggcagcgtctcgccccgtgtaacgcagcacccgcagaagtgcccgggatcagcctttgcctcggcgggatcctggttcctggttcttccaagggcatggcgaggtccccgctcccttatcttgaggaaagtaataagtaacccagctctttcaactcccaaggttactttgtcaataaagtgcgccttctcaagtcttaaaaaaaaaaaaaaa

SEQ ID NO: 26559 - DNA, 1302 bp, Homo Sapiens
attgggaggagggttaacaccagggccagaaaccacgtgggcagggtggccctgcactgggctgcaggtgcagggcacgagcaggctgtgcgtctgcttctggagcacgaggctgctgtggacgaggaggatgcggtaggggccctcacagaggaggggaacactgcccttcatctggctgctggtcggggccatatggctgtgctgcagcgacttgtggacatcgggctggacctggaggagcagaatgcggaaggtctgactgccctgcattcggctgctggaggatcccaccctgactgtgtgcagctcctcctcagggctgggagcaccgtgaatgccctcacccaggtagccaggccctcccaagactgcggtcggctcttggctgctgagccatagccatgtcggcagtaacggccacagggattcctgaaccctgagtgaatagaggcttcgaggcagcagacaaggttctgatcttggcttctccactgctgagccctgtgacctggagcaagttacttaacctctctgagccttgtttcccaactataaagtgcagtgacatttacttttttacattgttgtgaggattaaatacctaacacagtgcccaggacataatagggcccaacacctcaatacctgttagtgtttttttgttttaatttttttgagatgggtcttactctgtcgcccaggctgaggtgcaatggtgcgatcttggctcactgtagcctccgcctcctgggttcaagcagttttcctgactcagcctcccaagaggctgggactacaggtgtgtgccactacccccggctcatttttgtattttttgggtagagacagggtttcaccatgttggccaggctggtcttgaactcctgacctcaagtgatccacctgcctcagccttccaaagtgttgggattataggcgggagccattgcacctggccctgttagtgtcttctatttgttgagctcttgatcgttcacaaagccccttcataactgttaccccagaaaaattccacccattttgcagatgagaaaactggagctttgagggcactttctcagggtcacaagctagtacgaggcaaagctgagtctcaaaagccttttcccctgactccagagctcccacccactgatgaagcttttcccctgacagagctggggcttgaggtgtgaccctggatgaacctcttctctctctccccgttgtactcatcaattctgccagtaaaaattctcctctatgacctggaaaaaaaaaaaaaaaaaaaaaaaaaaa

SEQ ID NO: 26560 - DNA, 963 bp, Homo Sapiens
gaaggatggccgcctcatgcgggggctgcagcgaggggctgcctcctttggctcatccacagcctctgccgccctggaactcagcaaccggttggtacaggctatccaggccacagctgagaccgtgtatgacatcctgtccccggcagcccccgtctcccgctccctgcaggataagcgctctgcgcggaggctgcgcaggggccagcagcctgccgacctgcgggagggtgtggccaaggcctacgacacagtgcgagagggcatcttggatacagctcagaccatctgtgacgtggcatcgcggggccatgagcagaaggggctgacgggcgccgtggggggcgtgatccgccagctgcccccgactgtggtgaagccgctcatcctggccacggaggccacgtccagcctgctcgggggcatgcgcaaccagattgtccccgacgcccacaaggaccacgccctcaagtggcgctcggacagtgcccaagactgagcctggggtgcccggcacccagagggtgctgcccaccatgctcctgagcctcccaagagctgcagcccacgggcccggcccggcctggcccttcaggggatggccactgtgaaggacgccttcccagcctgcccgttgccaatctgctgtgagaggggggcctccctgccttggggccttagccctggctctgcacttttcctccggggagaaaggacactgcccctcccccgacctgggcccacactgctgccttctcccaggacggaggcttttggaccctcggaccccatcccactcagccaagtgtctttctgtgtctggggggaggaggggatgatatccgtgtggttcgatgtattatttttaagctccgtgagtgcgtgggtcagtgtctgcatgaagtggaataaactgcccaccgccaaaaaaaaaaaaaaaaaaaaaaaaaaaaaaaaaaaaaa

SEQ ID NO: 26561 - DNA, 2215 bp, Homo Sapiens
agcggagaaaaatgaagccgacccggccctgccccgagggacgctccaagagggcggaggtgcagggagggccccgccacaattcgcggtaacgcaagccaggctcgggcggaagggcggccggagccgatcaaaggctggctccgggcaggggcagcgagggagcgagggggagctctccgcaggccggtgtcccggaggaggcataattggagcagggcttccaaggtcacggagagacgccgggcaagacctcttaaggatcctcttccgggcttgaaaggcaggcgtcctcccgaaccgcgcgacccagccaagaagagccggggcggggccggggccggggccgggggccgactcgggaatcttcggccgaggctcggcaatccccccatcctccgtccggggcctccagcccggggccgatccggaaacagccgagcggatccggaaacagccgagaggacccggaagcggtgcgctccgtcaccagggagtgcgggaatccgccgtttgcgctgaggcaatggcggcagctgcgccggtggccgcggacgacgatgagcggcggcggcggccgggggctgcactggaggactcccggtcccaggaaggggcaaatggtgaggccgagtcaggtgagctcagccggcttcgggctgagctggcaggcgccctggcagaaatggaaaccatgaaggctgtggcagaggtgagcgagagcacgaaggccgaggctgtggctgcggtgcagcggcagtgccaagaggaggtggcctcgctgcaggccatcctgaaagactccatcagcagctatgaagcccagatcaccgccctgaagcaggagcgacagcagcagcagcaggactgtgaggagaaggagcgggagctgggccgcctgaagcagctgctgtcccgggcctaccccctggactccctggagaagcagatggaaaaggcccacgaggactcggagaagctgcgggagatcgtactgcccatggaaaaggagatcgaggagctgaaggcgaagctgctgagggccgaggagctgattcaggagatccagaggcgtccccggcatgccccttccctgcacggctccacggagttgctgcccctgtcccgggatccatcgcccccgctggagcctctggaggagctgagcggagatgggggtccagccgctgaggccttcgctcacaactgcgatgacagcgcctccatctcctccttctcccttggcggtggggtcggcagcagctcctccctgccccaaagccgccagggcctgagccctgaacaggaagagacggcctcgctggtgtctacgggcaccctggttcccgagggcatctacctgccccctcctggctaccagctcgtcccagacactcagtgggagcagctgcagacagagggccgacagctgcagaaggacctggagagcgtcagtcgcgagcgggacgagctccaagagggcctgagacggagcaatgaggactgtgccaagcagatgcaggtgctcctggcccaggtccagaactcagagcagctgctgcggaccctgcaagggaccgtgagccaggcccaggagcgggtgcagccgcagatggtgagtacctgggggccctagggcaggagggcgaggagtccagcaggaatcagttgcacatggtggaagggggcacgtgggaagtcaaggaacctgtcctgtccccagctgctcaggccacaccctggaacaggtgccaggtaggtaagagggtttggggcagctggtgccgtggccagaacagggcccctgcagccacacagagctgtttgatcttgagctaatcccagactcccagcctctgcctcaccatctataaaactgacataatgggccctagtttgcagagtcatgaggattaaaatcaaatctgactgggcgaggtgactcatacctgtaatcctagcactttgggaggcctgggcggttggatcacctgaggtcaggagttcgagcctggccaacacggggaaaccccgtctctactaagaatacagaaattagccgggcatggtggtgggcgcctgtaatcccagctacttggctgggcaggataatcgcttgaacccgggggacagaggttgtagtgagccgagatcgcgccattgcacttcagcctgggtgaaagcaaaactgtctcaaagaaaaaaaaaaaaaaaa

SEQ ID NO: 26562 - DNA, 1781 bp, Homo Sapiens
gccgggcgcaatggcggatacgctggagtcctcgctggaggacccactgcggagctttgtgcgagttttggagaagcgggatggtacagtgctacgactacagcagtatagctccggtggcgtgggttgcgttgtgtgggacgctgccattgtcctttctaaatacctggaaacgcccgagttttctggcgacggggcccacgcgctgagccggcggtcggtgctggagctgggttcgggcaccggggccgtggggctcatggctgctaccctcggggctgatgttgtagtcaccgatcttgaggaattgcaagacttgctgaagatgaatattaatatgaacaagcatcttgtcactggttctgttcaagccaaggggggaagaaatagaaggctttccttctccacccgacttcatactgatggccgactgcatatactatgaagagtctttggagccattgctgaaaactctaaaagatatcagcggatttgaaacttgtattatatgttgttatgaacaacgaacaatggggaaaaatccagaaattgagaaaaaatattttgagctccttcagctagattttgattttgaaaaaattcctttgggaaaacatgatgaagagtatcgaagtgaagatattcatattatatacatcagaaagaaaaaatcgaaatttccatcgtgaagcctttaatcatcttacccaaggctctaacaacctgggtaaactaaagatgtgaatagagcatgtgaatacagcatgggaagattgtgttcacagatttttttttccggcacgtccttagagatccgatgtatagatgatgaccaccaggggctgtctgcaatacgaaaaattcctgcttgcctgcctgcctgccaatggccctgaatccagcttaggttacttagttcagcatcaagttcttcttaaatgttgggaatcagttattcaaataaaaattggtattgaggcgaggctgaaatctgccaaaaacagccaacatgatttgactggaccttttacaggaagctagagataaatttctgaagagaactatctgctattatataataatgttttaaattcaaactagtaaattttagtttgtcttcagagtttaaaaggttttcattttgtacataattatacaatatttatcatttgtattttccacttcatttcttttaaaatatctttaatactgaaatgttcttttaattttaaaaagaactgagatattgtcttgtatacttatattggccaaagtttttcttttcttccaccatacatatctatgtgatttaatcagtaaattgtactgtaatgagttgctaagaagacaaatcagaagattggaggaacaaaagatatctttacagatttttcatttgagcatggagtgagaatagaaagaccagtttcaggcttatgcacttacgtggctcatgcactttatgtatatgttccaggaaaatctggcttaaaaatactggtattgtttacatgaagcagtgaaaggtttttgaataactacaaatgtagttctatatgtatataccaaatgaatttctgttctgtgtctctctgttttatgttatgaagccattcgctcatatacaataatctgtcaaggactttaatcatacttgttccaaagagtagtaaccggatggaattctggtatttacaggcattggtgctagatggtacattttatgtgttaaaataaacattgtttttgagaccttgtgactgtgaaaaaaaaaaaaaaaa

SEQ ID NO: 26563 - DNA, 1377 bp, Homo Sapiens
agcgggactccgggccccggcggcggcccatggggcgggaggcgtgaggccgctgcctgtccggggctcggggggtggggggagcggggcggggagatggataaactgaccatcatctcaggatgtctctttctggccgccgatatcttcgccatcgccagcatcgccaacccggactggatcaacaccggggagtctgcggtctcaccttaatccagctcagttctgtgtacaaaccatggaggttattcattcaggtgaaataaatgggttacttctgccagattaatctgggaagaaacagagcactcactgtgggcctcgtgcgacagtgtcaaacaatccatggacgagaccggacgtgcatccctccccggcttcccccggagtgggtcaccacactgttttttatcatcatgggaatcatttcattgactgtcacatgtggtttgctggtggcttcccactggcgaagagaagctacaaaatatgctcgatggatagcattcactggaaagtgtgtgcattcttctcatacctaagaaaatcactgtaaaatctgctgaaaactatttttaggttttatttgcacaagactgaattagtttgacatttttggaagctcctattgaacatacccaaacatctgtaaacatgaaaaatcttcaatttattaaaagcaaacatttcagtatgattctttccaaagtttgctgctgattcttccttgtgtggccttttgaggagcctcctggggaattggaggattaagacatgccactatgagaagattataggaaaaacaccaagactagaggactctgggttctttttatgcaaagtcaactcttctgggtcacagttacccagcaacaaaaataaagaatttccccatggactccagatcctttactactgaactcacagggctgtaacactgttactgtacagagaggaccaggacgatgccagcaccccgtttatcctgagtgaactctccggaggcctcttcaagcttgtgggttctctgctgtcttgaagccatccatccatttgataggttttgcaaagacttggtcctgccaagatggttttaatcatttctgctaaaaggaatggactcgaggatttgatctcattttagatgcagttgtcctcacttggccattttacagcactttagtaaatatggccagtgtatttggtcactattaaatcaatccccattcattatctgtcagggcaactcagtgaactaaatactatgttctgacctctggcactctttctcatgttgtttaaatatttaatattgtctaaggcaattcaagtattttcttaaataaaaaatatgaaaacccaaaaaaaaaaaaaaaa

SEQ ID NO: 26564 - DNA, 2412 bp, Homo Sapiens
ggcggtgggctgagctaaaatggctgaggagagagtcgcgacgagaactcaatttcctgtatctactgagtctcaaaaaccccggcagaaaaaagctccagagtttcctattttggagaagcagaactggttgattcatcttcattatatccggaaagattatgaagcctgcaaggctgttatcaaagaacagcttcaagagactcagggattgtgtgaatatgctatctatgtccaagcattgatatttcgcctagaaggaaatatccaagaatccctagaactcttccagacatgtgcagttcttagtcctcagagtgctgataacctcaagcaggtggccagatctttatttcttttgggaaaacataaagctgccattgaagtatataatgaagcagctaaactcaaccagaaagattgggagatcagccataacctaggagtttgctacatatacctgaagcagttcaacaaggcacaagaccagttgcacaatgccctgaatcttaataggcacgatctgacttatataatgctggggaagatccacttgctggagggagacttggacaaggccattgaagtctacaagaaagcagtggagttctcaccagaaaatacagagcttcttacaactttaggattactctacttacagctcggcatttaccagaaggcatttgaacatcttggcaatgcactgacttatgaccctaccaactacaaggccatcttggcagcaggcagcatgatgcagacccacggggactttgatgttgccctcaccaaatacagagttgtggcttgtgctgttccagaaagtcctccactctggaataacattggaatgtgtttctttggcaagaagaaatatgtggcggccatcagctgcctgaaacgagccaactacttggcacccttcgattggaagattctgtataatttgggccttgtccatttgaccatgcagcagtatgcatcagcttttcattttctcagtgcggccatcaacttccagccaaagatgggggagctctacatgctcttggcagtggctctgaccaatctggaagatacagaaaatgccaagagagcctacgcagaagcagtccacctggataagtgtaaccctttagtaaacctgaactatgctgtgctgctgtacaaccagggcgagaagaagaacgccctggtccaatatcaggagatggagaagaaagtcagcctactcaaggacaatagctctctggaatttgactctgagatggtggagatggctcagaagttgggagctgctctccaggttggggaggcactggtctggaccaaaccagttaaagatcccaaatcaaagcaccagaccacttcaaccagcaaacctgccagtttccagcagcctctgggctctaatcaagctctaggacaggcaatgtcttcagcagctgcatacaggacgctcccctcaggtgctggaggaacatcccagttcacaaagcccccatctcttcctctggagccagagcctgcggtggaatcaagtccaactgaaacatcagaacaaataagagagaaataagaatagaatgaatgaccccaaaatagggttttcttgggcgaggatgtgctggattaggaaaggtgacatgacacaggcagagcagagtggcacccaccacagaatacagtgtgtgttattacgaggagccagcagttgagcctaaggtccttctacctacctggtattggcatttgaggtcggaaaccctctactgccccataagccaggaaaagtgaaaagagaacacagttcctttaagaactggcagcaaggcttgaggccttatgtatgtagctgagtcagcaaggtacatgatgctgtctgctttcaaaaggacttttctctcctagctgactgactccttccttagttcaaggaacagctgagacagacctctgctgagtagctctgtgatgacaaagccttggtttaactgaggtgatcctcaggttgtgaggtttattagtccccaaggcaaacacaaatattagattaataatccaactttaatagtatacatttaaaagaaaaaaaacaaaagccctggaagttgaggccaagcctgctgagtattgcagctgcatttgcccaaagggaatccagaacaagtccctccctgtattttgttcttgagaggggtcagtctagaagctagatcctatcaggatgaggagcagcagcccagggcttgtctggatcagcaccaacgattttaaagaaaaaaggaagagtttcttagatgagtaattgttattgaagatagtcagtgataaccactgaccagatgctatcaatacactatgtgtcctttttagaataaagattacatatcatcgaaaaaaaaaaaaaaa

SEQ ID NO: 26565 - DNA, 2947 bp, Homo Sapiens
cagagccctgggaggccgggccgggctcgggggccaccccgggggcccgggccatggatgtgcgccgtctgaaggtgaacgaacttcgcgaggagctgcagcgccgcggcctggacactcgaggcctcaaggccgagcttgctgagcggctgcaggcggcgttggaggccgaggagcctgacgacgagcgggagctcgacgccgacgacgaaccggggcgacccgggcacatcaacgaggaggtcgagaccgaggggggctccgagctggaggggaccgcgcagccaccgccgcccgggctgcagccgcacgcggagcccggcggctactcggggccggacggacattatgccatggacaatattaccaggcagaaccaattctacgatacccaagtcatcaaacaagaaaacgagtcaggctacgagaggagaccactggaaatggagcagcagcaggcctatcgtccagaaatgaagacagagatgaagcaaggagcacccaccagcttcctcccgcctgaagcttctcaactcaagccagacaggcagcaattccagagtcgaaagaggccttatgaagaaaaccggggacgggggtactttgagcaccgagaggataggaggggccgctctcctcagcctcctgctgaagaggatgaagatgactttgatgatacccttgttgctattgacacctataactgcgacctccacttcaaggtggcccgagatcggagtagtggctatccgctcacaattgagggctttgcatacctgtggtcaggagcccgtgccagctatggggtcagaaggggccgtgtatgcttcgagatgaagatcaatgaggaaatctccgtgaagcaccttccgtctacagagcctgacccccacgtggtccgtatcggctggtccctggactcctgcagcacccagctaggcgaagagcctttctcctatggctatggaggcactgggaagaagtccaccaatagccggtttgaaaactacggagacaagtttgcagagaacgatgtgattggctgctttgcggattttgaatgtggaaatgacgtggaactgtcttttaccaagaatggaaagtggatgggcattgctttccgaatccagaaggaagccttggggggtcaggccctctatcctcatgtcctggtgaagaattgcgcagtggagttcaacttcggacagagagcagagccctactgttctgtcctcccggggtttaccttcatccagcaccttccccttagtgagcgtatccggggcaccgttggaccaaagagcaaggcagaatgtgagattctgatgatggtgggcctgcctgctgctggcaagaccacatgggccatcaaacatgcagcctccaacccttccaagaagtacaacatcctgggtaccaatgccatcatggataagatgcgggtgatgggcctacgccggcagcggaactatgctggccgctgggatgtcctgatccagcaggccacccagtgcctcaaccgcctcatccagattgctgcccgcaagaaacgcaactatatcctagatcagacaaatgtttatgggtcagcccagagacgaaaaatgagaccatttgaaggcttccagcgcaaagctattgtaatttgtcccactgacgaggacctaaaagaccgaacaataaagcgaaccgacgaggaagggaaggatgtcccagatcatgcggtcttagaaatgaaagccaacttcacgttgccagatgttggggacttcctggatgaggttctgttcattgagctgcagcgggaggaagcggacaagctagtgaggcagtacaacgaggaaggccgcaaggctgggccaccccctgaaaagcgctttgacaaccgaggtggtggtggcttccggggccgcgggggtggtggtggcttccagcgctatgaaaaccgaggaccccctggaggcaaccgtggcggcttccagaaccgagggggaggcagcggtggaggaggcaactaccgaggaggtttcaaccgcagcggaggtggtggctatagccagaaccgctggggtaacaacaaccgggataacaacaactccaacaacagaggcagctacaaccgggctccccagcaacagccgccgccacagcagcctccgccaccacagccaccaccccagcagccaccgccaccacccagctacagccctgctcggaaccccccaggggccagcacctacaataagaacagcaacatccctggctcaagcgccaataccagcacccccaccgtcagcagctacagccctccacagacctaccctcagcccagctataaccagtatcagcagtatgcccagcagtggaaccagtactatcagaaccagggccagtggccgccatactacgggaactacgactacgggagctactccgggaacacacagggtggcacaagtacacagtagccagtgtgacccagaggctcccggaggcccctgccggcttcctccaccagcgcctgcctcggcccctcctctgcccccgccagatcccgtggtgctggggatggggtcatcccagggctgcctccctccagcccactgcctcccctctgaggggcttccttcccctccatagggccaggcatttttttctggattcaaacaggcaacaatgaccttttattttctgtttgtccccacctccccagccttccacctcctgttcttcctaccttcttcctttttgactaaataatccccacctcccttgatcatacagtgaggctacagtgactgaggggagaatcccctcctgttcactctcccaaccctgctccagcccctcagcttcccagaccctcatgcagttggttgtaaattctcccaggagctgttttactgtctacttttcaggattaaaaaaaaaaaaaaaaaaaaaaaaa

SEQ ID NO: 26566 - DNA, 4670 bp, Homo Sapiens
ttgagctcaaagcttagcagcttcaatgttgttgttaggcataaacagcttgcaaatttcaattttttttctctcctcacttttgaactagatttgggcaatggaggtgatgacagcattttagaagacagaacaggaattctaggtgtttaggcacgttgaagagaaacttgctagaggtgatgaagtggaaagaaaaagacaattcactatagggatcaacattattgcagttctgcaaaggatattttcttttaaaacatccatatctcttctttgccatggaaactacacccaatctacctgaacctgcggcacccctctgatgacccatttggattctctgatttcactgccaagattctcagttctccaaaatacttatcattcaggttgaataaaccagttctacagactgcttcttccatgcatttcccaatgatgctaactgcccttaaaattctttcagatttggaactgtatctgtatggaaacaacagagttttcttgaagtacaactaaggacaggtcaccactaggcactaacatcgctgacttgcatgattatggagatggtctatctgatgctgaaaatgtctctagttttttgacaacggctaaataaccatgggatcaagtggccttgggaaagcagcaacattagatgaactgctgtgcacttgcattgagatgtttgatgacaatggagagctggataatagttatttgccaagaatagttctactgatgcaccgatggtatttatcttccactgaattggcagaaaaacttctctgcatgtatcgaaatgccactggagaaagctgcaatgaatttcgattaaagatctgctacttcatgaggtactggattctgaagtttcctgcagagtttaatttggatcttggtttgattcgtatgactgaggaatttcgggaagtagctagtcaactaggatatgaaaaacacgtcagcctcatcgacatatccagcattccttcctatgactggatgagaagagtcacacagaggaaaaaagtatccaagaagggaaaagcctgtctgctgtttgaccatctggagcccattgaattggctgagcacctcacttttctggagcataaatcttttagaaggatctcattcactgattaccaaagctatgtcatccatggctgcctggagaataatccaaccttggaaagatcgattgctttatttaatggaatctctaagtgggtccagttgatggttcttagcaaaccaaccccccagcaaagggcagaagtcatcacaaagtttatcaatgttgcaaagaagctccttcagctcaaaaattttaacaccctgatggcagtggtgggaggcctcagtcatagttccatttcacgcctcaaagagacccattctcatctttcttcagaagttacaaagaactggaatgaaatgacagagttggtctcctccaacggcaattactgcaattaccgcaaggcctttgccgactgcgatggcttcaaaatccccatccttggagtacacttgaaagacttgatagctgtccatgtcattttcccagactggacagaggagaacaaagtgaacattgtgaaaatgcaccagctctccgttaccctgagtgaactagtctccctgcagaatgcctctcaccacttagaacccaacatggatttgatcaacctgctcacgctttccctggacctctatcacactgaagatgatatttacaaactgtcactggtgctggagcctagaaattctaaatcgcagcctacctcccctacgacgcccaacaagcctgtggtacccctggagtgggcattaggggtgatgccaaagccagaccccacggtcatcaacaagcacataaggaaattagtggagtctgtatttagaaactatgatcacgaccatgatgggtacatttcccaagaggactttgaaagtatagctgccaattttcccttcttggattccttctgtgttctggacaaagatcaggatggcctaattagtaaagatgaaatgatggcttacttcctgagagctaaatcccaactacactgtaaaatgggaccaggatttatccataattttcaggagatgacctatctcaagccaaccttctgcgaacactgtgcgggatttctctggggcataatcaagcaaggatacaaatgcaaagactgtggagccaattgtcacaaacagtgcaaagacctcctggttctggcctgcaggagatttgcccgggcgccctccttgagcagtggtcatgggtcactgcctggaagcccctcgctgcccccagcgcaggatgaggtgtttgagttccctggagtcactgctggacacagggatttagacagcagagccatcacactggttacaggctcttctcgcaagatctctgtgaggctacagagggccaccaccagccaggccacccagactgaacctgtctggtcagaggctggctggggggactcggggtcccacaccttccctaaaatgaaatccaagttccatgacaaagcagcaaaggacaaaggctttgccaaatgggaaaatgagaagcccagggtgcatgctggtgtggatgttgtagaccggggcacggagtttgaacttgaccaggatgaaggagaagagaccagacaggatggtgaggatggctgacttcaggctgcggaaactgaaggcaataatgttggcttttggaaggggcaagacgagaaactctgaagaaagctctgactctcaggaagttatctggaaagatacctggatgtttactgccttgggacactgtgggatctccatgtttggactatgggacagagaattgaccctaactaactatgaactatttatttcctcctcccctacccctagttaagtgccacaaagactgtgttatgtagtcagtacttttttctcatgtatctttctctagaccatttatatacgggtgaaatgaaagcctttttgcatgtacttgatactcagtctgtaaactcagacttcgctttttttgtgagactatcctttcaatatttttataaacttttgtgtgtgctgtggcagggaacagttaacaaggagtttatttagaggggtttttttcattttttgtttttcttgttttgttttgttttgttttgttcttcttggtgtgctttttggatgggaccagaacttaacattttcctgaggactaggaagctcatcagacactggaatgcagtgattcttctaatgatggtcaactgcaaggagaaactgtttacatccttcccactacacagttgctatgatatgtaacaagtcacacatgtatatatcacacaagtcttaccaattctgcgtcactaggaagctatagcatggtcgtgaaagctctcctaatacttacttaaatagccatggaagaaaattatgcttgtcccttctgactgggttaagccatctttcttaagattcctgaagtagaaatagcaattaagaaattaattcaagttttgacggttaacatttagcagaaaaacaaaccattgaataagctactaggtgaaatgcaaaacaaccatcaatttttttaaactcaataattttgtgaaaaaaaaaaccaccaccaaacttttggttgtaaaagagaacccttgttcccttcctaagaaactgccttccacaattaaagaatactcatagaaagaaaataatcataaatcatatttgattaacatttcatttaagcttttaaaatatcaattttttaaatagctcccatttacccaaaataactagttatgggtctatttcttccatgattagaggagagagaacttgattcaagatactgaaaaatagagctgggactgagcctgtgaatgacaggaatgatctattaccaggtgactagtcggaaactacacagacgtgcactggtctgcatttgggggctaaagtgtatatattccatttaaaatggaatttgtttgtatttggggcagtcttcagtaaagcctttctcctttcttttctccattgaggacagttctgctcagcaaaattgttgagtacctgttctgggcaggtcccacgctatatgcacaaagttaagaaaaacttggtcttagcccttgggagctgacagcccatgggcattaaggcaaagtagttccagtgatttaaaatacggttccaaatacgctaaaaccaacttgtgccaaccagatttacagattggaaatactgcagatgatgtgaagttatcagttggaggagctgtgattaagctggataataagagaacgtgccatctgtaaagcactcagaaggcagccatccctagatgttggtttcatgtatattacactatctactactatccataaatgcaataatatgcatgttaacaacattaaaaacagcaaacagcaatctaagtacagaaaagctttttgtgtgtttaaaaaaattgaagaaaattcaggaagaaacgtgttaataaacattgtactgttcttaaaaaaaaaaaaaaaaaaaaaaaaaaaaaaaaaaaaaaaaaaaaaaaaaaaaaaaaaaaaaaaaaaaaaaaaaaaaaaaaaaaaaaaaaaaaaaaaaaaaaaaaaaaaaaaaaaaaaaaa

SEQ ID NO: 26567 - DNA, 3402 bp, Homo Sapiens
gcgggtaagttgtcgtaggggcccggtccgtgagggactgctaaggaagaggctgcatggcgcggtagtcccccgagtggaggtcggctgcccctgggaaaccagagagtcggagggagtccatctggagcggccaagtaggtcggggaagggccgcgcctgacgtctggccgcaggtagccacgttccctccgcccccggtgcagcttcagggcttgcaccctgcgtccctctgtggtccttcgagagggtctgggcggggactatgggtgggcgcgcccaggaattgtcccttcggcctctcgtcctgcccctcccccccaccatccagtctctccttggaatatactcttaaaatatttcggatggagttctttggagaaatgggtttcctggagtgtcaggtgatcattgatgttgattgtttctgaaatgtttatttaggcatcaaaccaacatgcctaaataagtttttcatttctacagcgcctagattcattcctagcacatagtaggccctaactcagatgtgaatgtaggattcgtaggagctgagcatttgtgcttcaggcatcaagttgtctttgactcttcgactcttccttggtctttttccattctccacacctccagcagcaaacctttcgcctctcctcaaggcctttcccccccatctccctcagcgcctctttgactggagggggacagaggctttcatggcagggattctcccatctcccttcctatccccgctatgccctccaattatcttttcctggcgttccgttttacaagagatggccttctttccaaaaacatttatattgtattgaatattcttgattttggccatcttgctttacagacagacctggggtctaatttcagctctgccacttaccaggtggttgccttgtgcaaatttcttgatcgtctgtgttttcctcatctgtaaaatggggaaaagaataatatggacctcatagaactctggggaggatttaaactaagtgaataatgtatttagatcatttaggttagtgcctggaacatagtaaatgtgccgtatatgatagcttttgttagtatttgccccttacctcttcttctggggtcttgctgtattagcctttcccatgagtgtaaaaatacactgtcttctctggctttttcctgtttttctctacaaatgcttgtgtttttctctaaattttattttttgtcttttagcgtctacattaaggacacattctcagtttcgtaatgatttttctttttcttttttcctttttttttgagactatagcccaggctggagtgcaatggcaagatctcggcttactacaggtttgacctcctgtgctcaagcaatcctcccacctcagccttccaagtagctggaactacaggtggtgactctcaaaaggaaataggatcatggcagcagatgatgacaatggtgatggaacaagtttatttgatgtcttttctgcttctcctcttaagaacaatgatgaaggctcactggacatatacgctgggttggacagtgctgtttctgacagcgcttccaaatcctgtgtaccatcaagaaattgtttggacttatatgaagagatcctgactgaagaaggaactgcaaaggaggcaacatataatgatttgcaagtagaatatggaaaatgtcaactacaaatgaaagagctgatgaaaaagtttaaagaaatacagacacagaatttcagcttaataaacgaaaaccagtctcttaagaagaatatttcagcacttatcaaaactgccagagtggaaataaaccgcaaggatgaagaaataagtaatcttcaccaaaggtattactgagcggtgtagctgttataaattacgtgggtattgatatgtggaatatttttaacttttagaggaaagatgaaaataatgtatttttattttttattttttaatttttttttttttttagagacagggtctcattttgtcactcaggctggtcttgaactcctgacctcaggtgagccacccaccttggcctcccaaagtgctgggatttcaggcgtgagccactgtgcccagacttttttttttttttggcagagtcttgctctgttgcccaggctggagtgcggtggtgtgatctcagctcattgcaacctttgcctgctgggttcaagcgatcctcccacctcagtctcccaggtggctgggattacaggcatgcaccacctgtaaaaaaaaattaaaaaaaaaaaaaaaagatttttttgtatttttagtagacggggtttcaccattttggccgggctggtctcaagctcctgatctcaagtgatctgcccgcctggccctccaaagtgctgggattacaggtatgagccactgcacccagcttcaagggtgttccttttgtggttagtgcttttcgtgtttacatttccccagtgatctcaaaggtatctaccaacagttggtcggttgagtcagtatctatattagtttcctaggcttagtgtaacaaaactaccagaaatgggtggcctaaacaaccaaaatttgtctcacagtcctggaggctagaagtccaaaatgaaagtgtcagcaaagttagtttcttttgagagctctgaaggaaggatctgattcaggcctctgtactcttagatggttgtctacttcctatgtctctttatatcctctttctaaatgtatctctgtgtccaaatttccccctttttataagaacaccagtaatattgcatgcccaccttgaggacatcactttaacttgattatttctgtaaagaccctttaaataaggtcatattctgaagaacaatgggttagaacttcaaattatgaatttggtcaggagaggggacacaatccataacagggttcatatgaggcttacatattgttttaggttgtgtgtttttctaatcctctcttataacaatctgcctatatttctgagttttttaagttttgggtttttctacacatttgctactgattagaaaaagatatatgaaatttcagagaaattatggaatttctggaagatgaagttattaccagaagccaatataggccaggcacagtggctcacgcctgtaaccccagtgctttgggaggcgaaggcgggagaattgcttgagtccaggagtttgagaccagcctgcgcagcatggtgagatcccatctctacgaaaaattaaaaattagctgggcatggtggcttgtacctgtggtcccagctacttggagggttgaggtgagaggattgcttgagcctaggacatcaaggctgcagtgagccatgatcattccgctgcactcagcctgggtgaaagagggagatcctgtctcaaaaaaaaaaaaaaa

SEQ ID NO: 26568 - DNA, 1363 bp, Homo Sapiens
ggcggagacggcggagcgggccttttggcgtccactgcgcggctgcaccctgccccatcctgccgggatcatggtctgcggcagcccgggagggatgctgctgctgcgggccgggctgcttgccctggctgctctctgcctgctccgggtgcccggggctcgggctgcagcctgtgagcccgtccgcatccccctgtgcaagtccctgccctggaacatgactaagatgcccaaccacctgcaccacagcactcaggccaacgccatcctggccatcgagcagttcgaaggtctgctgggcacccactgcagccccgatctgctcttcttcctctgtgccatgtacgcgcccatctgcaccattgacttccagcacgagcccatcaagccctgtaagtctgtgtgcgagcgggcccggcagggctgtgagcccatactcatcaagtaccgccactcgtggccggagaacctggcctgcgaggagctgccagtgtacgacaggggcgtgtgcatctctcccgaggccatcgttactgcggacggagctgattttcctatggattctagtaacggaaactgtagaggggcaagcagtgaacgctgtaaatgtaagcctattagagctacacagaagacctatttccggaacaattacaactatgtcattcgggctaaagttaaagagataaagactaagtgccatgatgtgactgcagtagtggaggtgaaggagattctaaagtcctctctggtaaacattccacgggacactgtcaacctctataccagctctggctgcctctgccctccacttaatgttaatgaggaatatatcatcatgggctatgaagatgaggaacgttccagattactcttggtggaaggctctatagctgagaagtggaaggatcgactcggtaaaaaagttaagcgctgggatatgaagcttcgtcatcttggactcagtaaaagtgattctagcaatagtgattccactcagagtcagaagtctggcaggaactcgaacccccggcaagcacgcaactaaatcccgaaatacaaaaagtaacacagtggacttcctattaagacttacttgcattgctggactagcaaaggaaaattgcactattgcacatcatattctattgtttactataaaaatcatgtgataactgattattacttctgtttctcttttggtttctgcttctctcttctctcaacccctttgtaatggtttgggggcagactcttaagtatattgtgagttttctatttcactaatcatgagaaaaactgttcttttgcaataataataaattaaacatgctgttaaaaaaaaaaaaaaaaaaaaaaaaaa

SEQ ID NO: 26569 - DNA, 3772 bp, Homo Sapiens
ggtgaaaaccggcagaaagacattaagagattttcctgcagtcactgctggcagatgatagagccaggatttgaaagcaggcagcctggctccagaccctgtgctcttaactcccgttttgcatcaagaacagaatcctatgaaaggcttgtacagtgcttggtactgagtaggcactccgtcagtattttagtagctattattccaaaggacactgtattctaggtactaagacaatgtgaatggaatggaaaacaattcctccctgcagaagccaactgtctaggaagacagataatgacattattaaaataatcagaacattggcaaaataaagaagattgaaatgcagttcatatgacagtgctaattaatcatactttttagatctaggaaaggccataaaggttaaattgacttggaaatggtaaacaagacaatggttgtgtcactgatcggtgatggccagtttttggttatccttatttgccatttaaatgattgaattgaaaggaagaagtaagacttggaagatgaatattgaaggaaaggtgaagatggaaaagagaagggggtttattctgagaacagtgactagaactctgaggtatggtagaaatttcaggataacagatgataaaggggaatgaagccatggagaggaagagaatgataatattaattgtgaaagtttgtgtcaagtgttttctgagtcacctttctttcagtttctcatttctagtattgtataaatgagtttaacatcaaaatggtatagtgaaaaaaaggatgaactgcttgacagaagaggtcagatctagttttgactctagcttatttagctttacagctttaaataaattacagtgtctttaaagctctggatcttaagttttctaattgttttttaaacaaagatttgtgaacacctacttacaatgtgacaaatgtctttgtaaggcattatgggagataaaagctgcattaaacctggctgttgtacttacaagtaatttggaaggcaaaatttcaaatacttgaacctaaagtagggtttcttggttttcatttaattgaaatactgttaggaaacaaaaatttttcataaatttttcttgtggatatgtaagtaaattctatatatctagcaatatgatacatctatagttctgtttaaaggtaacaatgtgaggaagcttatgcgaataacttgacagaagaaatctaaagtaaaagcattttcctagtaggctagcttgttctcttatttcatttattgtaacagtttcactttttaataattatgtgaaattaggaaacagatattctagggcattctgtttagggtgatgaacttattcatgaatgttattaaaaccatttaaatatgccatagtttaaatttgtgatccatgctgttcaatctgtgacctaggatagcagcatcaaggagcattgtgtacatgcagaagtgcacagtacctggagtgaaactgcttgtgttcgatttctgataccattcataactggctgtgtgatctcaaaacctctaaaatgcagacctccagctctagatctgtgcacctgagtgaatggcagaagaattacttcgcaattacatctggcatatgtaccggaccgaaggcagatgcataccgtgcacagatattacgcattcagtatgcatgggcaaactctgagatttcccaggtctgtgctaccaaactgttcaaaaaatatgcagagaaatattctgcaattattgattctgacaatgttgaatctgggttgaataattatgcagaaaacattttaactttggcaggatctcaacaaacagatagtgacaagtggcagtctggattgtcaataaataatgttttcaaaatgagtagtgtacagaagatgatgcaagctggcaaaaaattcaaagactctctgttggaacctgctcttgcatcaatggtaatccataaggaggccactgtctttgatcttcctaaatttagtgtttgtggtagttctcaagagagtgactcattacctaactcagctcatgatcgagaccggacccaagacttcccggagagcaatcgtttgaaactccttcagaatgcccagccacctatggtgactaacactgctaggacttgtcctacattctcagcacctgtaggtgagtcagctactgcaaaattccatgtcacaccattgtttggaaatgtcaaaaaggaaaatcacagctctgcaaaagaaaacataggacttaatgtgttcttatctaaccagtcttgttttcctgctgcctgtgaaaatccacagaggaagtctttttatggttctggcaccattgatgcactttccaatccaatactgaataaggcttgtagtaaaacagaagataatggcccaaaggaggatagcagcctgcctacatttaaaactgcaaaagaacaattatgggtagatcagcaaaaaaagtaccaccaacctcagcgtgcatcagggtcttcatatggtggtgtaaaaaagtctctaggagctagtagatcccgagggatacttggaaagtttgttcctcctatacccaagcaagatgggggagagcagaatggaggaatgcaatgtaagccttatggggcaggacctacagaaccagcacatccagttgatgagcgtctgaagaacttggagccaaagatgattgaacttattatgaatgagattatggatcatggacctccagtaaattgggaagatattgcaggagtagaatttgctaaagccaccataaaggaaatagttgtgtggcccatgttgaggccagacatctttactggtttaaggggaccccctaaaggaattttgctctttggtcctcctgggactggtaaaactctaattggcaagtgcattgctagtcagtctggggcaacattctttagcatctctgcttcatccttaacttctaaatgggtaggtgagggggagaaaatggtccgtgcattgtttgctgttgcaaggtgtcagcaaccagctgtgatatttattgacgaaattgattccttgttatctcaacggggagatggtgagcatgaatcttctagaaggataaaaacagaatttttagttcaattagatggagcaacaacatcttctgaagatcgtatcctagtggtgggagcaacaaatcggccacaagaaattgatgaggctgcccggagaagattggtgaaaaggctttatattcccctcccagaagcttcagccaggaaacagatagtaattaatctaatgtccaaagagcagtgttgcctcagtgaagaagaaattgaacagattgtacagcagtctgatgcgttttcaggagcagacatgacacagctttgcagggaggcttctcttggtcctattcgcagtttacaaactgctgacattgctaccataacaccggatcaagttcgacccatagcttacattgattttgaaaatgcttttagaactgtgcgacctagtgtttctccaaaagatttagagctttatgaaaactggaacaaaacttttggttgtggaaagtaagtgggatacttggaatcaaggcatctctgtattacagtcttctttattttttagcatagaaagttggggatgtgttaattgtatttttaagaatatattctaaattctgtacttcaaaaaaaaaaaaaaaaaaaaaaaaaaaaaaaaaaaaaaaaaaaaaaaaaaaaaaaaaaaaaaaaaaaaaaaaaaaaaa

SEQ ID NO: 26570 - DNA, 2658 bp, Homo Sapiens
cagagagcaatatggctggttccccaacatgcctcaccctcatctatatcctttggcagctcacagggtcagcagcctctggacccgtgaaagagctggtcggttccgttggtggggccgtgactttccccctgaagtccaaagtaaagcaagttgactctattgtctggaccttcaacacaacccctcttgtcaccatacagccagaagggggcactatcatagtgacccaaaatcgtaatagggagagagtagacttcccagatggaggctactccctgaagctcagcaaactgaagaagaatgactcagggatctactatgtggggatatacagctcatcactccagcagccctccacccaggagtacgtgctgcatgtctacgagcacctgtcaaagcctaaagtcaccatgggtctgcagagcaataagaatggcacctgtgtgaccaatctgacatgctgcatggaacatggggaagaggatgtgatttatacctggaaggccctggggcaagcagccaatgagtcccataatgggtccatcctccccatctcctggagatggggagaaagtgatatgaccttcatctgcgttgccaggaaccctgtcagcagaaacttctcaagccccatccttgccaggaagctctgtgaaggtgctgctgatgacccagattcctccatggtcctcctgtgtctcctgttggtgcccctcctgctcagtctctttgtactggggctatttctttggtttctgaagagagagagacaagaagagaacaatcctaaaggaagatccagcaaatacggtttactccactgtggaaataccgaaaaagatggaaaatccccactcactgctcacgatgccagacacaccaaggctatttgcctatgagaatgttatctagacagcagtgcactcccctaagtctctgctcaaaaaaaaaacaattctcggcccaaagaaaacaatcagaagaattcactgatttgactagaaacatcaaggaagaatgaagaacgttgacttttttccaggataaattatctctgatgcttctttagatttaagagttcataattccatccactgctgagaaatctcctcaaacccagaaggtttaatcacttcatcccaaaaatgggattgtgaatgtcagcaaaccataaaaaaagtgcttagaagtattcctataaaaatgtaaatgcaaggtcacacatattaatgacagcctgttgtattaatgatggctccaggtcagtgtctggagtttcattccatcccagggcttggatgtcaggattataccaagagtcttgctaccaggagggcaagaagaccaaaacagacagacaagtccagcagaagcagatgcacctgacaaaaagggatgtattaattggctctataaactatgtgcccagcactatgctgagcttacactaattggtcagacatgctgtctgccctcatgaaattggctccaaatgaatgaactactttcatgagcagttgtagcaggcctgaccacagattcccagagggccaggtgtggatccacaggacttgaaggtcaaagttcacaaagatgaagaatcagggtagctgaccatgtttggcagatactataatggagacacagaagtgtgcatggcccaaggacaaggacctccagccaggcttcatttatgcacttgtgctgcaaaagaaaagtctaggttttaaggctgtgccagaacccatcccaataaagagaccgagtctgaagtcacattgtaaatctagtgtaggagacttggagtcaggcagtgagactggtggggcacggggggcagtgggtacttgtaaacctttaaagatggttaattcattcaatagatatttattaagaacctatgcggcccggcatggtggctcacacctgtaatcccagcactttgggaggccaaggtgggtgggtcatctgaggtcaggagttcaagaccagcctggccaacatggtgaaaccccatctctactaaagatacaaaaatttgctgagcgtggtggtgtgcacctgtaatcccagctactcgagaggccaaggcatgagaatcgcttgaacctgggaggtggaggttgcagtgagctgagatggcaccactgcactccggcctaggcaacgagagcaaaactccaatacaaacaaacaaacaaacacctgtgctaggtcagtctggcacgtaagatgaacatccctaccaacacagagctcaccatctcttatacttaagtgaaaaacatggggaaggggaaaggggaatggctgcttttgatatgttccctgacacatatcttgaatggagacctccctaccaagtgatgaaagtgttgaaaaacttaataacaaatgcttgttgggcaagaatgggattgaggattatcttctctcagaaaggcattgtgaaggaattgagccagatctctctccctactgcaaaaccctattgtagtaaaaaagtcttctttactatcttaataaaacagatattgtgagattcacataaaaaaaaaaaaaaaaaaaaaaaaaaaaaaaaaaaaaaaaaaaaaaaaaaaaaaaaaaaaaaaaaaaaaaaaaaaaaaaaaaaaaaaaaaaaaaaaaaaaaaaaaa

SEQ ID NO: 26571 - DNA, 1790 bp, Homo Sapiens
cagggaaagacttgcttgtaactttatgaattctggatttttttttttcctttgctttttcttaactttcactaagggttactgtagtctgatgtgtccttcccaaggccacgaaatttgacaagctgcacttttcttttgctcaatgatttctgctttaagccaaagaactgcctataatttcactaagaatgtcttctaattcagatactggggatttacaagagtctttaaagcacggacttacacctattgataacacagaaaatacaggcacaagaaagatgagagagcagcacacaaccatttcgcatctttttcgtcgggcagaaccgccgcggtgcgcaggcaaggagtccttcccggcagctccgcgcagctccggttccgcgtccggggccgcagctagagcgcgctcgggccggagacgcggactgcgcgcgcacgggggacgcgcgctcgggggctcgcgcccgcgcgggcggtcttgggctcctgctgcgcgcagccccagctggccgctgccaaaatagagttgagctgggtcgggagaccacgcacgccgatccctcacagtctcccccacaccccatgggtgaattaaagagggtaaggtaggggaaagagacgctgttgcacttttctctgcaaccctggaagaactgtgtttccagctaccgcacgcgcaactcacatcgcaagggaccgaggcggtacactctgagcgtaaacagagaacacctgcagctctggaatcggtcccaccgcagagggctgggaaccggaggactgtcggtccagcccataaggggctgctggggactaaacctcaagaaaagtaccgaagaaggctctcccctggcctcagcgagactaccccaacatcctaaacctgtgcaggcacttccgggcgccggattccgggataacaaaattccagtcaatttgccgtgtctcaatttaaaatggtgaattactcctatgatgaagatctggaagagctttgtcccgtgtgtggagataaagtgtctgggtaccattatgggctcctcacctgtgaaagctgcaaggtttgctcacacattgctacctgaaaaatataatgtccaacaccaaaataaaccagtggattacttcttttaagctaaatttaggctccttttttaaagactcaactaaaaatgagggagaaagagagagtcttagggagatgattcttagaagtgtgtgtctgatttagttcaaaaggcaaagaaatttatgctgtttagaaaactttgccagtctcatggttctaaaatactttattgtagtaaagtgatatagctgtagaaagacttccatttctaacagtcctaaatattgattttgcttgacttatatatatttaaagcatcgttgttcttgaaagggaatatgacaaactatttcccaaatacattttaacttcagagtatttctgtgctataagtctaaacattctttatccacagacataaaagcctaaattcccaactgtgtgatttcatcttgatttattccaaaataattttaaggattttttgaaatttatatcataaagaccaagaaatcagattttagtttttaatataataatttttataaatatatgacctatttaagtgcatggattttaatatgtaaaatatgctatattgttaccaaaaatataaattatactttaagaatttaaaaaaaaaaaaaaaaaaaaaaaaaaaaaaaaaaaaaaaaaaaaaaaaaaaaaaaaaaaaaaaaaaaaaaaaaaaaaa

SEQ ID NO: 26572 - DNA, 981 bp, Homo Sapiens
caccgcgtcgtcgtcggccgagacattgcgcacggtcaggcggcgctcggtgccctcctcctcgatgccgtacttggcgctcgcccacaaccgcgtctcctccttgaaccacgcggcctcagtggacggctggggcacctcacataggaacgtggccgactccttctcccgcacctccagatcttgcagccgctttttgaagggaaccgcgggctctgccaggagagaagactgctattttgaagcatacatgggaagctggttcctggacccccgcatataccaaaatctgtgcatactcaagttctacggtcagccctgtggaacccaagcataggacaagccggccctccctatacacacaggtttgacatcctgagaacactgctggttcccttcccatttggttccagaaaatctgcgtataagtggactcagtggtgcaaacctatgttgttcaagggtcaactatatatgatgaattattgttacctacagtgactctaccatgctactaaacactagaactgattcattttctctgactgtgtgtctctacccattaaccagcccctcttcatctcccttcccgcttccctccccagcctctggtaaccatcattcagttctctacctccgtgaaatcaacatgagtaagaactggtgaaacccaaacatagtctcgaatttagctttttttttttttttaactgtaagaggctaaacattcttgaggaggacacaaaaaagtctgaagacaactgtccagatgagaatcttgcacttgcacaagtagagaggagagttagtttttataccatcgcatccccaatcccagctttattgatgcataacaaataaaaattgtacatatttaaagtgtaaaaaaaaaaaaaaaaaaaaaaaaaaaaaaaaaaaaaaaaaaaaaaaaaaaaaaaaaaaaaaaaaaaaaaaaaaaaaaaaaaaaaaaaaaaaaaaaaa

SEQ ID NO: 26573 - DNA, 2486 bp, Homo Sapiens
gtgaccccaacagagtgtcccgggactcaggcctctgatcaagttacccccagaggatcagagaggggttgacgaaggagaagcattcagagggcactggcttctggacagcaatgagtgcccgggccacgcggccccgaagccggcgagggaggcatgctccacccggtgaactggatcccgtggctgagagttcagaggaggtcgaggcagccagtgggagctccaagcccagctttgccccacctccggtgagctccgggctggagcagctgggccccatggaggaggtcagtggccaaggcctaggaagcaggactgacaagaagatggatgggggctctggcagggaactggcctcagcccccgaagtgccccacaaacctgcagtggaagcccaccaagccccagaagcagccctacagtacaaggagactgtgccccctgggaatggggcccccgatgtgtttcagaccctccagcacactctgagctccctggaggcagcggctgcagcctggcgccaccagccccccagccattctgggccgatggagttcgaaggcacaagcgaagggggagcaggttcccttgggaagcaggaaggggcagggagctgccagcgagaggcagctcgcctggccgagaggaatgcctggctccggctggccctgagtagccgagaggatgagctggtccgcacgcaggcctccctggaggccatccgagctgagaaggagacgctgcagaaagaggttcaagagctgcaggattccctcttgaggctggagccctgcccacatctttcccacaaccaagcaggtggctcaggcagtggttctagcagctctgaggcagacagggaaccctgggagactcaggactccttctccctggctcaccccctgcttcggcgcctccgcagccattccagcacccagatccttgggtctcttcccaaccagcccctcagtcctgagatgcacatcatggaagcccagatggagcaactccgggggagcattgagaagctcaaatgctttaatcgtctgctatcagctgtgctacagggatacaagggccgctgtgaaggcctcagcatgcagctaggccagcgggaggctgaggccacagcattgcatctggccttgcagtacagtgaacactgtgaagaggcatacagggttctgcttgctctgcgggaggccgactcaggagcaggagacgaagcccccatgagtgacctgcaagcagctgaaaaggaagcatggaggctgctggcacaagaggaggctgccatggatgcaggagcacagcagaatccacagccaagccctgaaggcagcagtgtggataagcccaccccacaggaagtggctttccagctccgaagctatgtccagcgtctccaggagcgccgttctctaatgaagattctctcagagcctggccccaccttggcacccatgcccactgtgccccgtgcagaagccatggtgcaggccattctggggacccaggctggcccagctcttccccgactggagaagacacaaattcagcaggacctggtggccgcaagggaggccctggcggacctgatgcttcggctgcagctggtgcggcgtgagaagcggggcctagagctgcgggaggctgccctccgagccctgggtccagctcacgtgctcctgctggagcagctgcggtgggaacgggcggagctccaggctggtggggcaaacagcagtggcggacatagcagcggaggtggcagcagcggggacgaggaagagtggtatcagggccttcctgctgtccctggtggcaccagtggcattgatggtggccaggtgggcagagcctgggacccagagaagttagcccaggaactggcagcatcgctcaccaggacactggacctgcaggagcagctgcagtctctgcgcagggagctggaacaggtggctcagaaggggcgagccagacggtctcagagtgccgagctgaacagggatttatgcaaagcccacagcgccctggtcctggccttccgaggagcccaccggaagcaggaagagcaacgccggaagttggagcagcagatggcactcatggaggctcagcaggccgaggaggtggcggtgctcgaagccactgcaagggccctggggaagcccaggcctcccctcccgcctccccagcttggggacacctttctgtaggccccttacccagccatgtctggacatgccagacagctgtggcatgtcataaactgtcctggagtgacatcatgtcatgttgcatgatttggcatgttggggcacatttggcgtgagggaagctggtgcacatgggtgtccagggcctgatggggcgtggccaggcaataaagaaagactcaggtaaaaaaaaaaaaaaaaaaaaaaaaaaaaaaaaaaaaaaaaaaaaaaaaaaaaaaaaaaaaaaaaaaaaaaaaaaaa

SEQ ID NO: 26574 - DNA, 2627 bp, Homo Sapiens
cgggttgggcagggaactggcagcatagctcctaggatgcgagggccatttgtctccggccgggggtcagatcctcgggaagccgagccatcccatccagccgcttgccccaaaccgggcgcaggccgtggtcacttctctaggaagctccgaagatcccgccactccgtccctcaaaggtgcggaaagccggcttcccccagccctcggagaagattcctgactctccgctcggtcggggcatctgagggcaggagctgcgccaggcgtaccggatagaccagtggacaacacccacgccggaccgcctgtcccctacccggacccagactcggcgccgcacattgccccgggggggcccggcgcagtcacgcgcgcgcagagctcacgctctccgccccgcacacctgcgctccgccccctggtcctgggcccgcgacgggtgaaggcatttgggaagccagggcggctgcggaggcgatctccctgacccagggccggagttgcccggagcctgccaccgctctcagccagcccgcatccttctctgttcttccctccccccgcctgccacggcgcgggtatccgcagccacagcccggggccggtgaggcggcgaagggggaggggaggaatcaagggatgagcgccggaagggcgtcgggggccctgagccgcactaggacgcccctggagccggaaccccagcagaagccggaaccagaaccaaatcaccggtaccgggtcggccaggtggtcagggtgggagaaaccaaaaagggagaggggtgcgggagtactgagaggaaggggctgcagaggcctggctcaggccggcgtggaggaggtgcgggcgctgactcaggcaggatttctgctcccgccgcctaagaatgccgtcccatctcgtgctgcagtgtccttgggagggacagaagcgcgaacaagctggaaaggggaacgctcggggcgtcggggaagcgggaccagggtcgtggtagagagcttgcgttgccgctgacctcttgccgaaaggcgaaacagcactcctggcccggacagctccctggttgggtagggggtggggccggacctcagccggacgtcttagacgtgcttgtttcagatcctgaggacggcattcctacccctcccccattcccagctgcagccccctaaacccaggaggcgccctggcccgcgctcgccccccagggcctcatgtcggaaccacagcctgacctggaaccgccccaacatgggctatatatgctcttcctgcttgtgctggtcttcttcctcatgggcctggtaggcttcatgatctgccacgtgctcaagaagaagggctaccgctgccgcacgtcgaggggctctgagcctgacgatgcccagcttcagccccctgaggacgatgacatgaatgaggacacagtagagaggattgttcgctgcatcatccagaatgaagtgtggatgccacctccagcctgcaggacggagccccctcccatcatcacacagtgcacctgggctctgcagccccttgcatccattgcagccgcagcaagaggcctccacttgtccgtcagggacgctccaaggaaggaaaaagccgcccccggacaggggagaccactgtgttctctgtgggcaggttccgggtgacacacattgagaagcgctatggactgcacgaacaccgtgatggctcccccacagacaggagctggggctctcgtgggggacaggacccagggggtggtcaggggtctgggggagggcagcccaaggcagggatgcctgccatggagaggctgccccctgagaggccacagccccaggtcctagccagccccccagtacagaatggaggactcagggacagcagcctaacccctcgtgcacttgaagggaaccccagagcttctgcagagccaacactgagggccggagggaggggcccaagcccagggctgcccactcaagaggcaaatggggagccaagcaaaccagacacttctgatcaccaggtgtctctaccacagggagcagggagtatgtgagtctccttcattgtgctgatggactaccagctggcagggccagggggtgggtgggcgtgaaagccctcccctccactggacagcactgccccccagctgagggaccagctctacttccacctggagttgcacagtctcaggctgggggcctcaggagaggtcacagcccctcagtctcttctccttcccctgcctgcaacaggctgcctgccccgccttccccaacacctcgctccatatgatagagcgtggcagctgggagcaggcccctgcccgtggtgggcccctaaagcaatagcaccgtaggccccctgccctcttagcacaagaggcccaggccctggcctggccttcgtgccctttattcattgtcaataaatccgctcagaccattaaaaaaaaaaaaaaaaaaaaaaaaaaaaaaaaaaaaaaaaaaaaaaaaaaaaaaaaaaaaaaaaaaaaaaaaaaaaaaaaaaaaaaaaaaaaaaaaaaaaaaaaaaaaaaaaaaaaaaaaaaaaaaaaaaaaaaaaaaaaaaaaaaaaaaaaaaaaaaaaaaaaaaa

SEQ ID NO: 26575 - DNA, 2264 bp, Homo Sapiens
caggagtatcccgaggctgcacggggtaggggtggggggcggagggcgagtcttggtcttgagctgctggggcgcggattctctttcaaagccagaaccaggcctgtcccggacccgcgtcccggggaggctgcagcgcagagcagcggggctggggccggtggggggccgtttgggacgcgcggagaggtcctgagcgcggtggctctgcgtctcctagctctgatctccaggctacccctgtgattccgcgcagaggtacctctcggaggacgccggggtcccatgggcggcgccgcgcagggcgctaggaccccgcggggagcggaggcggcctcggcccgggagcctggaggacctggccggtcgatccgcccgggctggaaaactttctttataattacttctccaggtcggagcgcgcggcttgctaggcgcgcggggccggcgctgttacccggcgtggagtcgccgattttttttcctgcgggaccgcggggccccccagactagcggagctggacgccggggcgagcacggggaggggcgcaccgagggaggagacaaacttaactctggggccgggattccgaggcgggggccgcagccctcgaggcccgaagccaccgcttcctcccccgcctccccattcaggtgggcgccaacggcgggagcgagggtgtccaggccgccgggctgccaggtccgagcacgcacagggagaactctgcccagtggttcgccgggcgctgtagtccccgggatcctagggaccgaggcggccaggccctggggccccttgagtgcggcagctaatgctctcaccgcggcgggggaaggagcttgccaccgagacccccagccacgtgcgtccctcgcattctttaccggggccggggtggcggctacggaccgtcagctgggcccagatggagtcttgggagccctcaagtgtctcctgtccttgcccgcgccgcccctcgccactggcgctgaggcctgacgccgcctgcgtcccggctagaggcgcgcttgcctacaggtgagggaagacccccttcaccgacagtggccttaggcctggcaaggcgccacgacccgcccaggagccccggagggggcacagctaaaaacaccgctggagagccccgagcttccacgatcgcagtaaagaagcagtttcatctgggcaacgcacactgcgctttaatcaagttcctattcaacatagtcccagtgattaatagcccaactgcttcgttttcggtccagagctcataaacaagatatttttagcttgacgcttttggacgggagggagtaaaaaccagatacgttaaataaatatcccgatgtgagccggagagctgcttgctgagccaaatgcaggacccattcatatagcattcacctgtggagggagacctggacggaaatcaaaaagcaccaagagcgatttgcgtttttttctgcggtgctaaaactaatggcttttcctacctaggaacaaagaaacgccactgtacatgcacggttcccggcctgtggagttgtgggaggaaggcgatgtctggccttttttgcacagctgctgttgcctgcccagagatcgggaactctgccccgtaggactggaagaaacctcagtaatgggaataagactttgtccaatagggggctgatgaatgtgtgggggcgacaatggcaaggagtgggactcccggcccggggttcgccaaccccaggggccacaggtcctcctacaattgaaccagaattcacccacccgggcctgccctgtgcagggtgccgagagcccagggatgcatgagagggtggctcctgcctctgggaactgggacagtgggagagacggataagttgtcacacagaggctgctgggaggaaggaggagacagaaggagtaggggatgggacttcattcattcatcaaatgcacacgaggcacaaatgggaatcaagggtggatgtgctgtgatgaagagaagtcctgccctgaacaaggtggcgctgtggaggaggcagagatcagatttgtctgcggaggtgttatggactgaactgtgtccctgccccaaattcctatgttgaaggcctaacccccatgtgactgtatttggagataaggcttttaggaagtcattaaagtgagatgatgtcataaaaaaaaaaaaaaaaaaaaaaaaaaaaaaaaaaaaaaaaaaaaaaaaaaaaaaaaaaaaaaaaaaaaaaaaaaaaaaaaa

SEQ ID NO: 26576 - DNA, 3930 bp, Homo Sapiens
gaagtccccgaggcgcacagagcaagcccacgcgagggcacctctggaggggagcgcctgcaggaccttgtaaagtcaaaaatgtcagaaacttccaggaccgcctttggaggcagaagagcagttccacccaataactctaatgcagcggaagatgacctgcccacagtggagcttcagggcgtggtgccccggggcgtcaacctgcaagagtttcttaatgtcacgagcgttcacctgttcaaggagagatgggacactaacaaggtggaccaccacactgacaagtatgaaaacaacaagctgattgtccgcagagggcagtctttctatgtgcagattgacttcagtcgtccatatgaccccagaagggatctcttcagggtggaatacgtcattggtcgctacccacaggagaacaagggaacctacatcccagtgcctatagtctcagagttacaaagtggaaagtggggggccaagattgtcatgagagaggacaggtctgtgcggctgtccatccagtcttcccccaaatgtattgtggggaaattccgcatgtatgttgctgtctggactccctatggcgtacttcgaaccagtcgaaacccagaaacagacacgtacattctcttcaatccttggtgtgaagatgatgctgtgtatctggacaatgagaaagaaagagaagagtatgtcctgaatgacatcggggtaattttttatggagaggtcaatgacatcaagaccagaagctggagctatggtcagtttgaagatggcatcctggacacttgcctgtatgtgatggacagagcacaaatggacctctctggaagagggaatcccatcaaagtcagccgtgtggggtctgcaatggtgaatgccaaagatgacgaaggtgtcctcgttggatcctgggacaatatctatgcctatggcgtccccccatcggcctggactggaagcgttgacattctattggaataccggagctctgagaatccagtccggtatggccaatgctgggtttttgctggtgtctttaacacatttttacgatgccttggaataccagcaagaattgttaccaattatttctctgcccatgataatgatgccaatttgcaaatggacatcttcctggaagaagatgggaacgtgaattccaaactcaccaaggattcagtgtggaactaccactgctggaatgaagcatggatgacaaggcctgaccttcctgttggatttggaggctggcaagctgtggacagcaccccccaggaaaatagcgatggcatgtatcggtgtggccccgcctcggttcaagccatcaagcacggccatgtctgcttccaatttgatgcaccttttgtttttgcagaggtcaacagcgacctcatttacattacagctaagaaagatggcactcatgtggtggaaaatgtggatgccacccacattgggaaattaattgtgaccaaacaaattggaggagatggcatgatggatattactgatacttacaaattccaagaaggtcaagaagaagagagattggccctagaaactgccctgatgtacggagctaaaaagcccctcaacacagaaggtgtcatgaaatcaaggtccaacgttgacatggactttgaagtggaaaatgctgtgctgggaaaagacttcaagctctccatcaccttccggaacaacagccacaaccgttacaccatcacagcttatctctcagccaacatcaccttctacaccggggtcccgaaggcagaattcaagaaggagacgttcgacgtgacgctggagcccttgtccttcaagaaagaggcggtgctgatccaagccggcgagtacatgggtcagctgctggaacaagcgtccctgcacttctttgtcacagctcgcatcaatgagaccagggatgttctggccaagcaaaagtccaccgtgctaaccatccctgagatcatcatcaaggtccgtggcactcaggtagttggttctgacatgactgtgatagttgagtttaccaatcctttaaaagaaaccctgcgaaatgtctgggtacacctggatggtcctggagtaacaagaccaatgaagaagatgttccgtgaaatccggcccaactccaccgtgcagtgggaagaagtgtgccggccctgggtctctgggcatcggaagctgatagccagcatgagcagtgactccctgagacatgtgtatggcgagctggacgtgcagattcaaagacgaccttccatgtgaatgcacaggaagctgagatgaaccctggcatttggcctcttgtagtcttggctaaggaaattctaacgcaaaaatagctcttgctttgacttaggtgtgaagacccagacaggactgcagagggccccagagtggagatcccacatatttcaaaaacatgcttttccaaacccaggctattcggcaaggaagttagtttttaatctctccaccttccaaagagtgctaagcattagctttaattaagctctcatagctcataagagtaacagtcatcatttatcatcacaaatggctacatctccaaatatcagtgggctctcttaccagggagatttgctcaatacctggcctcatttaaaacaagacttcagattccccactcagccttttgggaataatagcacatgatttgggctctagaattccagtcccctttctcggggtcaggttctaccctccatgtgagaatatttttcccaggactagagcacaacataatttttatttttggcaaagccagaaaaagatctttcattttgcacctgcagccaagcaaatgcctgccaaattttagatttaccttgttagaagaggtggccccatattaacaaattgcatttgtgggaaacttaaccacctacaaggagataagaaagcaggtgcaacactcaagtctattgaataatgtagttttgtgatgcattttatagaatgtgtcacactgtggcctgatcagcaggagccaatatcccttactttaaccctttctgggatgcaatactaggaagtaaagtgaagaatttatctctttagttagtgattatatttcacccatctctcaggaatcatctcctttgcagaatgatgcaggttcaggtcccctttcagagatataataagcccaacaagttgaagaagctggcggatctagtgaccagatatatagaaggactgcagccactgattctctcttgtccttcacatcacccatgttgagacctcagcttggcactcaggtgctgaagggtaatatggactcagccttgcaaatagccagtgctagttctgacccaaccacagaggatgctgacatcatttgtattatgttccaaggctactacagagaaggctgcctgctatgtatttgcaaggctgatttatggtcagaatttccctctgatatgtctagggtgtgatttaggtcagtagactgtgattcttagcaaaaaatgaacagtgataagtatactgggggcaaaatcagaatggaatgctctggtctatataaccacatttctaagcctttgagactgttcctgagccttcagcactaacctatgagggtgagctggtcccctctatatatacatcatacttaactttactaagtaatctcacagcatttgccaagtctcccaatatccaattttaaaatgaaatgcattttgctagacagttaaactggcttaacttagtatattattattaattacaatgtaatagaagcttaaaataaagttaaactgattataaaaaaaaaaaaaaaaaaaaaaaaaaaaaaaaaaaaaaaaaaaaaaaaaaaaaaaaaaaaaaaaaaaaaaaaaaaaaaaaaaaaaaaaaaaaaaaaaaaaaaaaaaaaaaaaaaaa

SEQ ID NO: 26577 - DNA, 2829 bp, Homo Sapiens
ccacgcgtccgcacggaacagggaactatcagcccgtcggcctccgggccctgcattctctagccatggaccgggaccttttgcggcagtcgctaaattgccacgggtcgtctttgctctctctacttcggagcgaacagcaggacaatccacacttccgtagcctcctggggtcggccgccgagccagcccggggcccgccgccccagcacccgttgcagggcagaaaagagaagagagttgacaacatcgagatacagaaattcatctccaaaaaagcggatctgctttttgcactttcctggaaatcagatgcacctgcaacttctgaaattaatgaagacagtgaagatcattatgcaatcatgccacctttagagcaattcatggagatacctagtatggatcggagagagctgtttttccgagatattgagcgtggtgatatagtgattggaagaattagttctattcgggaattcggttttttcatggtgttgatctgtttaggaagtggtatcatgagagatatagcccacttagaaatcacagctctttgtcccttaagagatgtgccttctcacagtaaccatggggatcctttatcatattaccaaactggtgacatcattcgagctggaatcaaggatattgacagataccatgaaaagctagcagtatctctgtatagctcttctcttccaccacacctatctggtattaaattaggtgtaattagctctgaagagcttcctttatactacaggagaagtgttgagctaaatagcaattctttggagtcctatgaaaatgtcatgcagagttccttgggatttgttaatccaggagtagttgaattccttctagaaaaactaggaatagatgaatctaatccaccatctttaatgagaggcctacaaagcaaaaatttctctgaagatgattttgcttctgcattgagaaaaaaacaatccgcatcttgggctttaaaatgtgtgaagatcggagttgactattttaaagttggacgccatgtggatgctatgaatgaatacaataaagctttggaaatagacaaacaaaacgtggaagctttggtagctcgtggagcattatatgcgacaaaaggaagtttgaacaaagcaatagaagattttgagcttgcattagaaaactgtccaactcacagaaatgcaagaaaatacctctgccagacacttgtagagagaggaggacagttagaagaagaagaaaagtttttaaatgctgaaagttactataagaaagctttggctttggatgagacttttaaagatgcagaggatgctttgcagaaacttcataaatatatgcagaaatctttggaattaagagaaaaacaagctgaaaaggaagaaaagcagaaaacaaagaaaatagaaacaagtgcagaaaagttgcgtaagctcttaaaagaagagaagaggctaaagaagaaaagaagaaaatcaacttcttcttcaagtgtttcttctgctgatgaatcagtgtcttcatcatcatcctcttcctcttctggtcacaaaaggcataagaaacataagaggaaccgttcagagtcttctcgcagttccagaaggcattcatctagggcatcctcaaatcagatagatcagaataggaaagatgagtgctacccagttccagctaatacttcagcatcttttcttaaccataaacaagaagtggagaaactactggggaagcaggataggttacagtatgaaaagacacagataaaagagaaagatagatgccctctctcttcatcttcacttgaaataccggatgattttggaggtaggtctgaagatccaagagatttttataacagctataaaacccaagcaggtagtagcaaaacagaaaagccatataaatcagaaagacatttttccagtagaagaaattcctcagattccttctgtaggaattcagaggacaagatttatggttataggagatttgaaaaggatatagagggaagaaaagagcactatagaaggtgggaaccaggttctgtgaggcattctacctcaccagcaagctcagaatactcttggaagtcagttgagaaatacaaaaaatacgctcactctggatcacgtgatttcagtagacatgagcaaagataccgtttaaatacaaatcaaggagaatatgaaagagaggacaattatggggaggatatcaaaacagaggttccagaagaagatgcactaagtagcaaagaacactcagaaagcagtgttaagaaaaatttacctcagaatttactgaatatatttaatcagatagctgaatttgaaaaagaaaaaggaaataagtcaaaaaattaatacaccaaggatatcggcaccattacacaaaatgccattaagtgaagtttttggttgtattagtcataacagttgagtgcagaaatctctgcttctaaaattatttgtagagattacaggaaacaaatgcttttaagtaagtttttctcaaattttgtttcagttctaggtcccttgtcacagcttggtttttagactttttatgtatatgtttatgtacagtatattactcttgacagtttgaatttcttcacctaaagataattctctgaaagtactgtttcttcattctattgcggtatatgagaattcctgggtgcatcttattctgctgtttgagagaaaaatttgtgcattgaacacttggatcatttttataaaaattaatttcattttcttttctgttaaattaaaaatcgtcagcttttgaaagaaaaaaaaaaaaaaaaaa

SEQ ID NO: 26578 - DNA, 2442 bp, Homo Sapiens
cggcagggttggaaaatgatggaagaggcggaggtggaggcgaccgagtgctgagaggaacctgcggaatcggccgagatggggtctggcgcgcgctttccctcggggacccttcgtgtccggtggttgctgttgcttggcctggtgggcccagtcctcggtgcggcgcggccaggctttcaacagacctcacatctttcttcttatgaaattataactccttggagattaactagagaaagaagagaagcccctaggccctattcaaaacaagtatcttatgttattcaggctgaaggaaaagagcatattattcacttggaaaggaacaaagaccttttgcctgaagattttgtggtttatacttacaacaaggaagggactttaatcactgaccatcccaatatacaggtaatgtatttttctcttgatcccatagcaaattttaaaacaattataatttaaaaatgagttctgtataggcactcaggactgttacattgcacagccccacagggtacctttaacattataacatatgggttatcttgggaaaagtgggtgcatttctatagactaagctgtaccttacagctctccaggtactcagtagttaaggttttttttttaaagactaggaaaataaatcttctatttaatggtaatccttactgatgagaaaatttgatatgttttgaaaataggagtttctgatttttttgttgaaagttaatatctctaaaagtgcacttattaaaacatttaatttgtcagtgatatttagtaaagaaaaacactcatttgatgttatgtgttctaatgttctaaattttttctgaaaataattgtttcctaaaagaggtgtggtcctctctgcatcagagaacagagtactcctggggacagagctggccagaatacccaaaataattggcagatgtcaaatttggctttctgtgtttattactagagcataaacatttctagttttgtttgagtgttttacagtcctttttggcagttaggtattatacatttttttcttttgcaatggttttcatgagaaatctttattcccattacatgtgtatgttttatttttcttctgaactttgtaatactttgctatgttgaattgtttctgttggtagcgcacttttgcagcattcttcaaataggaggcaaaaaaatctttagtttagattaattattagtacttacaaaaaccaaggaaatgctgacttaggcctatcttctggtccactatctgatttctttatcttagtgtgttgttggtccattgtttaatagaaaattagtagaggagtttgaatttaccttacagcataaaccagatagaaaataacgcattcatccagtcatgcatccaatgattaccaaggcagaaggccaaacaccacataatttgtgtcacttgacaaaagcagtaatgttaaaaggcatttttttcctcatagaggtttcttggcatactttcttcagacatacactgtttgggcttgagttttgactcattatttgctgatgaagctactttaatctgtttgtgccttggtatcttcgctttaaaatgtaataatagttaccactttatggatatactgggaaacttaactgagttaatacttacaagatgcttagaacagtctgacaatttttaactcaacgaatgttattatttgttgctattattgacagcgtatgttcttaaaactgccaaaaattgatttaattatatagaaacttatgtaactattatcttatataatacttaagtatcataagtatgatagagttatgcttttctgggtgtttgaaaaatgtcaactaagacagatggagtctcacttatttcttggttatttaatattgttcagttagatgaaagtgtgattgtagatttgaaatacaaaataaaacttggatactgtgatttttttaacatggccagactgtcatgtattataatgacatatacttttgtccataaaatgaaattaagtttcactgaaaaatttacatactttcccctggggattctgttgcttcagattaaagtttataaagtatcattagtgtcttccacagggtcattttacacaaacacagttttagtgagatgtcaactggcttttgttggttgttggattgactgtgatttaaaatgttaaagatgatataatgcatcttgttctgcttctaggctgaaaggtcactgaggcagagctgtttgtaccttgtatcccctggaattttgcctaaacatttgtgtactcatagggtggtaggagatagtccgcagatggtctaaagaatgccatgtgatactgtgagatgccaataatataaataaaactttgttattattaaaaaaaaaaaaaaaaaaaaaaaaaaaaaaaaaaaaaaaaaaaaaaaaaaaaa

SEQ ID NO: 26579 - DNA, 1478 bp, Homo Sapiens
cggaggtgggtagatagacccggagagacggcgaaggagctggaaaccgagccagggctgagccggctgacaacagttgcaggttccgatctttgggtactccaggagctgttctatagcccctgcttctggacctatggattctccatctagcgtttcttcctattcctcctactctctctcttcgtcttttcccacctccccagtgaacagtgactttggcttcccctctgatagtgagagggaggacaagggggcccatgggcccaggccagacactgttgggcagaggggaggttcacggcccagcccgggtcctatccgctgcaggcatcgatcgaaggtttccggtaaccagcatacaccatctcatccgaaacagcggggttcggcttctcctatggcaggatctggggcgaaaagatcaagagatggtgaactggagaccagtctaaacacccaaggttgtaccacagagggagacctgctgtttgcccagaagtgtaaagaactccaaggatttatacctcctctcacagacctactcaatgggctgaagatgggtcgttttgagagaggattaagcagttttcagcagagtgtggcaatggacaggatccagcgtattgtaggtgttttgcagaagccacagatgggggaacgttacctaggaaccttgctacaggtagaagggatgttaaagacttggtttccacaaatagctgcccagaagtcatcattgggtggtggcaagcatcagctgaccaagcattttccaagccaccacagtgattcagctgcttcctctcctgcatctcctatggaaaagatggaccagacacagctaggacatctagctttaaaaccaaagcagccttggcacctcacacaatggccagctatgaacctcacctggatccacaccactccaatttgcaacccccctctcagctccccaggtactatctcctttagccatggtcctttaggcactggaaccggcattggcgtcattcttttcctccagcatggagtgcaacccttcacccactctgccccaaccaccccagtcccacctactacagcatctcctgtcatccctggtgagcctatgaaactatctggagagggtcctcgttgctacagtttgccagtaactctgccatcagactggagctataccctatcccctcccagtctacccaccttggccagaaagatgaccataggacaccgggagcagcagagaagccatcctccagttgctgctgatgctcatcttctcaacctctagcccagggcatacagctgtccactgtgacttctactttgtgtaaatatttatgtatatatgtatttttactattaatgtgtgcatttgtgttgagggaagataaatcctttctgattaaagaaatttttttatacctaaaaaaaaaaaaaaaaaaaaaaaaaaaaaaaaaaaaaaaaaaaaaaaa

SEQ ID NO: 26580 - DNA, 1898 bp, Homo Sapiens
tggcgctcgaccttcgccccacctggaaggcgccggatgcgagactcgcccttggctcggcccgcggccccggccggcgcctcgcccttcaccttcaagtccccgagggagctcggcaactcggcccaaggacaggggcccagcctagccgtcaccgccggcagcgcgctccgggtctggctctggtagtcactggcgtatcccgcatccggcctgctcacggcgctccaggcctgccccgcgcgccgaaaccctccgccggacgcggaggaaaagaaggtggtgagcgaggcacggagatgctccgacggctgcgcgggtctccgaggccgaaccgccacccgcgttccgggccagtcccagcccacggcgtggccagcgctgccgccggtccagcgacactgcgggcgcccccgggccgcggggcctcttctgagaccatgtggcccacagagaatctaagctcccgccgccgggctccacctcaacggcggagaactcgggcgccgagcatcgcccgatccctacccggcagcggacggctacagggtttgattttcccctccacaggaaagaacgtgcagaggcacaaatcccctcctcttccctcagaggaaagcctgtcccagcggtcccgctgagaacttccgaagccttggcgcggcaggcaggcccctgagccggtgcaccgcgaagttgcattctcaccttcgagtcaccgtggcttaggccgagtaaacgagcacttcatctagcgccgggcgggccccggcacgaagctaagagctcaaaactcctcgaagcgggcgcgcgacgtcgcggtccgagctctcctcgccgcactcccccatcagacctaagatcttttaccttttaaattaaagtgaatccagatccttgttaatgcggcctaatgtagcagcgggaagagtgtaggtccctggcgaggggagcgcgctccggtgacctctagcgcctcagacgcccgcgcaggaggaactcccgcagcccgcccgggacccgagggcaggagggtgcggggaacggggctgccactgcgcctaagcctttccccttttataggctttagggaaacaaatcctcttttcctagtggatgtaagaagtgagtgaatttaaagtcacagccacggcggtaagcggccccaattgtctgggattcataatgctgttaatatacacacgtatatgtaacagcactttgcaggtatacatacatatatattatatgtattttttttcatatgacgtttgcatcaatattctgcgtgctgtccctccccaaccccaaccccaatctgtttttaaaaatccacctccgcagaagaggagaggagtgcttcagggaagggtggaggcatccatgtcctcacctttcccagtgaggaatcgagacttcccgccttcgcgatggaactagaaaagggtatgtagtcctggactttaaaaagacaattaacagaagtggaaataaggatgtaactatattccgaggaagagcgggcaggaaattcttagctgtcgtagcagaaagtaaatgtctaaaactcataagcctaaaattagccatgcaggtacattaattaattaaccactagacaagcagaattattaatgtaggtaatgcccagtagggggaagaaaaaaggaattgattctgacctgtggcactggggctggggagagatggaaacttctgacaactctgtttatattacaagcccgtctgcaatgttgtttgagttgttgtaagcgtgtgcatcatttacattcttaaaattatttttaaatgaataaaacaataatgctttctataaaaaaaaaaaaaaaaaaaaaaaaaaaaaaaaaaaaaaaaaaaaaaaaaaaaaaaaaaaaaaa

SEQ ID NO: 26581 - DNA, 3181 bp, Homo Sapiens
cgcaggtggcggcgagcgcggggctcggcccgagctcaggagatggggaaactgaggcacggagctggacagtgactcagacaccaggagctgcctggagtggagctgagagctcaggtctgggctcagccagtccagagtgcaaatctactgtcccttcctagctgtgtgatcttgacaggcactggacggggcctgcaggggtctccacagagaccatcaggatgtcgtattttggggagcatttttggggcgagaaaaatcatggctttgaggtcctgtaccacagcgtgaagcaggggcccatctccaccaaggagctggcggacttcatccgggagagggccaccatcgaggagacctactcgaaggcgatggcgaaactctccaagctggccagcaacgggacccccatggggaccttcgccccgctctgggaggtcttccgcgtctcctcggacaagctggcgctgtgccacctggaactgacacggaagttacaggatctcatcaaggacgttctccgctacggcgaggaacagctcaagacccacaagaagtgcaaggaggaagtggtgagcaccttggatgctgtgcaggtactctcgggcgtcagccagctcctgcccaagtcccgcgagaactacctgaaccgttgcatggaccaggagcggctgcggagggagagtaccagccagaaggagatggacaaggcggagactaaaaccaagaaggcggcagagagcctgcggcgctcagtggaaaaatacaactcagcccgagctgactttgagcagaagatgctggactcagccctgcgcttccaagccatggaggagacacacctgaggcacatgaaggcactgctgggctcatatgctcactcggtggaggacacgcacgtgcagattgggcaggtgcatgaggaatttaagcagaacatcgagaacgtcagcgtggagatgctactcaggaagtttgcagagagtaagggcacaggccgggagaagcctggacctctggacttcgaggcatacagtgcggctgccctgcaggaagcgatgaaacgtttgcggggagccaaggcctttcgccttccaggactaagccggcgggagcgggagccggagccacctgcagctgtagatttcctggagcccgattcagggacatgtccagaggtggatgaagaaggtttcactgtccggcctgatgtgacccagaacagcacggccgagccctcccgtttctcgtccagcgactccgacttcgacgatgaagagccccgcaagttctatgtgcacatcaagcctgccccggcccgggctccagcctgcagccccgaggcagcagcggcacagctcagggccaccgcaggcagcctcatccttcctcctggcccagggggcaccatgaaacgccattcttcacgggacgctgctgggaaaccccagagacctcggtctgcccccagaaccagcagctgtgcagagagattgcagtcagaggagcaggtgtccaagaacctctttgggccgcccctggagtcagcctttgaccacgaagattttacaggctctagcagcctgggcttcacctccagcccctcccctttctcctcctcgtcgcccgaaaacgtggaggattccggcctggactctccgtcccacgcggcacctggcccctccccagattcctgggtcccccgcccaggcaccccgcagagcccgcccagctgtagggcgccacccccagaggccaggggtatccgggcaccgcctctgccagactcgccgcagcccctcgcctcgtctccaggcccctgggggctggaggccttggccggaggagacctgatgcctgcacctgctgaccccacagccagggagggcctggcagccccacccaggagacttcgctctaggaaggtgtcctgccctctcacacgtagcaatggggacctgtctcgttccctgagcccctccccactgggctcttcagccgccagcactgccttggaacggcccagcttcttatcccagacaggacacggagtctcccggggtccgagccctgtggtcctgggctcccaggatgccctgcccatagccacagccttcacggagtatgtccacgcctacttccgtggccacagccccagctgcctggctcgagtaactggggagctgaccatgaccttccctgctggcatcgtgcgtgtgttcagcgggaccccaccaccacctgtcctcagcttccggcttgtacacacaaccgctattgagcacttccagcccaacgccgatctgctgttcagtgacccctcccagagtgaccctgagaccaaagacttctggctcaacatggcagctctgaccgaagccctgcagcgccaggcagagcagaaccccactgcctcctactacaacgtggtgctgctgcgataccagttctcccgcccgggtccccagtctgtgcctctgcagctcagtgcccactggcagtgtggagccaccctcacccaggtctcagtggagtacggctaccggcccggtgccacggctgtgcccacaccactcacgaacgtccagatcctgctgcctgtgggggagcctgtgaccaacgtccgcttgcagccggctgccacctggaacctggaggagaagcggctcacttggaggcttccagatgtgtccgaggcaggcggttctggccgcctctctgccagctgggagccgctctcagggcccagcacacccagccccgtggctgcacagttcaccagcgaggggaccactctgtcgggcgtggacttggaactggtgggcagcggttaccgcatgtcgctggtgaagaggaggtttgccacagctgcacccccacagggatgtacctggtgagctgctgaacccgcaaatgctgctgccccagctctacactgcgccctggtgctggctgaccaccccctgccctcctgccggaccctggggcctcccaccccagcctccctgaggcccatactccacggagaggagccccatgcccagcctggctgagcccgagattcgctcctccccctcatgccaaccccacacaggtcccggccttttaatgttctttgaataaacactttattttctaataaaataaaaaaggaaaaaaaaaaaaaaaaaaaaaaaaa

SEQ ID NO: 26582 - DNA, 3720 bp, Homo Sapiens
ccacgcgtccggccagccgggtggcacagcggtgtcgtggccgtgttgctgatcgcctgggtggttgttggcgtgtccctgcagcgaaggatcctggttgacagtgaaaaagcagtctggctcccgaggtccaccccttataccccaaggtccagatggcggccaacgtgggtgatcaacgtagcacagattggtcttctcagtacagcatggtggctggggcaggccgagagaatggcatggagacgccgatgcacgagaacccggagtgggagaaggcccgtcaggccctggccagcatcagcaagtcaggagctgccggcggctctgccaagtccagcagcaatgggcctgtggccagtgcacagtacgtgtcccaggcagaagcctcagctttgcagcagcagcagtactaccagtggtaccagcagtacaactatgcctacccctacagctactactatcccatgagcatgtaccagagctatggctccccttcccagtatgggatggccggctcctatggctcagccacaccccagcagccatccgcaccccaacaccaagggactctgaaccagcccccagtccccggcatggatgagagcatgtcctaccaggctccccctcagcagctgccgtcggctcagccccctcagccctcaaatcccccacatggggctcacacgctgaacagtggccctcagcctgggacagctccagccacacagcacagccaggcggggcccgccacgggccaggcctatgggccacacacctacaccgaacctgccaagcccaagaagggccaacagctgtggaaccgcatgaaacccgcccctgggactggaggtctcaagttcaacatccagaagcgaccctttgctgttaccacccagagctttggctccaacgcagagggccagcacagtggttttggcccccagcccaaccctgagaaagttcagaaccacagcgggtcctctgcccgggggaacctgtctgggaagccggatgactggccccaggacatgaaagagtatgtggagcgctgcttcaccgcctgtgagtcggaggaggacaaggaccgcacggaaaagctgctcaaggaggtgctgcaggcgcggctgcaggacggctcggcctataccattgactggagccgggagcccttgccggggctgacccgggagcctgtggctgagagccctaagaagaagcggtgggaggccgctagcagccttcaccctcctagaggggcaggctcggcgacaaggggcgggggtgccccgtcccagcgagggacgcccggggctgggggtgccggtcgagcccggggcaacagcttcaccaagtttggcaaccgcaacgtcttcatgaaggacaacagctcttcttccagcacagactcccgctcccgctcctcctccaggtccccgacgcgccacttccgcagaagtgactcccactcagactccgacagctcctactcagggaatgagtgtcaccctgtgggccgcaggaacccgccccctaagggccggggcggtcgaggggcccatatggatcggggccgaggcagggcgcagcgtgggaagaggcacgatctggcgcccaccaagcgcagtcgaaagaagatggcggcgctggagtgtgaggacccggagcgagagctgaagaagcagaagcgggcagcccgcttccagcacggacactcccgccgcctgcgcctcgagcccctggtgctgcagatgagcagcctggagagcagtggggctgaccctgactggcaggagctgcagatcgtgggcacctgccctgacatcaccaagcactacctgcgcctcacctgtgcccccgacccgtccaccgtgcgccctgtggcagttttgaaaaagtcgctgtgcatggtcaagtgccactggaaagagaagcaggactacgcgtttgcctgcgagcagatgaagtcgatccggcaggatctgacggtgcagggcatccgcaccgagttcacggtggaggtgtacgagacccatgcccggatcgccttggagaagggtgaccatgaagagtttaaccagtgccagacgcagctcaagtcgctgtacgccgagaacttgcctggcaatgtgggcgagtttactgcctaccgaatcctctactacatcttcaccaagaactcgggagacatcaccacggagctggcatacctcacacgagaactgaaggcagatccttgcgtggcccacgccttggcattaaggacagcctgggccctgggcaactaccaccgctttttccggctctactgccatgcaccctgcatgtctggctacctcgtggacaagtttgcagatcgggagcgcaaggtcgccctcaaggccatgatcaaaaccttccgccctgcgctgccagtctcctacctgcaggccgagctggccttcgagggcgaggccgcctgccgggccttcctagagcccctgggcctggcctacacgggcccggacaactccagcatcgactgccgcctcagcctggcgcagctgtcagccttctgagcacccagcgaggaggggcgggggcaggggctgcagcccccagcgctgcctttgcggattctgtttttgagccgtggacttgggttgtaaatttatttgtggggagtgcgctccaggaagagccaccatccctgcccccgttttcccaccggggagtctgtacagagatttttctacgtttttattttttgcctcagagggatgggattggggaggaggggatgggcagcggagggttgggggcatggtctgcaggctcatctgtgtccgcctttcactccactaatgctgtctcagtgttttctctctctctctttcgagcttgcactccggtacccgacccggcgccctggcccatcccatgccggggggccagtggaaagaagacaggccgtccagcccgtgcccgcctgcggcgggggcacccagcaagcccgcccaccgcccgctgcctcacctgcttcgccacagactcttgttcccagccccttggggcctccgtgtttggggtgggggagctgcttagagactgtgcccgtcctcggccccccaccctgaagtgccagcaccaccagcaccagatcctccgccgccacaccgcactgaggacacgccggccgggccgcctcgtctcaagttgtataaagttgtctccgtgtcccctcctccctctgcccccagtgtttcttctgatttttttttcccctttccctccctccctctccgcattcttcccttggttcagcacaggtaaaacggttcccctccctccctgccttcatggatcaccagctcacgtcatgttgccttctcttttctttgtgtgtgtgtttatttaagttatttttcttcctcctctcccttttctttttggccctccctccctccctcttctgccatgtaactggaggatgtgctatgagtttgcaaacagctggactgtcaggctgctttttttccagatgttcctcctctgcctccccttcccctcctctcccctccttttccttccttccttcctttccttggagcactgagcaccatttggaagcttgagagaaaccaaaattaaagagagaaagagagagaaaaaaaaaaaaaaaaaaaaaaaaaaaaaaaaaaaaaaaaaaaaaaaaaaaaaaaaaaaaaaaaaaaaaaaaaa

SEQ ID NO: 26583 - DNA, 1044 bp, Homo Sapiens
cagagctagaaggatgccatgaaggaaatgactgctttgtaaagcgagggtaaacttctgaaatgctttgattaaaataagctatattaaagaccccaaaaccacttccctcgcagctttcctctgaatgtctttcacatgaaatgggcctgagtcactctaagactcaccttagggtgatcaaagtagcacctttgcaaaacaaagaggtagagactccctcggctggccgtgtggactttgcattcaatcagaatttggaagaaaagacttcatattcactggcaagactgcaggaccagaataaagccttggaagggcagctgccacctttacaagaaaactgcatccagagacatgtattttgacatcccactggaacacagagaaacaagtattattaaaaggcatccaccccaaagacttcaaaagcttgaacccattgacttgccacgagtaattacttcaggaagactcctgagccagcgagaagccaggacaatgcacaaagcaaaggtactagaaaagaaaatgcaaactccaatgtatacttctgagaacagacaatatttgcataagatgcaagtgctggaaatgatccgtaaaagacaagaggcccaaatggagttaaagaaaagtcttcatggagaggcaagaattaataagcaaagtccaagggaccataaagccaagaaaacccttcaaagcaccccaaagaatgatgaccatgaccttctaaccatgttgcctgatgaaatcttgaacagaggtcccgggcaaacccacagttgaaatttccaatattgttcacacacacagatcgctgtgctgtgggccaaatccccacatcagcaggactgacccaccgctgagagagctgcagaaaagctggctatgtctctggaggtcttgaacttctaagacgcaaaattgcctgctgaaagagacactgctcctacttggagaaacaagacgctcgatcaataagttaattaaataagaaaaggctgaataattgaaaaaaaaaaaaaaaaaaaaaaaaaa

SEQ ID NO: 26584 - DNA, 2881 bp, Homo Sapiens
cccggctctgcccgcccttcgaaagtccagggtccctgcccgctaggactgaggggctttttctctctgtgccccaggcaagttgcactcatggcacctccaagtgaagagacgcccctgatccctcagcgttcatgcagcctcttgtccacggaggctggtgccctgcatgtgctgctgcccgctcggggccccgggcccccccagcgcctatctttctcctttggggaccacttggctgaggacctgtgcgtgcaggctgccaaggccagcggcatcctgcctgtgtaccactccctctttgctctggccacggaggacctgtcctgctggttccccccgagccacatcttctccgtggaggatgccagcacccaagtcctgctgtacaggattcgcttttacttccccaattggtttgggctggagaagtgccaccgcttcgggctacgcaaggatttggccagtgctatccttgacctgccagtcctggagcacctctttgcccagcaccgcagtgacctggtgagtgggcgcctccccgtgggcctcagtctcaaggagcagggtgagtgtctcagcctggccgtgttggacctggcccggatggcgcgagagcaggcccagcggccgggagagctgctgaagactgtcagctacaaggcctgcctacccccaagcctgcgcgacctgatccagggcctgagcttcgtgacgcggaggcgtattcggaggacggtgcgcagagccctgcgccgcgtggccgcctgccaggcagaccggcactcgctcatggccaagtacatcatggacctggagcggctggatccagccggggccgccgagaccttccacgtgggcctccctggggcccttggtggccacgacgggctggggctgctccgcgtggctggtgacggcggcatcgcctggacccagggagaacaggaggtcctccagcccttctgcgactttccagaaatcgtagacattagcatcaagcaggccccacgcgttggcccggccggagagcaccgcctggtcactgttaccaggacagacaaccagattttagaggccgagttcccagggctgcccgaggctctgtcgttcgtggcgctcgtggacggctacttccggctgaccacggactcccagcacttcttctgcaaggaggtggcaccgccgaggctgctggaggaagtggccgagcagtgccacggccccatcactctggactttgccatcaacaagctcaagactgggggctcacgtcctggctcctatgttctccgccgcagcccccaggactttgacagcttcctcctcactgtctgtgtccagaacccccttggtcctgattataagggctgcctcatccggcgcagccccacaggaaccttccttctggttggcctcagccgaccccacagcagtcttcgagagctcctggcaacctgctgggatggggggctgcacgtagatggggtggcagtgaccctcacttcctgctgtatccccagacccaaagaaaagtccaacctgatcgtggtccagagaggtcacagcccacccacatcatccttggttcagccccaatcccaataccagctgagtcagatgacatttcacaagatccctgctgacagcctggagtggcatgagaacctgggccatgggtccttcaccaagatttaccggggctgtcgccatgaggtggtggatggggaggcccgaaagacagaggtgctgctgaaggtcatggatgccaagcacaagaactgcatggagtcattcctggaagcagcgagcttgatgagccaagtgtcgtaccggcatctcgtgctgctccacggcgtgtgcatggctggagacagtgagagccccccacccacccaccccacccctgcctcacccaagtctaggctgttcttcccacctctgttctgagccgctatatgacagccccagcaacacactgggccaccctggatgggagccgtgttcattaccctttatttatgtctctccatcatcactccttggaaagcggctccaggttctcacccatatccagccccagaatgacctgaagtcagacaaacctggctttctaatctctgcagctttgtacaggtcacgtaacctttctgagccttggtttcattggttgggagtctaggatgggccaggagctgggacagagcctagaatgtgacaggcagggtgtgatgaggtgtgaggagggcagcacggagcactgtggatggtcagagaggcattcctggcagagggaacagcatgccaagcgtgagaaggctcagagtaaggaggttaagagcccaagtattggagcctacagttttgccccttccatgcagtgtgacagtgggcaagttcctttccctctctgggtctcagttctgtcccctgcaaaatggtcagagcttaccccttggctgtgcagggtcaactttctgactggtgagagggattctcatgcaggttaagcttctgctgctcctcctcacctgcaaagcttttctgccacttttgcctccttggaaaactcttatccatctctcaaaactccagctaccacatccttgcagccttccctcatatacccccactactactgtagccctgtccttccctccagccccactctggccctggggctggggaagtgtctgtgtccagctgtctcccctgacctcagggttccttgggggctgggctgaggcctcagtacagagggggctctggaaatgtttgttgactgaataaaggaattcagtggaaaaaaaaaaaaaaaaaaaaaaaaaaaaaaaaaaaaaaaaaaaaaaaaaaaaaaaaaaaaaaaaaaaaaaaaaaaaaa

SEQ ID NO: 26585 - DNA, 3860 bp, Homo Sapiens
gtgaacgggcagaagcagggccatgcccaagccacccccaagatccccctgaacctgcacctccatcacgacccattcaggagcctccaggagcccagacaccagccccccaccatgggcagcaaggagcgcttccactggcagagccacaacgtgaagcagagcggcgtggatgacatggtgcttcttccccagatcaccgaagacgccattgccgccaacctccggaagcgcttcatggacgactacatcttcacctacatcggctctgtgctcatctctgtaaaccccttcaagcagatgccctacttcaccgaccgtgagatcgacctctatcagggcgcggcccagtatgagaatcccccgcacatctacgccctcacggacaacatgtaccggaacatgcttatcgactgtgagaaccagtgtgtcatcattagtggagagagtggagctgggaagacagtggcagccaaatatatcatgggctacatctccaaggtgtctggcggaggcgagaaggtccagcacgtcaaagatatcatcctgcagtccaacccgctgctcgaggccttcggcaacgccaagactgtgcgcaacaacaattccagccgctttggcaagtactttgagatccagttcagccgaggtggggagccagatgggggcaagatctccaacttcttgctggagaagtcccgcgtggtcatgcaaaatgaaaatgagaggaacttccacatctactaccagctgctggaaggggcctcccaggagcaaaggcagaacctgggcctcatgacaccggactactattactacctcaaccaatcggacacctaccaggtggacggcacggacgacagaagcgactttggtgagactctgagtgctatgcaggttattgggatcccgcccagcatccagcagctggtcctgcagctcgtggcggggatcttgcacctggggaacatcagtttctgtgaagacgggaattacgcccgagtggagagtgtggacctcctggcctttcccgcctacctgctgggcattgacagcgggcgactgcaggagaagctgaccagccgcaagatggacagccgctggggcgggcgcagcgagtccatcaatgtgaccctcaacgtggagcaggcagcctacacccgtgatgccctggccaaggggctctatgcccgcctcttcgacttcctcgtggaggccatcaaccgtgctatgcagaaaccccaggaagagtacagcatcggtgtgctggacatttacggcttcgagatcttccagaaaaatggcttcgagcagttttgcatcaacttcgtcaatgagaagctgcagcaaatctttatcgaacttaccctgaaggccgagcaggaggagtatgtgcaggaaggcatccgctggactccaatccagtacttcaacaacaaggtcgtctgtgacctcatcgaaaacaagctgagccccccaggcatcatgagcgtcttggacgacgtgtgcgccaccatgcacgccacgggcgggggagcagaccagacactgctgcagaagctgcaggcggctgtggggacccacgagcatttcaacagctggagcgccggcttcgtcatccaccactacgctggcaaggtctcctacgacgtcagcggcttctgcgagaggaaccgagacgttctcttctccgacctcatagagctgatgcagaccagtgagcaggccttcctccggatgctcttccccgagaagctggatggagacaagaaggggcgccccagcaccgccggctccaagatcaagaaacaagccaacgacctggtggccacactgatgaggtgcacaccccactacatccgctgcatcaaacccaacgagaccaagaggccccgagactgggaggagaacagagtcaagcaccaggtggaatacctgggcctgaaggagaacatcagggtgcgcagagccggcttcgcctaccgccgccagttcgccaaattcctgcagaggtatgccattctgacccccgagacgtggccgcggtggcgtggggacgaacgccagggcgtccagcacctgcttcgggcggtcaacatggagcccgaccagtaccagatggggagcaccaaggtctttgtcaagaacccagagtcgcttttcctcctggaggaggtgcgagagcgaaagttcgatggctttgcccgaaccatccagaaggcctggcggcgccacgtggctgtccggaagtacgaggagatgcgggaggaagcttccaacatcctgctgaacaagaaggagcggaggcgcaacagcatcaatcggaacttcgtcggggactacctggggctggaggagcggcccgagctgcgtcagttcctgggcaagagggagcgggtggacttcgccgattcggtcaccaagtacgaccgccgcttcaagcccatcaagcgggacttgatcctgacgcccaagtgtgtgtatgtgattgggcgagagaaagtgaagaagggacctgagaagggccaggtgtgtgaagtcttgaagaagaaagtggacatccaggctctgcggggagtctccctcagcacgcgacaggacgacttcttcatcctccaagaggatgccgccgacagcttcctggagagcgtcttcaagaccgagtttgtcagccttctgtgcaagcgcttcgaggaggcgacgcggaggcccctgcccctcaccttcagcgacacactacagtttcgggtgaagaaggagggctggggcggtggcggcacccgcagcgtcaccttctcccgcggcttcggcgacttggcagtgctcaaggttggcggtcggaccctcacggtcagcgtgggcgatgggctgcccaagagctccaagcctacgcggaagggaatggccaagggaaaacctcggaggtcgtcccaagcccctacccgggcggcccctgcgccccccagaggcatggatcgcaatggggtgcccccctctgccagagggggccccctgcccctggagatcatgtctggagggggcacccacaggcctccccggggccctccgtccacatccctgggagccagcagacgaccccgggcacgtccgccctcagagcacaacacagaattcctcaacgtgcctgaccagggcatggccggcatgcagaggaagcgcagcgtggggcaacggccagtgcctggtgtgggccgacccaagccccagcctcggacacatggtcccaggtgccgggccctataccagtacgtgggccaagatgtggacgagctgagcttcaacgtgaacgaggtcattgagatcctcatggaagatccctcgggctggtggaagggccggcttcacggccaggagggccttttcccaggaaactacgtggagaagatctgagctgggccctgggatactgccttctctttcgcccgcctatctgcctgccggcctggtggggagccaggccctgccaatgagagcctcgtttacctgggctgcaatagcctaaaagtccagtcctttggcctccagtcctgcccaggccctgggtcaccaggtcactgctgcagcccccgcccctgggccctggtcttcctccaacatcacacctgctgcccattctccatttctgtgtgtgtcaaaggggactaacagcagaatctacctcccaactgccatgtgattaagaaatgggtcttgagtcctgtgctgttggcaaagtgccaggcacagttggggaggggggggtccttaacaagcgtgactttgctcattctgtcatcactaaggcaataaacctttgccaggtgaaaaaaaaaaaaaaaaaaaaaaaaaaaaaaaaaaaa

SEQ ID NO: 26586 - DNA, 1725 bp, Homo Sapiens
gctcgcgcaggagaccccgggtgacggggcccggcgccgctaactggagcgaaccccagcgtccgccgacatggcctggaccaagtaccagctgttcctggccgggctcatgcttgttaccggctccatcaacacgctctcggcaaaatgggcggacaatttcatggccgagggctgtggagggagcaaggagcacagcttccagcatcccttcctccaggcagtgggcatgttcctgggagaattctcctgcctggctgccttctacctcctccgatgcagagctgcagggcaatcagactccagcgtagacccccagcagcccttcaaccctcttcttttcctgcccccagcgctctgtgacatgacagggaccagcctcatgtatgtggctctgaacatgaccagtgcctccagcttccagatgctgcggggtgcagtgatcatattcactggcctgttctcggtggccttcctgggccggaggctggtgctgagccagtggctgggcatcctagccaccatcgcggggctggtggtcgtgggcctggctgacctcctgagcaagcacgacagtcagcacaagctcagcgaagtgatcacaggggacctgttgatcatcatggcccagatcatcgttgccatccagatggtgctagaggagaagttcgtctacaaacacaatgtgcacccactgcgggcagttggcactgagggcctctttggctttgtgatcctctccctgctgctggtgcccatgtactacatccccgccggctccttcagcggaaaccctcgtgggacactggaggatgcattggacgccttctgccaggtgggccagcagccgctcattgccgtggcactgctgggcaacatcagcagcattgccttcttcaacttcgcaggcatcagcgtcaccaaggaactgagcgccaccacccgcatggtgttggacagcttgcgcaccgttgtcatctgggcactgagcctggcactgggctgggaggccttccatgcactgcagatccttggcttcctcatactccttataggcactgccctctacaatgggctacaccgtccgctgctgggccgcctgtccaggggccggcccctggcagaggagagcgagcaggagagactgctgggtggcacccgcactcccatcaatgatgccagctgaggttccctggaggcttctactgccacccgggtgctccttctccctgagactgaggccacacaggctggtgggccccgaatgccctatccccaaggcctcaccctgtcccctccctgcagaacccccagggcagctgctgccacagaagataacaacacccaagtcctctttttctcactaccacctgcagggtggtgttacccagcccccacaagcctgagtgcagtggcacgatctcggcggctcactacaacctctgcctcaagcgatcctcccatctcagcctcccaaagtgctgggattacagacctgagccaccacacctgggcaacagagtgaaacctgtccctgttttcctgctcttactctcacctccgaggcctcctctgcctggaagagattacagggaaattccaggcaaaaaaaaaaaaaaaaaaaaaaaaaaaaaaaaaaaaaaaaaaaaaaaaaaaaaaaaaaaaaaaaaaaaaaaaaaaaaaaaaaaaaaaaaaaaaaaaaaaaaaaaaaaaaaaaaaaaaaaa

SEQ ID NO: 26587 - DNA, 2052 bp, Homo Sapiens
ggtcgctgctcagggaaatgcggaggccagtaggcttacgtgtttaccgcgtagggcaaagccttgccaaattcccggccagcggagcggcgagggtggggactcacgggacgttaaacagcctcgtcggcgtcctcgaggctccaaaaccaggctctaggcggggacgactgcagccgttatggaggccaccgcggctacggccgcggctgaggcctccccaggtggagcggtggcctggaggggaatcttgatcctgggccagccacctgtcaagaggaggcggagcgtcatgcctctggaagactggatgaatattctccaggagcctgacgaaggcgaagaagtctttgcagaggaaattgaatgctgtctgatgctacaattcatatggatcctttcctggattgaagcctgacttttaaaaaaggtttcaataaattgcttatacctatgaagagatgcaaaagaaccttcaaaataaagcaaaggacttgaagaaagagaaggaagacatgaagaagaggatgtcatttaggtgaagggccatgctggataaggagctggctgcctctgtgaacatcctactcaaggcatcttcactgctgtacatccttttgaaatcccagagatcttcagtctccctgtggattaaggagatgtgcagtatttaaagtggcttcaggaaggcatggaagaggactgagtggggaaagctttttgtgcatgctgctggctacctccagcggctgcctccagcctccatcagctgcactctggggaagaggaggctgccttctacctcccagcatctctggatttcatgttcctgtcagcacagaggagctaaatggcctgtagaggctgaaggtctgaggctcctaaagctggaagaaaaggctgggccagtcaggccaagcaagaacacagtgtaacttgtctctgagtgcttcatggttaagggggctaagcaggcacaagggcatgaggatggttatatgtacagactgaggggaagaagcagtgaagatgagacttgccatcttcttgagtcagtaggcctgcctcaggtgcctaggatgtaattgctctgctgcttctcatggggaggagtggccctcatgaccttgtttacctggaagagtgtgggatgaatgcctcctcctatggggactcgcaagtgctttagcaaaaggataaattgctaattgtggcatttcgtggatcagcaggattatttctccttgctaaagaggattttgttggtcctgaattctgaggaggtgggactaggaatgggctccatgagcctgtgtatgactcagggaatattaggactttggcacagcctcatgggttgggagtaagtcttggctcttccctagcctgaatgacagacatcagatcattctggtgctttgtccatgaagatgtagattctgagcccacccaactaatcttttcacttgagcacagaaacagccccgggaatcggacagacccgtgtctttcaggtttgcttcacagagccccaggggttgacaataggtgccttggagactgcctgcatggggatttttaaaaagctttctttgttaaaggtttgtaaaccactcctctgagcctgttttcattttatagattattcagggaactgaactgcacagagatccagaaagtgggtagtgcaggctgtagtgctgataactactgtactacttggatctttgtgctcccaaataccaaatggaagaggatctctgagagtcctttgcaaagatcttgtagggactttaggctggggccttcggaaaattccagaggattccaatggagattttgagggactgactcagaagaacaaagaaatgataatggtgatgtccctgctttttacaacagatcatgttctgatatatatgcaaatctgtgtaaagtaaaccctacctaaaatgtactggggacccaaaaaaaaaaaaaaaaaaaaaaaaaaaaaaaaaaaaaaaaaaaaaaaaaaaaaaaaaaaaaaaaaaaaaaaaaaaaaaaaaaaaa

SEQ ID NO: 26588 - DNA, 1324 bp, Homo Sapiens
ccacgcgtccgctaaaaatacatctcagacggcagctattactacaaagggaggcctcgtgggtctggtagattatcctgatgatgatgaagatgatgatgaggatgaagataaggaagatacgttaccattgtcaaagaaagcaaaatttgattcataataatggcaacggcctaggatcagtacctgttgaaaaaaactggttctccacccctcccccatacaaaatccacaacaaagcgcagtggtctcttgtgaatgactgacacagatcagcctcttacacttgacttctgctcatcaagtgccaattcaatggagcaggaggaggggatatcatatatttaggggaaagacttaagcctttgagctctccagcttggaccacacattgcccttttctcagggaaggaaatggaaacaaaaagccaacagggcaggggttttgtaagtggaactctggattgactggtcagttgctacaatcagaatatgctttcttggaccatgtttgagactcagaagaatgggcctttctgccataattcttcactagtcaagaatgccagcagtttctttgtataaagagacctgcctttaaaatcatacattctgaacattttagtcaagctacaacaggtttggaaaacctctgtgggggaggggcgagtataaagttttcctcttttttaactgttccctttgcccttcaaactgcagatatttttttttttaagtggggacttctccctacttgattaaagattgagtggaattctagatgtggtcatttgtgtcataatttttttgttttattttgtttttgattttttttttcctcccctgagtgtatgcttagttgttgagtatatatatttgggaccattaaaactttttttgatgtaatataacctaacgttgtgctggtacctgttttaccatgtgtaatttttgttctacatcacagttcttaatttgtttagagttttatgaaagatggtatagtttttattgacaaaagcaaagtaatcttacaactatgtgcatacaaaagcaatactattttgtgactaaatattttatattaaaatttacatcagcaactgtcttgagaattcagggaaatagaatggaatttaaaacttcaacagttttgttaaatctagaaacatgaaattagtattccaaagagattctgaaatttcttttcttggggaaatgacggtacattaaatcaaaattgaggatggatgatttaaaaacatttgacttttgaataataaaaagaaaagtgaagagtaagagaaaaaaaaaaaaaaaaaaa

SEQ ID NO: 26589 - DNA, 2186 bp, Homo Sapiens
gcgcctttcccggaaggcagggaggcagcgccggcctccggaggcggcctgggcgatggcggcggagttttgtccataacgtgggcaaccgcgcagctggaggatggcctcactcgggcctgccgcagctggggagcaggcgtcgggggctgaggcggagccgggccccgcggggccgccgccgccgccctcaccgtcctctctggggcccctgctccccctgcagcgggaacctctctacaactggcaggcgaccaaggcgtcgctgaaggagcgcttcgccttcctcttcaactcggagctgctgagcgatgtgcgcttcgtactgggcaagggtcgcggcgccgccgccgctgggggcccgcagcgcatccccgcccaccgcttcgtgctggcggccggcagcgccgtctttgacgccatgttcaacggcggcatggccaccacgtcggccgagatcgagctgccggacgtggagcccgcagccttcctggcgctgctgagatttctatattcagatgaagttcaaattggtccagaaacagttatgaccactctttatactgccaagaaatacgcagtcccagccttggaagcacactgtgtagaatttctcaccaaacatcttagggcagataatgcctttatgttacttactcaggctcgattatttgatgaacctcagcttgctagtctttgtctagatacaatagacaaaagcacaatggatgcaataagtgcagaagggtttactgatattgatatagatacactctgtgcagttttagagagagacacactcagtattcgagaaagtcgactttttggagctgttgtacgctgggcagaagcagaatgtcagagacaacaattacctgtgacttttgggaataaacaaaaagttctaggaaaagcactttccttaatccggttcccactgatgacaattgaggaatttgcagcaggtcctgctcaatctggaattttgtcagatcgtgaagtggtaaacctctttcttcattttactgtcaaccctaaaccccgagttgaatacattgaccgaccaagatgctgtctcaggggaaaggaatgctgcatcaatagattccagcaagtagaaagccgctggggttacagtgggacgagtgatcgaatcagattcacagttaatagaaggatctctatagttggatttggcttgtatggatctattcatggccctacagattatcaagtgaatatacagatcattgaatatgagaaaaagcaaaccctgggacagaatgataccggctttagttgtgatgggacagctaacacattcagggtcatgttcaaggaacccatagagatcctgcccaatgtgtgctacacagcatgtgcaacactcaaaggtccagattcccactatggcacaaaaggattgaagaaagtagtgcatgagacacctgctgcaagcaagactgtttttttcttttttagttcccctggcaataataatggcacttcaatagaagatggacaaattccagaaatcatattttatacataatttagcattataatacatcttggctaaataataccatacaatctagtgtcaaaaacataaatggccacaaaaaagtagtttgagtgttatgaatatttaaaattgtaagataagaaacagtttcttagagcagatagaaaaatgcttatttaaatctttgcatgatttaaaaacagattttccattttcttacaactttaagagaaaagaactgggtttaatggtttaaaaaaaagcacagctttttcaccttcatcttgtataatttcatagattggctgacttagggtctttcaatagtttgggaattgaaagattcttgttatatatagctagtttgggtttgtttttgttttaactattttgaaggttaggtgagatgggcaaataggcttaactattttgaaggttggatgaaaagagatgggtcagtattcctacagaattcttattaactcaaataactaaatttcagaaaattaagaagctgactttatatttggtggtttgaagtatcttgttgttagcatttgtaataatgctaaaaaaggcctaataaaatgcccaagaaaatattcagtgcaaaaaaaaaaaaaaaaaaaaaaaaaaaaaaaaaaaaaaaaaaaaaaaaaaa

SEQ ID NO: 26590 - DNA, 1930 bp, Homo Sapiens
cggctgcgcctcgcttcagcgatggccgcggagctgagcatggggccagagctgcccaccagcccgctggccatggagtatgtcaacgacttcgacctgctcaagttcgacgtgaagaaggagccactggggcgcgcggagcgtccgggcaggccctgcacacgcctgcagccagccggctcggtgtcctccacaccgctcagcactccgtgtagctccgtgccctcgtcgcccagcttcagcccgaccgaacagaagacacacctcgaggatctgtactggatggcgagcaactaccagcagatgaaccccgaggcgctcaacctgacgcccgaggacgcggtggaagcgctcatcggctcgcacccagtgccacagccgctgcaaagcttcgacagctttcgcggcgctcaccaccaccaccatcaccaccaccctcacccgcaccacgcgtacccgggcgccggcgtggcccacgacgagctgggcccgcacgctcacccgcaccatcaccatcatcaccaagcgtcgccgccgccgtccagcgccgctagcccggcgcaacagctgcccactagccaccccgggcccgggccgcacgcgacggcctcggcgacggcggcgggcggcaacggcagcgtggaggaccgcttctccgacgaccagctcgtgtccatgtccgtgcgcgagctgaaccgccacctgcggggcttcaccaaggacgaggtgatccgcctgaagcagaagcggcggaccctgaagaaccggggctacgcccagtcttgcaggtataaacgcgtccagcagaagcaccacctggagaatgagaagacgcagctcattcagcaggtggagcagcttaagcaggaggtgtcccggctggcccgcgagagagacgcctacaaggtcaagtgcgagaaactcgccaactccggcttcagggaggcgggctccaccagcgacagcccctcctctcccgagttctttctgtgagtcgtggccggtcctggcccccgcccttgccccggcccggactccctgtcccacgtccctagtcccagactaccccggaccctgtccctgccgcggccccagccttgacctgtttgacttgagcgagagggaggaagggcgcgcgggccgcgggcgacgggcgggtgcgcgggcgggcaggggaccttggctaaggcgagagtagcgcacgccagcgccgcctcctagactcgagcagagccggagagagagacgagagggtgggaggtcccggagtaacttctctccaggctgaagggcggcgaggcatagtcccgagaagtcaccaaggccatctggagactcctggctttctgaactttgcgcgttaagccgggacagctgctttgctgcccggagagtagtccgcgccaggaagagagcaacgaggaaaggagagggactctggcgtcccggcaggcgagaggcgaggctgagcgaaagaaggaaggacagacggacctgtctgtcagagttcggagaacactggctctcagccctgagacacaggcctcagttaggacgctcggcgcccaaatctcatcagttttattgcctgctcgattatatagaaaaatacaaaaaatctgcattaaaaatattaatcctgcatgctggacatgtatggtaataatttctattttgtaccattttcttgtttaactttagcatgttgttgatcatggatcatactccccttgtttctttgggtgagaagggatcgcagtttggaaactccggcggctgcgtgcggggtttcagtcccagctgtaggcttgtaaatacccgccccgccaaaccgcatagagaacgtggcagcaagctgagggtctttgtttgggtttattattacggtatttttgtttgtaagttaaaaaaaaaaaaaaaaaaaaaaaag

SEQ ID NO: 26591 - DNA, 1470 bp, Homo Sapiens
cgaagatggcggggcgaagtctgtgtctcacgagaagcagcgttccagggactccgttcccgccacccgttcagcaaccctctacacctggacccgacctcctcgccttggaggaagaatataagcgtttaaatgcagaattgcaggcaaaaacagctgacgtggttcaacaagctaaggaaataataagagatcggcaagaagtacgatctaggcctgtttcaacacaaatgaaatcatgtgatgacgaagatgattacagtttaagaggtctgttaccatctgaagggatagttcatcttcattcagaaactaagccaaagaccaaaaacattgatcctgtaaacaaggttcaaaacaaattacactctgcaaataaaggaaggaaaacaaattcaagtgttaaattgaaatactctgatgtccaaactgccgacgatgttgccattccagaggatttctcagacttttcccttgcaaaaacaattagcaaaattgaagggcaactggaggaagaaggcttacctgaatatatagatgatattttttctggtgttagtaatgacattggaacagaagcacagatcagatttctaaaggccaaactccatgttatgcaggaggaattggataatgttgtatgtgaatgcaataaaaaggaggatgaaattcagaatttaaagtctcaagtaaaaaattttgaagaagattttatgagacagcagcgaacaattaatatgcaacagtctcaagtagaaaaatacaaaactcttttcgaagaagcaaacaaaaagtatgatggattacagcaacagttgtcttcagtagaaagggaattagaaaataaaagaagactgcaaaaacaggctgcaagtagtcaaagtgccacagaggttcgcttgaatagagctctagaagaagcagaaaagtataaactggagttaagtaaattaaggcaaaataacaaggacatagcaaatgaagaacacaaaaaaattgaagtgttaaaatcagaaaacaagaagctagaaaaacaaaaaggagaattaatgatagggttcaagaaacagttaaaattaattgatgttttaaaaaggcaaaagatgcatattgaagctgccaagatgctatctttcactgaggaggaatttatgaaagcacttgaatggggaaattcataagtgatctacttcagttagtctctatgacaataagaaaactaaggctcagagaaaaagccaaaactagtacttgcatgacacctagtcaagtcctagtagtattcgactttcattttgtggatcaatttttatttggaaaatagcagcaattctcgtaggagtcagattaaaacgtctacaactaccttgaataacttcaactatcaggataattaaaactgcaaaccactggaaaaaaaaaaaaaaaaaaaaaaaaaaaaaaaaaaaaaaaaaaaaaaaaaaaaaaaaa

SEQ ID NO: 26592 - DNA, 1853 bp, Homo Sapiens
tcggggtgagggccgtccgcggcctcgctttcgcctcctccgagccgggccggcgatggccgcagctgtgaggcgagcagaagaatagaaggaaggtgataggatgtgatgatagaatttgtgatagccaagcaacaacttttcctaattcggcatgttaaaaaataagggtcactcatctaagaaagataacttggcagtcaatgcagttgctttacaagatcacattttacatgatcttcaacttcgaaatctttcagttgcagatcattctaagacacaagtacaaaagaaagagaacaaatctctaaaaagagatacaaaggcaataatagatactggacttaaaaaaactacacagtgccccaaactagaagactcagaaaaagaatatgttcttgatcccaaaccgccgccgttgactttggcacagaagttgggcctcattgggcctccaccacctccactgtcatcagatgaatgggagaaggtgaaacagcgctctctcctgcaaggggactccgtgcaaccatgccccatctgtaaagaagaattcgagcttcgtcctcaggtgctgctttcatgctcccatgtgttccacaaagcatgtcttcaggcttttgaaaagttcacaaataagaaaacctgtcctctctgtagaaagaaccagtatcaaacccgagtgatacacgatggggcccgcctgttcagaatcaagtgtgtgaccagaatccaagcctactggagaggatgtgttgttagaaagtggtacagaaacctgaggaaaacagtacctcccacagatgccaagttaagaaaaaattctttgaaaaaaagttcacagaaatcagccaccgcatcctgtgctcatacaacaccaacattgaagagctctttgcagaaatcgatcagtgcttggccataaatcgaagtgttcttcagcagttggaagaaaaatgtggccatgagatcacagaagaggaatgggagaaaatccaagtgcagaatgaaacttccgcatgtttcgaagacccatgtctcggggcacatggttcgcatttcagtttaagtaactttctgctgtgatgaaactaacccgcgtggcctcttcccgtcctgtgtgccgcaggctctgcgccgggagacccacgagtgctccatctgcctggcccctctctccgctgctggcggtcagcgcgtgggtgcaggcaggcgttccagagagatggccctcctgtcctgctcacatgtgttccaccatgcgtgtctgctggcactagaggagttctccgtgggagacaggcctcctttccatgcctgtcctctctgccgctcctgctaccagaagaagattcttgaatgttgaattcatagtcaaggaaagttaggtaattctgaggaaaaagtttaccatcattttggatgaactgcatgagttctgggttaagtactacaatgtaatctgtttcccagggaaataagctattggtagttgtaggaaatcttagtatattttaaaagctgacatcccacctaattttaatctttggtctctaaaaagtaaatttcaaatttatgagtttaatcacttcaaatatgaatagcaaaaaatgagagcttgcttacttctaaaaattgaggttaagatatagctagtgtctgaacgacactccttaaagtaagttccaaatgtaaaacactccttaagttccaaatgttttccgctaatagtctgtcctaaagcctttgccattcctaatactcgttttgtaataattgctgtatttctgtgtaataaaatataaaaataaaatattcagtggtattcaaaaaaaaaaaaaaaaaaaaaaaaa

SEQ ID NO: 26593 - DNA, 2210 bp, Homo Sapiens
tgggcggggttatataagccagcggcgggcggaaggcggggcgtgggggtctgtggctgctgggctggcggggcgcaggccgcgggacccgagcccggggaagcgagagagcggaggcgccgaggatccgattcactccctggggagacctatgggccgaagccgtgtaaatgcgttttaagcagaggcctcggctccgcaactgccactcctcctcggggtgttgcacaagtttcgaggtcaccggcgaccccccctagcagcgcgcctggctctggcccccgcgaaggaggacggagtttggagcttgcggcccccacccaccgcgtggcgtccccaggcacgcctagaattctagcacctcaggatcagtccagcccccatttacaattggggaaactgcggctccgaaagggtcagagggtacccgaggtcaagcagtagagagcggactcgaacttaagctcttgctcttaggctgagacgccttgatgtggccaccggctaccctctagtgtgttgcatactttctaaggcggcggctgcagcagcggctccatccagcccgtcagctcctcctgcaaggcatggctggctacctgagtgaatcggactttgtgatggtggaggagggcttcagtacccgagacctgctgaaggaactcactctgggggcctcacaggccaccacggacgaggtagctgccttcttcgtggctgacctgggtgccatagtgaggaagcacttttgctttctgaagtgcctgccacgagtccggcccttttatgctgtcaagtgcaacagcagcccaggtgtgctgaaggttctggcccagctggggctgggctttagctgtgccaacaaggcagagatggagttggtccagcatattggaatccctgccagtaagatcatctgcgccaacccctgtaagcaaattgcacagatcaaatatgctgccaagcatgggatccagctgctgagctttgacaatgagatggagctggcaaaggtggtaaagagccaccccagtgccaagatggttctgtgcattgctaccgatgactcccactccctgagctgcctgagcctaaagtttggagtgtcactgaaatcctgcagacacctgcttgaaaatgcgaagaagcaccatgtggaggtggtgggtgtgagttttcacattggcagtggctgtcctgaccctcaggcctatgctcagtccatcgcagacgcccggctcgtgtttgaaatgggcaccgagctgggtcacaagatgcacgttctggaccttggtggtggcttccctggcacagaaggggccaaagtgagatttgaagagattgcttccgtgatcaactcagccttggacctgtacttcccagagggctgtggcgtggacatctttgctgagctggggcgctactacgtgacctcggccttcactgtggcagtcagcatcattgccaagaaggaggttctgctagaccagcctggcagggaggaggaaaatggttccacctccaagaccatcgtgtaccaccttgatgagggcgtgtatgggatcttcaactcagtcctgtttgacaacatctgccctacccccatcctgcagaagaaaccatccacggagcagcccctgtacagcagcagcctgtggggcccggcggttgatggctgtgattgcgtggctgagggcctgtggctgccgcaactacacgtaggggactggctggtctttgacaacatgggcgcctacactgtgggcatgggttcccccttttgggggacccaggcctgccacatcacctatgccatgtcccgggtggcctgggaagcgctgcgaaggcagctgatggctgcagaacaggaggatgacgtggagggtgtgtgcaagcctctgtcctgcggctgggagatcacagacaccctgtgcgtgggccctgtcttcaccccagcgagcatcatgtgagtgggcctcgttccccccggagaatcccagcggggcctcagagatgcatctgggagaggtggggaagatggcaggcaagggtacccttggccaggactctggtgcccaccctgccacccccgcgctccacctgcagtgtttctgccctgtaaataggaccagtcttacactcgctgtagttcaagtatgcaacataaatcctgttccttccaaaaaaaaaaaaaaaaaaaaaaaaaaaaa

SEQ ID NO: 26594 - DNA, 2257 bp, Homo Sapiens
caaggcgctgggagaggcccggggaagcggcgggccagactggcgcaggtgcggactgggcgcggggcaggggagggcgctgtggagcggctgtcgccccggggcacagttgcgagccggcgtgtagcgcataactggacggcttgaacgcgcctgtgggtccgtggttgaactttgtctccacgggagcgtcggtctcggagccccttgtggcagcagcactacctgcccagaaaaatgctggaggctgggcgtggccccaggcctggggacctgtttttcctgtttcccgcagagttccctgcagcccggtccaggtccaggcgtgtgcattcatgagtgaggaacccgtgcaggcgctgagcatcctgacctggagagcaggggctggtcagggcgatggcagcagacctgggcccctggaatgacaccatcaatggcacctgggatggggatgagctgggctacaggtgccgcttcaacgaggacttcaagtacgtgctgctgcctgtgtcctacggcgtggtgtgcgtgcttgggctgtgtctgaacgccgtggcgctctacatcttcttgtgccgcctcaagacctggaatgcgtccaccacatatatgttccacctggctgtgtctgatgcactgtatgcggcctccctgccgctgctggtctattactacgcccgcggcgaccactggcccttcagcacggtgctctgcaagctggtgcgcttcctcttctacaccaacctttactgcagcatcctcttcctcacctgcatcagcgtgcaccggtgtctgggcgtcttacgacctctgcgctccctgcgctggggccgggcccgctacgctcgccgggtggccggggccgtgtgggtgttggtgctggcctgccaggcccccgtgctctactttgtcaccaccagcgcgcgcgggggccgcgtaacctgccacgacacctcggcacccgagctcttcagccgcttcgtggcctacagctcagtcatgctgggcctgctcttcgcggtgccctttgccgtcatccttgtctgttacgtgctcatggctcggcgactgctaaagccagcctacgggacctcgggcggcctgcctagggccaagcgcaagtccgtgcgcaccatcgccgtggtgctggctgtcttcgccctctgcttcctgccattccacgtcacccgcaccctctactactccttccgctcgctggacctcagctgccacaccctcaacgccatcaacatggcctacaaggttacccggccgctggccagtgctaacagttgccttgaccccgtgctctacttcctggctgggcagaggctcgtacgctttgcccgagatgccaagccacccactggccccagccctgccaccccggctcgccgcaggctgggcctgcgcagatccgacagaactgacatgcagaggatagaagatgtgttgggcagcagtgaggactctaggcggacagagtccacgccggctggtagcgagaacactaaggacattcggctgtaggagcagaacacttcagcctgtgcaggtttatattgggaagctgtagaggaccaggacttgtgcagacgccacagtctccccagatatggaccatcagtgactcatgctggatgaccccatgctccgtcatttgacaggggctcaggatattcactctgtggtccagagtcaactgttcccataacccctagtcatcgtttgtgtgtataagttgggggaattaagtttcaagaaaggcaagagctcaaggtcaatgacacccctggcctgactcccatgcaagtagctggctgtactgccaaggtacctaggttggagtccagcctaatcaagtcaaatggagaaacaggcccagagaggaaggtggcttaccaagatcacataccagagtctggagctgagctacctggggtgggggccaagtcacaggttggccagaaaaccctggtaagtaatgagggctgagtttgcacagtggtctggaatggactgggtgccacggtggacttagctctgaggagtacccccagcccaagagatgaacatctggggactaatatcatagacccatctggaggctcccatgggctaggagccagtgtgaggctgtaacttatactaaaggttgtgttgcctgctgaaaaaaaaaaaaaaaaaaaaaaaaaaaaaaaaaaaaaaaaaaaaaaaaaaaaaaaaaaaaaaaaaaaaaaaaaaaaaaaaaaaa

SEQ ID NO: 26595 - DNA, 1840 bp, Homo Sapiens
gacctgaggcagtggcctccggagggcactggacagaaacagccatccaagtggctgagtggagggaccctgctcaagtgcagctgcagtggccggggtttccctcaggtagggatcggggcgccttgtcgccgccagccacgtgtggcgtccggtacagtcagcagagtgcagggtgcgggcaccaggaaagggggcgcaggggaactcccgcgggcctcgcgtttgcaaacttctcgcctgggcaggaggcggtcgtgggaaagaaggtggaagagcgagctttttggaactgtgcacgggacagattggacgcacacccctcgggaggcgcgaaggcatggaaaatttgaagcatattatcacccttggccaggtcatccacaaacggtgtgaagagatgaaatactgcaagaaacagtgccggcgcctgggccaccgcgtcctcggcctgatcaagcctctggagatgctccaggaccaaggaaagaggagcgtgccctctgagaagttaaccacagccatgaaccgcttcaaggctgccctggaggaggctaatggggagatagaaaagttcagcaatagatccaatatctgcaggtttctaacagcaagccaggacaaaatactcttcaaggacgtgaacaggaagctgagtgatgtctggaaggagctctcgctgttacttcaggttgagcaacgcatgcctgtttcacccataagccaaggagcgtcctgggcacaggaagatcagcaggatgcagacgaagacaggcgagctttccagatgctaagaagagataatgaaaaaatagaagcttcactgagacgattagaaatcaacatgaaagaaatcaaggaaactttgaggcagtctttggaatcgtcctctgggaaatcgccactggagatatcccgtttcaaggtgaagaatgtgaagactggctcagccagtggctgtaattctgagaagatccgcaagctggtggctgtgaagcggcagcaggagccactgggtgaagactgcccttcagagctgcgggagatcattgatgagtgccgggcccatgatccctctgtgcggccctctgtggatgaaatcttaaagaaactctccaccttttctaagtagtgtatcaaaatctaaaccaaggagtctctggacaagaagctgggagaggcacaaactggacatctctctctctcatatccttcggcattgggttatctatgggagcaaggagtgggcacgcttctctgttacaaatagaaaacgattccagtcatacaggacacatcccactccaaatgatatttccaaaaacatacctctgacagtaactttgatagatggtttgtcaaatgtatctttctgggtatccacacctcttggcaatgaaatttgcagctcctcccttccataaatgaagtctctttccccaccatttgaatctgggctggcactgtgacttgatttgatcaatagaatgtggaagaagtgactgtatgccagttccaagcctaggtttcaagaggccttataaatgtctgttggaaccttacccagccatgaacatgttgagtgagcatgctggagaatgagagaccacatgaagcagaaacatgctttcctagctgaagtcatactagcccaaccaacatggcagctaacacatgaatgaggccaatcaagaccagaagaaccactcaagcagatcccagcccaaattgcccattcacacaatcaggagctaaataaattactgttgtcttaacactaaaaaaaaaaaaaaaaaaaaaaaaaaaaaaaaaaaaaaaaaaaaaaaaaaaaaaaaaaaaa

SEQ ID NO: 26596 - DNA, 2187 bp, Homo Sapiens
cggcggtggcggcgtcggaggcgcctccgggggacggtggcggctcccggcggtgaggccgcgcctgtccggggatcgtcgagggacggcgggagcttgggccagcggcggcggcggcctgggacgcaggcggagccccgcgcaggcccaaggtcccggaggctatggcagcggctaccatcgtgcacgacacgtctgaggccgtggagctctgccctgcttacggcttgtacctgaagcccatcaccaagatgaccatcagcgtggcactcccgcagctgaagcagccggggaagtccatctccaactgggaggtgatggagaggctgaagggcatggtgcagaaccaccagttctccacgctgcgtatttccaagagcaccatggacttcatccgcttcgagggggaggtggagaacaagagcctggtcaagtcttttctggcctgcctggacggcaagaccatcaagctcagcggcttctccgacatcctgaaggtgcgcgcggccgagttcaagatcgacttccccacccgccacgactgggactccttcttccgcgacgccaaggacatgaacgagaccctgccgggggagcggccggacaccatccacctggaggggctgccctgcaagtggttcgccctgaaggagtcgggctccgagaagcccagcgaggacgtcctggtcaaggtgtttgagaagttcggggagatccggaatgtggacatccccatgctggactcctaccgggaggagatgacgggccgcaacttccacaccttcagtttcggggggcacttgaacttcgaggcctatgtgcagtaccgcgagtacatgggcttcatccaggccatgagcgccctgcgcgggatgaaactcatgtacaagggcgaggacggcaaggccgtggcctgcaacatcaaggtttcttttgattcgaccaaacacctgagtgatgcctcaattaagaagcggcagctggagaggcagaagcttcaggaactggagcagcaaagagaagaacaaaagcgcagagagaaggaagcggaggagaggcagcgagcggaggaaaggaaacaaaaggagctggaagagctggagcgagagaggaaaagagaagagaagcttcgcaagagggagcagaagcagagggaccgtgagctgcgccggaatcagaagaagctggagaagctgcaggcggaggagcagaagcagctgcaggagaagatcaagctggaggagcgcaagctgctgctggcccagaggaacctgcagtccatccggctcatcgccgagctgctcagcagagccaaggtacccgggggctccctctgcagccgccagccgcgcccgggctgccctcagtgccctcccctgaaatgcgggcggcgtcacggcgccgtttccccgccggctgcagctgtagctacgaaaccagctttaatgccgaggatgacggctccttcccgggagggtgtagcgctcgtctgtcgttcccgatgatttcagagctgtgacggtttccttttgcaaagctggtgcattcaggttccccgagcaggctggcagcctcccgggggccagggcagaggctctctgtttcctttgggtcggggcagtggcagagagtgcagggggccgctccctctggcccgcgcctctgtgtgtggtcagctggcctggctgtgacctcaccagtggcccagagcagaggggcaaggtgggctggggggagggctgagcgcacagagggggcctgccgtgggcccgggtccctcctccgcagcgtgaacctgacaggtctcaccagcgccggtactgacgaccccctcagcaccaagagcctccctgctcctcctgcaggcgcgactggtaactcccatgagcccggggccagggcccacagacagacagacctccccaggacagacgtccccggcacgctccttgtcctcaggagggctgcgtccccctggagtccaacgcggggcgaccccataacctgttgtctgattacagttgtgataagtccccgggaaggagcatgacaagaggctgagacatgtggcagcccagtccttacctcatggtgaatattgaagacactaacccaggctaggccaggctcgccccgcagctacggcggtggcatgcgtctgcggcgtcatctcagctccctgttgct

SEQ ID NO: 26597 - DNA, 1508 bp, Homo Sapiens
cagacatgccgctgctgctactgctgcccctgctgtgggcaggggccctggctatggatccaaatttctggctgcaagtgcaggagtcagtgacggtacaggagggtttgtgcgtcctcgtgccctgcactttcttccatcccataccctactacgacaagaactccccagttcatggttactggttccgggaaggagccattatatccggggactctccagtggccacaaacaagctagatcaagaagtacaggaggagactcagggcagattccgcctccttggggatcccagtaggaacaactgctccctgagcatcgtagacgccaggaggagggataatggttcatacttctttcggatggagagaggaagtaccaaatacagttacaaatctccccagctctctgtgcatgtgacagacttgacccacaggcccaaaatcctcatccctggcactctagaacccggccactccaaaaacctgacctgctctgtgtcctgggcctgtgagcagggaacacccccgatcttctcctggttgtcagctgcccccacctccctgggccccaggactactcactcctcggtgctcataatcaccccacggccccaggaccacggcaccaacctgacctgtcaggtgaagttcgctggagctggtgtgactacggagagaaccatccagctcaacgtcacctatgttccacagaacccaacaactggtatctttccaggagatggctcagggaaacaagagaccagagcaggagtggttcatggggccattggaggagctggtgttacagccctgctcgctctttgtctctgcctcatcttcttcatagtgaagacccacaggaggaaagcagccaggacagcagtgggcaggaatgacacccaccctaccacagggtcagcctccccgaaacaccagaagaagtccaagttacatggccccactgaaacctcaagctgttcaggtgccgcccctactgtggagatggatgaggagctgcattatgcttccctcaactttcatgggatgaatccttccaaggacacctccaccgaatactcagaggtcaggacccagtgaggaacccacaagagcatcaggctcagctagaagatccacatcctctacaggtcggggaccaaaggctgattcttggagatttaacaccccacaggcaatgggtttatagacattatgtgagtttcctgctatattaacatcatcttagactttgcaagcagagagtcgtggaatcaaatctgtgctctttcatttgctaagtgtatgatgtcacacaagctccttaaccttccatgtctccattttcttctctgtgaagtaggtataagaagtcctatctcatagggatgctgtgagcattaaataaaggtacacatggaaaacaaaaaaaaaaaaaaaaaaaaaaaaaaaaaaaaaaaaaaaaaaaaaaaaaaaaaaaaaaaaaaaaaaaaaaaaaaaaaaaaaaaa

SEQ ID NO: 26598 - DNA, 2733 bp, Homo Sapiens
gtaggtgcgtgcccgggactctgccgatgcgggccgcgccccctggggccaagagactccacgtcccgctcagggcaaagggtgtggggagaagcggtcacgcccctcggctggaatccgtgaggaccaggtctttttcagtgtgctcaatatggtcaccaagcctggaaacatagagtctcaccctgttgcttaggcagatggcgcgatctcggctcctgggttcaagcaattctcctgcctcagcctcctgaatagccgggattacagtcgtccagcatgctctgcccaccccacgccgaggtgcactgaccatgagcctcaactcctccctcagctgcaggaaggagctgagtaatctcactgaggaggagggtggcgaagggggcgtcatcatcacccagttcatcgccatcattgtcatcaccatttttgtctgcctgggaaacctggtcatcgtggtcaccttgtacaagaagtcctacctcctcaccctcagcaacaagttcgtcttcagcctgactctgtccaacttcctgctgtccgtgttggtgctgccttttgtggtgacgagctccatccgcagggaatggatctttggtgtagtgtggtgcaacttctctgccctcctctacctgctgatcagctctgccagcatgctaaccctcggggtcattgccatcgaccgctactatgctgtcctgtaccccatggtgtaccccatgaagatcacagggaaccgggctgtgatggcacttgtctacatctggcttcactcgctcatcggctgcctgccacccctgtttggttggtcatccgtggagtttgacgagttcaaatggatgtgtgtggctgcttggcaccgggagcctggctacacggccttctggcagatctggtgtgccctcttcccctttctggtcatgctggtgtgctatggcttcatcttccgcgtggccagggtcaaggcacgcaaggtgcactgtggcacagtcgtcatcgtggaggaggatgctcagaggaccgggaggaagaactccagcacctccacctcctcttcaggcagcaggaggaatgcctttcagggtgtggtctactcggccaaccagtgcaaagccctcatcaccatcctggtggtcctcggtgccttcatggtcacctggggcccctacatggttgtcatcgcctctgaggccctctgggggaaaagctccgtctccccgagcctggagacttgggccacatggctgtcctttgccagcgctgtctgccaccccctgatctatggactctggaacaagacagttcgcaaagaactactgggcatgtgctttggggaccggtattatcgggaaccatttgtgcaacgacagaggacttccaggctcttcagcatttccaacaggatcacagacctgggcctgtccccacacctcactgcgctcatggcaggtggacagcccctggggcacagcagcagcacgggggacactggcttcagctgctcccaggactcagggacagatatgatgctgcttgaggactacacgtctgatgacaaccctccctctcactgcacttgcccacccaagagaaggagctcggtgacatttgaggatgaagtggaacaaatcaaagaagctgccaagaactcgattcttcatgtgaaagctgaagtacacaagtccttggacagttacgcagcaagcttggccaaagccattgaggccgaagccaaaatcaacttatttggggaggaggctttgccaggggtcttggttacagcacggactgtcccggggggcggcttcgggggccgccgaggcagcagaactcttgtgagccagaggctgcagttgcagagcatcgaagaaggagatgttttagctgccgagcagagatgagggcctcagggtgccgtggggctgcagcctgagaggctggcccggggaggagttcccatcaccgcctgtgccgcggccttgggagcatgtcactgtgtacagctggccacacacagggaaggagcagcatctggtatgcagccaccaggacaaggactgaaaataatgtctacagtccacagcttcagcatttccagagaccacatgtgagcttcttttaggtcccagtgatgggaccagaagcatctaaagcaaaaaaaaaaccaaaaaaaaatctagagatgtggctgtggctttttgggaggtggggcatgggaggaccagagacgaagggcttggaaggagacccccacatgcatcatttcctcctcttcacagtgtgctgggagtccagccgtgcactgtgccagatgcctcaggaggagaaccctccccagtgtactgtgaaggatgacacagcacttcttcctaatgacacgcgaccgtcctggtgcctctacatggttgatgcgggcagtgtgggaccctcagttctaggactggtccgcagagaaagcacccaggagcagagcgcttcggagcggtcctcagtggcgccacctgctggtgctaatagggacagccacaggcctcttgcagactggcccaccctgcctacttccctactgacaagttctttggtatttcaaaagggagaaaccactataaaagacaagaggaagggcaggtactaggtgtttcatttccagaattaaaaaaaaaatccatttaaaaaaaaaaaaaaaaaaaaaaaaaaaaaaaaaaaaaaaaaaaaaaaaaaaaaaaaaaa

SEQ ID NO: 26599 - DNA, 601 bp, Homo Sapiens
gataaaaatggcagaatgaaagaattatgagtggaactagagaataggaaagacatgaaccaacgcccaaaatgagaaagaaggacatataaagaaaaagacaaatacaagtgaaaaaaatagactaatggattaacgtccctgtcgtgtgacattttctgactatggaaatgatattagacaaaaagcaacttcaagtggttttcttatttgagttcaaaatgggtcataacgcagcagagataacttgaaacatgaacagcgcatttggcccaggaactactaacgaacatacagggcagctgtgattcaagaagttttgcaaagcagactagagccttgaatatgaggaacacagtggccagccattggatgcttcacttcttgaagcatcttgacagctttttgcaggtgaaatgcttccacaccagcaggatgcagaaaaatgctttccaagagtttgttgaatccagaagcatggatgtttatgctgcaggaataaacaaatttatttctcgttggcaaaaaaaaaaaaaaaaaaaaaaaaaaaaaaaaaaaaaaaaaaaaaaaaaaaaaaaaaaaaaaaaaaaaaaaaaaaaaa

SEQ ID NO: 26600 - DNA, 1267 bp, Homo Sapiens
ccacgcgtccggactagttctagatcgcgagcggccgcccaaagtactgggattacaggcatgagccagtagctttttacatttaaagtagggtccagctgaagtgaattcattttacaaacgctaaaagcagtgagaactagctgagagcattttgagaagaaaagtgaaaggtatgaaggttttcctgaagttagtatccacttttgtaaaatctaggccagtggttctgggccaggggtggttttcccacccagggaacatttggtaatatctggagacatttttggttgtcatgatgtgggggaggtgatatggtttggctgtgtccccacccaaatcttatcttgaattgtagctcccataattcccatgtgttgtgggagggacccagtgggaaataattgaatcatgagggcagtttcccccatactgttctcgtggcagtgagtaagtctcaggagatctgatggttttacaagggaaaacccctttggcttggttcctatttctctcttgtctgctaccatgtaagacatgtcttctgccttccaccatgattgtgaggcttccctagccacatggaactgtgagtccattgaatctcattttgtttataattacctagtttctggcatgtgtttatcagcagtgtgaaaacggactaatactgtatgtaactaatactggcatctaggtagagggtagggatgcatctcagtatcctgttatgccccacaccaaaggattattgagccccaaatgtcaatagtgctgatattgagaaaccccagtccaggcttcatgtacttatctggcctctctagaacactggttccttaacttgaatgtgcatcagaatcacctgggggtcttgttgaaattcgggttgctggaccccacccccagagtttctgatttggaaagtcaggtggggcctgagagttggcatttctgccaagtttccaggtgacgttgatgctgatgctgctagtccagggaccacacttagaaccacggctctacaagaaaggagggttatttgtcactgtgcttgcctatgtacaaccaccaagaaagaatactgaatacagaaattagccaggcatggtggtgtgcacctgtaatcctagctacttgggagactgagacgggaggatcacttgagcccggtaggcggaggttgaggtgagctgagatcgtgccactgcactccagcctgggtgacagaccaaaaccctgtctcaaaaaaaaaaaaaaaaaaaaa

SEQ ID NO: 26601 - DNA, 2899 bp, Homo Sapiens
taagaggcaggcaggaagcaatggacagggagtccgagtgaggttgtgctctttcctgagagaggggttccgcaagggattggaggcgtccttgtagccaggtacagctttccccttagagatgagcgctcttggagaaatgagaatggggagaaatcgtccatgaacatggagattggacatccccacgaaggaaaggatgatttaggagacaagagggtcatcatgggaacaaaatttcccatggagttggggatcagagtaggattaggaaaagaagattcccgatgcggggagagccctgtggttagtaataagtgtgagggaaggatggcaccaccagaaacaaaatttccattgagcaaggggcttgaaatgggattagaaagacagaatatttctaggactgtcatgcagaggggtagtttaggagtcgacagtgtctcagcttcacagggaacaaaaccttctctgttgccaggaagaatggggttagaaaatgagagtcttcttgcaggatatacccatgaacggataatacagcctcctttgggcagggtgtgtggaagttcacaggctgcagggagcaggagagctcctttggctagtggccctgaaggggtagaggaattagtgggaaagcctgctttcgttatggaaccaagacaggaaatggaaaaagagtctacctgtgttttaatgaaacccaacacagagattaagcttcctgtggaggtggacattggactaacccaagccgaggggccagatgagactaagaatacagagccccaaatgggcttggtgatagaacctccccaatgccagtttgcccaacaacatgaacagagaaaggaggctggaaacattgaatcaggagtggaacctccagatcgcatcagacccatatactctgggaagttttttgatcggaccccttgctggccaagtgcaggaaaagttattccagttggttacagagttgcaacctgcttgactgaaaaacttcccaggctaattactccacctgaagcaaaaaagtatttcaacttcagatatccacctgctggagtagaaagagtattttacggaagagcaaatgatccccagattgcaccttatttgacacatggaattagatctaaaatttcgatactggcaaacacattgataaacccacagcctattaccacatttcaacagaaaattaaagataaaaaagaatctatatatcttagcaatcgacgagcaccattaggaaaatctcacgatcaagcaccaggattaccaaaaggcatggacacaatcaatacgacatttgggacagcagtcatcaaagaatactctgctaaagatgtggtgaatccaccaaaatcctatgaagaagtatttaaagaaggaaatgaaggacatgatttgtatgttgtttctcacaatgattattatgcaggagaggcaaagaaccgaaagtataacccatcaagtttccataggtgtagtgtgtatggagtaccaacaccacattttaatgatggacgagccatggcaaaatctctatattggctccatgaactacaaatgaaaagaggagctaagtttgtatccaaaagagcagatgatttcaaagaaaagtttcaacataaacttggaagagttttagatcccattgcagaaacaatgaatgttcccccagactgcacatttggagcttgtctccgtcctgaggaatatggagttggtgatctcatccataatagacttccggatgaatatcttcgaggcaaggatagacagcgagccctgattgcagcagttcggcatcacctgaagaaagttaattaccaaaagtttgacactttgctggcagccttcaggcactatgacaagaagggagatgggatgatagataaagacgagctgcaggaagcttgtgaccaggccaacttgagtttagatgacaagctcctggaccagctatttgactactgtgatgtggataatgatggcttcattaactatctggaattcgcaaattttcttaactggaaagacaaaatgcttcttaaagagtatgaagagagggtcattattaaaggtagaaaaccagattgtgtaaaccctactgaggctaatgttgaagaacctgaacaaactctcctcataaagccagaagatattgtcttaaaagaagcaggaagcacagaaaagactctccggacacttctgagaccaagtgataaagtttccaactactataagacaacttcttctgagatcaatgcaattgtaggagccattccttctacttgttaccccatttgtggtgttccaaccattcgatctgacattcctgctccccgaattcgtcgcatcagtgacagaactaattatggtgaagaaggtagtgcatattcactactatatcctaccatttttgcccggaaaggagtgtttgaaagagacttcttcaagaccagatcaaaagaagagattgcagagatattgtgtaacattggtgtcaaactgtctgatgaagaatttgaaaatgtatggaatcttgcatcaaaaaagcatcacagaggagaagtttgtgttgagaacatcagaaatgttctagatgagctacggcatgcagaccggatcaagtgtaaaacactcatgtgatatttttggacttcattcattcaagcaaaagaattattaactctgtgtttatctaaaatgttgaatccattctggttttagatattatgttagagttcacagtggtaagactcatatgcctgtatgtgttgctaataaattagattttggattttaaaaaaaaaaaaaaaaaaaaaaaaaaaaaaaaaaaaaaaaaaaaaaaaaaaaaaaaaaaaaaaaaaaaaaaaaaaaaaaa

SEQ ID NO: 26602 - DNA, 1923 bp, Homo Sapiens
tgaaggaggaagttcaagggcgagagtgagtaccagcagaaggctgggagtctgtagtttgttcctgctgccaggctccactgaggggaacggggacctgtctgaagagaagatgcccctgctgacactctacctgctcctcttctggctctcagcacatggagaccagttgccgttgctgttttgatcaacttcaaaggcattcatccagggtggtttattccagaaccactagaaatcattaggaccaccaggacagcctctccacagccatctgatgtggctgcctcagctcgacctcatgagggtcatcagtgctaagagtcaaggctactccattgccactcaaatcaccggtccaacaacagtgaatggcttggagcggggctccttgaccgtgcagtgtgtttacagatcaggctgggagacctacttgaagtggtggtgtcgaggagctatttggcgtgactgcaagatccttgttaaaaccagtgggtcagagcaggaggtgaagagggaccgggtgtccatcaaggacaatcagaaaaaccgcacgttcactgtgaccatggaggatctcatgaaaactgatgctgacacttactggtgtggaattgagaaaactggaaatgaccttggggtcacagttcaagtgaccattgacccagcaccagtcacccaagaagaaactagcagctccccaactctgaccggccaccacttggacaacagcagccgggatgtccccagagcaggtactgcagcccctggagggcgacctctgctatgcagacctgaccctgcagctggccggaacctccccgcgaaaggctaccacgaagctttcctctgcccaggttgaccaggtggaagtggaatatgtcaccatggcttccttgccgaaggaggacatttcctatgcatctctgaccttgggtgctgaggatcaggaaccgacctactgcaacatgggccacctcagtagccacctccccggcaggggccctgaggagcccacggaatacagcaccatcagcaggccttagcctgcactccaggctccttcttggaccccaggctgtgagcacactcctgcctcatcgaccgtctgccccctgctcccctcatcaggaccaacccggggactggtgcctctgcctgatcagccagcattgcccctagctctgggttgggcttggggccaagtctcagggggcttctaggagttggggttttctaaacgtcccctcctctcctacatagttgaggagggggctagggatatgctctggggctttcatgggaatgatgaagatgataatgagaaaaatgttatcattattatcatgaagtaccattatcataatacaatgaacctttatttattgcctaccacatgttatgggctgaataatggcccccaaagatatctgtgtcctaatcctcagaacttgtgactgttaccttctgtggcagaaagggacagtgcagatgtatgtaagttaaggactttgagatagagaggttattcttgctgattcaggtgggcccaaaatatcaccacaagggtcctcataagaaagaggccagaaggtcaaagaggtagagacaaagtgatgatggaagtggacgtgggtgtgacgtgagcaggggccatgaatgccgcagccttcagatgccagaaagggaaaggaatggattcccctgcctggagcctccaaaagaaaccagccctgcccacgccttgacttgagcccattgaaactgatcttgagctcctggcctccagaattgcaggagaataaatttgtgttgtttttaatgaaaaaaaaaaaaaaaaaaaaaaaaaaaaaaaaaaaaaaaaaaaaaaaaaaaaaaaaaaaaaaaaaaaaaaaaaaaaaaaaaaaaaaaaaaaaaaaaaaa

SEQ ID NO: 26603 - DNA, 1800 bp, Homo Sapiens
cagagctgcaagaagcaccaggctcggccacttcagaagccccagcctcgacctagcccaccctctcagggccacagtgcagaagcctgcacacctgccaagtctctccgactccttgcagctgctgtcagcatggcccaggctcctgctgacccgggcagagaaggccaccttgaacaaagaatcctgcaggtgctgacagaggctggctccccggtgaaacttgcccagctggtgaaggaatgccaagcacccaagagggagctcaaccaagtcctctaccgaatgaaaaaggagttgaaagtctccctcacatcccctgccacctggtgcttgggcgggactgatcctgaaggcgagggtcctgcagagctggccttgtccagccctggtaactgccaccccggggaggcgggtctgaccctgcagggagcatcctggcaatggacaagcacagatttgagcctgggttcgaatctgaactctgccacatgggagctcacaggtttcctctctctgtgccttggtttctttttctggttgatggagctcacagcagggctgcttggtaggggttgctgagaggaggccctgcgtcaggctcagcccagccctgcacacaggaggtactctgcagaacactaacaattataatagaaaatcatcatgatggagacagcaatgacgccatggtcccaatcacagaacatatgcagtcccaccagccccccttttctagctttacagcccacagccagaaggagctgccatttatcatgcacttaagattagccaggcactgttttggggttcacccagccctcacacaaccccaggaggcaaaggaggctgagccccggagaagttaatcggcaggaagccgcagctgccagggcgcaggcaggatttgaagtcaagtgtgttgaactctggagtctgagtttgcaactaccggcattgccacttacccctagggagctgcccacctttgtggggtggaggcctggtgctgtcttctgtcccccacccctctgacccatctttctttctgcagccgagaggccccagcaacatgcagctacaattccagagacccctggccctcagttcagccaacaacgggaggaagacatctacaggtttctcaaagacaatggtccccagagggccctggtcatcgcccaagcactgggaatgaggacagcaaaagatgtgaaccgagacttgtacaggatgaagagcaggcaccttctggacatggatgagcagtccaaagcatggacgatttaccgcccagaagattctggaagaagagcaaagtcagcctcaattatttaccagcacaatccaatcaacatgatctgccagaatggacccaacagctggatttccattgcaaactccgaagccatccagattggacacgggaacatcattacaagacagacagtctccagggaggacggtaagtcacccaagagagcccagggaggggacctcggtggggagccaccggatcctctgggtgggggcaaagggtagggatggggagtggggggattctgccctccaaggggaaagggttgcttccagacccccacagtccacctttacggccgtcctgagaatgaggacacctggatcaaagctctcctgatttccctgtactctgatactttctacctcattttaaagtttaatttaatttttatttttctaataaaattttaaaattaaaaaaaaaaaaaaaaaaaaaaaaaaaaaaaaaaaaaaaaaaaaaaaaaaaaaaaaaaaaaaaaa

SEQ ID NO: 26604 - DNA, 2343 bp, Homo Sapiens
gattatattctcctgccttttaaaaagatggacttcagcagaaatctttatgatattggggaacaactggacagtgaagatctggcctccctcaagttcctgagcctggactacattccgcaaaggaagcaagaacccatcaaggatgccttgatgttattccagagactccaggaaaagagaatgttggaggaaagcaatctgtccttcctgaaggagctgctcttccgaattaatagactggatttgctgattacctacctaaacactagaaaggaggagatggaaagggaacttcagacaccaggcagggctcaaatttctgcctacagggtcatgctctatcagatttcagaagaagtgagcagatcagaattgaggtcttttaagtttcttttgcaagaggaaatctccaaatgcaaactggatgatgacatgaacctgctggatattttcatagagatggagaagagggtcatcctgggagaaggaaagttggacatcctgaaaagagtctgtgcccaaatcaacaagagcctgctgaagataatcaacgactatgaagaattcagcaaagagagaagcagcagccttgaaggaagtcctgatgaattttcaaatggggaggagttgtgtggggtaatgacaatctcggactctccaagagaacaggatagtgaatcacagactttggacaaagtttaccaaatgaaaagcaaacctcggggatactgtctgatcatcaacaatcacaattttgcaaaagcacgggagaaagtgcccaaacttcacagcattagggacaggaatggaacacacttggatgcaggtacagtagaacccaaaagagaaaagtaaaatatttcttatgcctatttttttttaaatcaaaagggagagaacaaaagctataccaaaagggccatgtttcaagaaaatggatttaaacatatttccctgtggaggggctttgaccacgacctttgaagagcttcattttgagatcaagccccacgatgactgcacagtagagcaaatctatgagattttgaaaatctaccaactcatggaccacagtaacatggactgcttcatctgctgtatcctctcccatggagacaagggcatcatctatggcactgatggacaggaggcccccatctatgagctgacatctcagttcactggtttgaagtgcccttcccttgctggaaaacccaaagtgttttttattcaggcttgtcagggggataactaccagaaaggtatacctgttgagactgattcagaggagcaaccctatttagaaatggatttatcatcacctcaaacgagatatatcccggatgaggctgactttctgctggggatggccactgtgaataactgtgtttcctaccgaaaccctgcagagggaacctggtacatccagtcactttgccagagcctgagagagcgatgtcctcgaggcgatgatattctcaccatcctgactgaagtgaactatgaagtaagcaacaaggatgacaagaaaaacatggggaaacagatgcctcagcctactttcacactaagaaaaaaacttgtcttcccttctgattgatggtgctattttgtttgttttgttttgttttgtttttttgagacggaatctcgctctgtcgcccaggctggagtgcagtggcgtgatctcggctcaccgcaagctccgcctcccgggttcacgccattctcctgcctcagcctcccgagtagctgggactacaggggcccgccaccacacctggctaattttttaaaaatatttttagtagagacagggtttcactgtgttagccagggtggtcttgatctcctgacctcgtgatccacccacctcggcactttgggaggttgaggtgggaggattgcttgaacccaagaggtcaaggctgcggtgagccatattcacgccgctgcactcaggcttgggtgacagagcgagaccccgtctcaaaaaaaattttttttttaataaaacaaaatttgtttgaaaacttttaaaaattcaaatgatttttacaagttttaaataagctctccccaaacttgctttatgccttcttattgcttttatgatatatatatgcttggctaactatatttgctttttgctaacaatgctctggggtctttttatgcatttgcatttgctctttcatctctgcttggattattttaaatcattaggaattaagttatctttaaaatttaagtatcttttttcaaaaacattttttaatagaataaaatataatttgatcttaaaaaaaaaaaaaaaaaaaaaaaaaaaaaaaaaaaaaa

SEQ ID NO: 26605 - DNA, 1622 bp, Homo Sapiens
ctgggaggggacccgggctgccaggcgcccagctgtgcccagatggatgggacagagacccggcagcggaggctggacagctgtggcaagccaggggagctggggcttcctcaccccctcagcacaggaggactccctgtagcctcagaagatggagctctcagggcccctgagagccaaagcgtgacccccaagccactggagactgagcctagcagggagaccgcctggtccataggccttcaggtgaccgtgcccttcatgtttgcaggcctgggactgtcctgggccggcatgcttctggactatttccagcactggcctgtgtttgtggaggtgaaagaccttttgacattggtgccgcccctggtgggcctgaaggggaacctggagatgacactggcatccagactctccacagctgccaacactggacaaattgatgacccccaggagcagcacagagtcatcagcagcaacctggccctcatccaggtgcaggccactgtcgtggggctcttggctgctgtggctgcgctgctgttgggcgtggtgtctcgagaggaagtggatgtcgccaaggtggagttgctgtgtgccagcagtgtcctcactgccttccttgcagcctttgccctgggggtgctgatggtctgtatagtgattggtgctcgaaagctcggggtcaacccagacaacattgccacgcccattgcagccagcctgggagacctcatcacactgtccattctggctttggttagcagcttcttctacagacacaaagatagtcggtatctgacgccgctggtctgcctcagctttgcggctctgaccccagtgtgggtcctcattgccaagcagagcccacccatcgtgaagatcctgaagtttggctggttcccaatcatcctggccatggtcatcagcagtttcggaggactcatcttgagcaaaaccgtttctaaacagcagtacaaaggcatggcgatatttacccccgtcatatgtggtgttggtggcaatctggtggccattcagaccagccgaatctcaacctacctgcacatgtggagtgcacctggcgtcctgcccctccagatgaagaaattctggcccaacccgtgttctactttctgcacgtcagaaatcaattccatgtcagctcgagtcctgctcttgctggtggtcccaggccatctgattttcttctacatcatctacctggtggagggtcagtcagtcataaacagccagacctttgtggtgctctacctgctggcaggcctgatccaggtgacaatcctgctgtacctggcagaagtgatggttcggctgacttggcaccaggccctggatcctgacaaccactgcatcccctaccttacagggctgggggacctgctcggttcaagctccgtgggccacactgctgctgtgccaagaaggtgtacagcctccccaggatggggcctcatacaacccttcatctgcactcaacatttaatcgtgtccttgctgtctttttattttcctttttgttagcaaaaacctctatttagatttcaataatcagagaagtgtaaaataaaacagattatattgtaaaaaaaaaaaaaaaa

SEQ ID NO: 26606 - DNA, 2336 bp, Homo Sapiens
gcccaacctagcacaaaaggatagtttgaggaatggtgtttactcaaagagtcaggagccaccgtcttccagttactacattgccgggtacacaccctatgcagagtgtgacttttattacagtggtggttatgtctatgagaatgacaccgagggacagtatagtgtcaacccttcctaccggtcctcagcccactatggatatgagcgccagagggactacagcagatcctttcacgaagatgaggtcgaccgggtaccccataacccatatgcaactctccggctgccaaggaaggctgctgcaaaatcggagcacatcaccaaaaacatccacaaggccttagttgccgagcacttgcgtggctggtaccagcgggcctctgggcagaaggatcagggacacagcccgcagaccagctttgactcagacaggggatcacagagatgcctggggtttgcggggctgcaagtaccttgttctccaagcagtcgtgcatccttgtactcttcagtgtcttctacaaatgcttctgggaactggaggacccagttaaccatagggctgtcggattacgagactccagcacattcttcttacaccagctgctatggcaatgtctataatcctttaccctctccaagcagacaatacacagaaatcagtcaactggatggtacagatggaaaccagctggaagacaacctggagagtagtgagcagagactcttttggcatgaagattcaaagcctggaacattagtctgaactgcagttggacctcctgaccaagcactgcgttctcacactagtgtgccttgcaaattgtatttgtcttccgagaggatgttcgttttagaaacctaaagacatcaaaggttgaagagaagacttagttgccctggaagtgaatcagtgaatcacacaccaagccccacaaagcccctaaaggaggatttggcctttcaaactctaggcactaacgtaactgtagggtctgcccacatgttgaagtattgccaagagaggactcagtgtgaagccttcatcaatagcaagcactttttaagggagtaaaagttgttaaaggcaaacgtcaaaaacatgaaagggcattcaggatgtcccatggcaataagaacaggggaaatctcagagcacaattcagcaggatgagagaaggggaaccagaagctccggagtcattgctcacttcagagtttgaattcgtgagctgacaaagagtaacatgctctttctacacagacatggacaatttagacagtattggaaaattacttgaagctggattttcatgaagttctgaatgagtgtaaatgttttttaggatactataaagagtgatgtttttcataagcaccataaaatgggttctggaaaaactgattaccttagcatcctgtaatataacttatggtagcagattggggaaaatgaagcagcccactgaataattgacaaagtctgcttggagaacattctaaggtacaatatcatggagctcctttttcctttctccactaattgcgtgatgagctattgttctggctggtaattctccaactcggctgtcatttgaagtggcagacttaatatggaaagtttttataattatgagtttgaaaaagcattttaagatgatacagaaagtatccaaaacaacagaaaaaaaaagccacgtcattttagatgaattgcgtgccttaaaatggtgaacgttagaaaattaaacaagtctggattccacaagtagttccaagtcaccaagtgacaaaaacaaggttaacattaaaaaagaaaaacaacaacaacgacaaaaagctccaagctgcagtggatttaattatgaggctaaaactacctcatactttccttggaagaactaattagctatggtttattgtagggttttgtttgtttgttttttaaagcaaatgatttccatattcctgattgatcttttttgtcatctttgcttcaaaattacataaaaggtgctcctttcccccttcttttatacaagtttcttgttcatattgtgaatagaaaagtttctgaacaacttttttggaacattttctatctatattccaaagcatgtaatatatacataaaaacgatttgttaaactggtccttagtcatttgtataattagaaatgaagtttgggaaaaaattttggaaaaaagacaagcaaaaaaaaaataacttattccttttttgcatatttgtatagccttctagaatcagaaataacctttttgcatattcttttattgttctgacttttcaagacctataaaaaaaaaaaaaa

SEQ ID NO: 26607 - DNA, 1055 bp, Homo Sapiens
cgcccgcggggccgggtgcgatggcggcggtggctgcgttgcagctggggctgcgggcggcggggctgggacgggccccggccagcgccgcctggaggagcgtcctcagggtctccccgcgcccaggggtggcctggaggccaagcagatgtggcagttctgcagcagaagcatctgccacaaaagcggaagatgactcctttcttcagtgggtcctgctcctcatccctgtgactgcctttggcttggggacatggcaggtccagcgtcggaagtggaagctgaacctgattgcagagttggagtccagagttctggctgagcctgtccctctgccagccgatccaatggaactgaaaaatctggagtataggccagtgaaggtcagggggtgctttgaccattccaaggagctgtatatgatgccccggaccatggtggaccctgtccgggaggcccgggagggcggcctcatctcctcctcaactcagagtggggcctatgtggtcactcccttccactgcaccgacctgggagtcaccatcctggtaaatagagggttcgttcccaggaagaaagtgaatcctgaaacccggcagaaaggccagattgagggagaagtggacctcattgggatggtgaggctgacagaaaccaggcagccttttgtccctgagaacaatccagaaaggaaccactggcattatcgagacctggaagctatggccagaatcacaggcgcagagcccatcttcattgatgccaacttccagagcacagtccctggaggacccattggagggcaaaccagagttactctgaggaacgagcatctgcagtacatcgtgacctggtatggactctctgcagctacatcctacctgtggtttaagaaattcctacgtgggacacctggtgtgtgacagatcagctgctgaagccctgtccctggataatgcagtatttcaagactgcctttatgctggatcatgtgctactggtataaagttctggccttctaccttaaaaaaaaaaaaaaaaaaaaaaaaaaaaaa

SEQ ID NO: 26608 - DNA, 1017 bp, Homo Sapiens
gcgacgggacgcccgcggaggcacgccgggtccctgaagaggccagcacgaaccggagggctagagacagcggccgagaggacgagccgggcagccccagggccctgagggcccgacttgagaagctggaagccatgtaccgccgggccctgctgcagctgcacctcgagcagcggggaccacgtccgagcggggacaaggaggagcagcctctacaggaacccgactccggcctccgctcccgggactcggagccctctgggccctggctgtagccgaggccgcagccggtgagaggcggagcctcgagcgggcccctcctcctccgttcccagctacccccgacctcgcgcacgccctggcccgctccctgcccgcggataccttggactacggtgccttcccgcccccaccagtggacacttccgggtggcgcttggccatccgcttggtggaggtcgagtgggtgcaagggccctcaggacctcccacatgtacagttcccctgcctcttgccccggctagtttccctggagagaggcctagccaacaacgaagggacggattttaaaacagcgagaactgggtgccaagaaacacttcatagtccctgaacttttctggatgttgtgcgaacctgttgtatttttttttttcctgtattttggttctgagggatgagtaatgtgtttttagttcgttgagtttatccattcttcaatcccctaaagccttcagctgttctttcatatgtggccaacattttaagtacagtgtttgcttttataagtcggtgttacttggatgtcctataaaatacccactttttataaagatgatatttataacctaggaactcatgcctgtcttggctgcagtccctgtacatctaatatatactgatttgtttgcccccagagaatttttaaggtatctgcctatatcgtgatcttttgaaatggtaaataaatctggtgcattaaaaattaaaaaaaaaaaaaaaaaaaaaaaaaaaaa

SEQ ID NO: 26609 - DNA, 2378 bp, Homo Sapiens
gcggcgcccggcgagcggggccgcttccacggcgggaacctcttcttcctgccggggggcgcgcgctccgagatgatggacgacctggcgaccgacgcgcggggccggggcgcggggcggagagacgcggccgcctcggcctcgacgccagcccaggcgccgacctccgattctcctgtcgccgaggacgcctcccggaggcggccgtgccgggcctgcgtcgacttcaagacgtggatgcggacgcagcagaagcgggacaccaagtttagggaggactgcccgccggatcgcgaggaactgggccgccacagctgggctgtcctccacaccctggccgcctactaccccgacctgcccaccccagaacagcagcaagacatggcccagttcatacatttattttctaagttttacccctgtgaggagtgtgctgaagacctaagaaaaaggctgtgcaggaaccacccagacacccgcacccgggcatgcttcacacagtggctgtgccacctgcacaatgaagtgaaccgcaagctgggcaagcctgacttcgactgctcaaaagtggatgagcgctggcgcgacggctggaaggatggctcctgtgactagagggtggtcagccagagctcatgggacagctagccaggcatggttggataggggcagggcactcattaaagtgcatcacagccagagcctgttgtgtctcagttgggtggtccccaggacactgcctgtggggacctgccctgcccctcttaggtttggagcagaagtggaggtgcccacagcaggtacccactggccccctcctcagtggagaccccaaggagctgcagctgaactgcaggggagggaaggaggagcagcctgggctgccccttgacattcaggatgtagcttcctgcccaccgcataccctggcgcctcactcctcacacgggaagacagcgggcctggctgggcatccctgtgcctgtccctggcggccaggccattgccttcccactatgcagccagggatgcccctgccccccatggctctgtgctgctcactttagggggctcaattctccactctgctcagtccctacagggaaagctcaggtcgggtctttctgagggtccaccagccatcctaccctctccctgcctggcacatgcctgccagcgttgtgtcatgcctgtccacaggggattcgtggggctcacttcatcagagtttgaagcccaaatgaaacgctgaagtgactgagaacctggcttcagtatattttctgctggggcttaataaagcagtagacagggcttgttccatccctctgtgctcagctgcatttcctgctggggtcctggttcctcaggagagagagaccacagggtgagagtgagccaggaacagcaaggacgttgattggttggggcaggggggccagagtagctgatgtaggagtactgggaggccagacggcacgaggtctccaaggccccagcaaagccatggcttctacccctagttcccctgacaggaagttcttggcgggtttggagccaggggatggcatggagtgatgtggctttgaagggtcctctggctgctgagctgggatgaggcaggtaagggtggaacaggaggggtggggaggaagccggggcagtcaccgagtgaccaccaagaggaagacccaccccacggcggggacagatgcggggtacgttaaagggagagccagagaactcatggggtgaggatggagtccgaggagactgctgggagccgccgtgtgggtcagagatggagaaggctgagtgcagcaaggtggggggtgactgggacccagcctttgggcctccccagccagagcagcccagcaacagtgtgtcctgtggtcataaaactccagggacctctatcctccaggagtctcagcctttccctgggcgcaggcccaccttggcatggccgcctcaggcctccatggagggagctgctatgtccccaccagattggccccgtgcggctgctggcttctgtagaggctgcccagaggggccaggtggcacaaataagagaggggagatggggggcagccaggagaggaggtgtcccttcctcgcccagacacagcgcgcttctctctggcctttcccgaggcctgtgagtgcctcaggaagcagctgggccctctgggaaggctgtgttcagcttaggaacataccgcctgtatctgctgtccctcccctgcccccctgccccccccaccgccttccctttttccctgtcttccttaaagtttcactcctgaataaaacttcactttgccttagaaaaaaaaaaaaaaaaaaaaaaaaaaaaaaaaaaaaaaaaaaaa

SEQ ID NO: 26610 - DNA, 3228 bp, Homo Sapiens
attaccaggcacgcgcaggaaacatggcggcggcgggtgttgtgagcgggaagattatatatgaacaagaaggagtatatattcactcatcttgtggaaagaccaatgaccaagacggcttgatttcaggaatattacgtgttttagaaaaggatgccgaagtaatagtggactggagaccattggatgatgcattagattcctctagtattctctatgctagaaaggactccagttcagttgtagaatggactcaggccccaaaagaaagaggtcatcgaggatcagaacatctgaacagttacgaagcagaatgggacatggttaatacagtttcatttaaaaggaaaccacataccaatggagatgctccaagtcatagaaatgggaaaagcaaatggtcattcctgttcagtttgacagacctgaaatcaatcaagcaaaacaaagagggtatgggctggtcctatttggtattctgtctaaaggatgacgtcgttctccctgctctacactttcatcaaggagatagcaaactactgattgaatctcttgaaaaatatgtggtattgtgtgaatctccacaggataaaagaacacttcttgtgaattgtcagaataagagtctttcacagtcttttgaaaatcttcttgatgagccagcatatggtttaatacaagcaggactgctagacagaagaaagctgttgtgggccattcaccactggaaaaaaattaaaaaggacccttatacggcaactatgataggattttccaaagtcacaaactacatttttgacagtttgagaggcagcgatccctctacacatcaacgaccaccttcagaaatggcagattttcttagtgatgctattccaggtctaaagataaatcaacaagaagaaccaggatttgaagtcatcacaagaattgatttgggggaacgccctgttgttcaaaggagagaaccggtatcactggaagaatggactaagaacattgattctgaaggaagaattttaaatgtagataatatgaagcagatgatatttagagggggacttagtcatgcattgagaaagcaagcatggaaatttcttctgggttattttccctgggacagtaccaaggaggaaagaacccaattacaaaagcaaaaaactgatgaatacttcagaatgaaactgcagtggaaatccatcagccaggaacaagagaaaagaaattcgaggttaagagattatagaagtcttatcgaaaaagatgttaacagaacagatcgaacaaacaagttttatgaaggccaagataatccagggttgattttacttcatgacattttgatgacctactgtatgtatgattttgatttaggatatgttcaaggaatgagtgatttactttcccctcttttatatgtgatggaaaatgaagtggatgccttttggtgctttgcctcttacatggaccaaatgcatcagaattttgaagaacaaatgcaaggcatgaagacccagctaattcagctgagtaccttacttcgattgttagacagtggattttgcagttacttagaatctcaggactctggatacctttatttttgcttcaggtggcttttaatcagattcaaaagggaatttggttttctagatattcttcgattatgggaggtaatgtggaccgaactaccatgtacaaatttccatcttcttctctgttgtgctattctggaatcagaaaagcagcaaataatggaaaagcattatggcttcaatgaaatacttaagcatatcaatgaattgtccatgaaaattgatgtggaagatatactctgcaaggcagaagcaatttctctacagatggtaaaatgcaaggaattgccacaagcagtctgtgagatccttgggcttcaaggcagtgaagttacaacaccagattcagacgttggtgaagacgaaaatgttgtcatgactccttgtcctacatctgcatttcaaagtaatgccttgcctacactctctgccagtggagccagaaatgacagcccaacacagataccagtgtcctcagatgtctgcagattaacacctgcatgatcactgttcttgcttttttgggaagagacactttgttgcaaccctttttcaagtacttgaaagttgaaaatttgaaatcttggtattgatcatgctttaaggtttatgtaaagaaagtgtactgatgttcttacattaaagctttacaaagatttaaactaattatttttgtagttacttctaccaaatagcctttccttttcgataacattcctcagtatttttatagccaagtacattttattttcttgctgatgaactggaattggataaatattgcaagtggatgagttggaaattatgcactttgaaaaacattcactttgtttaagcttattgggtttcagatttgattaaattaaatgtggaggctttctatagcattctaagctgagaagtagattgttacccagtaatgaaataaaaaataaaaataaaaggatttttttctctattgtttacgacagtactcagcttaaatatttatgctggtcaaatgtgatttaaattggacattttcatcaatgcagtctaatgtgtagataaatatttcaaccataataagtggattggcagtatattttttacattgaacttttcttcacttgtatataaagattatatataagtacttatttatgagtataagaaaggttaggcatattttcattaactgaataaacgacttgatttatataacctggtttatcaaaatttaacatggcttcagtatgagatctttttcaaaactattttcttaaacatttatttcatgagattatgttcaaccctgtacctggtgtaattttaaaattaattgcttgtaacctcactttactaataatgtttattatctttcctaataatgcattaactgattaatcaggtgtttaaatttttataaaatactcttgcaaaaagtttatttgaaaaatttctagatggtctcatgagtttcaaaataataatttttgtgtatgaacaaagctgttgtttttaccatgcagtattgcatgattttaagttatgtggaattaacataactgattttgttttaattgtaagttgttaactcctgtatatatcattaaaataaatctgaagttgaagtggaaaaaaaaaaaaaaaa

SEQ ID NO: 26611 - DNA, 3251 bp, Homo Sapiens
cgagacggggaagccgcgcgcggggaaggagggtccaggcgtgccggacccgcccccagaacccgcgcctagccctcccttccgcgcgcttactttgtttataacttgaaaaatcctctccgtctcccttccctgcctcctttcctttccctttcctctgccagtacaactagacccggcgtctggcgtccccggtgcccagcattctgcggggcaggcggattaattggaattcttcaaaatgtcaggtgtggtacccacagcccctgaacagcctgcaggtgaaatggaaaatcaaacaaaaccaccagatccaaggcctgatgctcctcctgaatacaattctcattttttaccaggaccccctggaacagctgtccctccacctactggctacccaggaggcttgcctatgggatactacagtccacagcaacccagtaccttccctttgtaccagccagttggtggtatccatcctgtccggtatcagcctggcaaatatcctatgccaaatcagtctgttccaataacatggatgccagggccaactcctatggcaaactgccctcctggtctggaatacttagttcagttggacaacatacatgttcttcagcattttgagcctctggaaatgatgacatgttttgaaactaataatagatatgatattaaaaacaactcagaccagatggtttacattgtaaccgaagacacagatgactttaccaggaatgcctatcggacactaaggcccttcgtcctccgggtcactgattgtatgggccgagaaatcatgacaatgcagagacccttcagatgcacctgctgttgcttctgttgcccctctgccagacaagagctggaggtgcagtgtcctcctggtgtcaccattggctttgttgcggaacattggaacctgtgcagggcggtgtacagcatccaaaatgagaagaaagaaaatgtgatgagagttcgtgggccatgctcaacctatggctgtggttcagattctgtttttgaggtcaaatcccttgatggcatatccaacatcggcagtattatccggaagtggaatggtttgttatcagcaatggcagatgctgaccattttgacattcacttcccactagacctggatgtgaagatgaaagccatgatttttggagcttgcttcctcattgacttcatgtattttgaaagatctccaccacaacgttcaagatagagagacacagcaagccatcaactatggttaattttgaaaaatggaaaagttggattgggcttacagtcagcactcagttatttgcaagtgtatttctttgctttgtagagtatttttattgggtgttaactttgacagctgagagtgggcttgcaagaacacaatctaaaagtgtgtttcaattgagtatctctctagtagaataggagttcatcctgaaaagctgtgactcattaacccagtaaacatatacaaagtaagcttaaaacactataaacatgagataagggaaaatgaatccagagttctcatattaataggtagtgaaacaataaggctttttagagcagactttgttggcataaaataacctggcttctatccctaaccctttcctacctttcctctccgtcaacatgtcctcatactgaagacaaacttgtttcaatgatagtcttcattttcaaaaacaaaaaggcaggcagacagaaataatgatgttttcttgcactaagaaggtactacttgtacacatatatcaaaacctcattctgcaaagtttttgaaggtttcaatgggaaatttgattttattacaaaataaaacattttttaatgttaaagtttatatattccatgcttgttttctcattcactggcatggatgatcaggagctgcctatatatgaaggcagaatcagactatcaggaaaggagctggccagggccatagccagtcaagatctctgagcaacttagagacattggtgtcattatatgaagcttgcatttaatacatttatacataatacatttgtacatttaattcataacgtctcttggtcacagatgccttatatataaaataagttgccagatctctaagattgcctagtacacctttgtatctcatttgatgtgatacccagaagagatcattgttttttgtttttgtttttgtttttttcaagaagatccttcgtgatcaccatgctgttctcatggtaagaactggagttatgtttttaaatttggaaatatgacattttatgtagcactttataaaaagtgaaagcgacaaattccaccgctgcttaatactgctttgcttctttttattgacatgatagataaatatgtatctacacagagtaataataataaaacacagtaaacattctatttctctatggtctacagcatgccagtaaataatatgtaggaccaataataaattatcaattacacatttttgtgttaactaattaaaagcatagtgtataagtgagtacactctaattaacttgcttctgttgcactttagttttctacctgcatatggactgcatttttttttttaacacagtcagtatgtagaatgggatgtattcttctgctgctgcttattaaataaagaaagcctgagtgttcttagatggggttattctgagatgagggtcttagcctacagttctttttgaaatgaaaggtgctttgttttttaattatattcatcttttcagggtaaatttgtttttctgagtttctcgtaatgctcatttttacatgctgctactagctttttttttaaaaaaagtaaaagttgctgctttctaaaatattaattgccttatatttgaaagtgccattgcaatcgtaagtagactatgtatttcctataatgatgtctgatatttaaataggaaatcagacaaacaatattcagaaagtttaagcatataaactttttatttttaacttgcctaaatccctgtattccaaaacctgctgcatcataataaatatatctatatatatttagcataagacgtgatatttttaatttcttttttaaaaaattatatttgtctcttagagttaaaattttctttatataatattgtcatatgtcatagttttaatacaattcacatgatttctatgtttcttaatgatattttgttgtgtaaaattgatcggattgattaaaaaacaaattctctggaaaaaaaaaaaaaaaa

SEQ ID NO: 26612 - DNA, 3381 bp, Homo Sapiens
gtctagagcggcggcggctggctagggctgcggcgcgcgtggagggttcgctgctggtttgccgccgggtcgggctccgtgggccggggcaggaggaccagcacctgaggccgggcccgcagcccgcgacttcacagccaggcggcggcgctgctgctgctgcggggctctggcgcgcagcccggcgggacagcggggcggctggcgccgggggccggggagcgccagatgatggatttggacatgcttctatgaagaaatgccacatggtccgagagcaaacatgtccaggctactgccactttagtggactagggctcggtgccagcacttcccgggtaatcaggcgtggtctgaccgaggatcaagaagcacatcatcaccaatgacatcatgacagcaagagagcacagccctcgccatggtgccagggcccgtgcaatgcagcgggcttccaccatcgacgtggcggccgacatgctgggcctctctctggcaggaaatatacaagacccagatgagcccattttagaatttagcttagcttgcagtgagctgcatactccatcgctagatcgaaagccaaatagttttgttgcggtgagtgtcaccacccctcctcaggcattctggacgaagcatgcacagacggagatcattgagggaaccaacaatcctatatttctaagcagtattgccttctttcaagactctcttatcaatcagatgacacaagtcaaactctccgtgtatgatgtcaaagatagatctcagggaacaatgtatttactgggctctggaacgttcattgtcaaagatctgctccaggacaggcatcataggttgcatttaacactaaggtctgcagagagtgaccgtgtaggtaacatcaccgtgattggctggcagatggaggagaagtcagaccaacggccccctgtgacccggtctgtggacactgtcaatgggaggatggttcttcctgtcgatgagagcttgacggaggcgttaggaatccgatccaaatacgcttcattgcgaaaggacactttgctgaaatcggtgttcggtggtgccatctgccgcatgtaccggtttccaaccactgatggtaaccatttgcggatcctggagcagatggcagagagcgtgctctccctgcacgtgccccggcagttcgtgaagctcctactagaggaagatgcagccagagtgtgtgagctggaggagctgggagagctgtccccttgctgggagagcctccggcgccaaattgtcacccagtaccagaccatcatcctcacataccaggagaacctgaccgacctccatcagtacagagggccctcgtttaaagcaagcagtttgaaagcagataaaaagttagaatttgttcccacaaacttgcacatacaaaggatgagagttcaagacgatggaggatcagatcagaactacgacatcgtcaccattggggcgccagcagcacactgccaaggttttaagtcaggaggtctccgcaaaaagctgcacaaatttgaagagaccaagaaacatacatcatctggctgccagtccataatctacataccccaggatgttgtcagagccaaggagatcatcgcccagatcaacaccctgaaaacccaagtgagttactacgcagagcggctgtcaagggcagccaaggacaggtctgccactggccttgagaggacactcgccatcttggcagacaagacacggcagctggtcacggtctgcgactgcaagctcctggccaactccatccatgggctgaacgctgcacggcctgactacattgcctccaaggcctctcccacttcgactgaggaggagcaggtgatgcttagaaatgaccaggacaccctcatggcccggtggacagggagaaacagccgatcttccctgcaggtggactggcacgaggaggagtgggagaaagtgtggctgaacgtggacaagagcctagagtgcatcattcagcgtgtggacaagctgctgcagaaggagcggctgcatggcgagggctgtgaggatgtcttcccctgtgcaggcagctgcaccagcaagaaaggtaacccggacagccacgcctactggatcagaccagaagaccccttctgtgatgtcccctcctcaccatgcccctccaccatgccctccactgcatgccatcctcatctgaccacacattgcagtccccctcctgaagagtccagcccaggtgaatggagtgaggccctttacccgctgctgaccactctcaccgactgcgtggccatgatgagtgacaaggccaagaaggccatggtattcctgctcatgcaggacagcgcgcccaccatagccacctacctgagcctgcagtaccgccgtgacgtggtcttctgccagacgctgaccgccctcatctgcggcttcatcattaagctgaggaactgcctgcatgacgacggcttcctgcgccagctctacaccatcgggctgctggcccagttcgagagcctgctgagcacctacggggaggagctggcaatgctggaggacatgagccttgggatcatggacttgaggaacgtgaccttcaaagtcactcaggccacttccagcgcctccgcagacatgctgcccgtcatcacaggaaatcgcgacgagtttaacgtgcgggtccctctgccgggcccgctgtttgacgccttgccccgggagatccagagtggcatgctgctgcgagtgcagcccgtcctcttcaacgtgggcatcaatgagcagcagacactggccgagaggtttggcgatacgtctttacaagaagtcatcaacgtggagagtttggtgcggttaaattcctactttgagcagtttaaggaagttttgcctgaggattgcctgcctcggtctcgcagtcagacgtgcctgccagagctgctgcggtttctgggtcagaacgtgcatgcccggaagaataagaacgtcgacattctctggcaagctgctgagatctgccgccgccttaatggggtccggttcaccagctgcaagagcgctaaggaccgtacagccatgtcggtgacactggagcagtgcctgatcctgcaacacgagcatggcatggccccgcaggtcttcacccaggccctggagtgcatgcgcagtgagggttgtcgaagagaaaatacaatgaagaatgttggaagtcgcaaatatgcatttaattccctgcagctgaaggctttccccaagcattacaggcctcccgaagggacttacggaaaagttgaaacgtgaacacacggtttcctctaattagctgttacataataaatgtgggtaccctctagaaaaaaaaaaaaaaaa

SEQ ID NO: 26613 - DNA, 3711 bp, Homo Sapiens
gtttgctggctgggagcctagaagggatagtgggcgaggctccgccccgtggtggggcgctttccgtcggcgtgtgttttggggttgccatcggcccgtagtatgtgaaaagtgagtttgcaaagaatcagtgggaaatctgtactctaaagggccggaaagcgtgttatggccctgccacttcgtggctagagaccgtgggctttacctctttaaagctgccttacctcatttttcctgcaaagggctgacgtcgctgaactctctgaaatgtagagagcccgaggggaagttgctgcagaggcaccaaataatgtcatctgaaatgttgccagcatttattgaaacttctaatgttgacaaaaagcaaggcataaatgaagatcaagaggagagccagaagccaagattaggtgaagggtgtgaaccaatatctaaacgacaaatgaaaaaactaataaaacagaaacaatgggaagagcaacgggaactccgcaaacaaaagcgaaaagaaaaacgcaagaggaaaaaattagagcgacaatgtcaaatggaaccaaactcagatggacatgacagaaaacgtgttcgaagagatgttgttcatagcacccttcgccttattattgactgtagttttgatcacttgatggtattaaaggacattaagaaacttcataagcagattcaacgatgttacgcagaaaaccgacgggcactgcatcctgtgcagttttacttgacaagccacggaggccagctgaaaaagaacatggatgaaaatgacaaaggatgggtcaactggaaggatatccatatcaaaccagagcactatagtgaactcataaagaaagaagacctgatttaccttacgtcagattcacctaatatactgaaggaattagatgaatcaaaggcctatgtgattggaggattagtagatcacaaccatcacaagggactcacatataaacaagcgtcagattatggaatcaatcatgcacagctcccacttggaaattttgtgaagatgaatagtcgaaaagttttggcagttaatcatgtgtttgaaattattctggaatacctggaaacaagagactggcaagaagcattttttactatcttgccccaacggaaaggagctgttcccacagacaaagcctgtgaaagtgcttctcatgacaatcagtctgtcaggatggaggaaggtggatcggacagtgattccagtgaggaggaatatagcagaaatgaactagattcaccacatgaagaaaagcaggataaggaaaatcacactgaatctacagtgaactctctgccacactaatgttacctggtttccttttagtttaaggaaaaattaggagaaagtgaggtgctatatagaatattgaaattggaagaacattttattttctcttatttctgttgtgatttttaaaaacttttttttggacctaaataataataaaaaaaaaagccctttaaactttgtaaggaaatattttttgattttgcgtaagaagatttaaatgtgtatgtgattttttttgtttttgtttttaaagcctcagtagtttctagataattttactgtattagtatattttcattctttcattttatattctttagaatgtgccttctgacctttcagttttttaattttatagtcacatcaacatctttatgatctattgcctatatatctgtgagggcacatattcataaatatactgtcaatctatcagcatttgtgtatggtaggttaccctctatttgcagcttttatgtttaaattagttacttgaaagaatgtagtaattttaggaagaagtatcagtttgatagacttaataattcatttcttttggactatggagcgcatatctgttccttctttatgatgcctttttatggttctgaagtaattactgaagagttgagaatctctttaatgcattttcttaattcttacaatggtgataagttacttcaattataaaattgaattttgcagactaaattattttataaggctgttgctattgaaagatcaattttgtctttacctgcatttaaaatggaacagctcttagcagctgtggtttttttttccatattttttttaaatttgttggctcttaagatgaataaagtttataggtgcatctgcctcctcttctctaagaatatgcatactaatgtttgtttctataaatcaaatacacatgtgataatatgcatgtaaatacataactatcctcatcatgtatggctctcagttcttaattgatgataacatgattgaattgccatatatctgtattacttgtgtgaatggttgtgttgaacacgctaagaacaatttgaattttattaagtacaaaaatccttaacgtttgtatgggaacattggcaagaaagaatagtgtgaaagggaactgttttagtttcctatcagtaattgtacatgcagttaaatgtttaaggtaaaatgattggtctctgtcacagctaaaagatttcagtagccttcattgagtttgggtaaaataagttgctgttcttttgtcttctttttaatatataaaagttatatttaaaaagtatataacatactatatatgttacatactaacatatatatacacaacagaaagtttattggatttagtactgatatttactgtctatttttgttactttgttcttagtaatctattatagttacctattttaaggtaaggtctgtaggcaagatatgtaagtaaagacaagccctacaattttaaaataacaaagcttatgtcttaagttgtattttttcaaaggttcatgtttttctgagtaaatgtggtttattagcatgaaatattatgccttttacttaaattattttatgtaaaatagggcactgtttaattatgaaagggggaaaatcattccaaataagagtttaatttttattaattataaaaaactctgtattagtttcctagatgtgctagaacaaattaccacaaactgggtggctttaaacaacagaaatttattctcttaacagttccagagactaaatgtccagactcacaatgtcccagtgccatgcttcctccttaggccctaggaaagaatacttcctagcctcttcctggcttttggtggttgccagcaatccctgctgttccttagcctatagtggcttgactccaatctcagttttgttgtcaagtggtcttctaccctgtcttctatgtttgtatccgtgtccaaactctttttctagggagaccagcactggattagagttcaccatgatccaatatgacctcatcttgactacatccgcaaagaccctgtctccaaataaggtcacatttacagggtaccatgtgttaggatttgacatatcttttgggggacacaattctacccactacaggcccatatcttatctaggatgttggtggcaagaaggtgaagattactacctcttttgatataactagtttctgaggtatttaaaaatttggttttaaaaatattaagctttttgctcatttgcatgtatacttttctctcaacattgttttggtttatttaggttatttgttaaaacttcagtaaatactaaagttacttgtattagaacataataaaagtagagaattaaactacctaaaaaagaaaaaaaaaaaaaaa

SEQ ID NO: 26614 - DNA, 3767 bp, Homo Sapiens
gataagttggcgcgtcacctagacgtcagcctcttacctctcggacgtcccgtcccaggagcaaaactctagtgactttgggcccgcccccgtgagagtggagggcggccgatgagggcggttctgaagggaacaagaccaatgagacgagcccggggcggggcgcggggccggagggtggggcgggtggcggcggtggcagtccgaggtctggctccgcgcagtatatgacagtacgtcagcagcgggatggccctagcagtggcggcggctgcagaagcccaagcagccgcggccgcagtggaggctagagccggagcggcggcggcggcggcaccccggggagtttaagatggcggcgggggggacagggggcctgcgggaggagcagcgctatgggctgtcgtgcggacggctggggcaggacaacatcaccgtactgcatgtgaagctcaccgagacggcgatccgggcgctcgagacttaccagagccacaagaatttaattccttttcgaccttcaatccagttccaaggactccacgggcttgtcaaaattcccaaaaatgatcccctcaatgaagttcataactttaacttttatttgtcaaatgtgggcaaagacaaccctcagggcagctttgactgcatccagcaaacattctccagctctggagcctcccagctcaattgcctgggatttatacaagataaaattacagtgtgtgcaacaaacgactcgtatcagatgacacgagaaagaatgacccaggcagaggaggaatcccgcaaccgaagcacaaaagttatcaaacccggtggaccatatgtagggaaaagagtgcaaattcggaaagcacctcaagctgtttcagatacagttcctgagaggaaaaggtcaacccccatgaaccctgcaaatacaattcgaaagacacatagcagcagcaccatctctcagaggccatacagggacagggtgattcacttactggccctgaaggcctacaagaaaccggagctacttgctagactccagaaagatggtgtcaatcaaaaagacaagaactccctgggagcaattctgcaacaggtagccaatctgaattctaaggacctctcatataccttaaaggattatgtttttaaagagcttcaaagagactggcctggatacagtgaaatagacagacggtcattggagtcagtgctctctagaaaactaaatccgtctcagaatgctacaggcaccagccgttcagaatctcctgtatgttctagtagagatgctgtatcttctcctcagaaacggcttttggattcagagtttattgatcctttaatgaataaaaaagcccgaatatctcacctgacgaacagagtaccaccaacactaaatggtcatttgaatcccaccagtgaaaaatcggctgcaggcctcccactgccccctgcggctgctgccatccccacccctccaccgctgccttcaacctatctgcccatctcacatcctcctcagattgtaaattctaactccaactcccctagcactccagaaggccgggggactcaagacctacctgttgacagttttagtcaaaacgatagtatctatgaggaccagcaagacaaatatacctctaggacttctctggaaaccttaccccctggttccgttctactaaagtgtccaaagcctatggaagaaaaccattcaatgtctcacaaaaagtccaaaaagaagtctaaaaaacataaggaaaaggaccaaataaaaaagcacgacattgagactattgaggaaaaggaggaagatcttaagagagaagaggaaattgccaagctaaataactccagtccaaattccagtggaggagttaaagaggattgcactgcctccatggaaccttcagcaattgaactcccagattatttgataaaatatatcgctatcgtctcctatgagcaacgccagaattataaggatgacttcaatgcagagtatgatgagtacagagctttgcatgccaggatggagactgtagctagaagatttatcaaactagatgcacaaagaaagcgcctttctccaggctcaaaagagtatcagaatgttcatgaagaagtcttacaagaatatcagaagataaagcagtctagtcccaattaccatgaagaaaaatacagatgtgaatatcttcataacaagctggctcacatcaaaaggctaataggtgaatttgaccaacagcaagcagagtcatggtcctagaactctgcttggaccagaagatgtgaataaacttaagcttatttatttaaaattccaaatgagttgctctagattctaaaaaggtgaaactttggctgttgaaagtttcagtattagtaaacttgagttactttttcttttccattttactttgcttccctgcatttcgaagctgctctttctggtcctccccaccaccccacccccaagacttgtgtttgttaatagaaataatttttttaggtattggggatccattgtctatatttcaaatcagttttttttcctcaaaaacttgtgtttgttattagaaatgattttttagatattggggatccagtgtccacacttaaaagttgtatgtgtttaaaaaacaacaacagtaatgtgcaaggtgaaatgcttttggataaacgtaagcctattttctgacgtttcttaatgcaaactctttgccttaaatggtagaatatttagaaatttgcacaaaattaaaaaaataaacattgtcttggagggttaaaaaatagaaaggtgtatgtgtatagattcacatacacatatgtatatacaggctgacttgatctagaacattaaatccgccctgcaagttaaccccccattgcaatggttgccttaaggtgtttgctagttgtgtacatagtgtggttaatcattagctacactgcttcccacttgattagagcaatgggaagcatactgtggcctaccagcatctggaagtgtgtgctcgatctgtatgtgtgcagaggtggtgtggatgtgagcgtgcatgaaggaaaaaaagctgctactcctagtaggccaaacgctcaggttaaacaactgacgagtgttactgtagggtgtttttttgtttttttgttttttttcttctatcaaattgctacttttgttgtggaagacaaaagcatttccatttcaacgagtttgtcagctttattaatgttgggcaaaaattgatatgtcatgaaaatgaaacagatctatagttttgggacaaaattataaaatgaaatgtgtaggtaacctatttatatactgctataaagtattttttgaagagagatatgcaaagaagctattacctacataagaggtatatttaaagattttttttttttcatcctggtgccaggaatataaaaaagagtggatatatttaaccataacatactgtgattcatcaaacagcacaaactttcatttcatggagtttatctgttgacattgatttaaactgtcacttgttttatcatgtgggaacataagttatgtggtcaaaaatataaggattttgaattaatgttgattcaagttgtattgtcttattgtattgtcttttcaaagtgctgccagttgaaaagggaagcattatgtttacaaatctgttttgaaatgtttgccaaaattttggtagtgtctttaataaagatgtttgtctccagcatccagaaaaaaaaaaaaaaaa

SEQ ID NO: 26615 - DNA, 3463 bp, Homo Sapiens
agcggaggagtatgagagcttctcctccgagcaggaggcaagtgacgacgccgtgcaggggcaggacttggacgaggacgactttgacgtggggaagccgaagaagcagcggagatcgattgtaagaacgacgtccatgaccaggcaacagaacttcaagcagaaagtggtagcgctgctgcggaggttcaaagtgtccgacgaggtcctggactcggagcaggaccctgcggagcacatccccgaggcagaggaggacctggacctcctgtatgacaccctggacatggagcaccccagcgacagcggccccgacatggaggatgacgacagcgtcctcagcacccccaagccgaagctgcggccatactttgaaggcctgtcgcactcgagctcgcagacggagattgggagcatccacagcgcccgcagccacaaggagcccaagcccggctgacgtgcccgagaagacgcggtccctgggaggcaggcagccgagcgacagtgtctctgacacggtggccctcggtgtgccaggcccgagggagcaccctggacagcctgaggacagccccgaggctgaggcctccaccctggatgtgttcacggagaggctgccgcccagcgggaggatcaccaagacagagtcccttgtcatcccctccaccaggtccgaggggaagcaggctggccgacggggccggagcacatccttgaaggagcggcaggcagcacggccccagaatgaacgggccaacagcctggacaacgagcgctgcccggacgcccggagccagctacagatccccaggaagactgtgtatgaccagctcaaccacatcctcatctccgatgaccagcttcccgaaaacatcatccttgtcaacacctcggactggcaggggcagttcctctccgacgtcctgcagaggcacacgctccccgtggtgtgcacgtgctctcctgcggacgtccaggcggccttcagcaccatcgtctcacggatacagagatactgcaactgcaattcccagcccccgacccccgtgaagatcgccgtggcgggagcgcagcattacctcagtgccatcctgcggctctttgtggagcagctgtcccacaagacacccgactggctcggctacatgcgcttcctggtcatcccactgggtgagcaccacgccgtccacctgggcctgggcacagatgccacgggcagtgtggcgtggcatggagtggtgtggcgtggcgtggcgtgttgtgtggcgtggcgtggcgcggtgtgtcgtggtgtggcgcggtgtggcatggcgtggtgtccctgcttgctacacatttgttgtttttaaatgtttgtttgatacagtaacactttgttaattttaattatatgcaagataacttgattgccctaaaacagccatttgggtcaagataaagccatcgccctctgaaggggcctgagctgggtgtctcctccatcagtcgctgtgataactctatgccagtttcgatttccaaagtcagaagtgcaaagcagggctcgttattaatcctctcaaatcgtccaggtcctgtgtcgtcgaactccattacttctttaggtccatacgatgtgtcttaccacgaaacaaacccacccagccttaatctgttgaccagcagcaaggcctggaggcgacacctctcccgtgtggccctcacgatgccgacgtcagagccctgagccagccgaggcctctgcacggtcacatgtgccctgctgggccttcctcagtggcactcagggctctgggacctcagctcagggctggagctccttcagcggggccacaggcatccaccagggaggggcagtggtggctttctctttcggtggcaggaaagtgggcttgtctggaaggcagcagcacaggcctggggtcgggtggcccagcttttgtgccgcggtgggagccttgcagctccgagtcccccgtggtgacaccagccccacccctggcatgcaggctcccaccccgtggccaggtacctaggctccgtggactaccgctacaacaacttcttccaggacctggcctggagagacctgttcaacaagctggaggcccagagtgcggtacaggacacgccagacattgtgtcacgcatcacgcagtacatcgcaggggccaactgtgcccaccagctccccatcgcagaggccatgctgacctacaagcagaagagccctgacgaagagtcctcccaaaagttcattccctttgtcggggttgtgaaggttggaattgtggagccatcctcggccacatcaggcgactcggacgacgcggccccctcgggctctggcacgctctcctccaccccgccgtccgcatctcctgcggccaaggaggcctcacccaccccgccctcctccccgtcggtgagcggaggcctgtcctcccccagccagggtgtcggcgccgagctgatggggctgcaggtggactactggacggcagcacagcctgcggacaggaagagggacgccgagaagaaggacctgcctgtcaccaaaaacacgctcaagtgcactttccggtccctccaggtcagcaggctgcccagcagcggcgaggctgcagccacgcccaccatgtccatgaccgtggtcaccaaggagaagaacaagaaggtgatgtttctgcccaagaaagcgaaggacaaggacgtggagtctaagagccagtgcattgagggcatcagccggctcatctgcactgccaggcagcagcagaacatgctgcgggtcctcatcgacggcgtggagtgcagcgacgtcaagttcttccagctggccgcgcagtggtcctcgcacgtgaagcacttccccatctgcatcttcggacactccaaggccaccttctagccccacccaccagggggcccacctcctgccccatgctgtgaggggcccagctgcatttctgttaacatttcagtttactacagagacagacgcttaaaacacaaagagaaacagtcttaagtatgaatgtgctcacaacgtggaaactaacgggggagctcctgccaggagccgaataactgctctgcttattaacccgaacgttcggcccggggctgggaagccagaaggacgatgctgagccatggatcgcggaaggcgtcctctggcctcaggagccacccagagcctcacaggctgagttcttgcctctgtgtcctgtccttcctggaagtcaggactctgcttcctcagggagcccggggaaggcggagctcagtggccacaggccgagggccatggggccgctcagtcccgttggggttgtcctgagttgagcctgggggggccgtcctgcccgcctaagagatgcccccagcaccgcacactcgtggttcccaataaactcctgcctgcggcggaggttttatagcagcaaaaaaaaaaaaaaaa

SEQ ID NO: 26616 - DNA, 3950 bp, Homo Sapiens
attctttcttcctcttggcttatattagggataggggatgtggtttgttacaaaggatgagtattttgatagcttctcattccttgaactattctgcaggtttataacaaagctcagaaaatactaaaggttaaaggagaattgagagctgccaaggaaatgaaagatgaggcgggggagagagacagagaagtgagcagcctgaacagcaagctgttaagcctgcaacttgacatcaagaatctgcacgatgtctgcaagagacagaggaagaccttgcaggacaatcagctctgcatggaggaggcaatgaacagcagccacgacaagaagcaagcacaggcattagcattcgaggagtcagaggtggaatttgggtccagtaaacagtgtcatctgagacaactccagcaactgaagaaaaaattgctggtccttcaacaagaactggagtttcacacagaggagttgcagacttcttactattctctccgccagtatcagtccatcctagagaagcagacttccgacctggttcttctgcaccatcactgcaaactgaaagaagatgaggtgattctctatgaggaggaaatgggaaatcacaacgagaacacaggggagaagctccatttggcgcaggagcaactcgccttggccggggacaagatcgcctctctagagaggagcttaaacctctacagggataaataccagtcttccctgagcaacatcgagttactagaatgccaagtgaagatgttgcagggggaactcggcgggatcatgggtcaggagcctgagaacaagggtgatcattcaaaggtacggatatacacttctccttgcatgattcaagagcatcaggagactcagaaacgactgtctgaagtctggcaaaaggtctctcaacaggatgatctcattcaagaacttcgaaataagctggcctgcagtaacgctttggttctggagcgtgaaaaggctttgataaaactacaagccgattttgcttcctgtacagccacccacagataccctcctagctcctcagaagagtgtgaagacatcaaaaagatactgaagcacttgcaggagcagaaagacagccagtgcctgcatgtggaggagtaccagaacctggtgaaggatctgcgcgtggaactagaggccgtgtcggaacagaagagaaacatcatgaaggacatgatgaagctggagctggacctgcacggactgcgggaggagacatctgcccacattgagaggaaggataaggacatcaccatcctgcagtgccggctgcaggagctgcagctggagttcaccgagacccaaaagctcactttgaagaaagacaagttcctccaagagaaagatgagatgctgcaagagctggagaagaaactgacacaggttcagaacagcctcctgaaaaaggagaaggagctggagaagcagcagtgcatggccacagaacttgaaatgacagtcaaggaggctaagcaggacaagtccaaggaggcggagtgcaaggccctgcaggctgaggtccagaagctgaagaacagtctcgaagaggccaagcagcaggagaggctggctggtgaggcccctgcagctcagcaagcagcccagtgcaaagaagaggctgcactggcaggctgtcacctggaggacacccagaggaaactgcagaagggtctcctcctggacaagcagaaggcagacaccatccaggaactacagagagaacttcagatgctgcagaaggagtcctcgatggctgagaaggaacaaacctccaacagaaaacgggtggaggagctgtcattagaactctctgaagccctgaggaagcttgaaaattcagacaaggaaaagaggcagcttcagaagacagtggctgagcaggatatgaaaatgaatgacatgcttgatcgtatcaagcaccagcacagggagcaaggctccatcaaatgcaagttagaagaagatcttcaggaggccacaaagcttctggaggacaaacgggagcagttgaagaagagcaaagagcatgagaagctgatggagggagaacttgaagctttgcggcaggaatttaaaaagaaagacaagacgttgaaagagaattccagaaagttggaggaagaaaatgagaatctccgagcagagctacagtgttgttctacacaactggaatcctctctcaacaaatacaacaccagccagcaagtcatccaagacttgaataaagagatagcccttcagaaggagtccttaatgagcctgcaggcccagctggacaaagctctgcagaaggagaagcactatctccagactaccatcaccaaagaagcctatgatgcattatcccggaagtcagccgcctgccaggatgacctgacacaagccctcgagaagctcaatcacgtgacctcagagacaaagagcctgcagcaaagcttgacacagacccaagagaagaaagctcagctggaagaggaaatcattgcttatgaggaaaggatgaaaaagctcaatacggaattaagaaaactgcggggcttccaccaggagagtgagctggaggtgcacgcctttgacaagaagctagaggagatgagctgccaggtgctgcagtggcagaagcaacaccagaatgacctcaagatgctggcagccaaagaggagcagctcagggagttccaggaggagatggccgccttaaaagagaacctccttgaggacgataaggagccctgctgcctgccccagtggtctgtgcccaaagacacctgtaggctctaccgagggaatgatcagattatgaccaacttggagcaatgggcaaaacagcagaaggtcgccaatgagaaactaggaaaccagctccgagagcaggtgaaatacattgccaagctgagtggcgaaaaggaccacctccacagtgtaatggtccacttgcagcaggaaaacaagaagctgaagaaggagatagaagagaagaagatgaaagccgagaacacaaggctatgcaccaaagccctaggcccgagcagaacggagtccacacagagggagaaagtgtgcggcaccttgggctggaaggggttgccccaggatatgggtcaaagaatggacctcaccaagtacatcgggatgccccactgcccgggtacgtctgccattggtcaaaaaaataagtgtgatttttttctttaaatcactggattgagaattcaagtaggaagaagaaaataggccttttgtggcctcaagtcattttcttagcgactttggaccaaagatcgttgttttcacatctgtaaagggaggaggcaaattaagaccccttctgatctaagaacatctgaagcatacccaagtgcctcacatctcagacctgtcccctcccctgacccagacccattttagggaacaggtagaagaggcatcttccttctacgtctggaaaccccgtaagagcaccccagccacctacccagcctgggtccacagccgcctttcctgccacctgtaaactccatgttaccccagaggcaagaagtcaccctgcagcagagctgcctggccatgcggccagcccttgaggaatcacctcgttaatttctcctcgaatcaaaactctcatttcctccctgttccctcaggttcctcatactgctagaatccacatctagccctgagcagcatttccacgggtgtttcttcagaggacagtgagttcccagccctccctctctcttgacctggatcagctcttacaggagtatatcacggtcccagcctattttgcaagacactaacttttgttgagttttgtccacttcctgccatggagtgagctttagaaccatactaccatctccaggcccaaactctggaataaagacatgagcatgagcacaaaaaaaaaaaaaaaa

SEQ ID NO: 26617 - DNA, 3102 bp, Homo Sapiens
agcggatcggccccgggtctgtccgggcgttgcgggattggggcctgggaacgctcggcccccggcagccgagaagcccgtgactgggctgagcagcaccatcccagccctggggcctgctgactgcgaacccggagcgttgctatcctccaccggactgtcaggctctgcgcgccccgcggaggtcggcggcgaccagcagcgactgcggagcgacggcgggcggccccgggcatgtacgcccccggaggcgcagggctgcccggcgggcgccggcggaggagcccgggaggcagcgctctgcccaagcagccggagcgtagcctggcctcggccctgcctggcgccctgtctatcacggcgctgtgcactgccctcgccgagcccgcctggttgcacatccacggaggcacctgttcgcgccaggagctgggggtctccgacgtgttgggctatgtgcacccggacctgctgaaagatttctgcatgaatccccagacagtgctgctcctgcgggtcatcgccgccttctgtttcctgggcatcctgtgtagtctctccgctttccttctggatgtctttgggccgaagcatcctgctctgaagatcactcgtcgctatgccttcgcccatatcctaacggttctgcagtgtgccaccgtcattggcttttcttattgggcttctgaactcatcttggcccagcagcagcagcataagaagtaccatggatcccaggtctatgtcaccttcgccgttagcttctacctggtggcaggagctggtggagcctcaatcctggccacggcagccaacctcctgcgccactaccccacagaggaagaggagcaggcgctggagctgctctcagagatggaagagaacgagccctacccggcggaatatgaggtcatcaaccagttccagccaccccctgcttacacaccctaatgccagccctgggctctcttcctcggcagcccctccctcaactctgcagctcctctcgcacccagaggagctcctttccccagcaggcctcactggtaggatcctgaccatcttctccaaaccttccccaggagagactctgcctttagggtcatccaagtatccctgctctcagaaccggaggtccactggttttctataatgtactctttccctcctgccacatcctgcccccttcacattcacgagtcattaccagccagggaaggtcatccaagtttcctccagcatgggcgatatctttgggaccgagactttccttggagagctgctgagagcggacagtcccaaaaacaagtgtcaaagggcccaagggaaaggggactgtgccctggaggctcacttcacagggatcagtgtttgctccacagctgtagctctgggctgacgccccccagaccccttccttctcggagtgacccgcccccaggccacctgctccggggagttctgtgcactttactctttggacttctcctcacgtgtgccctggttttatggggagagggaatcgctgttgggaaggcagagcagttgcaaccctctctgcccttgcttcatgtggctggagcccaggcaaggagagcaggagccagcgtgagactgaggccccctggtgcctatcaaggaccagagtgaaggggactacatctcccagcccttcaccttttaaatatgagtggttttaaaaggaaaaaaatgaaaccaggcaacagcaacaatattctgtttttaaaatagggacaagactgttgtcactttttagacatgtatcccattccttttggctctgcaatatttggggctgtagctccttccaagcccatggtagtccctccccgagtctctcccagtagaatgcagcctcccttccctggccccttccctctcagtgacggtgactccctggggccttctcgtggaacccaggggggctgaggactgtggcctggctggcgggccagcgtggtgctcctcaggactgcagcactgagatggaacctggcctcagtttaggaacaggggccacaacagggcaggaacccaccaccctccacataggaatacaaccagtggggccacatcatgtgaggcatcagacccacactgtcagcccagcaggccgggctgtgtccttcagacccagtgctgccctagactctgactcgggactccagcttgccacgtgccctctcccctcttgaatgtactctggtcttgcagtgtgctgctgggactttcttgctcagccatcactctggtcaccttgtttgctctgggtctggctgaattttctgccctgagatctgggcataaagtggatgaaacttgaaagaccttcagtgtagatccagatggccaacctgtccttgttaagttacttgcttcttgggaatcagtgtcccctgctgagctgaaaaggaaatggattccaatctcttccaacctttaaggtgatagatagtttgagcaagactggagaatggacaacactatgaagctgtggctagaaagggactgtcatgtcccatcctttggccagattgactggggatgtccggacagatgcctgcatgggtggtgagggccacatctgcacacgagccagtggctgcttgcagttcactgctgtgatgccagagtgtgttcaaaggtgactctcctgctctcctggactcttctctcaggcaagaaaggctgcaggctgcctgctatgtgatgcctgagcacaaagccaaggaactgaactaagtctttctgttaagtcctgagtttgtcattggcaggtttacttgtggccagctctctctgcccttgggtgtctgagcaggcagaccagaagaccaggcactggacctgcatgccgaagggactggtcatctcctgaggacctgtacatgaccctgtggactgttccgcacgatccggaacccactttttattcactccccatgtctttggccttcctcttctttctctttccctctgccatcctgacactgatagtttgtcatataaattccccgggttgtgtttttttttctagaaaaaaattaaaagggaaaacaaaaccaaaaaaaaaaaaaaaaa

SEQ ID NO: 26618 - DNA, 3394 bp, Homo Sapiens
gttggcctcgggctgaggtgcaaggaccaggactagggcgagggcagcggtccaagaaatagaaaacaatgactgggagagcccgagccagagccagaggaagggcccgcggtcaggagacagcgcagctggtgggctccactgccagtcagcaacctggttatattcagcctaggcctcagccgccaccagcagagggggaattatttggccgtggacggcagagaggaacagcaggaggaacagccaagtcacaaggactccagatatctgctggatttcaggagttatcgttagcagagagaggaggtcgtcgtagagattttcatgatcttggtgtgaatacaaggcagaacctagaccatgttaaagaatcaaaaacaggttcttcaggcattatagtaaggttaagcactaaccatttccggctgacatcccgtccccagtgggccttatatcagtatcacattgactataacccactgatggaagccagaagactccgttcagctcttctttttcaacacgaagatctaattggaaagtgtcatgcttttgatggaacgatattatttttacctaaaagactacagcaaaaggttactgaagtttttagtaagacccggaatggagaggatgtgaggataacgatcactttaacaaatgaacttccacctacatcaccaacttgtttgcagttctataatattattttcaggaggcttttgaaaatcatgaatttgcaacaaattggacgaaattattataacccaaatgacccaattgatattccaagtcacaggttggtgatttggcctggcttcactacttccatccttcagtatgaaaacagcatcatgctctgcactgacgttagccataaagtccttcgaagtgagactgttttggatttcatgttcaacttttatcatcagacagaagaacataaatttcaagaacaagtttccaaagaactaataggtttagttgttcttaccaagtataacaataagacatacagagtggatgatattgactgggaccagaatcccaagagcacctttaagaaagccgacggctctgaagtcagcttcttagaatactacaggaagcaatacaaccaagagatcaccgacttgaagcagcctgtcttggtcagccagcccaagagaaggcggggccctggggggacactgccagggcctgccatgctcattcctgagctctgctatcttacaggtctaactgataaaatgcgtaatgattttaacgtgatgaaagacttagccgttcatacaagactaactccagagcaaaggcagcgtgaagtgggacgactcattgattacattcataaaaacgataatgttcaaagggagcttcgagactggggtttgagctttgattccaacttactgtccttctcaggaagaattttgcaaacagaaaagattcaccaaggtggaaaaacatttgattacaatccacaatttgcagattggtccaaagaaacaagaggtgcaccattaattagtgttaatccactagataactggctgttgatctatacgcgaagaaattatgaagcagccaattcattgatacaaaatctatttaaagttacaccagccatgggcatgcaaatgaaaaaagcaataatgattgaagtggatgacagaactgaagcctacttaagagtcttacagcaaaaggtcacagcagacacccagatagttgtctgtctgttgtcaagtaatcggaaggacaaatacgatgctattaaaaaatacccgtgtacagattgccctaccccaagtcagtgtgtggtggcccgaaccttaggcaaacagcaaactgtcatggccattgctacaaagattgccctacagatgaactgcaagatgggaggagagctctggagggtggacatccccctgaagctcgtgatgatcgttggcatcgattgttaccatgacatgacagctgggcggaggtcaatcgcaggatttgttgccagcatcaatgaagggatgacccgctggttctcacgctgcatatttcaggatagaggacaggagctggtagatgggctcaaagtctgcctgcaagcggctctgagggcttggaatagctgcaatgagtacatgcccagccggatcatcgtgtaccgcgatggcgtaggagacggccagctgaaaacactggtgaactacgaagtgccacagtttttggattgtctaaaatccattggtagaggttacaaccctagactaacggtaattgtggtgaagaaaagagtgaacaccagattttttgctcagtctggaggaagacttcagaatccacttcctggaacagttattgatgtagaggttaccagaccagaatggtatgacttttttatcgtgagccaggctgtgagaagtggtagtgtttctcccacacattacaatgtcatctatgacaacagcggcctgaagccagaccacatacagcgcttgacctacaagctgtgccacatctattacaactggccaggtgtcattcgtgttcctgctccttgccagtacgcccacaagctggcttttcttgttggccagagtattcacagagagccaaatctgtcactgtcaaaccgcctttactacctctaacctgcagaagacgatgcagccgcttttctttttgaaatgactttgggatttttttaagcttttatttactttttttttaactgttatctttctggatgaaacttgggaaggggattaggagatctagcattttatttctagcattgctattcaccggcttccttattttatacgtaaaaattaagattttatattttatcttcttgtttctcatagatattttgtgagcatttttttgtttattttgaagaaatgtggataagatacttggtagtataaaacagactctctgagagtatttgaaatgtgtttggagatttacttaaacgtactttcaggagtgagcaagtcctacttataaacctatattaactttatttttgagatacctgttttgaatttaaaggagataagaggcgtaaagtaggatgctcactacaaccataggtggggtttcagctcatatcttaaagataaaaggtactattatataacctatacacaagatacaggagaaaatatgcttgatttttatttggcaggggggctaggttgtatgggagtaaaaaaaacattgaaaatttttaaattgtccaaagaaacattttaagactctttaacaaaaaaggccatgagtaaatctctatattaacattactatttattttgttttggaactgggacatgattctatttgttataaaataaaattgatgtgattgtcaaaaaaaaaaaaaaaa

SEQ ID NO: 26619 - DNA, 4524 bp, Homo Sapiens
agcggcgcctgagccccggaagggtgatgtggctgcggcatcgccggcctcgctatgtctgccattttcaattttcagagtctattgactgtaatcttgctgcttatatgtacctgtgcttatattcgatccttggcacccagcctcctggacagaaataaaactggattgttgggtatattttggaagtgtgccagaattggtgaacggaagagtccttatgttgcagtatgctgtatagtaatggccttcagcatcctcttcatacagtagctggggaaaatgccagaatgtagttgccatcagatttgattgtgaacaaggactgactgcagaaaataatggaaaggatgtttaactcttttatctccgaacattgaatgagataaatttccagatgctgttctctattttaatgttattggaccaatgttctgtataaacaattaagatgtaaccatttaatagtctgtaacaatcaacctcagtactgtcactacaatattacattctgcaaatgttattctgttgtatcagatacaaaattttagtgaggtatctctaaggcacatagtagaaaacaaaattggttaattactcaagttcctttcactgtgatttggaaatgatttaatctttatagaatgagaaccttttttggactagcttttttattaaaatggctcaatttgtgttgataaggattgcattaatatttaatagtgcttgcttttcctctgggcacaccattttgatcattaaccagagtacctctactcttagcaaactctagtttatgacaagtatttaaaatatttaaaacaagcttatgcagttcttaaggacgaaggtaaatgagatgtaacttaaaaatagtattgggaaaatgttgatagttaacattagtggatttagactagccaaatgacatagtaggctctgaaacatcttgtcaagtatatgtattttgtgcatgaatttttgctggaaagctgtctttctctgaaaaacacaacgttcttagaatgaaaagaacaattataaaataattatcctatatgtgtttttcattctttttagtgtcatggcttcaaaaatgaaacatttattttaattgccgtaaaggaactgtatttttgttttgttttttaacacagcactttaaatccagtttgtgttttgtcaacttgaactggaatctcttttgttactttggaggtgataaatagttttcaaatctgctgatttgtatactgtggcacaagtatctttgaactttgatagtgaaaggagaccttcaacaatttttagtctaggcgagaggaatattaggaatgtgacttctaaattttacaatagagcagttattttaaggtcatggttaacatttcttaaggttcaactaaaattcagttaaaatttcagagctacgaggaacttaaatcttagctaaaaattacctgttgtagatagtattaattagattgtttgcagctattaattcatcataaagataaaatgaagaaactctccctttttttaaacaaaaaaaattatttctagataataggctagtagttatttctgcagaaacaacgtatggaactgaaagccacctatttttattttagactaatttaaaccacttggaatggattctaggaaacatcttaagcttgtgtgttgcctgtggtggttttttgtttgggggtgttttttggttttggtttgattttctgtattttgttatctggggattttttgtttgtttgttttggtttggttttggttttatatttttggcatgtctatggcagttaaaagtggtatattttgctttagatagggaatcaggttataatcattgttcttcctctaaactgcctcttgggctttacatcaggtcaaggatttttagggtttctcaaaaataggattcttgtcagtgtatgcatgctgagtaagtcacctttctggctctaatttctgggtggccatctgttgtccagctctgctgccaactggactttccgaaagccatgtcaactaattttttatatgctaagacaaatcgaatatgaaaagaggaagaatattctagatattctaagacatttcttaatttggcatctcagaggaggtaggtggaaagtaaaggaagagataattttgggggaaaatttgtggaaacatacaaaacgttttgctttgtatagatgctaaacagagtgggaggcagcatatttgtaacaacaaccattctgaccttttgaaacacaagcttttggagaagtcagggagagacacagtatgaataaaagcaattaacattttctttaatgtatatttttcaaagaggaccactgaatcctgttctctaacccaaggggcagtgtaggtggttttaagcccacagaatattgagatatttctcttgtggttttggtggggtggtgggatgcagaaggttattaaagatcaatttaagcatcagatagactatcccttttatttttttaacttttaggttcaggggtacatgtgcaggttgttatataggtaaactcatgtcaagtggttttgttgtacagattattttgtcacccaggtgctaagcctagtacccagtagttattttccctgctcttctccctcctcccaccctccaccctcaagtaggccccagtgtctgttgttcctttctttgtgtccttgagttctcatcatttagctcctacttctaaatgagaacatgtatttggttttctgttctgtgttagtttgctaaggataatggcctccagctcagatggaatatctctatcatatagacctgttgttacagggcaggatcggatgatggacactgaagtcctcagcttgctaagttcagttgctctccctagcctccttttggcttcagagtcttttgattccatctatcctggtattttttgtgtgctgatgtttagttctggattggtttcagctgtgctaataggaagggcgttgtcttttcaagcaatcttaaaaggtggtcaatcaaaaggccagagtctgaatcccttctgtggcttaaataatttgaggatcaagtccagtgtcttgttaatccctgttctactgtgccagacactatcttgaatgcttttatatgttcaggttcaaaatcgctctttcataccaggggatgatagtaacgtgtaacttgcaatagattccttcatcttagtaataagatgatcagtctagttaggacaaaatagagattgaataaattaacttttccaagtttacagagtaaaaatgagcagatctctgcctggttttgtgaaaaagagttagcactggtaaatagaatatttctactcctacaccattctttcagtatatcatcactgaagacaggaagataggcacacagattcttcctcgtagtaattcatagtgcactaggtgaaagagatgaagtatgtattaaaagtacaatgtgatggcatttattattcagataatcccaggattctagaagaaaataaagaagagtgacagttcagttagggtgtgaacttccagaggagcactgcttaagctgaacttgagagcattgtgcaaaagcacagtagtctgttaagaactagaaataacctagcttgtgccacttcgggagtattaagacataagcctagaaaggtaggcaaaggttagatcttagactgtcttgtatttttctcattcctgttgattacctacctcaaaattgaatatgtttttcctcctgcctaacacaaaactacccaagggcagaaatttaaattcttccttggtgtatgtgcaaagaaggttgaatatattcatgcctaccttattttggactaggaatacagtagtatactttccgaagacttgcctgaatagtatataaggtggaggcaactgactagttaggtcagtatttttagaaactcttaatagctcatactcttgataccaaaagcagccctgattgttaaagcacacacctgcacaagaagcagtgatggttgcatttacatttcctgggtgcacaaaaaaaaattctcaaaaagcaaggacttacgctttttgcaaagcctttgagaagttactggatcataggaagcttataacaagaatggaagattcttaaataactcactttctttggtatccagtaacagtagatgttcaaaatatgtagctgattaataccagcattgtgaacgctgtacaaccttgtggttattactaagcaagttactactagcttctgaaaagtagcttcataattaatgttatttatacactgccttccatgacttttactttgccctaagctaatctccaaaatctgaaatgctactccaatatcagaaaaaaagggggaggtggaattatatttcctgtgattttaagagtacagagaatcatgcacatctctgattagttcatatatgtctagtgtgtaataaaagtcaagatgaactctcaaaaaaaaaaaaaaaa

SEQ ID NO: 26620 - DNA, 3547 bp, Homo Sapiens
agcggggcgaagagtagcggtaggtcggcgggacttccgtgttggcgggattctgaacgctgccatggctcagaccgtgcagaatgttacattgtcgctcactctgcccatcacgtgccacatttgcttggggaaggtacgtcagcctgtcatatgcatcaacaaccatgtattttgttggatttgtattgatttgtggttgaagaataatagccagtgtccagcttgcagagtccccatcactcctgaaaatccttgcaaagaaattataggaggaacaagtgaaagtgaacctatgctaagccatacggtcaggaagcatcttcggaaaactagacttgaattactacacaaagaatatgaggacgaaatagattgtttacagaaagaagtagaagagcttaagagtaaaaatctcagcttggagtcacagatcaaaactattctggatcctttaaccttggtgcagggcaaccaaaatgaagacaaacatctagtcacagataatccaagtaaaattaacccagaaactgtagcagagtggaagaaaaaactcagaacagctaatgaaatctatgaaaaagtgaaagatgatgtggataagctaaaggaggcaaataaaaaattgaaattggaaaatggtggtctggtgagggagaatttacgactgaaggctgaagttgataacagatcacctcaaaagtttggaaggtttgcagttgctgctcttcagtccaaagtagaacagtatgagcgtgaaaccaatcgcctcaagaaagccctggaacgaagtgataagtatatagaggaactagaatctcaagttgcacagctaaaaaattcaagtgaagagaaagaagctatgaattccatttgccagacagcactttctgcagatggcaaagggagcaaaggcagtgaggaggatgtggtgtcaaagaatcaaggcgatagtgccagaaagcagcctggctcatccacctccagttcttctcacctagcgaagccttccagcagcagactgtgtgacaccagttctgcaaggcaggaaagtaccagcaaagcagaccttaactgttctaagaacaaagacctatatcaagaacaggtagaagtaatgttagatgtgacagatacaagtatggatacttatttggaaagagaatgggggaataaaccaagtgactgtgtaccctacaaagatgaagaactttatgatcttccagctccttgtactcctttgtcccttagttgccttcagctcagtactccagaaaatagagagagctctgtggtccaagcaggaggttccaaaaagcactcaaaccatctcagaaaattggtgtttgatgatttttgtgattcttcaaatgtttctaataaagattcttcagaagatgatataagtagaagtgaaaatgaaaagaaatcagaatgtttttcttccccaaagacaggattttgggactgttgttccacaagctatgcccaaaacttagattttgaaagttcagaggggaacacgatagcaaattctgttggagaaatatcttcaaaattgagtgagaaatcaggcttatgtttatccaaaaggttgaattctattcgctcttttgaaatgaaccggacaagaacatccagtgaagcatcgatggatgctgcttaccttgacaaaatctctgagttggattcaatgatgtcagagtcagacaacagcaagagcccttgtaataacggttttaagtcactggatttggatgggttatcaaagtcatctcaaggcagtgaatttcttgaggaacctgataagttggaagaaaaaactgagctaaacctttccaaaggttctctaactaatgatcagttagaaaatggaagtgaatggaaacccacttcttttttttctcctctctccatctgaccaagaaatgaatgaagatttttcactccattccagttcttgtccagtaactaatgaaatcaaacccccaagctgcttgtttcagacagagttttcccagggcattttgttaagcagttcacatcgactatttgaagatcaaagatttgggtcatctttgtttaagatgtcctcagagatgcacagtcttcataaccaccttcagtctccttggtctacttcctttgtgcctgaaaagaggaataaaaatgtgaatcaatcaacaaaaagaaaaatccagagcagcctttccagtgccagcccatcaaaagcaactaaaagttgactcattagaaaggtgtcatttgtggttttgtcctgagagaaatagaaaagttgttaaagttaccttttttcctcataaaagttctatacaaattggaattgataatctttagtcaagtatcaagtcaggatggtggattaacctgtacccagaatacttattgttcattttgaaaagactttgttcttttcatttttatttgggagtctttgtgaccagagaagttagggaggaggttatttttgtgttttggggttggttggttggttggttttgtttttggttttgtttttttactgaatttgatatgtatctcggttggatatacattgtttttttaaaaaatgttatttaactgttagatacagtggcctgttgataagccccacttgtcttcagaacttggatttcttaaataaaacttttagtgttgtctatacactgctcaataagacacttgagtttaagcttttcccagggtggaaattattttacctgtccctttttatttatgtttagtgatggcctagtttttctgcagggccatgatggagaaatagcactctagccttagtccaatattgatttactttctttttttaggttttatgtatatgtttgcattttttagcattgtgttttgtccagttttgtgaaaatgttctgctagtatgaaagaaaacattttctatatgaagacatttgttttatgttaggtagcttacattttctcctctgcgtgtgtgtgtatgtgtgtaaaatcagaaatttagcatactatggaaagaaggcatggagcacttgggtttagaggaacctaaaacatcatagcttcattgttccagatgtaacaggtttgaaagagctcatcgccaagttcttgatccacttgcattccaggggagttttcttttgagtagtatgtttcttgtttgcatgttcctgttcttcgtggaaactatgcatggtagcatttttgcttgctgtgttttccatacttaagaaaaagaggtttcagttggctgatagaatatcttttatgtaggacaaaacttttctgtgaagagtgttgagggggtgaagataggtaagaggtaagcacaatttttaatttaggctctgaaaaagtgtattgttctaaacgtatttggtatgcctatataggtctttaaaaatgggtttgtatgctgtttaatgtgcactgaacattttacattaatattgtactgttttacattaatactgcatgcttttctatgtgaattgaataaagaatgtcataagcaaaaaaaaaaaaaaaa

SEQ ID NO: 26621 - DNA, 4725 bp, Homo Sapiens
agcggagagttcagggaggccgccctgagattccggcgaggccgcgggtcccacctcccgggggcggggcgagggcggagcggggagaagggagctgacgggcgcccggccggctgcggtccgtgcggaggctgagccggccgcgggcgcgaccggaggcagtttccgttactatggcaatgacggcagggactacaacaacctttcctatgagcaaccatacccgggaaagagtgactgtagccaagctcacattggagaatttttatagcaacctaattttacagcatgaagagagagaaaccaggcagaagaaattagaagtggccatggaagaagaaggattagcagatgaagagaaaaagttacgtcgatcacaacacgctcgcaaagaaacagagttcttacggctcaaaaggaccagacttggcttggatgactttgagtctctgaaagttataggaagaggagcttttggagaggtgcggttggtccagaagaaagatacaggccatatctatgcaatgaagatattgagaaagtctgatatgcttgaaaaagagcaggtggcccatatccgagcagaaagagatattttggtagaagcagatggtgcctgggtggtgaagatgttttacagttttcaggataagaggaatctttatctaatcatggaatttctccctggaggtgacatgatgacattgctaatgaagaaagacaccttgacagaagaggaaacacagttctacatttcagagactgttctggcaatagatgcgatccaccagttgggtttcatccatcgggatattaagccagacaaccttttattggatgccaagggtcatgtaaaattatctgattttggtttatgtacgggattaaagaaagctcacaggactgaattttatagaaatctcacacacaacccaccaagtgacttctcatttcagaacatgaactcaaagaggaaagcagaaacttggaagaagaacaggagacaactggcatattccacagttgggacaccagattacattgctccagaagtattcatgcagactggttacaacaaattgtgtgactggtggtctttgggagtgattatgtatgaaatgctaataggatatccacctttctgctctgaaacacctcaagaaacatacagaaaagtgatgaactggaaagaaactctggtatttcctccagaggtacctatatctgagaaagccaaggacttaattctcagattttgtattgattctgaaaacagaattggaaatagtggagtagaagaaataaaaggtcatcccttttttgaaggtgtcgactgggagcacataagggaaaggccagcagcaatccctatagaaatcaaaagcattgatgatacttcaaattttgatgacttccctgaatctgatattttacaaccagtgccaaataccacagaaccggactacaaatccaaagactgggtttttctcaattatacctataaaaggtttgaagggttgactcaacgtggctctatccccacctacatgaaagctgggaagttatgaatgaagataacattcacccataaccaagagaactcaggtagctgcatcaccaggcttgcttggcgtagataacaatacactgaaatactcctgaagatggtggtgcttattgactacaagaggaaattctacaggattaggatttctaagactactataggaattggttggcagtgccagctggctcttttttttaatattttattatttttgttaactttattatatgaaggtactggaataaaaggaacagacatccctttctaactgcactgcttacatgcgtattaaggtccattctgcctgtgtgtgctgtggctttgaactgtaacacctctaatcaattcaggaggaacacatatcatttaaagcaacataggctaacctgtaggtaacactgcagtattgatgttttactgcaaatcttatgggtctagataatcagtaaaagccatcttccatagttggtgttagaacattgccctattggtttggacatctgtagaatatatatgaagacaatttctgtaatggttttaagagatttaaaaagaaattcactggttctttacaaaatagaatttatcatcaagttattacacaaacttcacagtaaggagtgacaagtttataataaggaagacaaagtttaacaccttcactcaagcactccactaatatatttacgttgcattcagaaatactgatgaccttcatatacgtagtctgtatactcatagggagatgtactgtattatataacatgtaaagttgattttcttgtgacaagagaacttctttttttaacaagaggacatggcattattttaatttgattatggtgagttgaatttaagacatgaccatgaaggctgcttgtagaattagtgtatttttattaaactatttttttaaatgtcaaacttctatcatgtaaatggacttatagagaacaaaaagctatttactttggttttctagaaagttgttacatatcatggctggttaacttttatttcttttgatgaaaatttttcctttgatagtacttgtattattgtgccattattttcttatgctccaaatgtaccaaagatcttgaacagagtggatgttcacaactgagtagaattttcctttcctgtgggcatgctgtattcagacctgacagatctttgatagaggtcagcttattaaagggcaatattgttcttgtttagctacatcactgtggtgaatatagatggaattaaggaagtaaatgcaggccagggggttgtgatgagaggataggggagataatatcagcatcaaattctttgggtatctctctaagaattaaataatcttttctagcttaatattttaattctaattcaaacaactctgaggttttggtttcattagtaatagttgaggaataatatactagcaaagaatggcctaatgtttgtcataactgttaatggatgaaattttttaaagatacaaccatgataaccattataaatgatctatgatcaaaatctaaagtgatgaattatttgtaggaatgtcttcctaatggggaagaattgcataggagcattatgcaaatctacacaagcttttataaatgttgctgctgggtagctccacagtgtttcataaggccatcctgtttcccccaactcccccatttttggtttgtttctttttaaatatttgttgagtacttatgtgtttatctaacagttcacttccatttttctagtctggattttttgagtatttaggaaagagagctattaaaaactctggggatttctcaatgtgactaactctaatttttctaattataactgcctttaattaacataatattaacttttgctgaggtttatgagattttctcaccccacatcgctcccctttttttaaaaaggactgttttgctagtgtgataatgaataggtaagatatgagataattgcaacattgtctagttctagtatggtaactattcttgaaatggtattgaaaaataccgttaattcaaattgacagagattgataaaaagaaactgatttacctaagtttactttttaattgcataatagagcattttttgttttgagttccctcattcttattaccagaaagagcttgcaaatagttttactttcttggcactggaagggtagttctggaaagctactttgttgagagtctcattcttccctggagttaatagagtgattcacaatctttggggttttctcctcatcaaaagcatttcttaagtgcctatctaaaagcaattaaagactgtgtctgccctttagaagctaagaatttgattcatgatgcaaattaactagataatttgcaaagtacccttgagattgaattttctctattatatatttcccatatttcaggtgaataatttaatttaaatgacaaaaccctatctagtctactgggcataatgacattttctttaaattagactctattttgaattaaaagagttttattataaaccgtgtgtttttggtttttctaagtatatagaaagcttgtataattcagatttatcaatttcctgatttaatgtagactttgacttttttattaaaaacctttgtattaaagcaagttatgttatttttcttttatgcatttattactaacatagctttaaatctttaaatgtattgaagcattgtgctgtctgaaaataaggaattgcttataaaccagccacttctgaatacaatatgtagctgatttaataagctagttagtgaatggaaaataagtgtggagtattaaaaatgttctttggttggtaaggcctaagatagggtttcatttatttctatactttttctgttttttaaacacctgcatatttttatgtaaatctctaaatttaaaatattttaagtacatttatttttggtgttttattgtataaaaccttagacaatcaatcagtcagtctttactgacaggagcagcagctatctgtcttttgctgatctacaaataaatgaattgagaatttagtccatagaggtccctggctaccaaacacattctcctttgaattgttaaaattcagaacattcaaaataactgttttgctacaacccaaaaaaaaaaaaaaaa

SEQ ID NO: 26622 - DNA, 4172 bp, Homo Sapiens
agcggggcgggtccccgagcccagtaccagacctcctgtgcgaagagtaacctgctcttcggactgataactggatggaatggcctttagaaagggagcatcttcagaatctgcagctgggatcagattgttcttttgttgaatcaactcagctctgccgagccagcatcttgctaagggttacaaaataaatgccatttgaacagtgccatctgtcatggaaaaacgtgagacgtttgtacaagccgtgtctaaggagctggttggagagtttttgcaatttgttcaacttgataaagaggcctctgatcctttcagcctaaatgaattactagatgaattatcaaggaaacagaaagaagaattatggcaaaggctgaagaatttattgacagatgtgttgttagaaagcccagtggatgggtggcaggtagtggaagcccagggtgaagacaatatggaaaccgaacatggctcaaaaatgagaaaaagcatagaaataatttatgcaattacatctgtgattcttgcttctgtgtctgtaataaatgaaagtgagaactacgaagccctactggaatgtgttattatattaaatggtattttatatgcattacctgagtctgaacgaaaactacagagttctattcaggatttgtgtgttacctggtgggagaaaggcctgcctgccaaggaagacacaggaaagacagcctttgtcatgttactaaggaggagtctggagactaagacaggtgcagacgtatgtcggctttggcgtatccatcaagctttatattgctttgattatgatttggaggaaagtggagaaattaaagatatgttacttgagtgcttcataaatattaattatatcaagaaagaagagggaagaagatttcttagttgtctcttcaactggaatatcaacttcatcaaaatgatccacgggaccattaaaaaccagttacagggattacaaaagtctttgatggtatacattgcagaaatttatttcagagcttggaaaaaggcttcagggaaaatactggaggcgattgaaaatgattgcatccaggacttcatgttccacgggatacaccttccgaggaggtctccagtgcattccaaagtgcgggaggttctgagttactttcaccatcaaaagaaagttcggcagggagtggaagagatgctttatagattatataagcccatcctttggagaggattaaaggccagaaactctgaagttcgatcaaatgctgcattgttgtttgttgaagcatttcctattagggatccaaaccttcatgctattgaaatggatagtgaaatccagaaacagtttgaagagctctatggatccttggtgtttgtaaaataacttctaagtactgggaaatgatgcccccgaccattcttattgacctcctgaagaaggtgactggggaactggcatttgacacgagctcagctgatgttcgttgttctgtctttaagtgtctgccaatgattttggacaacaaactgagccacccattgttagagcagctccttccagctctcagatacagtctccacgacaattcggagaaagtgagggtagcttttgtggacatgctgttgaagatcaaagctgtgagggctgctaagaatgtatctctaaaagataagcacttaaaaccactctaccattattttataaaaaaagaataactcttcagtaaaacaaaacagaaaacagtaatagttttggaaaatatgtcccatggagcacattctggttcgtctggaaactgattctcgacctgtgtctcggcgcctggtgagcctcatctttaattctttcctgcctgtgaatcagccggaggaggtctggtgcgagcgctgtgtcaccctggtgcagatgaaccacgccgctgccaggaggttctatcagtacgcccacgaacacaccgcctgcaccaacatagcaaagctgattcacgttattcgtcattgcttaaatgcctgtatccagagggcagtgagagagcctccagaggacgaggaggaagaggacggaagggagaaggagaatgtgactgttctggacaaaacactgtcagtaaacgatgttgcatgcatggcaggtttactagaaatcattgtgattctctggaaaagtattgacagaagtatggaaaataataaagaggccaaactttacacgattaacaagtttgcctctgtgcttccagagtatctgaaagtatttaaggatgatcgctgcaagatccctttattcatgctaatgtcctttatgccggcctctgctgtccccccattcagctgtggtgtgatttccacgctgagaagccgggaggagggcgctgtggacaagagctactgcactttgttggattgcctctgctcctgggggcaggtggggcacattctggagcttgttgacaactggctgcccacagagcatgcccaggccaagagcaacacagcttctaaaggtagggtgcagatccatgacacacgcccagtcaaacctgaattggcattggtctacattgagtatctgctgactcatccaaagaaccgcgagtgcttgctctctgctcctcggaagaaacttaaccatcttttgaaagcccttgaaacgtcaaaggcagatctggagtcacttctgcagacaccgggtgggaagcctcgtggcttcagtgaagcagctgccccgcgagcctttggtctccactgtcgcctgagcatccatcttcagcacaagttctgctcagaaggaaaggtgtatttgtccatgttggaagacactggcttttggttagaaagcaaaattttatcttttattcaagatcaagaagaagactacctgaagcttcatagggtcatttatcagcaaattatccagataactagcacatggataggagaagctttgtgaggctggatttactccctttttaaaaatggcctttgttgctaagctgtgtctgtctcttacagacctacctgactgtgtgtaaagatgttgttatggtaggccttggtgaccatcagtttcagatgcaactcttacagcggagtcttggaatcatgcaaacagtgaagggatttttttatgtttcattacttcttgacattctgaaagagataactggaagttccttgattcagaaaacagattcagatgaagaagttgcaatgctgttggacacagtccagaaagtatttcagaaaatgttggaatgtattgcacggagcttcaggaagcagccggaagaaggcctgcggctgctttattctgttcagaggcctcttcatgagttcattactgctgttcagtctcggcacacagacacccctgtgcaccggggtgtactttctactctgatcgctgggcctgtggttgagataagtcaccagctacggaaggtttctgacgtagaagagcttacccctccagagcatctttctgatcttccaccattttcaaggtgtttaataggaataataataaagtcttcgaatgtggtcaggtcatttttggatgaattaaaggcatgtgtggcttctaatgatattgaaggcattgtgtgcctcacggctgctgtgcatattatcctggttattaatgcaggtaaacataaaagctcaaaagtgagggaggttgcagccactgttcacagaaaactaaagacattcatggaaattactttggaagaggatagcattgaaagatttctctatgaatcatcatcaagaactctgggagaacttttgaattcataaccaagccaacatctccagacatgtaaaaatagggaaaagtgattcaaattgaaatgcctgtgtattttcctattgtttttaatgttaataacccatataatagggaaagggtgggatttttttgtgggaatgtgggaaggtgggggttatggaggagataactcaaaacttcttcaattttgcctagtgcctgcgtaaataatatatttaatataaaggactccaggtatgaatggtgtagaaatccatgattccaagaaaaaacacttttctagcaaacctggttgtttttaaaatgacttttatatatgtaatattgcttggaaactatgagtaataaagcaatgacaacatcaaaaaaaaaaaaaaaa

SEQ ID NO: 26623 - DNA, 5008 bp, Homo Sapiens
agcggggcgtgcccggcggcccccttccgctctccctctcgcgtcctccgcctagcaccgacctcagctaggaacggggacgggtcgctgttcggggaaggggctgggtggagtctcgcgaggtgcgagaactggctgggggcctgcgggattctgggaggcgatgctgggaaggggcggtggctgggctcccccggccacccttaaccccttcggtgctttttgcttcaggacctcctggcgggtgcgggtggggagtgaggatggggagctcgactcgcagttcccacttcgtgcttctcctcgcctaaacggttcttacctacacttctcgtaggggacgagaggcaggactttcccttttggtcacctctaaatgactcactgccacataataatgagacaaaaagaccctcataccagtaaaacggttattccacggctgatggacttagacggttcttcatttcttcctgtgctttcaggccgctgtgtatttgcagagcctgcaccagcagcctagagcgttcttaggaacttggtgatatgttgacgggtcgtgtaaagaacttggtctctggggccatactgaccagaatgcacctgagggcgtttttagaggcagtaccctggagagaattcaggccctggagtccagcggacctagactggaatcttggctgagtcactccctggctgtccactcaacctctctgagcctcagttttctgatctgcatttgtcttgtatttcatggcattattggaattaaaattaacatacaattcttgacagattggaagaggatgtgaagggagatcttgacattatcaggtccgtatgatatggcgcctggcatagagcaaatgtttaataaatggtagctgttattaccagctgagaaacaataggcaatatacttagcctctctgagccttagttttagaacctgaaatgaaattcagagcgcccagcacataggttttctgtaactataggttcagtcgttgtccagaaacatttctagagtccgtccggagttggattgatgccagctcttaaaaactatgaaggcaggatcagtggccacatttaaacggtttccctgggtgaggaaacacactctccactccctaatgttaacacgtagcgagagccagtattgataggagaccattatggtgtagcccaaactctaacgccaaggggttcagtgttttctgcttctaatactggtcacagaaaacttgtgagtccggtaagcaaaatcctacaaagggaaaagactgcaagttagaataagacacctcttaaaaatctctctagctttaccctgagagaaaggaggaactactgtccctcaaaaaactgtttgccttgattttttacaaaggatttttaacttcttttttttcaatctacggctgatacagtactctttggcaagtcatttggcttctttccgatgtcttctgaagtagctttactgccctctgacctacagggaataactgaaatttacatgtttaatacaggtactgtggtagacagaataatgtcttccccgcttgcccaaaactgtccaagtcctagtccctggaacctgtgaatatgttgcttttttatttatttatttatttattttttgagacagagtctcgctgtgttacccaggctggagtgcagtggcgtgatcttggctaactgcaacctccgcctcctgggttcatgcaatcctcctgcctcagcctcccaagtagctgagattacaggcatgcgctaccatgcccagctaatttttgtatctttagtagtgactgggtttctccatgttggccaggctggtcttgaactcctgacctcaggtgatccacccatctcggcctcccaaagtgctgggattaccagccagcattctttggcaaaagatattttgccaatggaaataaagcccttaaaattagatgattccgtattatatgggtgagcccagtgtaatcacatgaacccttaaaagcacaaaagggaggcaaaagagatgttttggagagatgaggcagaggaattaaattcaaagtatgagaggaattcaacccactgttactggctttgaaagtggccacaagccagggaatccaggcagcctcaaaaagctcagaggaagtcctgccaagagccagcaaggaaatggggacttcagtcctacaacctcacagagctgaattctgacaagctgaatgaacttgggaacagattataccccctccccaactctctagaaaggaatatagacaccttgatttcagcctcgtgagactggaagcagagaatcagctgagccatggaatccagacgtcgggcccacaagaagcgtgaaacagaaatgaatattgttttatgacactaaatctgtggtaacttcttacagccccaaaagaaagctaatacaggcattatggaaacacctttatttctttcagcgaacactgcctgacttcagctgggtcaaaccatgggggaatccagatttgaatatttcaaggtctctgcccttgcagaatcagacagaaacaagtgacaacatcgtagttaagtgtgaaaacagtatgttcagagaacggtacagatatgttagaaagttggctttagtcattaaaccttaagtagatgtgatttttttaaagttaatgagattcatgagtttattttcttgtcagaagcaccaacagacaaacctatacatttttggtgtgtgtttttctgttttttaatcacagtgcttttattatagattatcttcagaagttagtgcaggtggcatgtggaagataaacaggacagacactcaaccctgcctagtttggggatgagtcacttttcaaactgcacagttataagcaaagtgcatattcaagaaccaagttaacaggccaccagcagacacccaggaattcccaaagggacacatatatcccataaactgcactgcaagataatatattctcattggctctgcatgtcagcaggcctgggtttgaatctctgcagtctttctccatccagttctgtggccttgggcaagttatgaaacctctcactgactcagtgccgtcatttggacagcagggtacatagcaaattcaaagaatggaactgagattaaatgagatatctgtaaagtgcctagcacatagcagatactcactaaataccagccctctttgcctccaaaaagttttagtgtctaaagtgtaaaaagtgcctcattgtttatactttgagtgaaagaaaccttggaacagggtttgcccctgtaacaaatgttctctctcaataatattatccccgttttcacatgaagctgagattcagagaggtcagattacctccctcgggtccagatgattaaataagattacatttgctaaataaacttccagcatagcagatgatcagtacatgtatagctctccttgtccctcccacatttaatttatttgtgtgactttggtttagtgattgtgttcatgctagcatctttggtttcatcatcatatccccagtgcctggcacagtcttggcacatggtaggcacccaatctgttgaataaatgacccgatctccgtaattactttattggagaaactctgaagactaatttccctttgagccctaaacaatgtttggaacctgctcagggagaatcgggaaagaccaagacaggatttcacgcaaatatatctatgcaagttataaagatgctcatggatagagagcatgacttcagctgggcgtggcagcatgtgcctatagtcccagctactctggagtgcagtagcatgatcatggctcaccgcagtcttgacctcctgggcttaagccatcctcccacctcagactcctgagtagctaggagtaggtagggccacagacacatcccaccaccccgagctaattttttttttaaattttttgtagagacagggtctcgctatgttgcccaggatagtctcgaactcctaacctcaagtgatcctcctgcctcggcctcccaaagtgctggcattacagttgtgagccatggacatattaccttttgtttttgagataaagtcttgctctgtcatccagggtggagtgcagtggcatgatcttggcttatagcaacctctgcctcccaggttcaagcaatcttcctacctcagttggtgggataacaggcatgtgccacaacaccaggttaatttctgtatttttagtagagacagggtttctccatgtttggccaggctggtctcaaactccagacttcaagtgatctgcctgcctcagcctcccaaagtgctgggattataggcatgagccaccacgcccggcccatattacactttttaattgaaaaaaattctttttcatttcaaccgcaaaacatagaacatttagattaaggtagtagctatgggtaatattttttcttttttatatttgtattttcaaaacctagaattagtatgtgctacttttatgatggaaaaacaaattccattcttaatgcaatatacctcaacaatgtgaaaacaactttaataattattaatatttttattttgcttaaaaagatttgtgggaccccctagaatggcctcaaaggaaggataacctgagctgctttttaccgaaatcacggaaaatggcagctctctgatgctttaaggttttcaagtatagatttcaggacctcaataaggtacccatcccaatttttaatctctcttaataatgcagagatttactcacatccaccataatgcttctggcctcagtttaagccatttcctctattatttcctctgtgaaagaaggaaaagaacctttaaaatgtattttaacatcaaaatgctgagcgggtggtgtgcccaagtgatgagagcggtgaatgggttatttctttgtttcccatgatttataataaaaacatcaacttacaccccaaaaaaaaaaaaaaaa

SEQ ID NO: 26624 - DNA, 2968 bp, Homo Sapiens
aggcgactctgggcgggtctgggccgctccagtgttttggggcacagaagctgtgggaggagctggaggcttcaccgtggtaaccacagcgccgctgctgccccgccttgcaggcctcaggactgtcatcgcctctgggtgtgagggtactttggccaccgtccccggaaataaccgcgcctgcctctcaagataccccatcctctccacgccgctgccgctgccgccatgcaaggggaggacgccagatacctcaaaaggaaagttaaaggagggaatatagatgtacatccatcagaaaaagcactcattgttcactatgaagtggaagctaccattcttggagaaatgggggaccccatgttgggagaacgaaaagaatgtcaaaaaatcattcgacttaagagtctcaatgccaacacagatataacttccctggcaaggaaggtggttgaagaatgtaaactcattcatccttcaaaactaaatgaggtagaacagctgttgtactatctacagaaccgccgtgattcattgtcaggaaaagagaaaaaagaaaaatcaagcaagcctaaagatccacctccttttgaaggaatggagattgatgaagttgctaacattaatgacatggatgaatatattgagttattatatgaagatattcctgacaaagttcggggttctgctttgatcctgcagcttgctcgaaatcctgataacttggaagaactactattgaatgaaactgcccttggtgcattagcaagggtcctgagagaagactggaagcaaagtgtcgagttagctacaaacataatttacatctttttttgtttctccagcttttctcaatttcatggacttattactcactataaaattggagctctgtgtatgaatattattgatcatgagttaaaaagacatgagctttggcaagaagaactctcaaagaagaagaaagctgttgatgaagaccctgaaaaccaaaccttgagaaaggattatgaaaaaacctttaaaaagtaccaggggcttgtggtaaaacaggaacagctattacgagttgctctttatttgcttctgaatcttgctgaggatactcgtaccgaactgaaaatgaggaacaagaacatagttcacatgttggtgaaagcccttgatcgggacaattttgagctgctaattttagttgtgtcattcttgaagaaactcagcatttttatggagaataaaaatgatatggtggaaatggatattgttgaaaaactggtgaaaatgataccttgcgagcatgaagacctgctgaatatcaccctccgacttttactaaacctatcctttgacacaggactgaggaataagatggtacaagttggactgcttcccaagctcactgcactcctaggcaatgacaactacaaacaaatagcaatgtgtgttctttaccacataagcatggatgaccgctttaaatcaatgtttgcatacactgactgtataccacagttaatgaagatgctgtttgaatgttcagatgaacgaattgacttggaactcatttctttctgcattaatcttgctgctaacaaaagaaatgtacagcttatctgtgaaggaaatgggctgaagatgctcatgaagagggctctgaagtttaaggatccattgctgatgaaaatgattagaaacatttctcagcatgatggaccaactaaaaatctgtttattgattatgttggggaccttgcagcccagatctctaatgatgaagaagaggagtttgtgattgaatgtttgggaactcttgcaaacttgaccattccagacttagactgggaattggttcttaaagaatataagttggttccatacctcaaggataaactaaaaccaggtgctgcagaagatgatcttgttttagaagtggttataatgattggaactgtatccatggatgactcttgtgctgcattgctagccaaatctggcataatccctgcactcattgaattgctaaatgctcaacaagaagatgatgaatttgtgtgtcagataatttatgtcttctaccagatggttttccaccaagccacaagagacgtcataatcaaggaaacacaggctccagcatatctcatagacctaatgcatgataagaataatgaaatccgaaaggtctgtgataatacattagatattatagcggaatatgatgaagaatgggctaagaaaattcagagtgaaaagtttcgctggcataactctcagtggctggagatggtagagagtcgtcagatggatgagagtgagcagtacttgtatggtgatgatcgaattgagccatacattcatgaaggagatattctcgaaagacctgaccttttctacaactcagatggattaattgcctctgaaggagccataagtcccgatttcttcaatgattaccaccttcaaaatggagatgttgttgggcagcattcatttcctggcagccttggaatggatggctttggccaaccagttggcattcttggacgccctgccacagcatatggattccgccctgatgaaccttactactatggctatggatcttgataaagtatctgtttccatgtgtaatctcagcttagaagaaatctgtgtgggttgggttaattttggatctttgcctaataatgcatgttgatgttattgtgggtctgtgtttgtttttatttttatatgttgttagctgcagattaaccccagcccctctgtcttctgttaagtacagttgatactgacattgttcactcatcaaaccacatcttgatgctaagtaacatttcccatgagcctcaaaactgaatgctgaaaagctactagactggaaaacaaacactgcattatgtatgttaagtgactaatttaatttcaattaaaaagcgtaaagtgaaaatgaaaaaaaaaaaaaaaa

SEQ ID NO: 26625 - DNA, 3344 bp, Homo Sapiens
agcggactctcgctgaggctgggaagattgaaaggggccatggagaggctgcagtcacaatgaggcctccagattcatgtcatcaaagtgcttcatgatgactggattttcacaccatttatccaagggccctagtcaatggcagcagcaagaatgaaagtagacacattggaagctagagagtcactgggtgacttttggaggtagcaacaagctcatgaagaaggcattcagtggcttgcactccccacccatcctctcaactacatgcgaagttttcacatcttgtacatttccaaatttaatgaaaaaggtgttggaaagtctcctctagagctttggaaggctgaatgcactaaacatgaagagcttgaaagcgaagttcaggaagagtgacaccaatgagtggaacaagaatgatgaccggctactgcaggccgtggagaatggagatgcggagaaggtggcctcactgctcggcaagaagggggccagtgccaccaaacacgacagtgagggcaagaccgctttccatcttgctgctgcaaaaggacacgtggaatgcctcagggtcatgattacacatggtgtggatgtgacagcccaagatactaccggacacagcgccttacatctcgcagccaagaacagccaccatgaatgcatcaggaagctgcttcagtctaaatgcccagccgaaagtgtcgacagctctgggaaaacagctttacattatgcagcggctcagggctgccttcaagctgtgcagattctctgcgaacacaagagccccataaacctcaaagatttggatgggaatataccgctgctgcttgctgtacaaaatggtcacagtgagatctgtcactttctcctggatcatggagcagatgtcaattccaggaacaaaagtggaagaactgctctcatgctggcctgtgagattggcagctctaacgctgtggaagccttaattaaaaagggtgcagacctaaaccttgtagattctcttggatacaatgccttacattattccaaactctcagaaaatgcaggaattcaaagccttctattatcaaaaatctctcaggatgctgatttaaagaccccaacaaaaccaaagcagcatgaccaagtctctaaaataagctcagaaagaagtggaactccaaaaaaacgcaaagctccaccacctcctatcagtcctacccagttgagtgatgtctcttccccaagatcaataacttcgactccactatcgggaaaggaatcggtattttttgctgaaccacccttcaaggctgagatcagttctatacgagaaaacaaagacagactaagtgacagtactacaggtgctgatagcttattggatataagttctgaagctgaccaacaagatcttctctctctattgcaagcaaaagttgcttcccttaccttacacaataaggagttacaagataaattacaggccaaatcacccaaggaggcggaagcagacctaagctttgactcataccattccacccaaactgacttgggcccatccctgggaaaacctggtgaaacctctcccccagactccaaatcatctccatctgtcttaatacattctttaggtaaatccactactgacaatgatgtcagaattcagcaactgcaagagattttgcaagatctacagaagagattagagagctctgaagcagagagaaaacagctacaggtcgaactccaatcccgaagggcagaactggtatgcttaaacaacactgagatttcagagaacagctctgacctcagccagaaacttaaagaaacttagagcaaatacgaggaggctatgaaagaagtccttagtgtgcagaagcagatgaaactcggtcttgtctcacctgaaagcatggataattattcacatttccacgagctgagggtcacggaagaggaaataaatgtgctaaagcaggatctgcagaatgcattagaagaaagtgaaagaaataaagagaaagtgagagagttagaggaaaaactggtagagagggagaaaggtacagtgattaagccacctgtggaagagtacgaggaaatgaaaagttcatattgctctgttattgagaatatgaataaggagaaagcatttttgtttgagaaataccaagaagcccaagaagaaatcatgaaattaaaagacacactaaaaagtcagatgacacaggaagccagtgatgaagctgaggacatgaaagaagccatgaataggatgatagatgaactcaataaacaggtgagcgagctgtcacagctgtacaaagaagcccaggctgagctggaggattacaggaagaggaaatctctagaggatgtcacagctgaatatatccataaagcagagcatgagaaactgatgcaattgacaaacgtgtccagggctaaagcagaagatgcactgtctgaaatgaagtctcagtattcaaaagtgttgaatgagttgacccagctcaaacaactggtggatgcacaaaaagagaactctgtctctatcacagaacatttgcaagtgataaccacgctgcggactgcagcaaaagagatggaagaaaaaataagcaatcttaaggaacaccttgcaagcaaggaagtggaagtagcaaagctggagaaacaactcttagaagagaaagctgctatgactgatgcaatggtacctcggtcttcctatgaaaaactccagtcatccttagagagtgaagtgagtgtgttggcatcgaaattaaaggaatctgtgaaagagaaagagaaggtccattcagaggttgtccagattagaagtgaggtctcacaggtgaaaagagaaaaggaaaatattcagactctcttgaaatccaaagagcaagaagtaaatgaacttctgcaaaaattccagcaagctcaggaagaacttgcagaaatgaaaagatacgctgagagctcttcaaaactggaggaagataaagataaaaagataaatgagatgtcgaaggaagtcaccaaattgaaggaggccttgaacagcctctcccagctctcctactcaacaagctcatccaaaaggcagagtcagcagctggaggcgctgcagcagcaagtcaaacagctccagaaccagctggcggaatgcaagaaacaacaccaggaggtcatatcagtttacagaatgcatcttctgtatgctgtgcagggacagatggatgaagatgtccagaaagtactgaagcaaatccttaccatgtgtaaaaaccagtctcaaaagaagtaaagtggattccttggcaggacaccgaaaaaaaaaaaaaaaa

SEQ ID NO: 26626 - DNA, 1471 bp, Homo Sapiens
gttcattagaatgagggctccattattttggccacagagctatatccaggactgcttcagagcgagccccgtgtctgaatcttcagagggtagaagtcatcatcctgtttactcaggaaacatgcaattttcattgtgagctgccttccagagtttatggtagaacttcactgacgttgctgatgccaatgtggaataaagtatctggagtccatctttcaccatcttctcctgagattgtactggaccgtgaccactcttcttccattggctgcctctcttctgatgccattatttcatcaccagagaatacacatgcagcaaatagcattgtgagtcaaactattccaaaagcacagattcagcaatcaacacacactcatctggatatctcactttttccattgggtttaactgatgaaaaaagtaatggaacaattgcccttgtggatgattctgaggatcctggagccaatgtatctaacatacagcttcagcaaaaaatttcaagtctggagattaaactcaaagtatctgaagaagaaaaacagagaattaaacaggatgtggaatcattgatggaaaagcataatgtcttagaaaaaggctttctaaaagaaaaagagcaagaggccatttcttttcaagatagatacaaagaacttcaggaaaaacataaacaagaattggaagacatgaggaaagctggtcacgaagccctcagcattattgtggatgaatataaggcactactgcagtcttcagttaagcaacaagtagaagctattgaaaaacagtacatttctgcaattgagaaacaggcacacaagtgtgaggagttgctaaatgctcagcatcagaggctccttgaaatgctagatacagagaaggaactgttaaaagaaaaaataaaggaagctttgattcagcaatctcaagaacagaaggaaatattggaaaagtgtttggaggaagaaaggcaaagaaataaagaggcattagtatccgctgcaaagcttgaaaaagaagcaatgaaggatgcagttttaaaagtcgtagaagaagaaagaaaaaatttagaaaaagcgcatgctgaagaaagggaattatggaagacagaacatgcaaaagatcaagaaaaagtatctcaggaaattcaaaaagctatacaagaacaaagaaaaataagtcaggaaactgttaaggcagcaataatagaagagcagaaacgaagtgaaaaggctgtggaagaggcagtgaaaagaacaagagatgaattgatagagtatataaaagaacagaaaaggctcgatcaagtcatccgccaaagaagcctgtccagtttggaactgttcctctcctgtgcacagaaacagttaagtgctttaatagctacggaaccagttgacattgaataaaaagaacatgacaaacccaaaaaaaaaaaaaaaaaaaagaaaaaaaaaaaaaa

SEQ ID NO: 26627 - DNA, 3516 bp, Homo Sapiens
gctctggaccaggcggccatggcgcgggtggcggctgctgtgctggctgtggggacggaggcggtgaagtgccatcttcggctaggtcgtcacaggctccggctcatggcatcaagtggcatccatcataagatcgttaactgaagacaatatgcaaaattctcacatggatgaatacagaaattctagtaatggcagcacaggcaacagttcagaggtagtggtagaacatcctactgatttcagtactgagattatgaacgttacagaaatggaacagtcacctgatggctctcccaatgtgaatgcatctacagaagaaactgaaatggcaagtgctgtggaccttccagtgacgctgacagaaacagaagcaaatttccctccagaatatgaaaaattttggaaaactgtagaaaataatcctcaggattttacaggctgggtatatttgcttcaatatgtagaacaggagaatcacttgatggctgccaggaaggcatttgacagatttttcatacactatccgtattgctatggttactggaaaaagtatgcagaccttgaaaagcggcacgacaacattaaaccatcagatgaggtgcgtacatcactgaataaacttatctccaataggtactgtaagccaattaataacaaaacaaagattttttttttttttttttttggctggcagtacctaccatttatggtcaaacaatttttatagggtatttatttgcatttgtcactcttgtggcatttgtagctaatattttctctctttgttggcaggtgcgttaaacctctacagtttgtcaagctttgcagtgcaagcctctgtattacactgcagcttaacaagtagggcagggcttttctctcacttacatttatttctcattttccaaacaatatagttggtttgctagtcacatttgctacgtcttattgcatttttggtcagacgctgtcattgatgctctaatgggtctgtgccctatggtctgtaacccaaagcctgcccacacaacccggtcagaatgcagggactgctgcgctttgaagatcaagactctgcacgtggggatcagaacattgccatgttctatccaacctccacccaaatggtaatggtagattatttaaacaaaattccagtaattagtatttctaaggttcaccggataacacagtgttgcctctctgttaagaaataattaaatatttgaagtacagtttgctgttttcttcttaggtttatcggcgggggcttcaggcaatacctcttagtgttgacctttggatacattatataaacttcttaaaagaaacattggaccctggtgatcctgagacaaacaatacaataagaggaacttttgagcatgctgttctagctgcaggaacagatttccgttctgacagactgtgggaaatgtatataaactgggaaaatgagcagggaaacctgagagaagttacagctatatatgatcgtattcttggtattccaacacagctgtatagtcatcattttcagagatttaaggaacatgtacagaataatttgcctagagatcttttaactggtgaacagtttattcagttgcgaagggaattagcttctgtaaatggtcatagtggtgatgatggtcctcctggtgatgatctaccatcgggaattgaagacataaccgatcctgcaaagctaattacagaaatagaaaacatgagacatagaatcattgagattcatcaagaaatgtttaattataatgagcatgaagttagtaaaaggtggacatttgaagaaggtattaaaagaccttactttcatgtgaaacctttggaaaaggcacaactaaaaaactggaaagaatacttagaatttgaaattgaaaatgggactcatgaacgagttgtggttctctttgaaagatgtgtcatatcatgtgccctctatgaggagttttggattaagtatgccaagtacatggaaaaccatagcattgaaggagtgaggcatgtcttcagcagagcttgtactatacatctcccaaagaaacccatggtgcatatgctttgggcagcttttgaggaacagcagggtaatattaatgaagccaggaatatcttgaaaacatttgaagaatgtgttctaggattggcaatggttcgtttacgaagagtaagtttagaacgacggcatggaaatctggaagaagctgaacatttgcttcaggatgccattaagaatgccaaatcaaataatgaatcttcattttatgctgtcaaactagccaggcatcttttcaaaatacagaaaaaccttccaaaatcaagaaaggtgcttttggaagcaatcgaaagagacaaagagaacacaaagttatacctcaatttacttgaaatggaatatagtggtgacctcaaacaaaatgaagaaaatatcctaaattgttttgacaaagctgtacatggttcattacctattaaaatgagaattacattttctcagagaaaagtggaatttcttgaagattttggttccgatgttaataagcttctgaatgcttatgatgaacatcaaacactcctgaaagaacaggattctttaaaaaggaaagcagaaaatggatcagaagaaccagaggaaaagaaagcacatacagaagatacaacttcatcatctacacagatgattgatggtgatttacaggcaaaccaagctgtatataattatagtgcgtggtatcaatacaattatcagaatccttggaattatggacaatattatcctccccctccaacctgatgggaaaaatgtaaatttcaaatgcagtgtgtgaaaagtatgaaattattattttttttaatgagggatgtaaacagtataagcttgttgtatttgataacctgtcttccttgtttctgtgtaacatgatttgtttagtaatagggggaaaatgtcaattagtagcttaccacagatactgtttcctaccatttataaaatttactttttattgaaaaactattttttgatttttgcattaagtggtctagaattcttttgcaatgcatttgcaacagaattttgtagccttaaggggtaggaagaaaaacctgactgcaaatcatgtcagtgtagtacaaaattctgaaaacacataagggctggttatttacctccttttttttttttttaaagaaaaaaggacttttaacctttgctgacaaggttttgtctgtttcagttatacttgtgaattgtgatctaactgcagaaaggatacattattaaaatactttgccttggaatagattataaatgagaaaatggaatgtttgcatccctttaaaaatgaaaatcatatcaaaagtatgttgtttcaggagactttgtatttagaatattcatgtaaaacttgtgaacaagctttcattttgatcaaactgatcttcatttttgtaataaaacggaagactcatccggtaaaaaaaaaaaaaaaa

SEQ ID NO: 26628 - DNA, 3954 bp, Homo Sapiens
agggggaggtgggcagccggccagggaagcacggtccaggcggctacattcggcccggccatggcagcggcgcccctgaaagtgtgcatcgtgggctcggggaactggggttcagctgttgcaaaaataattggtaataatgtcaagaaacttcagaaatttgcctccacagtcaagatgtgggtctttgaagaaacagtgaatggcagaaaactgacagacatcataaataatgaccatgaaaatgtaaaatatcttcctggacacaagctgccagaaaatgtggttgccatgtcaaatcttagcgaggctgtgcaggatgcagacctgctggtgtttgtcattccccaccagttcattcacagaatctgtgatgagatcactgggagagtgcccaagaaagcgctgggaatcaccctcatcaagggcatagacgagggccccgaggggctgaagctcatttctgacatcatccgtgagaagatgggtattgacatcagtgtgctgatgggagccaacattgccaatgaggtggctgcagagaagttctgtgagaccaccatcggcagcaaagtaatggagaacggccttctcttcaaagaacttctgcagactccaaattttcgaattaccgtggttgatgatgcagacactgttgaactatgtggtgcgcttaagaacatcgtagctgtgggagctgggttctgcgacggcctccgctgtggagacaacaccaaagcggccgtcatccgcctgggactcatggaaatgattgcttttgccaggatcttctgcaaaggccaagtgtctacagccaccttcctagagagctgcggggtggccgacctgatcaccacctgttacggagggcggaaccgcagggtggccgaggccttcgccagaactgggaagaccattgaagagttggagaaggagatgctgaatgggcaaaagctccaaggaccgcagacttctgctgaagtgtaccgcatcctcaaacagaagggactactggacaagtttccattgtttactgcagtgtatcagatctgctacgaaagcagaccagttcaagagatgttgtcttgtcttcagagccatccagagcatacataaagtgaatcatgcaacgtgttgggggaagttctgcctttctgatcaatcttttgggttcacgtggaaaccaggacttggcaacatgatgtttgactgtaatctcatcacggatatgtatgaatttttacaggttcgtttttgaattgtgagaggcagttcattagcaaagatgtactgggcagtaactaaacacacatgcaaacatgtgaatggtggtttattcctcattctgtggatgtttctatgagccaaaatttgatgtctttttttcaaaattgcttatgaaatttccacacaatcgtagcttataagattggaacgatctcagccaaatattttaggtgtaattcatatgtatttgagtggaggattttttttctcatttttctagtgttaaattttaaccagcattaacatggtagagtggaggagtgagtgtgttcaaagatcaacatatttaacttttaaacactatctcaaagccagcataattaactactttgattgtgggctgacctttgtttttttaacaatcaggcatttttaattagataatccactcatgtatttccccctcactgcagttgtctgcatttttagcctcttttctcttcgttagttgtcagaatatgccttcgtcaaggctcagaggtaacaagacagaaaattcatctgggattttcctgctgtggctggcacattcttctgattaacagacacttgtatgatgctttaggctagttagtgcattttttagcaaacatttatcttaaacatcacagatccactggggggtgcaaggggctactgttagtcctcttgttagatgcagtcactcctcctggtcacctagtgagcagggacagagccaggagtcaagtgcagtgccaaggtgcatgaccctctgagaagtcactgggctgatttgacctccgactcattggttgtgcaaatgccatgtgcagcctttcctgaggccataggagggcttcctgcagctgagatctatgcaggccatcctctcaacaagtgccactccaagggcggtcctcggtgcagcagcatcagcttcacttgtgggggggtgggggaaggggcggtctcagaaatgcaggttcccaggtcccaccctggacttctgaaggggtgtggcatctgtgtttctgatgcttactacaatatgtgaaccactactttagaaaatctgctttaacttggtattcctctaattgtgttccctaggaaatgactgtcccaagagccagtgattattccaggtgttccctggaaaggtcaagtgagtctgggaaacactatgtctgtacacctcttgaaggtgtcgaatgtatgtttatacatcagtggaacccatttttctagcctagcaagtcccaaacacattacactgaagagattttggtgaggaaacttgctggagttttcagggaacactgttctaggcttaggtgaccttaggatcactcaagtagacgcttcactccctgcgagaaattaggatgaataactacctgtggcattgttggttctgaacttttacagttcaggcctgctgtgaatctttgatgaagctttaaggtgacactgttgtacaagatgtcagctttgctgaaacgcacattacctggaataagtgctttaattgtagaattagaatgggatttactgtactgttttaaatgagattggcttcagaatccattacagttaccttacatagcacttgatacgtgttaaatgaacatatgaatgtaatttatatattcctagaatttaagttactttgtgagatttgggcctgtccctcaatgccagtttaggatttctttttttctataccttgaaatgattataaaatagattttcatgggaattttaaaaactctatccaaaacatttttggagcattttaaagccccatacacagaagtatacgaaagcacacaaaacactccaagtttcagcagttttagcgccaccattaacccactttgcttgtctcatgaaaaatctttgttaaagtttgtacacaggtaacaaaaagttactttaaaagatatataaagggctgtaagctaattgtggtgtctagtaagtagcataatgagatgtgaggagttggaactttgcgtgttttgcgtattttcatctgcattcagcttcttactctgggtttgtactcgagtgttatttctttacaaatgcccttgtaattaccactctgaagtctgctgactgtgtctcttgaacatacttaggatattctgcacattatggaaaaaggtaaattttagaagtttctgctctactaactgtagatatttatgactctgcgagttatctatttttataaccacctgtggtccattgttcattttaattcacatttcttatgaagtatggtaacagggagggagacacctagattagcagctcaatttgtactacttcagccaatctgtgaatgtaaaaactacactgttgccttgctaggatccaccctcctataatatggaacaaatatctgaatgaaatccaccctaggagacggagtcaaactaaacttgtggtttttcatttaacttttgactacagcatggccccatggcatccacaccaagagggtgttgtgatgaggtgccggtgtgcaaagggaactttagtttttccactggttcttatctgctagccttttacatacatgtgtactatatttgtttatagactgtaggtggatatataatttaaaagcttgatttaataaacatttaaccccataaaaaaaaaaaaaaaaaaaaaaaaagaaaaaaaaaaaaaaaa

SEQ ID NO: 26629 - DNA, 4177 bp, Homo Sapiens
agcgggagcgacggcgcccgtccggatccgtagcgtttcgcggacgccgggacaggcggccccccgcggcgcaccccgccctacacgtccaggacgtggttgagataggagatgtagcagatggccaggcgcaggatctcgatcttggagagcttcttgtccgggggcagcgtgggcagcaatttgcggagctcggcgaaggccaagttgaaggcttccacgcggatgcgctcgcgggtggcgtgggccgagcggtacttggccgtggcgcgccggcggcggcgcttctcctcgcggctcagctgctgcgggtgcgggtagagcgcggctcggctgccgcccttgccgtcgccctcggcctcctccaccggctccaggtccgacacgctgccgagcaccttggtgtccgtgccgcccagggactccggatccgagtgcgccgagctgggatggtccgaatctgctgcttggtccggactcagcatcattttggaggctgaggaggggtcggaaaattaatcagtaaaaggaatcagggtattttgctggaaggatggctgccgaggcctaccacgccggtcctcccagcggacgcgcggcccgggccccctccccacagcaggccggcgcgcgacgcgggagggcgccgataggatctggcccgagggcgcgagccctgcgcctcgccctggcgcgggagccggcggggacgcggttgacccaggccgcatactagactggacacctcgacttgcagacggccacagcgggcctgtggccctgggcctggggaacaaccgcaggcctgtggggtcgcgactgggtttttgtgcctcttccggccaaatgccaaccgcgctattcctcctccctcccttcgtccccttcccggacaaacgagcgatttcgaacaacgaatacatctgggttttcacgggggcggggagacgcggggtgcacttctcgccccgagggcctccggcgaagcaacccggcagccgcggcgcccgagggcctggcgctggtctggggctgcgccgggggcgcctggctctggggtgcggccggtcaggaatccccatcctggagcgcaggcggagagccagtggctgggggcgggaaggcttcttggacccctcgcgcttctccgaaatcgtaaagaaatgactaaacaaacgtgggggagcctttttaaaaagaaaattgactccgatgccctcgcaggctcccggagcaccatctgtcacgcagacagccacacacataggggacctagggacacggcgacgtgggatcagacaatgcgcccggcagtctggcgaccaccttgcgggaaaatgccggcagccgggccgctgagggaggagaggatgcagagggaagggaagagaagggaagggcacggggcggggcaggcggggactagcgggtgcagcgcgtgttgtcccggcgggagctgcatctctgccggcaaagttcgggcgctcccggaaccggagctcggcaggctgcagctgtccccgggtggcctggccaagtccgggcatgtcggtgcttagccttcctctaacttaactgtgccctcttggaaacgccacctggccaggcttctctggggcgcctggagcactggcccggactgtgcgccttctgggagggggccgctcagaaccgctgggcttccgggtaattcgggcttcgagaaagggcccggcaggaggagaaaggcccctgcaggggctgcacgcaccgcccctgggcgtcgggagtgaggaccaggctgagaactcggggccccggcgtgggcagcctccgcgacgctcggcacgggagaaatccgcgtcggcgacgtataggagcgtttgcttctagagaaacaaaagcaaggggatgggtgatcggttcccagcaccgcacttgcagaggagcgaattgggccaaaacagctttaatttccctgcgaggaaatcaggtcctctacggcaaaataaaaacaaatgctcccagtgagctgcatgtgactccctacgggcttttctcgggtacgtttatgagtagaacaacttgcacctacacagtcagcttgaaagggcagaaataaatagacgagtaatggaaaatcacaataagccactaaatagttgtagttctggtaaaaagttcctgggttgccctcaaagcacattaaattctcctctagatctttaaaaatattcataaatagtatgccgtgtatgcgttttatctatttatggaatgaactgcatctatagacacagtatgaataatctaacttatttcaagctgaaaaaaattatttaaaggagtcttaccttgcaaaagcctttttgataatctgttctccaatctttagagttaaaattccaaggaatagcgaggggagattccggaaaatattaaaagcagcaaatatttattacattcaaaaatgaaaaagcagctgtcatctcgctggtgtccgcagcgagggacaataatatctcaggatgtagacgatatgaatgattgttcacttagttgatagattttttaaaaaacgctttttccttttaattgttctcaaacattgcaagaaattcgttgatgatttttttaaacgatgtgttgaaaagtctcgtgccttttttcctcttctaggtctctaaaaataacaaaagagatgcagagataaacacaatcacatcaaagggctgattcctccactttctaatagcggaataatcaataagaaagatggttaagataagattccgctcctatcgtatgcctttctttcccttaatacggctgagcagaaactgggaagtgcaggacagagatgtgatcttgctcagaagtgattttttttttttttttttttgagataaggctttgttcagctgatatctccccagttcccaggaacacaatactgtaactaggagctaaggttgcctcttcctcttccctcacttacttgtatgttgtataaatagacacctattttccagtttcaaagtctttcaaggtttggctatatcccccgtccccagcccctcttctctttaccttgtagcaaaatatatatagtcagtggcttggagatgcttggagaaaggttggtgaaaagtgaacgtctcctggagtaacagtgacaaggaagcagagaaagacgggaagagggtgggagagccagagcaaagaggcagagatgcgtgtgtggcttctgggctctcctggtaccaattgattcagcctggagatggtggaagagataaaggcttaggaagggggatggaatttttttcccctaaattgatatttaatgggaaatcctattggacagaaacctggacatgagtcacttaattggacttgacatctgtcacagtgtgggagttttcacagcccaaatattttagcagatcagattcccactgaatctgtgccataaaatataacaattgaaaagcagttcatgatagaaatcttagcctctaaacagtatctagccgtagtcaggctatttctcttttccagattattgatgaaatatttaagtacaaataaacaatatattgactatcaaagaattcccctggcatattacaaagccaccactttcccttaatatttagaaaaatatttgtgtccagaacatggaaatatatactatataagatgctgcaataaagtatttagacatgcaacagccaacatttattagagatcatttacattttaaaagatacttcagtaaggtttgattaagcatattaacatttttgagaaatgatctgctatgagactaacttatcaatagatggtaagaacctttcaatagattaagccattggtggaactagaaagagaatccacatattcacggaccacgacatgagataattctacttttctgtatgtttgtttttctctccacccactcattcattcaagctgaaatatgacatgctacatgtgttgattattgcacttcattcttgcccatcttaacatgctaatatattgtactgtgtggcagtgcttgtgccaagatgtaaacacaaattaccagtgtgttccagtacataatgcctttgccttacatgatcccatggccctgaatttgtataccttataataaaaaataaaatctagtccaaaaaaaaaaaaaaaa

SEQ ID NO: 26630 - DNA, 4336 bp, Homo Sapiens
agcggagagcagcgacagagccttcctcaaacctgtagtgactgccacactttgcaaggacaccgtagagggggcatgtccgcgctccaacttcctcccgacgcagcctctgattggctcctgggcttataagaaacgcgtgaatgagcagctgccgcgggcagaaagttgccggaggtctccgggtggtatcgccctttcctctttgccagcccgctggcgagccgagccggggcaagatgaggtcgtcctgtgtcctgctcaccgccctggtggcgctggccgcctattacgtctacatcccgctgcctggctccgtgtccgacccctggaagctgatgctgctggacgccactttccggggtgcacagcaagtgagtaacctgatccactacctgggactgagccatcacctgctggcactgaattttatcattgtttcttttggcaaaaaaagcgcgtggtcttctgcccaagtgaaggtgaccgacacagactttgatggtgtggaagtcagagtgtttgaaggccctccgaagcccgaagagccactgaaacgcagcgtcgtttatatccacggaggaggctgggccttggcaagtgcaaaaatcaggtattatgatgagctgtgtacagcaatggctgaggaattgaatgctgtcattgtttccattgaatacaggctagttccaaaggtttattttcctgagcaaattcatgatgttgtacgggccacaaagtatttcctgaagccagaagtcttacagaagtatatggttgatccaggcagaatttgcatttctggtgacagtgctggtggaaatctggctgctgcccttggacaacagtttactcaagatgccagcctaaaaaataagctcaaactacaagctttaatttatccagttcttcaagctttagattttaacacaccatcttatcagcaaaatgtgaacaccccaatcctgccccgctatgtcatggtgaagtattgggtggactacttcaaaggcaactatgactttgtgcaggcaatgatcgttaacaatcacacttcacttgatgtggaagaggctgctgctgtcagggcccgtctaaactggacatccctcttgcctgcatccttcacaaagaactacaagcctgttgtacagaccacaggcaatgccaggattgtccaggagcttcctcagttgctggatgcccgctccgccccactcattgcagaccaggcagtgctgcagctcctcccaaagacctacattctgacgtgtgagcatgatgtcctcagagacgatggcatcatgtatgccaagcgtttggagagtgccggtgtggaggtgaccctggatcactttgaggatggctttcacggatgtatgattttcactagctggcccaccaacttctcagtgggaatccggactaggaatagttacatcaagtggctagatcaaaacctgtaaaggagcaaaacttccagaagcctcgagcccctcttgacctcctacacctgctttggaaagacatgcactttttagttgactaattcttcctcccattcccctctacttgcgagttatggaatttctattccataactgaagtctttatgataacctaatttttaaaaatgaatttgactaacttaagtgcaaaacatgtaaatttggttcccagagtgggccaatctctctgttcttgttatcttagccaactatactgatacctacagctacagaaagcaggactaggaactggaaataactttgggtcctgccttcattaggacgttctttttagaagcagttcttccagctctggatcatagagtgacctttaataagttaaaaaaacgaggactccttaattctgctagagttaaccttgagttcagagcagtattaaatgcgtgcactttcaggtcagtactggggaccaagtaccctctggtcttttgtgaatggatggttttgtttcctatgggaattttggcaaaggttttctggaaagaacaagtttctcaaaggactttcttcctctagaatgttcattttatgagatcgctatctgtaagtccagttggattacaggaatacttgaaagttactttctaccactattagaaaatatgaagtcgcatgcactggatatctatatatcattaggtttttgttgtgtttttggttatgctgtcccccttctccttggggagatatttgggagcaaacttatttagatttagagtaaacttttcattatagagcaagtaaaaacagacaaatgaaacaacctagtgtttcacataaaaatacttctgacataaagtaccaagagcagtgtgaatatacttggcatagtcaaaaaagaaaatacatttaatattagttcaaaattgttaaaaatacctttagaaggtctagtctattattgaaaactcaattttttcacttatatggctttaaaatggagctattttgctacaatataatgtattgtttatttttttaagttatttaatgttaatatacatagctagacttaaggtttttcagaaagatgtccataataaatattaaaaacaatggtattttttaaaaaactgccttagggttttaaaaccttccctacagttataaccacgtgtaattttgtggaaatgatataacagctattaatactactataacatatgcataaatattttcgtgtttatatgcatatacaagttaaaataattagaaactatgactgcgcctagtaaagtcatctaggtttatagttcagtagcttaggcaaggcacacactgctcatctccgctttttagggtcagaggaacacaagctcatgttctgagtgaagggcgtacactggcacctggtgttgcctagatcccccatctcctccttccagccaggtctggaagtttcaacagcccaagcttaacttcatgtaaagtcttcactgccagtgggaacatctttgacacaacaagacactccaattgtgatttgagttgaggatctctgcctgccttcctgccgtccttccttcttccgcgatccatgctacttttaggggctgcggagagcagcagcagagctgagtaatgatacagggcaccacggagagaaagtagaaccatttcactcctgggaagatggggtatttcccacttccagcaacgaaataacaaatgaaaagttgcatacttattgatgtattgtatgagccagtagcattttatgtacaaaacagaagtcaatgcaacagtatgtatgtgtgcctgtgtgtgtataaaaataaccattgaagctaacttgctaatgtacttaggcaagccacttcccatctctgggcctcgtctttcctccctctaaaatcaaagagctgaattatgtgatccttgaggtctcttccacttataataccaactgtcttgtcagactggcaaattatattggcctctccttatgtggtggtttttttggtaggtcatagttccttatacacagacacctgctcatcgaaggtcttttttttcctaaaaaaaaaaaatgggattttagttcttattctgtgataactatcctcctcatataatactattctttttgacaccatttgaaggaaccaatatttggaccttattttgaggttgtctgtctcgaagaaaaagaaaataaaatgtataggcagggttccttcaattggcattttccccagaattgtgagccaaagcctatagtaattgcagacagcaaatgattccggatctctaaaaggctctctcagatgaaaagggagtaaaggaaaaaagaggtcaaccactgtttctgataatgtacttgagtttcattgttcttttagtttgtattcttataaaaaatgtttacactctgcagattgatttttttttttttagtactgtggctttcttttcctattttatgaaaaaaatgataatctttttgtaaaattgtctgtgaaatataaacattaatatataaagaaaaaccttgaagtgctgtatagtgaagtataaattaatgttttattgatttgtgaagaatttaagactattatataattatcttggtggatctattttatgcatgaccttttaacctttgactttgcttatttcccactacgaaggggaaggtagattttatgaatgattttaatagcaaatatattttataaagtgaaaatccagtgtggaggtagcaaagcatctatctattctgaatcatgtttggaaataaaattgctccatctgggaatgtgctttcaaaaaaaaaaaaaaaaaaaaaaagaaaaaaaaaaaaaaaa

SEQ ID NO: 26631 - DNA, 1776 bp, Homo Sapiens
gtttttcgcgccatgtcgtttgctgagagcgggtggcggtcggctctgcggcgccgcggtcccggcaccccgggccctgtggctcggccatcgtattcctcctttactcagggggacagctggggtgaaggcgaagtcgacgaggaggagggatgcgaccaagtggcccgcgacctgcgggcggagttctcggctggggcgtggtcagagcccagaaagcgctcggtgctcccgccggacgggaacgggtcgcccgttctgcccgataagcgcaatggtatctttcccgcggccgcgggcagcagagcccagcctcggcggtggccggtccaggtcctctctattctctgctcgctgctcttcgccattcttctcgccttcctcctcgccatcgcctacttgatcgttaaagagttgcatgctgagaatttgaaaaatgaagatgatgtagacactggactattaggattctggactctacttataatatccctaactgctggattctcctgttgcagcttttcttggacagtgacttactttgattcttttgaaccaggaatgtttcctcctactcctctttcacctgccaggttcaagaaactgactggacattctttccacatgggctatagcatggcgattttgaatggcatcgtagctgctcttactgtagcatggtgcctcatgtaaacccacactggagcgatattgttggcaaaacttaatcatgattgttttgtaataacaagaaggagcatcactgtctactcagaagactgagaaacctgctgttcattatgtagttcagatatttatcacaatcatcctcattatggaagaccttttaaagcattgttttagaatgtctgagtattaagatacagattaattgggaatatctgagtattaagtactttcttcagagtataagatgtttacctcatctttttacttttgtgtgtgtagttctttcaagttgtaggaaacattttaatggaatttaaactcaaacttgaatacaggacaatgcttgccttttcatgtatgtactacattttttgctaagaaatactgatatttctgtttagttgagctagaaatacttcttatttatacatttaggaaagcaaataatgcctactactccgacttttatagaagctacttttaaatcagaatatttaatttttgatattcatataattaatagaagttgcatttatattttttatggggcatagttccttatgtgtttttttaatgtattttcatactacatactgaatttgtatgtttttaaaattgttacatctagacaactgtaaacattatttttttagctagtgcaaacctagtacctgccatttttactaatttttgtctttaaaaaaagcaaaaaagcacattgacctaagttgaaaattaagtaagtttatttttaacaaaaaatgcctgaaaaaagctaaattatttaagtcattaagatattgagaaaaaatttgaaatttttactatttctgtttccacaattccaaatatttatcttggtgtatatattgttactttaacagaacttgcattattttgtttttaataaatataaacatgaaatttttgtatgtgagaatgattgaactagtttgttcttaatctcaaaaatttagttaccaaagtagaaaaggtattttgatactagatattaaaaactacatatagttaatataattttataatttttgtaattaaatgtgcttctgcaaaaaaaaaaaaaaa

SEQ ID NO: 26632 - DNA, 1481 bp, Homo Sapiens
ggccggaggcggcgagctgagcggctctgacaggacgggtcgcagggggtcgcctggccggagctgggctccgagaatcccgggtgccagcaccagagcagcggctctccgcactaactctcctctcctggtcagctgtaacccctgccgcagagcccggcaactttcagctgtcgcccgcggagccccgagggccactcgcctcacctgtgcgtgcagcgcctcgcgcgccctgtccggctgcggagatgagcgagcttaataccaaaacatccccagcaaccaaccaggcagctggccaagaggaaaaaggaaaagctggcaatgtcaagaaggcggaggaggaggaggagattgacattgatctgacagcaccagaaacagagaaggctgcccttgctattcagggcaagttccggcgatttcagaaaaggaaaaaggatcccagctcctgaatggccagccttgcccttcaccttcaccttcatgctggtcccttctctccccttctccacacccatgtatctttatcccttgtccctctagcctttccttgaggcaagttcaacctttatatactcttgtatctggccccctcaagccatcacagaagtagaggcacaagagaggtggagaagatgaagacttcaatcagcagtcactagtctaagggtggaacaatttcttcttggtataaggttctttgatcagtagctatgcctgccctgtagggctaaacaagaggcttcgaggctgagagatctccccaaagaacaatgtgggaaggaggggaaggctttcagagtagggtgcctgacggtgggacatatgcactgttctgctagttacggcattcacactttaggtaacatttttttttccccttcagatccttctgcaccaactccaacttcccctcccaggatctaagccacagtggggactggagcctcgttttccccctaggcagacctaaatcaagcagcttaccacaatagtgcatgctgagtagattagttccaaggaagggagactggaatgctggtgtcaaggaaaagcctccctcatcatctagtctaagaccataacgggcagaagcataagaggttccagggccataggagaatgagaagtagggcacatatagggaggaaagaaaagtgaagaagggggaaatctctgaatttttttactgctgggaaaagtgtactacatgaaggatgcttggggctttgctaacctgctcaccgctaaccctccaagtctaaccatccccagaggccacacaaaccaagtgactcctgtagttcccatttgccccactatggagtcagggcaaaagtggaatagccactccatgtgattttagcatgtttaatcattttaacaataaaccaccccacaaatggggtcatttaacctctaaaaaaaaaaaaaaaaaaaaaaaaaaaaaaaaaaaaaaaaaaaaaaaaaaaaaaaaa

SEQ ID NO: 26633 - DNA, 1852 bp, Homo Sapiens
caccacgtgcagccgctctcgtgcaggcgtttgcagtgtgcagctgagttcggcagctcacacagcacccctttcaagttgttttgcagtgggtgcctcttgtgagacactgtttctgagagcagcttttgtggcatcttacagggcagatttctggtcccacccacctctgcctccgccatggcttcaagaaccgttatcattgaccacgggtctggctttttgaaggctggcacggccggatggaatgagcctcagatggtcttcccgaacatcgtgaactacctaccgtgcaaggagaaccctggccccagctatgcccgtaggcgtgtgagcctgggcatcgacatttgccatcctgacacctttagctaccccatcgagcggggccgcatcctcaactgggagggtgtgcagtacctctggtcatttgtgttggagaaccacagacgggagcaagaggtcccccctgtgatcatcacggagacacccttgagggagcctgcggaccgaaagaagatgctggagatcctgtttgagttgctgcatgtcccatcggtcctcctggccgaccagctgcagatgtccctgtatgcctctggcctcctgaccggagtggtggttgattctggctatggcctgacccgcgtgcagcctttccaccagggccgccccttgcccgccagcggcaagacgctggagttcgccggccaggatctctccgcctatctcctcaagagtctctttaaggaagattgcgatagacgctgcctgtttcagctggagacagtcgccgtgactcagatgaacaagtgctacgtgccgcagaatctgggggaggccctggactttcgtgagaggcagcagagtgccttggatgagagcaacacctatcagctcccagacggctcccgcgtggagctgacccccatgcagcgggtggctcctgagatgttctttagcccgcaggtgttcgagcagccggggcccagcatcccacgggccattgtggaatccgtggagtcctgcgagatctccctgcgccccctgctggtctcccacgtgatggcctgcgggggcaacaccctctatcccgggttcacaaagcgcctgttcagggagctgatgggggatcacgtctcctccaccaaggccacagtctgggagggttccaatagaaactttagtgtctggctaggagcgtccgtggtggctcacctttctacctaccagtctgagtggatgtcccgagaggagtatggtgagcatatgaggatgtgaccctactggctcactcctgagaatgggctcctgttagatgggcacgggcggattaattttagcaaaatgttctgggtgggggtagaatgaggtggggtggggtgagctggctttggaattctaggggcatgagggtattttttaggttctaaggttttatcttgttgcaagagtgggacctacccaagggggaagacaagatgtcatccttggaaaccctgcaggggacagtttttccagggtggcctatcattggggtatgagtggctgactgccatctccatgcctgagagccactgatttttcattggcatttcccctggtttgtctcattcttcttggttgagtaggttttaactggggtagcactcctgctaggagtcccaattatttttgactaggggatgggggacagttgacatttctggtcctacaggccctttctggccagggaggcattgctgcaggtgagcctgggatgcccttgccacccgtggttggatcttgttttatatctgcaaataaatagcttgtttggaagcaaaaaaaaaaaaaaaaaaaaaaaaaaaaa

SEQ ID NO: 26634 - DNA, 1858 bp, Homo Sapiens
gttacccagagaaaggaagtgaaaagatttacaattataagcacgaaattcattggcagattacctgctttatctacagacagattgttttggggtttggttttgtctaggcagcctctggccaggctccttaattgcttgctctgctaatatttcagcttcctctcttgactccttgaggaaccaaccgctctttggaagacaaacacttagccacctctgtgctccagggtaaccctgagaagctctgctgtctggggcaagctttctttccaaagggaatgagaggaaggcaagcaggcagggtcctgcagcgtcaggccttctggggaaagtttcctcattttgtttgacagggtcctcagtacatcagacacccagatttgaatataagttcagagcctgatctcaagctaaatcagaatgctttggggactaaccatgatcgagaattggccaaatagtatggcatataaacagccatccagccagccgcaagtaaaggaacgtttgatccttggcaccttaaatgattgattgccttcaataggcaaactgctggtctggaaatctcgttgaaggctgaatacttcatgcggagtaggacaagccttagcccaccttcaggttgaaaggaaaggccataggactcaaaagataatgactctgaaactaaactccttccttctgaagctgacagaggtacttagtgcatctcaagactccatctcataaaactcatttgtgagggatttgctctagatttttctaaacattttttcatctattgtccagacttgcaaatccagtgtggacctgatggagatacccttcacacctgcgctcccaccccctcggcagggagacgtctcagtagaggagaacacacccattatgctgggatttgtatttataaatcacttcccttttagggatgagcggtgtggggcgtgtgtgcgtgtgagtgtatgcgcgtgcgtgtgtgaccctcaagtgtactttgctcaatttagacgtgcagtatttccagaaacaatgaaaaaagtaagatgttttcttctttatgattctgctcaaaacaccacgtgccgcctcagagctttttctagagcctcggtcctcaatgacgcgcttgacctgttgatgcctcagcccagcgaagcccctcacctgtgccccgggcgacagctcttcagtgtgcagtgcaggcctggggtggactgccaggccttcgctctgtgccagcaacgccgttcttgttgctcctccatgaacaggggtacaagccctggcccctcctcgacactaagccccccacagactcagcctccaaggaaccgctgagcacccttgaagcatgtcattgtcagtgatacctttttattctatggaactctaacctattcgtgtcatattgaccttttgctgcatgagtcataaattatgaaatcagtcttacagtttttgaaatgtagccagcatttgtaaggctaaacctttttcatgaactgaatttaagtgaataaccaagccacagttcctcctcaaatggagagtgatgatcgacatttgaatctctttgccctttccaacggctatggcatcaggttctaaaataagctcgtaatttttcctgttattttaataatatggaaatattagcatagtgtttcttttgatagtgatagactataatccatatttaaattttatagagaagaaattttattgtactgtgatgtagatatttattatccaggtaaggatttgcccggtgtgtattttttacaattgagacattttactttaatctttaaaaaaaatgcattaaaaacacactcaaaaaaaaaaaaaaaaa

SEQ ID NO: 26635 - DNA, 1918 bp, Homo Sapiens
gggcgccggcggggaaggaggagcgctaggtcggtgtacgaccgagattagggtgcgtgccagctccgggaggccgcggtgaggggccgggcccaagctgccgacccgagccgatcgtcagggtcgccagcgcctcagctctgtggaggagcagcagtagtcggagggtgcaggatattagaaatggctactccccagtcaattttcatctttgcaatctgcattttaatgataacagaattaattctggcctcaaaaagctactatgatatcttaggtgtgccaaaatcggcatcagagcgccaaatcaagaaggcctttcacaagttggccatgaagtaccaccctgacaaaaataagagcccggatgctgaagcaaaattcagagagattgcagaagcatatgaaacactctcagatgctaatagacgaaaagagtatgatacacttggacacagtgcttttactagtggtaaaggacaaagaggtagtggaagttcttttgagcagtcatttaacttcaattttgatgacttatttaaagactttggcttttttggtcaaaaccaaaacactggatccaagaagcgttttgaaaatcatttccagacacgccaggatggtggttccagtagacaaaggcatcatttccaagaattttcttttggaggtggattatttgatgacatgtttgaagatatggagaaaatgttttcttttagtggttttgactctaccaatcagcatacagtacagactgaaaatagatttcatggatctagcaagcactgcaggactgtcactcaacgaagaggaaatatggttactacatacactgactgttcaggacagtagttcttattctattctcactaaatccaactggttgactcttcctcattatctttgatgctaaacaattttctgtgaactattttgacaagtgcatgatttcactttaaacaatttgatatagctattaaatatatttaagggttttttttttttgacaaattcaacattcaacgagtagacaaaatgctaattatttccctgattaggaaagtttctttaaaaaacacgtaattttgcctagtgctttttctctacctgcccttgggctcactaatatcaccagtattattaccaagaaaatattgagtttacctgattaaactttaaaagttaattgtagatttaaattgtgtgaacctaatgatttttgcagtgaaacctttactaattcaaagttgcatgttctatgacatctgtgacttgcgttgcagagtgtacatgaaactgtataattgagtcattcagtaaaggagaacagtatcttggttaattgctactgaaaggttgagaaaggaatggtttgatatttaccacagcgctgtgcctttctacagtagaactggggtaaaggaaatggttttattgcccatagtcatttaggctggaaaaaagttgaaaacttaacgaaatattgccaagagattgttatgtgtttggttccagcctaaaaatgattttgtagtgttgaaatcatagctacttacatagctttttcatatttctttcttagttgttggcactcttaggtcttagtatggatttatgtgtttgtgtgtgtgtagtttatcctctctctcatctttatctagagattgactgatacctcattctgtttgtaaaaccagccagtaatttctgtgcaaccttactatgtgcaatatttttaaatcctgagaaatgtgtgcttttgttttcggatagacttatttctttagttctgcacttttccacattatactccatatgagtattaatcctatggatacatattaaaacaagtgtctcatacaacattgtatgtgagagaaatataaatatttacaacctgaaaaaaaaaaaaaaa

SEQ ID NO: 26636 - DNA, 1698 bp, Homo Sapiens
aaagaggagaggaaaaaaagttaaccagttcaacgaaaaggagaatctggcaaggaagcatctctgatgtgggcagagcctgcagcagcagatgtggagggcttctcacaagtgacagcaagactgtctgtaaaacggccactttgacctggtggtgttctgctcttttcatggccatagagtactctggctggtctccaggaggtaaggcccgccctgcaggcaacaccggtgcttgggctcctgctgagcagttctttcctgcgagtaacagaaccagggagggaggtgggctgtggcctcccctgcccctacagtcgtctcctgcagctcccaccatgctggactcatcagcagcagagcaagtgacccgactgacgctgaagctcttgggacagaaagcctcttagtcattcctggagcacacagggcctttgcgtggagccaccgtctctgtcacggtctctcttcctcacagaagctggagcaagaacggcagaacgtggaagggggacctgagggcctccacctcgagccaggaaatgaggaccggccggacgatgccctgcagactgctctgaagagaaggagggaccttctgcagagactccgggaggccaccctcatgcacataaccctggaagggtcttccagtcatggccatcctgcccggagaggcgcctgtacctggcccaggctggcctgagcctgatgctgggggtgcctctgtggcgttggggctccccgtccccgtgtgcagcagctctgcatcggccttgcaggaacaacacctcctggacgagctctctcgggcccaggcctggagcgggccaagcagaggagccctcgggtcagccctgcccccagagctgccccccacgggcatcctacccactgcctccccatccccgctggcctcagacccgccaaggatcatcctgcctacggtcccccagcctcctgccaccatcattcagcagctccctcagcagccactcatagcacagattcctcctccccaggccttccctactcaacggtcaggaagtattaaggaagacatggtggagctgctgctgctgcagaacgcacaggtgcaccagttggtcctgcagaactggatgctcaaggccctgcccccagccctgcaggacccgccacatgtgcccccgagggtcccacgagctgccaggccaaggctgcctgccgtgcaccaccaccaccaccaccaccaccatgctgtgtggccacctggggctgccactgtcctccagcccgcccccagcctgtggacgcctggcccaccctgagtgacagattctttcattcctgaagttccgcacaaggaggaaccctgtcccagtgcttccatctttgaaagtttgcaggtaggagacaggatgaccagagagttgccactgagctgcagagctccccagggacagccacctggtgctgacatggacgggcaggtgtgaacaccgaagggcccagcgcagctactggcagtaacactcacttctctcagaaccatcttttcgtgcctcttgaaggtgattccagagactctgtgctctcgttaaaagctcaaaccaaagctcagactccatttcctcttttcaaggtgactttccagcatggcatttctttctttctattaaaagtgtttttttttgaaaaaaaaaaaaaaaaaaaaaa

SEQ ID NO: 26637 - DNA, 3407 bp, Homo Sapiens
gcttcccggctctgccctcttggccgaagtgcccgctgccgggcgcgggcctcagacaatacaatggtgggtgaagagaagatgtctctaagaaaccggctgtcaaagtccagggaaaatcctgaggaagatgaagaccagagaaaccctgcaaaggagtccctagagacacctagtaatggtcgaattgacataaaacagttgatagcaaagaagataaagttgacagcagaggcagaggaattgaagccattttttatgaaggaagttggcagtcactttgatgattttgtgaccaatctcattgaaaagtcagcatcattagataatggtgggtgcgctctcacaaccttttctgttcttgaaggagagaaaaacaaccatagagcgaaggatttgagagcacctccagaacaaggaaagatttttattgcaaggcgctctctcttagatgaactgcttgaagtggaccacatcagaacaatatatcacatgtttattgccctcctcattctctttatcctcagcacacttgtagtagattacattgatgaaggaaggctggtgcttgagttcagcctcctgtcttatgcttttggcaaatttcctaccgttgtttggacctggtggatcatgttcctgtctacattttcagttccctattttctgtttcaacattgggccactggctatagcaagagttctcatccgctgatccgttctctcttccatggctttcttttcatgatcttccagattggagttctaggttttggaccaacatatgttgtgttagcatatacactgccaccagcttcccggttcatcattatattcgagcagattcgttttgtaatgaaggcccactcatttgtcagagagaacgtgcctcgggtactaaattcagctaaggagaaatcaagcactgttccaatacctacagtcaaccagtatttgtacttcttatttgctcctacccttatctaccgtgacagctatcccaggaatcccactgtaagatggggttatgtcgctatgaagtttgcacaggtctttggttgctttttctatgtgtactacatctttgaaaggctttgtgcccccttgtttcggaatatcaaacaggagcccttcagcgctcgtgttctggtcctatgtgtatttaactccatcttgccaggtgtgctgattctcttccttactttttttgcctttttgcactgctggctcaatgcctttgctgagatgttacgctttggtgacaggatgttctataaggattggtggaactccacgtcatactccaactattatagaacctggaatgtggtggtccatgactggctatattactatgcttacaaggactttctctggtttttctccaagagattcaaatctgctgccatgttagctgtctttgctgtatctgctgtagtacacgaatatgccttggctgtttgcttgagctttttctatcccgtgctcttcgtgctcttcatgttctttggaatggctttcaacttcattgtcaatgatagtcggaaaaagccgatttggaatgttctgatgtggacttctcttttcttgggcaatggagtcttactctgcttttattctcaagaatggtatgcacgtcagcactgtcctctgaaaaatcccacatttttggattatgtccggccacgttcctggacttgtcgttacgtgttttagaagcttggactttgtttcctccttgtcactgaagattgggtagctccctgatttggagccagctgtttccagttgttactgaagttatctgtgttatttggaccactccaggctttacagatgactcactccattcctaggtcacttgaagccaaactgttggaagttcactggagtcttgtacacttaagcagagcagaagtttttttgtggggctgggtggggggagaagaccgactaacagctgaagtaatgacagattgttgctgggtcatatcagctttatcccttggtaattatatctgttttgtttcttgactctgtccaatcagagaataaacatcatagtttcttggccactgaattagccaaaacacttaggaagaaatcacttaaatacctctggcttagaaattttttcatgcacactgttggaatgtatgctaattgaacatgcaattggggaagaaaaaatgtagaatgatttttgctatttctagtagaaagaaaatgtctgttttccaaagataatgttatacatcctattttgtaatttttttgaaaaaagttcaatgttcagttttccttagtttttaccttgttttctctataggtcatgatttctgtgaagcaaaaagatgccttttaccatgaattcttgagtttacatcaataatattgtatattaaggggatcagaagtaggaaggaaaaaataagagatagcagaggaaaaagaaaaacatttcctcttataacttctgaagtaatttgtaaaaaagatttgtagagtcaatcatgtgtttaaattattttatcacaaacttaacatggaagatattcctttttaactttgtggtaacttctttgaagttatttagaaatatcctttggaacaattattttattgtctaataaatattgacttctcttgaattattttgcagactagtgagtctgtaacataagtattaatcacctccactcatattaaagtgatcattaagaatccagaagctggcttctgcatttgctcagttatacttttaatggtagtatgtttttaggtggaataaattaatatgtgattggtttcaaggaaatgtactctattatgtaatacttccattttataagatgcccgtttctaatacaatgtgtgtaggaattatttgtatgtatgaggtatgattgtaaagattgagcattggaaggggtatcagagaccatgtagttcaactttccactcaaagtaagatttatgaattatttaaatgatagttgttacttggaacagccacttgagaggctctcttggtattgtttggaattgttttaaagtcagtttgagtctcacaagaaggtaagtagagtttcttaatagtcacaacttaatttgaaccacaagtatccagcttaatcacgtatcttactcacgataccactggtccagatgagtttaggtaattttcaaacattaaatccaacttcaacggaaacaaatacactcaagggaagttatttttaaaaaggtactctgcatgttcccgcagtaatgttctgcacaacagtattgtaattgtaatggaatcataacctgctaactagtttgctttaatatggcttgtaattcttgacatttttcttaaaattaaaacgaatttttattttgaatttaaaaaaaaaaaaaaa

SEQ ID NO: 26638 - DNA, 2873 bp, Homo Sapiens
aaacatatgcttgaagcgtgcaacaataatctggaaatggcagtcactatgtttttggatggtggaggaatcgctgaagagcccagtaccagttcagcaagtgtctctactgtcagaccacacacagaagaagaagttcgtgccccaattcctcaaaagcaggaaatactggtggaaccagaaccattatttggtgctcctaaaagacgacggcctgcacgttcaatttttgatggtttccgggattttcagactgaaactattcggcaagaacaagaattaagaaatggaggagctatcgataagaaattaactacccttgcagatctattccggccacccattgatttgatgcataaaggcagctttgaaacagccaaagagtgtggccagatgcaaaataagtggctgatgataaacattcaaaatgttcaagactttgcatgtcagtgcctcaaccgcgatgtgtggagcaacgaagctgtgaagaatattatccgggaacatttcattttctggcaggtttatcatgacagtgaggaaggtcagagatacatacagttttataagttaggggatttcccctatgtttccatattggacccacggacaggtcagaagctagtagaatggcaccagttagatgtatcttctttcttggaccaagtgacgggatttctgggtgaacatggacaactggatggactttctagcagtccccccaaaaaatgtgcccgttcagagagccttatagatgcaagtgaagacagccagctagaagctgccatcagagcctccttacaagaaacacattttgattcaacacagacaaaacaggatagccgctcagatgaagaatctgaatctgaacttttttctggcagtgaggagttcatatccgtttgtggctctgatgaagaagaagaggtagagaatcttgccaagtccagaaagtctccccacaaagatttggggcatagaaaagaggagaatagaaggccgctgactgagccaccagtcagaactgatcctggaacagccacaaaccaccaaggattgccagctgtggattcagagatactggagatgccacctgaaaaagcagatggagtagtggaggggatagatgtaaatggaccaaaagcacagctgatgttgcggtatccagatggaaaaagggaacagatcactcttccagagcaagctaaactgctagctttggtgaagcacgtgcagtctaaaggatacccaaatgaacgttttgaacttctcaccaactttcctcgaaggaaattatctcatctggactatgatattacattgcaagaggcaggcctttgtcctcaagagactgtctttgtacaggaaagaaattaacaccatggcttgacctctctcagcttaccccttttttcccttttcctgtgagatacatgtcactaagtatgcattttggctcataggaccacagagccaaagttgggcaagcaagtcaccttccttctcttatttcttgatctctcctataatcagtctctttctccccctttgtttctttctcctcttctgttttctcgctccccactccgtacccttctgcctccccctccccccacacttttctttcttacctaatctggtgaccaaactgaagtgtaaggataagacctctcctagtactagcagcaggaattgtgtgttccagtaagtggtctcttgcacggcacttttttgggatcaaatgttaacgttactccccagactcttcgggcaaaggaatggctagattcagagtaagaacaaccctccctttttttgtaagtccccgtgtttagcagggagaagaaattctctaacatgggtttggttttgttgtgttcttcatgtggaaatgtcgcttaacaaaatatccaggcttttgtttacgtggaaaaagcatcccttgtaatgattgctcatcatacttaaaaacctttttcaaaggattttcatgttcccagctataaggactatttccatgacatgtgttattggcagaatgagtgttaaatatggagcatatagcatggggtgactttcattgtcctaacctgagacagttttccttattactctgtattgatcctgctagtccaagaatggacatgaagtgaacctatcgtggtgactgggataggaaggtgcttgctatttttgccagcacagcatattagttcctttggagccctccattgtctgagtctgcagtgatctgtaggaaggcagctggtcaataatcatgtagtacaatggcttggaattgtaaccactatggttattgattgtcctgtgttgtttcaggcatacttaggtatgtccctggggaaaaagaaaaccattcagctgagagttgctaaccatgttcttttggttagaaataatggttcattttttgcccctggttggaatagtctctaaaaggctctggtgactgaattgaacatgagtccgcatgctgttttctttcaaaaggtatcaaaacggaaagcctctctaaggggaagacctttcaactccattcagaagacaacatttagtaaggaggatggcggaggttactagtaattttcagatgtcttgggctttttctgccaacaaaacccaaaatcaaattagagttggtgaaagctttcttcagtgtttttagaagaggccatcttgaatctgtagaataccatttacacatcaacttcaccctatgctcatttcgtattttgagcttaaatggagtcctctgaagggggggtagtcgtgattctggtggcaaaactagaacttttaacttgtaaaatgaaaaatattaaatggacctttttgtcaaaaaaaaaaaaaaa

SEQ ID NO: 26639 - DNA, 2481 bp, Homo Sapiens
caagaagcagcgactgcagcagcagcagcagcagcggcggtggcagcagcagcagcagcggcggcagcagcagcagcagcggaggcaccggtggcagcagcagcatcaccagcaacaacaacaaaaaaaaatcctcatcaaatcctcacctaagctttcagtgtatccagatccacatcttcactcaagccaggagagggaaagaggaaaggggggcaggaaaaaaaaaaaacccaacaacttagcggaaacttctcagagaatgctccaaaactcagcagtgcttctggtgctggtgatcagtgcttctgcaacccatgaggcggagcagaatgactctgtgagccccaggaaatcccgagtggcggctcaaaactcagctgaagtggttcgttgcctcaacagtgctctacaggtcggctgcggggcttttgcatgcctggaaaactccacctgtgacacagatgggatgtatgacatctgtaaatccttcttgtacagcgctgctaaatttgacactcagggaaaagcattcgtcaaagagagcttaaaatgcatcgccaacggggtcacctccaaggtcttcctcgccattcggaggtgctccactttccaaaggatgattgctgaggtgcaggaagagtgctacagcaagctgaatgtgtgcagcatcgccaagcggaaccctgaagccatcactgaggtcgtccagctgcccaatcacttctccaacagatactataacagacttgtccgaagcctgctggaatgtgatgaagacacagtcagcacaatcagagacagcctgatggagaaaattgggcctaacatggccagcctcttccacatcctgcagacagaccactgtgcccaaacacacccacgagctgacttcaacaggagacgcaccaatgagccgcagaagctgaaagtcctcctcaggaacctccgaggtgaggaggactctccctcccacatcaaacgcacatcccatgagagtgcataaccagggagaggttattcacaacctcaccaaactagtatcattttaggggtgttgacacaccagttttgagtgtactgtgcctggtttgatttttttaaagtagttcctattttctatcccccttaaagaaaattgcatgaaactaggcttctgtaatcaatatcccaacattctgcaatggcagcattcccaccaacaaaatccatgtgaccattctgcctctcctcaggagaaagtaccctcttttaccaacttcctctgccatgtttttcccctgctcccctgagaccacccccaaacacaaaacattcatgtaactctccagccattgtaatttgaagatgtggatccctttagaacggttgccccagtagagttagctgataaggaaactttatttaaatgcatgtcttaaatgctcataaagatgttaaatggaattcgtgttatgaatctgtgctggccatggacgaatatgaatgtcacatttgaattcttgatctctaatgagctagtgtcttatggtcttgatcctccaatgtctaattttctttccgacacatttaccaaattgcttgagcctggctgtccaaccagactttgagcctgcatcttcttgcatctaatgaaaaacaaaaagctaacatctttacgtactgtaactgctcagagctttaaaagtatctttaacaattgtcttaaaaccagagaatcttaaggtctaactgtggaatataaatagctgaaaactaatgtactgtacataaattccagaggactctgcttaaacaaagcagtatataataactttattgcatatagatttagttttgtaacttagctttatttttcttttcctgggaatggaataactatctcacttccagatatccacataaatgctccttgtggccttttttataactaagggggtagaagtagttttaattcaacatcaaaacttaagatgggcctgtatgagacaggaaaaaccaacaggtttatctgaaggaccccaggtaagatgttaatctcccagcccacctcaacccagaggctactcttgacttagacctatactgaaagatctctgtcacatccaactggaaattccaggaaccaaaaagagcatccctatgggcttggaccacttacagtgtgataaggcctactatacattaggaagtggcagttctttactcgtcccctttcatcggtgcctggtactctggcaaatgatgatggggtgggagactttccattaaatcaatcaggaatgagtcaatcagcctttaggtctttagtccgggggacttggggctgagagagtataaataaccctgggctgtccagccttaatagacttctcttacattttcgtcctgtagcacgctgcctgccaaagtagtcctggcagctggaccatctctgtaggatcgtaaaaaaatagaaaaaaaaaaaaaaaaaaaaaaaaa

SEQ ID NO: 26640 - DNA, 2013 bp, Homo Sapiens
cttgaaagtaaccgcaccttccaaagggcaccgtgcaatcagactgaaaccacggtgcaaatttaattgccggggaagataacgggccttggtgccctccaagcgtcagctgagtttccaagaagccgggcagcgggcgcccgcgggttcgtctctggctcctcctccgccacagcagccgggggcccgggtcggaggcggcgggggccgagcgcccggcctcgcaagcccacggcccgctgggggtgccgtcccgcgccggggcggagcaggccccggcagcccagttcctcattctatcagcggtacaaggggctggtggcgccacaggcgctgggaccgcgggcggacaaggatgggtccgcgcggcgcggcgagcttgccccgaggccccggacctcggcggctgctcctccccgtcgtcctcccgctgctgctgctgctgttgttggcgccgccgggctcgggcgccggggccagccggccgccccacctggtcttcttgctggcagacgacctaggctggaacgacgtcggcttccacggctcccgcatccgcacgccgcacctggacgcgctggcggccggcggggtgctcctggacaactactacacgcagccgctgtgcacgccgtcgcggagccagctgctcactggccgctaccagatccgtacaggtttacagcaccaaataatctggccctgtcagcccagctgtgttcctctggatgaaaaactcctgccccagctcctaaaagaagcaggttatactacccatatggtcggaaaatggcacctgggaatgtaccggaaagaatgccttccaacccgccgaggatttgatacctactttggatatctcctgggtagtgaagattattattcccatgaacgctgtacattaattgacgctctgaatgtcacacgatgtgctcttgattttcgagatggcgaagaagttgcaacaggatataaaaatatgtattcaacaaacatattcaccaaaagggctatagccctcataactaaccatccaccagagaagcctctgtttctctaccttgctctccagtctgtgcatgagccccttcaggtccctgaggaatacttgaagccatatgactttatccaagacaagaacaggcatcactatgcaggaatggtgtcccttatggatgaagcagtaggaaatgtcactgcagctttaaaaagcagtgggctctggaacaacacggtgttcatcttttctacagataacggagggcagactttggcagggggtaataactggccccttcgaggaagaaaatggagcctgtgggaaggaggcgtccgaggggtgggctttgtggcaagccccttgctgaagcagaagggcgtgaagaaccgggagctcatccacatctctgactggctgccaacactcgtgaagctggccaggggacacaccaatggcacaaagcctctggatggcttcgacgtgtggaaaaccatcagtgaaggaagcccatcccccagaattgagctgctgcataatattgacccgaacttcgtggactcttcaccgtactggcctgagtgctcgctgctgttgtagctaccaccaactttctactgaagatgataacccagggcataagaaatgacttcagacccaaggttctgaaagggcccctcaaggcctcgggtggctcctgcagaagtggcagaagaggcgggaactaggaacctggcatcataggaaaagtgccttctccaagaaagaaggggccccaagaggctgtcttacttagatcaaccataaactaccacagatgggtcatttcttatactatttcaaaatatctttgaagatgagaattcatttgtgtccttcatagaccaaagttctttgtgttaccttttcccaaaagtaaattcctttccctttattcattccttgtggaaataaaatgcaagccctttaaaaaaaaaaaaaaaaaaaaaaaaaaaaaaaaaaaaaaaaaaaaaaaa

SEQ ID NO: 26641 - DNA, 1577 bp, Homo Sapiens
cggacagagggctggaaacaagacgctccagaatcaggagcttcccctcaggaaatagcatcctgtgtccccgcactgcagttgtctggtctctccagcagtttggtacttccggctgctgcaatgcgtgtggtggtgattggagcaggagtcatcgggctgtccaccgccctctgcatccatgagcgctaccactcagtcctgcagccactggacataaaggtctacgcggaccgcttcaccccactcaccaccaccgacgtggctgccggcctctggcagccctacctttctgaccccaacaacccacaggaggcggactggagccaacagacctttgactatctcctgagccatgtccattctcccaacgctgaaaacctgggcctgttcctaatctcgggctacaacctcttccatgaagccattccggacccttcctggaaggacacagttctgggatttcggaagctgacccccagagagctggatatgttcccagattacggctatggctggttccacacaagcctaattctggagggaaagaactatctacagtggctgactgaaaggttaactgagaggggagtgaagttcttccagcggaaagtggagtcttttgaggaggtggcaagagaaggcgcagacgtgattgtcaactgcactggggtatgggctggggcgctacaacgagaccccctgctgcagccaggccgggggcagatcatgaaggtggacgccccttggatgaagcacttcattctcacccatgacccagagagaggcatctacaattccccgtacatcatcccagggacccagacagttactcttggaggcatcttccagttgggaaactggagtgaactaaacaatatccaggaccacaacaccatttgggaaggctgctgcagactggagcccacactgaagaatgcaagaattattggtgaacgaactggcttccggccagtacgcccccagattcggctagaaagagaacagcttcgcactggaccttcaaacacagaggtcatccacaactatggccatggaggctacgggctcaccatccactggggatgtgccctggaggcagccaagctctttgggagaatcctggaagaaaagaaattgtccagaatgccaccatcccacctctgaagactccagtgactgctgcctccccccacaagaactcccttctcccctcagccaatgaatcaatgtgctccttcataagccattgcttctccctcacttctttcctcaaagaagcatgaggtgagagaaagccacaaagtcagtgcctggagaagggttcagcccaacatggggcccctctcatcactgaaatccctctaccttctctgggtctggcattataaagaacagctgaggctgtcattccatgagtcttcagaagaaaggacagctcagaaaatcaaagaggccaactgcccagagccacagaaaatggaggataattgaggctaagtaacctgattacaagttgtactaacatattaaaggttctgaaaagtcctgcaaaaaaaaaaaaaaaaaaaaaaaaa

SEQ ID NO: 26642 - DNA, 1758 bp, Homo Sapiens
cagggagctggttccaggaaagaagggcacatgagcaaacatgatggcccctttatgagaggtaatttactgaaatgcacagcgattacctgctcacccagccctgatgtaattaaaaatggcaggctaggggctctgtttcccccggctctggcagagaaacctgggtttcgacttgtgaagcttgaggttggatgtgggaattggcttggagtcataggcgatgagagggacattaggatattatgaagcccgtgaactcaactcctgagaaggacacagcagagcgagagaaaagatggaataaaaaggcctacctcattgggctcgtgtgggtgaggagaactgaagagtctgagagcgcggcacgagccagaggctacggaaaacactgccctcctacactccaccttggagagacccagaaaagaacaagcttcatttgtaaaaaaggaaaacaactcaggcaatgggggtggcttaaaggcactctacagtgtgcagatgccttccacttcttccatctgccctgtctctccaagaacccctatggccccggtctcagaacagagctgagtgcagaaatgaaaatctatggctctgtgttccaaaacgatgaagaatttcaagatggtggcagtggtaaaatccttctccaggaaaaatctgtccttggcccaatgtgtaaacacttgctgagtattgtgaaaccagcaacttgttcacaattcttctgaatttcttgggaaatttgaagtggagtacctgtaccaacatgaaatgacacgaatttaagtgacgctcaacaacgaaaagcaaaaagaaccaaagaggaagcaactgaaacaacatctggatgtatttaaaaatatacaatgcctccaaaatcaggtgtcattaatgaaaattctgaagaaatgccaccggacatagccaacgcacctacgctgttgttattcatttcctgcttttcacagaaaacaattttgttgcatggaagatcgtgaacttcaaagggcagaggggaaactgtcccttggcctctacccctccaaggccccactttttcatcaacactccttggacgcagcagaagtatgaacataatatggtcctgaatgaggctgagtctttgggcgcagaagacccgggttaataaaaataggaaggtaagaaaagaaaagaaaaatcaagacacatcataggactaaattcctattatttatccactcaggattgaccacccctttgggccagatagttgtacccccatgtaccaggtgggcacatgaagacacaagaagtgctgtgatggttcattttgcacgtcaccttgcgtggagtatgccaactcattgtttggtcaaacactagtctggacatggtggtaaaggtattttttagatgagattaacgcttaaatcagtaaagcaggttacccaccatactacgggtgggccctgtccaatcagttgaaggcattaagaacaaagattgaggtttcctaaagaagatggaattctccttgagactacaacatagaaaccctatctgagtttccagcctgttgccctgtggaattcaaactcaggactccggtctatggcattaaccctcacttaacttttcagcctgccagcctgccctatggatttcggacttgccagccacacaattccttaaaataaatctctccgtctctgtcaaaaaaaaaaaaaaaaaaaaaaaaaaaaaaaaaaaaaaaaaaaaaaaaaaaaa

SEQ ID NO: 26643 - DNA, 1845 bp, Homo Sapiens
aaattatttcaagtacttcagggtttagttttcttagtgacaccctggaccctggatgctgctttctaaagtgcacctgatccatgcagttttatgtcttcatataactggtatcttgtgagtttgcaagcaatgggatgagcaagaaaaaaaggacgcatggaggagaaaaatttgaacgaggctagtgcaatgttttgctgatagattacattgttagggagctggtgattttttgccatggtcgtatcgtggacagcttttccgtggaaattcaaggcatctgtattaggcaaatgtgagtgcccttgatcttgtattgatcagtgccaatgtactgggaaagcaggtaccccagtgaaactggtctgtgcttggtttaacagctccaacaatttcagatccatggggctgcttgaccatagaccctgtttactccatgcctgttcaaaagtcattttgacttctagctttgtttcactttcttctttcaatacttctgtttcctcgtccttttccttcatattccatggctatttctttcctactttacagtttcccccagacccagattttttcacacctctgcatcatagacaactgagtatctcccttggcccctcctccatcctctcacaccctgtgctccattcctcagccgtttggacagggagctccgctgtcaccaaggagcccatgtgagacacactgctgtgactgcctcttgttaatgtcagcatcacctcatcacttaagcaaaaaggaaaatccataaaagagatggaaaatacgtctctttttattttattttaagaagattgggcggggtgggggggggttcttattctaggccttctcaatttctcatagattttaccttaaactaattaaggccattctcttgataaatttgtacatcagaccgggtcaccagctatgatgcagaacgccagatttttgaatctcaagtaactttctgtgctgctggacaaattgacttaattctgtgcaggcaaacactttgaatcataaggatttttattgccactccattcttactactattcatgattcaaacatctacccctgttctgaatcaggatgttgacacttcttggttattttcagatgaacagtaactgctacactcttgaaagcacttaaaagtgcaagcatgtcctaaatagccatttaacctggtaaaacataggcttttctgtttaattaagtattagaccagtctgtagatataatctgaaaagattttaggcagtaatgaagacagttggggaaaggagaaggccctttaaagacatgaaaccttacacgctcttgggatatttttaagcataataagctcattggattcaggtatttttccctttgcatttttaaaaatacgtatttctaatttgtttgcatatttaattttgtcaaagctgagaaatgctcatgagttgaatttataaatgtcatttgcaaccaaatgaagtatttatttttaaaaagagagtgaaggaaccaacactgatttgtacataataaaaatgtgtgtattatatatatatattttttcctccttgacagtacttggtcacaatatcaagtgtatttttgtacataatatatattgattagaaaaacgtcaattgtctattcaaaaaattctatctctgtgatagattatatttatcctaatctgttgatacctctgttaatttgttttaagagatagaattatattttttggaatttacagagaattgcattcatggctttcaattgtaaatatgctaagagtattttaataaatcttggtttcatgtcaaaaaaaaaaaaaaaaaa

SEQ ID NO: 26644 - DNA, 1871 bp, Homo Sapiens
cgcgtgaacgcagctcggctgccgctggcaggaaacaattctgcaaaaataatcatactcagcctggcaattgtctgcccctaggtctgtcgctcagccgccgtccacactcgctgcagggggggggggcacagaatttaccgcggcaagaacatccctcccagccagcagattacaatgctgcaaactaaggatctcatctggactttgtttttcctgggaactgcagtttctctgcaggtggatattgttcccagccagggggagatcagcgttggagagtccaaattcttcttatgccaagtggcaggagatgccaaagataaagacatctcctggttctcccccaatggagaaaagctcaccccaaaccagcagcggatctcagtggtgtggaatgatgattcctcctccaccctcaccatctataacgccaacatcgacgacgccggcatttacaagtgtgtggttacaggcgaggatggcagtgagtcagaggccaccgtcaacgtgaagatctttcagaagctcatgttcaagaatgcgccaaccccacaggagttccgggagggggaagatgccgtgattgtgtgtgatgtggtcagctccctcccaccaaccatcatctggaaacacaaaggccgagatgtcatcctgaaaaaagatgtccgattcatagtcctgtccaacaactacctgcagatccggggcatcaagaaaacagatgagggcacttatcgctgtgagggcagaatcctggcacggggggagatcaacttcaaggacattcaggtcattgtgaatgtgccacctaccatccaggccaggcagaatattgtgaatgccaccgccaacctcggccagtccgtcaccctggtgtgcgatgccgaaggcttcccagagcccaccatgagctggacaaaggatggggaacagatagagcaagaggaagacgatgagaagtacatcttcagcgacgatagttcccagctgaccatcaaaaaggtggataagaacgacgaggctgagtacatctgcattgctgagaacaaggctggcgagcaggatgcgaccatccacctcaaagtctttgcaaaacccaaaatcacatatgtagagaaccagactgccatggaattagaggagcaggtcactcttacctgtgaagcctccggagaccccattccctccatcacctggaggacttctacccggaacatcagcagcgaagaaaaggcttcgtggactcgaccagagaagcaagaggtatagcttacctgaccactagccagtctttagttttgaaagcattacagtttaactcaccattgcagtttaataaccagacatgctaaactaattagtaatttagctaaagaataggtcgatagtggtagacattacttagcaatagtatcattttaggatgagcaagcaagctgtgttgggagtggatgaacaaatccatattatttcctaaaactggatcttattctcttgctggtgctggtaaaatcacatccaggtaattacaccaatagaaataaattgcccccaattcccaggccaggcattttgaaatggtgaaagttttttgactcacatggttgatgtggctctggaccataaagtcacagagttagtgatctaaaaacccactcctccctttcctttccagctcaactcatcttgttgctcacttattttataatgatcagtcttggtaaattatcacatcacgtttcatctcaaaagcaatgcaaatgacatctctcgttggttttcccaaattgctaaacgtatctctgttacttttatagagcattaaatttatgagattagaaaaaaaaaaaaaaaaaaaaaaaaaaaaa

SEQ ID NO: 26645 - DNA, 1455 bp, Homo Sapiens
ctccactcaagggaattctgtactttgccctttgggtaaagtctcatttacatttctaaacctttcttaagaaaatcgaatttcctttgatctctcttctgaattgcagaaatcagataaaaactacttggtgaaatgacttcttgtcacattgctgaagaacatatacaaaaggttgctatctttggaggaacccatgggaatgagctaaccggagtatttctggttaagcattggctagagaatggcgctgagattcagagaacagggctggaggtaaaaccatttattactaaccccagagcagtgaagaagtgtaccagatatattgactgtgacctgaatcgcatttttgaccttgaaaatcttggcaaaaaaatgtcagaagatttgccatatgaagtgagaagggctcaagaaataaatcatttatttggtccaaaagacagtgaagattcctatgacattatttttgaccttcacaacaccacctctaacatggggtgcactcttattcttgaggattccaggaataactttttaattcagatgtttcattacattaagacttctctggctccactaccctgctacgtttatctgattgagcatccttccctcaaatatgcgaccactcgttccatagccaagtatcctgtgggtatagaagttggtcctcagcctcaaggggttctgagagctgatatcttggatcaaatgagaaaaatgattaaacatgctcttgattttatacatcatttcaatgaaggaaaagaatttcctccctgcgccattgaggtctataaaattatagagaaagttgattacccccgggatgaaaatggagaaattgctgctatcatccatcctaatctgcaggatcaagactggaaaccactgcatcctggggatcccatgtttttaactcttgatgggaagacgatcccactgggcggagactgtaccgtgtaccccgtgtttgtgaatgaggccgcatattacgaaaagaaagaagcttttgcaaagacaactaaactaacgctcaatgcaaaaagtattcgctgctgtttacattagaaatcacttccagcttacatcttacacggtgtcttacaaattctgctagtctgtaagctccttaagagtagggttgtgccttattcaactgcatacatagctcctagcacagtgccttattcggtaggcatctaagcaaatttcttaaattaattaatatatctttaaagatatcatattttatgtatgtagcttattcaaagaagtgtttcctatttctatatagtttattatacatgatacttgggtagctcaacattcttaataaacagcctttgtattcagaatataaaattgaaatagatatatataaagttaaaaaaaaaaaaaaaaaaaaaaaaaaaaaaaaaaaaaaaaaaaaaaaaaaaaaaaaaaaaa

SEQ ID NO: 26646 - DNA, 723 bp, Homo Sapiens
ttctcagtccctgtggaggctaacgcaaagctctgtagaacaagccttagagtgcatgctctatggtctaatgagaaacttgtgtttgtgcttgcacacgtttcaatgttccctacaggatattttacaaaggtatgaaaataatggccaaccagaagctagtatcagtttggggcctaaatgcagcaggtgttcctgataagcagataagcagagctcttcctgcagtagcccaggtctcaccaaatgacaaatggctaatcaagacactcctacaagcccttgatggtgagagctgcagagctgtttcttcagctgccatcaaggcaggacctcaggacctgactgtctacagtcagggaatagtgaacaatatgggatatgggtataggtaggtggtagacaaggatcgtgccccatggctgatgggccgggtgtctcaggcaggccccctgtgcacagaaagagcctaagtgcagagaagccaggcatctttcccctgtcatctgtggaaggggaatgtgatggccacagacaccctcatggcacagacatggccagcctctgacgttcctctgcatcagagtagttctgtcctcgaagccccagtcagcagagctggatgaccagatcgcaagaagcaaaccagaaagtgtgatggcagagatgtcagatcccgtttaataaacacttcagtaaaaaaaaaaaaaaaaaaaaaaaaaa

SEQ ID NO: 26647 - DNA, 1692 bp, Homo Sapiens
cgcggacccgcagcgactccacagggactgcgctcccgtgcccctagcgctcccgcgctgctgctccagccgcccggcagctctgaggatggagaggagggcgcggagctcctccagggagtcccgcgggcgaggcggcaggactccgcacaaggagaacaagagggcaaaggccgagaggagcggcgggggccgcgggcgccaggaggctgggcccgagccgtcgggctccggacgggcggggaccccgggggagccccgagcgcccgccgccacggtggtggacgtggatgaggtccgaggctccggcgaggagggcaccgaggtggtggcgctgttggagagcgagcggcccgaggaaggtaccaaatcctctggcttaggggcctgtgagtggcttcttgtcctcatttccctgctcttcatcatcatgaccttccctttttccatctggttctgcgtaaaggttgtacaagagtatgaaagagtaattatattccgactgggacatctgcttcctggaagagccaaaggccctggtcttttcttttttttgccctgcctggatacctaccacaaggttgaccttcgtctccaaactctggagataccttttcatgaggttgccttggattcagtgacctgtatttggggaatcaaagtggagagaatagaaattaaagatgtgaggttgccagctgggcttcagcactcactggctgtggaggctgaagcgcaaagacaagccaaagtgcggatgattgctgcagaagcggaaaaggctgcttctgagtccctgaggatggcagctgagattctgtcaggcacccctgctgccgttcagcttcgatacctccacacccttcagtctctgtccacagagaagccttccactgtggttttacctttgccatttgacctgctgaattgcctgtcttctcccagcaacagaactcagggaagcctccccttcccaagtccttccaaacctgttgagccactaaatcctaaaaagaaagactctcccatgttataggaaggatggggcataatgtgactgtaaaggggcctgccatagaaaagtcacatgcctgagggagacactctgtcctcattccctgcccttcctttggttgccatatggaatggccatggaatgcacgaagtcacaatgcaccatccatgagaagacagtgaaatgatgtaatgacagagaaggcagacaacatgtttccgtgactcatctagtcagagcaattatgggaaacagctttggtcaacattctactttggaaagaattttgagtctagatgtggttaaattttgacttctgggaacttggttcagatgtccctttcactgtatgtcctctgacccctttggcaaggttgccacagctcccacagcccttcctacaagcacctatcattgggcttgtcacactctattgctcttctgtcccgaagatgcagtcttctctccaatgatactaccaagtcttagttttcctcaaccacactcaatctttttgctccaccctgaattcctcacacctaaccctgatagttacctaaagtgacacttaaatgtttcagagtgaatgcaaaaaagagagatgtacttggagtcggatatacaatttatccctaattaaagcatttaaaaggaaaaaaaaaaaaaaaaaaaaaaaa

SEQ ID NO: 26648 - DNA, 2093 bp, Homo Sapiens
ccgagcccggtggcctcccggcgaccctcagcgcgaggcgacatggcaggcggccacagcctcctgctggagaacgcgcagcaagtggtgttggtgtgcgcccgcggcgagcgcttcctggcgcgggatgcgctgcgcagcctggcggtgctggaaggcgccagtctggtggtgggcaaagatggatttataaaagctattggtcctgctgatgttattcaaagacagttttctggagaaacttttgaagaaataattgactgctctgggaaatgtatcctaccaggtttggtggatgcacacacacatccagtatgggctggtgaaagagttcacgaatttgcaatgaagttggcaggagccacctacatggaaattcaccaggccggaggagggatccactttaccgtggagcgcacgcgccaagccacagaggaggagctgttccgctccttgcagcaacggctccagtgcatgatgagggctggcaccacgctggtggagtgcaagagtggatatggcctcgacctggagaccgagctcaagatgctgcgcgtgattgagcgcgcccggcgggagctggacatcggcatctcggctacctactgcggggctcattcagtgcctaaaggaaaaactgctactgaagctgctgatgacatcatcaataaccacctcccaaagctgaaggaacttggcagaaatggggaaatacacgtggacaatatagacgtattttgtgagaaaggtgtctttgatctcgattccaccagaaggattcttcaacgtggaaaagatatagggttacagattaacttccatggggatgaactccacccgatgaaggctgctgagcttggggctgaactgggagcgcaggcaatcagccacctggaagaagtgagtgatgaaggcatcgttgccatggcaacggccaggtgctctgccatccttctgcccaccacagcctacatgctgagactgaaacaacctcgagccaggaagatgttagatgaaggagtaatagttgctctgggaagtgatttcaaccccaatgcatattgcttttcaatgccaatggtcatgcatctggcctgtgtaaacatgagaatgtccatgcctgaggccttggccgctgccaccatcaatgcagcttatgcactgggaaagtctcacacacacggatcgttggaagttggcaaacagggagatctcattatcatcaattcatcccgatgggagcatttgatttaccagttcggaggccatcatgaattaattgaatatgttatagctaaaggaaaactcatctataaaacatgatagatttgaaaagagaagactttttgactatatgaaataagtcaatatagttatattaaaagttaaaacaccttaatatttacaagaattatatcacttaaacctaaatgtacttcaatgtctttttaagtcactcaaaaacccaagggatagatttattttcatttaacacatgcatttgacatataaacaggtaaacctattgtgattaaaatcacaaaacatccaattagttcacaaatattggttacaaatattctgtagattaatatggtggggtatcacaaaaatgcctttgtggggaaaagtaggcttggcttaaaatttccattttgtgtctgtatttcacatctcagtttttaaactatatttagtgaacattgagggatcgaaagaaatctaagtgatacgccccaatgaagctaaaatatagccttctgttaagcaaatagtatttcctttccccaagtagttcattttctagatgcttgtcaaatgaattaatgtcctctgatgaagagtgtccttccgtttctaaggtcttctcaatctcagcaatagagcttcccagcagcgttcaagacacatcatttatacacaggcacaggggccttcctgaaatgggtgcatttttaccaactacaatcatgtaatttttttggaaattttttaaaatttttgattctttacattacaattgggtgaaacacattttacagctctcaataaatgtttgctgtcgctctaaaaaaaaaaaaaaaaaaaaaaaa

SEQ ID NO: 26649 - DNA, 2996 bp, Homo Sapiens
cgcaccccgcgcagcggctgagccgggagccagcgcagcctcggccccgcagctcaagcctcgtccccgccgccgccgccgccgccgccgccgccgcccccggggcatggcctgtctgatggccgctttctcggtcggcaccgccatgaatgccagcagttactctgcagagatgacggagcccaagtcggtgtgtgtctcggtggatgaggtggtgtccagcaacatggaggccactgagacggacctgctgaatggacatctgaaaaaagtagataataacctcacggaagcccagcgcttctcctccttgcctcggagggcagctgtgaacattgaattcagggacctttcctattcggttcctgaaggaccctggtggaggaagaaaggatacaagaccctcctgaaaggaatttccgggaagttcaatagtggtgagttggtggccattatgggtccttccggggccgggaagtccacgctgatgaacatcctggctggatacagggagacgggcatgaagggggccgtcctcatcaacggcctgccccgggacctgcgctgcttccggaaggtgtcctgctacatcatgcaggatgacatgctgctgccgcatctcactgtgcaggaggccatgatggtgtcggcacatctgaagcttcaggagaaggatgaaggcagaagggaaatggtcaaggagatactgacagcgctgggcttgctgtcttgcgccaacacgcggaccgggagcctgtcaggtggtcagcgcaagcgcctggccatcgcgctggagctggtgaacaaccctccagtcatgttcttcgatgagcccaccagcggcctggacagcgcctcctgcttccaggtggtctcgctgatgaaagggctcgctcaagggggtcgctccatcatttgcaccatccaccagcccagcgccaaactcttcgagctgttcgaccagctttacgtcctgagtcaaggacaatgtgtgtaccggggaaaagtctgcaatcttgtgccatatttgagggatttgggtctgaactgcccaacctaccacaacccagcagattttgtcatggaggttgcatccggcgagtacggtgatcagaacagtcggctggtgagagcggttcgggagggcatgtgtgactcagaccacaagagagacctcgggggtgatgccgaggtgaacccttttctttggcaccggccctctgaagaggactcctcgtccatggaaggctgccacagcttctctgccagctgcctcacgcagttctgcatcctcttcaagaggaccttcctcagcatcatgagggactcggtcctgacacacctgcgcatcacctcgcacattgggatcggcctcctcattggcctgctgtacttggggatcgggaacgaagccaagaaggtcttgagcaactccggcttcctcttcttctccatgctgttcctcatgttcgcggccctcatgcctactgttctgacatttcccctggagatgggagtctttcttcgggaacacctgaactactggtacagcctgaaggcctactacctggccaagaccatggcagacgtgccctttcagatcatgttcccagtggcctactgcagcatcgtgtactggatgacgtcgcagccgtccgacgccgtgcgctttgtgctgtttgccgcgctgggcaccatgacctccctggtggcacagtccctgggcctgctgatcggagccgcctccacgtccctgcaggtggccactttcgtgggcccagtgacagccatcccggtgctcctgttctcggggttcttcgtcagcttcgacaccatccccacgtacctacagtggatgtcctacatctcctatgtcaggtatgggttcgaaggggtcatcctctccatctatggcttagaccgggaagatctgcactgtgacatcgacgagacgtgccacttccagaagtcggaggccatcctgcgggagctggacgtggaaaatgccaagctgtacctggacttcatcgtactcgggattttcttcatctccctccgcctcattgcctattttgtcctcaggtacaaaatccgggcagagaggtaaaacacctgaatgccaggaaacaggaagattagacactgtggccgagggcacgtctagaatcgaggaggcaagcctgtgcccgaccgacgacacagagactcttctgatccaacccctagaaccgcgttgggtttgtgggtgtctcgtgctcagccactctgcccagctgggttggatcttctctccattcccctttctagctttaactaggaagatgtaggcagattggtggttttttttttttttaacatacagaattttaaataccacaactggggcagaatttaaagctgcaacacagctggtgatgagaggcttcctcagtccagtcgctccttagcaccaggcaccgtgggtcctggatggggaactgcaagcagcctctcagctgatggctgcgcagtcagatgtctggtggcagagagtccgagcatggagcgattccattttatgactgttgtttttcacattttcatctttctaaggtgtgtctcttttccaatgagaagtcatttttgcaagccaaaagtcgatcaatcgcattcattttaagaaattatacctttttagtacttgctgaagaatgattcagggtaaatcacatactttgtttagagaggcgaggggtttaaccgagtcacccagctggtctcatacatagacagcacttgtgaaggattgaatgcaggttccaggtggagggaagacgtggacaccatctccactgagccatgcagacatttttaaaagctatacaaaaaattgtgagaagacattggccaactctttcaaagtctttctttttccacgtgcttcttattttaagcgaaatatattgtttgtttcttcctaaaaaaaaaaaaaaaaaaaaaaaaaaaaaaaaaaaaaa

SEQ ID NO: 26650 - DNA, 1309 bp, Homo Sapiens
cactcacaggcccacgcagcgaggggggcccctcttctgtgtgcgtctggaaggtcgctgcccagggaggaaatgcctttaaccggcgtggggccgggcagctgcaggaggcagatcatccgggctctgtgcctcttgctacttctcctccacgccggctctgccaagaatatctggaaacgggcattgcctgcgaggctggccgagaaatcccgtgccgaggaggcgggcgcgcccggcggcccccggcagccccgagcagaccgctgcccgccgcctccgcggacgctgccccccggcgcctgccaggccgcgcgctgtcaggcggactccgagtgcccgcggcaccggcgctgctgctacaacggatgcgcctacgcctgcctagaagctgtgccgcccccgccagtcttagactggctggtgcagccgaaacctcgatggcttggtggcaatggctggctcctggatggccctgaggaggtgttacaagcagaggcgtgcagcaccacggaggatggggccgaacccctgctctgtccctcgggctatgagtgccacatcctgagcccaggtgacgtggccgaaggtatccccaaccgtgggcagtgcgtcaagcagcgccggcaagcagatgggcgaatcctacgacacaaactttacaaagaatatccagaaggtgactcaaagaatgtggcagaacctggaaggggacaacagaagcactttcagtaaagcaacggcaagcagctaggttgcaagaacattcctctactttctgctaagccttggaaacagttgggaaaagtagtttgaccctcacagttcacattcagctcagcagagcaagaccccagagatgcttagagacaggacacctggccatcaaacccagtttggcccagcctggttgggtgactttgtgggagccacttaacagctctgggtccctgttttaccatcctgggagcaaggccctgcagctccacgagacctttaccccgggaagaagccgccgcccatgaaagcatttctgaagcccctttctaagacaaggctcagcatcttgatatttttgacagattcctcccaagtctggctctgggaggtatgtacccatctcaaatgttcccaagataaattcatccatcaggaaatggaaatgaacttgcttactaatgtgtgattcctagttgtagccaccggatgtgctgaggcctaaatgttagcaggtgggaggaggccacagaacaataaaaacaaccaaataaaaaaaaaaaaaaaaaaaaaaaaaaaaaaaaaaaaaaaa

SEQ ID NO: 26651 - DNA, 2298 bp, Homo Sapiens
cggttctgccctccttgtacccgcggcgcgctgcggcccgtggcgcggccccgttcccgcctagccccgtcggcctccttcccctcccggagccgcgcgtgaggacggctgaggccgcaggagtgatttggagaacaatgcatgtaagtctgacatcatgatgtccatccggcaaagaagagaaataagagccacagaagtttctgaagactttccagcccaagaagaaaatgtgaagttggaaaataaattgccatctggttgtaccagtagaagattatggaagattttgtcattgacaattggtggaaccattgccctttgcattggacttcttacatctgtctaccttgccacgttacatgaaaatgatttatggttttctaatattaaggtatggagtttctttgaccattgtatcattcactcagtgggatctccagtagtaagccatgtggatgaatgaccaaggcaacacagttttgccataaagaatccaatctctagaaaggttggactatagagtgaaataacttttgtgtttattattttaaaataacatattagaatctttttttaaatttttctttattatttatttatttttgagatggagtctcactctgtcacccaggctggagtgcggtggcgcaatcttggctcactacaacctctgcctcgcaggttcaggtgattcttctggcttagcctcccaagtagctgggactataggtgcgtgccaccacacccagctaatttttgtatttttactagagacggggtttcagcatattgaccaggctgatctcggactcctgaccttgtgatctgcctgtctcagcctcccaaagtgctgggattacaggcgtgagccactgcgtccagccagaatctttatttttcattttaattttttgagatagggtattgctctgtcgcccaggctggaatgcagtggtgcaaacatgggtcgctgcagcctcaacctcctgggctcaagtgagtatcctgcctaagcttcctgtgtcactgggaccccaggcatgcaccacctcaccaagctaaatttgatttttttgtagagacagggtctcactttgttgcccatgctggtctcgaactcctgggctcaagcgatcctactgccctggtcttccaaaatatgagaatgagccatagcacccagcccagaatttttataatcaagtgagttttttctttttcattaacttattccatttatttagcagttattctaaattagtatttttcaagttatagattgtgaaattagtgcagtaggtcatgagtaacatttttcttaatgaaatcaaaaagaaagaatactatcacatctagtagggttgaggattgttttgtgaaacttttaattttatatatatatatatatgcacaaactgggtcacagtatacaaggtacttccttttcttttttttcttgttggctacaacaggaaaaaaaaaaaaacagaaaaggaaataaaaaagccactgctttaaatcatggggtctaaatgtggctccacagagggtcctcagcatgttcatgactatctaatactctgtgcaagtggttttgcagggcatagggcgatggggaagccatatgtttccagggaaaggaactgtaattttaatcagattttcaggagggttagccgggcgtcacgcctgtaatcccagcactttgggaggtcgaggcgggcagatcacttgaagtcaggagttcaagaccagcctggccaacatggtggaaccctatctctactaaaaatacaaaaattagccgggcatggtgacacacacctgtaatctcagctactcaggaggctgaggcacaagaatcacttgaactcgggaggaagaggttgcagtgagctgagatcccaccactgcactccagcctgggcgacagagcaatactctttatcaaaaaaaaaaagaaaaaagttgagggggtggtctgtgactctttaaacacgtttccttgttttctttctctctctctttttcaacatttctagaactcctcttggcattgttttcagaactcgtatataacttacatgtggaaatttgcatccaaatataccttacattttaatctaatatgtcatgatctttaacctaaactgtggtgtctaatgactagttgcttgtaaaaataaacaaacaccttcaaagccaaaaaaaaaaaaaaaaaaaaaaaaaaaaaaaaaaaaaaaaaaaaaaaaaaaaaaaaaaaaaaaaaaaaaaaaaaaaaaaaaaaaaaaaaaa

SEQ ID NO: 26652 - DNA, 2499 bp, Homo Sapiens
tcctgaatcacacttggctccccctgcctggaacgcttttttcctgcacacccctcccccgcgcctcttcattcttaggggcctaccagacctccacttcagccacacctcttcaggaagctttccctcatccccgcacccccgccccacataccaagcgtgacggccttggctctccctaagtcggagtgccttgggggggacccgtgggttgttccccgttgtctccctgtggggggtgcacagtacatgccttagggtcgtggaaaggctgacttctgggcggcaggtggctctggaggacgtcttcccagggatcccgagggagggaagaatggggcacagccacagtgactctccccctgcctttcagctacgtgtgggagcacctggacgtgggctatgtgcagggcatgtgcgatctgctggcgcctctcctggtcaccctcgacaatgatcagctggcctacagctgcttcagccacctcatgaagaggatgagccagaacttccccaacgggggtgccatggacacccactttgccaacatgcgctccctcatccagatcctggactcagagctgtttgagctgatgcatcagaatggagactacacccacttctacttctgttatcgctggttcctgctggattttaagagagaactgctgtatgaggatgtgtttgctgtgtgggaggtgatctgggcagccaggcacatctcatcggagcactttgtcctgttcatcgccctcgccctggtggaggcctaccgagagatcatccgtgacaacaacatggacttcactgacatcatcaagtttttcaatgaacgtgctgagcatcacgatgcccaggagatcctgcggattgcccgggacctcgtccacaaggtgcagatgctcatagagaacaagtgagctggggccaggaggcagcagccgtgcagagcctgggctccggcagggagaggtgcaggggagtcaccgcccagacctccccagccaccaaccgaccccacctctgttcctaacaaagcggttgtgagcctggatccgactcccggcagtgctgaccctgcagggcaagtcaggggccaggatgccctcggatcagggccgggatgggaggggtcagcctcagggagcagctgccttgggggacacacctactctgctcccctctcacacatctgggagtagccccactgccacctgcagccgcagcctggactgctgcccacgagtgaacctggggccccacaggattaacaggggctatagcggcctgggccctactcagctggggtggcagagggcgagaggctctgtgctgtgtcccttctgagggtccctttgcagtcccagtatattgtgcgtgcaccagccccagctggagcaaccaaaactgcttctggtttaggcacacgtcacgggtgcgggagacccgggcacgggagacccgggccgccttcaggccgctcccccgagattctggggcagtcggaagatgtgggccctgggtgggagcagcccacttcagcagcactgccactgcctttggccacctgaggtgacccccaggcctccccggccttgtacagtgtacctctgtgtatctgtacagcctcgctcctgccaccccacccttgcgttctgcattaggtacttccctgaaaaccacgtgtaagaagtgatgcttttgccagtggatgatctggaatgcgaccggagcacttgctctgaggaatcccagggtgactctgtcggggaagaatccggtcacagcctcccctcagagacaggcctcagttcgagggcagcccattatctgtcgcagacatctgccgtgtccctgagactgcgggaggcaggggatgcatgggtgtccccatctgtccctggtgagaagcaaggctagctctgccttccacatgcttctcaggatgccaagaggcctaggaacccagaaacccccttggaggagctgtgtatgcgggggtgccaggaagggcatagctcctgcccccaggcctaggcatgctgcttgctcggccatccccacttcctcctctaccccaacacatgcaggctaggccttgccctggaacgtggaggccctgcccggggctggggcctagtccagcagccaccaaagtctggcagactttctgcatttgagaaacatgacaaagggccccgcagcccttctgcacccagcacagcctgcccagcccagccctgcccccgggcactgcacagcctgtctgggggccagaccaccccattgtccatccttgttgtccgtgagtccttggcctccaccaagcacgtgtggccattgtgtgcctgccttagtgactccgtggttttgtgaggagcagagtgtgtatgatttttgcctcagaaactatactcttctgtgtaacagaccaataaacaacatttgtcaacaaaaaaaaaaaaaaaaaaaaaaaaaaaaaaaaaaaaaaaaaaaaaa

SEQ ID NO: 26653 - DNA, 999 bp, Homo Sapiens
ggggccatcagcctcgctatcacctccacccccaagtgcttggctccccaagggacagctctaaaatccccagaatctcaggctggtgggtccagctgagcatcctagttttcactttctcctcccaaaaaggaaagaaccttggtcactaaattctacgccttctggaaatcactctgctaatgacttcctgaatgatcgactgagaccaacagctggcccagccctgcatggaggagtaagaaaccctcatctgtcagagttaaggggcctgaatgggtacaggtcacattcttggagctcaaggtgacaggccagagcccaggtccccaggacagtgcagcaccttgtccaggcgggcctcccgtttctggctccgggctgagcttcctggagaagaggaaggttcatctgaattgcagaaactggaagcagagagcccagttaggagctactacaactatccaggcaagaaagacagtggcttggatggggatgtggtattgaaagtggagactagcagaggtacttggaaatgtacatcttatagctaccaagacttgctgctggtgtgaatgttcaggtaaaagagagagaaatcaagaatggctctaggctgggtgcagtgactcatgcctgtaatctcagcactttgagaaccgaggcggatggatcacttgagctcaagagttcgagaccaaccagtctgggcaacacagcaagactctgtctctccacccctcaaaaaaaagaaaaaaggaaaggcatgactctgagggtaaattctaggaaggcatgtggggtgggaaatggggccagcggtgtgattaaagaatgtacatggtagtagagggatgcagatttagataatattgaaaggccaggacttggacttctgggaatgggaaacatgatagaattatctgtaattttccagaatcaatgactagttgttttttttaaaaaaaaaaaaaaaaaaaaaaaaaaaaaaaaaaaaaa

SEQ ID NO: 26654 - DNA, 2111 bp, Homo Sapiens
catccaggcacctctcagcacagcagagctttccagaggaagcctcaccaagcctctgcaatgaggttcttctgtgcacgttgctgcagctttgggcctgagatgccagctgtccagctgctgcttctggcctgcctggtgtgggatgtgggggccaggacagctcagctcaggaaggccaatgaccagagtggccgatgccagtataccttcagtgtggccagtcccaatgaatccagctgcccagagcagagccaggccatgtcagtcatccataacttacagagagacagcagcacccaacgcttagacctggaggccaccaaagctcgactcagctccctggagagcctcctccaccaattgaccttggaccaggctgccaggccccaggagacccaggaggggctgcagagggagctgggcaccctgaggcgggagcgggaccagctggaaacccaaaccagagagttggagactgcctacagcaacctcctccgagacaagtcagttctggaggaagagaagaagcgactaaggcaagaaaatgagaatctggccaggaggttggaaagcagcagccaggaggtagcaaggctgagaaggggccagtgtccccagacccgagacactgctcgggctgtgccaccaggctccagagaagtttctacgtggaatttggacactttggccttccaggaactgaagtccgagctaactgaagttcctgcttcccgaattttgaaggagagcccatctggctatctcaggagtggagagggagacaccggatgtggagaactagtttgggtaggagagcctctcacgctgagaacagcagaaacaattactggcaagtatggtgtgtggatgcgagaccccaagcccacctacccctacacccaggagaccacgtggagaatcgacacagttggcacggatgtccgccaggtttttgagtatgacctcatcagccagtttatgcagggctacccttctaaggttcacatactgcctaggccactggaaagcacgggtgctgtggtgtactcggggagcctctatttccagggcgctgagtccagaactgtcataagatatgagctgaataccgagacagtgaaggctgagaaggaaatccctggagctggctaccacggacagttcccgtattcttggggtggctacacggacattgacttggctgtggatgaagcaggcctctgggtcatttacagcaccgatgaggccaaaggtgccattgtcctctccaaactgaacccagagaatctggaactcgaacaaacctgggagacaaacatccgtaagcagtcagtcgccaatgccttcatcatctgtggcaccttgtacaccgtcagcagctacacctcagcagatgctaccgtcaactttgcttatgacacaggcacaggtatcagcaagaccctgaccatcccattcaagaaccgctataagtacagcagcatgattgactacaaccccctggagaagaagctctttgcctgggacaacttgaacatggtcacttatgacatcaagctctccaagatgtgaaaagcctccaagctgtacaggcaatggcagaaggagatgctcagggctcctggggggagcaggctgaagggagagccagccagccagggcccaggcagctttgactgctttccaagttttcattaatccagaaggatgaacatggtcaccatctaactattcaggaattgtagtctgagggcgtagacaatttcatataataaatatcctttatcttctgtcagcatttatgggatgtttaatgacatagttcaagttttcttgtgatttggggcaaaagctgtaaggcataatagtttcttcctgaaaaccattgctcttgcatgttacatggttaccacaagccacaataaaaagcataacttctaaaggaagcagaatagctcctctggccagcatcgaatataagtaagatgcatttactacagttggcttctaatgcttcagatagaatacagttgggtctcacataaccctttacattgtgaaataaaattttcttacccaaaaaaaaaaaaaaaaaaaaaaaaaaaaaa

SEQ ID NO: 26655 - DNA, 3251 bp, Homo Sapiens
ccgggggccaagggctccggctgctgcctggcggccaacgggccaggtaggatttccgggagaggctgctgtggaggctgaggaggcggcggcggagatctggaaacagtatctcacctccctaaactggttaatagtggcatggaagatccatttgaggaagcagaccagcccactacagagccaggcatggtcctggacagtgtggaagcaggagacacaacacctcctaccaaaaggaagagcaagttctcaggctttggcaagatcttcaagccctggaaatggaggaaaaaaaaaagtagtgataaatttaaagagacttcagaagttttagaacggaaaatatctatgcgaaagccaagagaagagctggttaaaagaggggttctgttggaagaccctgagcaaggtggtgaggatccaggaaagccaagcgatgccatgttaaagaatggccataccacccccatagggaatgccagatcatctagtccagtccaagtagaggaagagccagtaagattagcaagtcttaggaaagctattccagaagaggacctaaagaaacgactaggctcaactggaagccagcctaattctgaagcagagtctgttcctgagaatgtacccaaaccacctttacttcctcccaaaagacccttgtcctcttctcatgaagcaagtgaagggcaagcaaaggatgccacttcctctggcggcacggcaaggttcatcatctccacctccatcaccacagcacccgctgccaccactgctgccacaagccttgcaaagactgttaatctctctgtcaccccttccccagcacccaggactctgcctgctgctcctgccagcactaacactactgctaccccaagcctcactcatatggtccctgccaagcagccccctatccctccccctaaaccagctcacagaaatagcaaccctgtcattgctgaactgtcccaagcaataaacagtggtacattgttatcaaaaccgtccccacccttaccacctaagagaggcattccatcaacctcagtacccaccttggagtctgctgctgccatcaccacaaaaacaccaagtgatgaaagagagaagagcacgtgttctatgggctcggaactactaccaatgatctcacctcgctctccgtcccccccactgcctactcatatacctccagagcctccacgcacccctccattccctgctaagacttttcaagttgtgccagaaattgagtttccaccatccttagatctacaccaggagattccccagcaggaagatcagaaaaaggaagtccccaagaggatactggaccagaactttggggagccccatataccctctaggctgcctccactcccactgcatattcgaatccagcaggccctcaccagcccacttcccatgactcctattctggagggttctcacagagctcattcgttgctttttgaaaacagtgacagcttttctgaggacagcagtacgctgggtcggaccaggtctcttcccatcactattgaaatgctaaaagttccagacgatgaagaagaagaggagcaaacctgtccatccacattcagtgaagaaatgacacctacctcagtcattcctaaattaccacagtgtctacgggaggaagaagagaaggagagcgactctgattcagaaggtcccattcagtaccgagatgaagaagatgaagatgaaagctatcagagtgctctcgccaacaaagtgaagaggaaagacacactggcaatgaagttgaaccacagacccagtgaaccagagttgaacctgaattcttggccttgtaaaagcaaggaggagtggaatgaaatacggcaccagattggaaacacactgatccggcgactgagtcaaagaccaacaccagaagaactagaacaacgcaatatattgcaacctaaaaatgaagctgatcgtcaggcagaaaaacgagaaattaaacgtcggctcactagaaagctcagtcaaaggccaactgtcgctgaactccttgccaggaagattctgaggtttaatgaatatgtagaggtaacagatgctcaagattatgaccggcgagccgacaaaccttggaccaaactgacccctgctgacaaggctgccataagaaaagaattaaatgaatttaaaagctccgagatggaggttcatgaagagagcaaacattttacacgctaccatcgtccatgatgccaaaggttgagagaggaatcaacatggctgctttgctgcttccttctccaaagtgacatatggagggaactttagcacttcccagcacagccagaattgcatcctctgggatcttctgaggtggacagcactttgaatgtagcatttcactggaacagagtcttatgtgctgcaccgggggcaaaacaacactttgtcagtgcttttgaacctttcaatattgtagcatgcttgaggagtttttcccctactggccaccaaagttctgaaccacttgcaggttccaggttttactggctgcaccacaccccttcccctagatgactgcctgtgcagagacacagtttgcaccattagccttacctgccctgccctgattgtgagacccaaatgtgtaggctctaaattccagccatcaaatccaattcctggtggggaaaaccttctggagacccccaaccttctgataaaagagtctctacctccagggaaagccttcttaccacactggcatatcagatgaaagcattgcactgtacctctcgtaacacagcaatacagtcctcttgaggcactcaagcctgagaggaagctcaggatctgacatgttcttccttttcctcacaagtcatcatgattttttattttaaaataatctggaagtaatgggaacttagtttttcctgaactccaaccagaatccaaattggttagatgaggccaggcgcggtggctcacgcctgtaatcccagcactttgggaggccgaggtgggtggatcacctgaggtcaggagttcaagaccagcctggccaacatggtgaaaccccatctctactaaaaatacaaaaattagccaggtgtggtggcgcctggttgaggcatgagaatcgcttgaacccaggaggtggaggttgcagtgagccaagatcatgcctactgcactccagcctgggcaacaaagtgggactctgtcttaaaaaaaaaaaaaaaaaaaag

SEQ ID NO: 26656 - DNA, 2420 bp, Homo Sapiens
cgccgcggcagccccgggccccggctcggaggctcccggcggagaggaggcggcccgcccgggcccgggaccccgcgcgagtcggcgcccggccgaggggctgcgtaggccccgcccggccaggcccagccgggccctggacagagacagggcagggcattgttcatgcactgaccgacctcagcagccccggcatgacctcagggaacggaaactctgcctccagcatcgccggcactgccccccagaatggtgagaataaaccaccacaggccattgtgaaaccccaaatcctgacgcatgttatcgaagggtttgtgatccaggagggggcggagcctttcccggtgggacgctcgtccctgctggtggggaatctcaagaagaagtatgcacaggggttcctgcctgagaaacttccacagcaggatcacaccaccaccactgactcggagatggaggagccctatctgcaagaatccaaagaggagggtgctcccctcaaactcaagtgtgagctctgtggccgggtggactttgcctataagttcaagcgttccaagcgcttctgttccatggcttgtgcaaagaggtacaacgtgggatgcaccaaacgggtgggacttttccactcagaccggagcaagctgcagaaggcaggagctgcgacccacaaccgccgtcgggccagcaaagccagtctgccaccacttaccaaggataccaagaagcagccaacaggcactgtgcccctttcggttactgctgctttgcagctaacacacagccaggaagactccagccgttgctcagataactcaagctatgaggaacccttgtcacccatctcagccagctcatctacttcccgccggcgacaaggccagcgggacctggagctccccgacatgcatatgcgggacctggtgggcatgggacaccacttcctgccaagtgagcccaccaagtggaatgtagaagacgtctacgaattcatccgctctctgccaggctgccaggagatagcagaggaattccgtgcccaggaaatcgacgggcaagccctgctgctgctcaaggaggaccacctgatgagcgccatgaacatcaagctggggcccgccctgaagatctacgcccgcatcagcatgctcaaggactcctagggctggtggcagccaggattctggcccagggcgcctcctcccgactgagcagagccagacagacattcctgaggggcccagaaatggggccggttggagggcaggggctctccctaggggcatagctggtgaggaggtctgggcacctcctccatggctctcaggggcctttcatttctgtgggaggggcagagaggtaggtggcacagaagatggggctttatgcttgtaaatattgatagcactggcttcctccaaagtcccaatactctagccccgctctcttcccctctttctgtcccccattttccagggggtatatggtcagggctccccaacctgagttgggttacttcaagggcagccagcaggcctggatggaggcctagaaagcccttgccttccttcctcccacttctttctccaggcctggttaactcttccgttgtcagcttctcccccttcagcctgtttctgcagcagccagggttctcccccctacaccctctgcaggtggagagagagaagctgggcccagccgggccgtgcctgctggcacagacgccttaacgctgtgtgtatgactgtgtgactgtgtgggagcctggactgacagataggccaagggctactctctggcatctccaggtgttttgtagcaaacagccacttagtgctttgtcctggactccactcagcctcaggatggggaatagccaagaatggcagcctcagcgcagaggcaaggtcagaaagagacggcgcttcagagtttcctttccagacacccctccccgcactgtgaagttcccctgaccgccctcctggttcacaaagagcattaagaaagctgcggtggtctgagcaacatagcccaaagggctgagcctcctggcctgcctgcccgcccaccctgggagtcccagtggtgaggctcagagaactgctaaggggaaagaacagctggagtttctgttgatgtgaagaaggcagctcttggcctcccactcccacacttctttgcctataaatcttcctagcagcaatttgagctacctgaggaggaggcagggcagaaagggcgagggcctgcctctgacctgccgtgtcctttgcaggaaggaggtaggcacctttctgagcttattctattccccacccacacccccaggcagggttggaaatgaaggacttttttaacctttgttttgttttttaaaaataaatctgtaaaatctgaaaaaaaaaaaaaaa

SEQ ID NO: 26657 - DNA, 2371 bp, Homo Sapiens
ccaagcgcgcggggcaaggcggccctgcaggggtgagctttcctctgagaacccggggccttagcgacacgtaatccagttttccgtctccttggtgcagatgaagaaaccgacgcccatgggcgaaagggacctgctcaagttcactcagtaagtcaggagataagccagaatgcgtatctgactccagtctcaatgtctaccccttcacaaaacggtagcctccagggtagtcctcagcaaagcgttggcaccttactgaatctgtttttccatctgagaaatgggccaacggaaaaatcaaacttccattctggggaagtcgagaaccgggactccctaggaagggcagtgctttggcctcatgttctgtgctctgacagagagctgcactagagacaagtttatccatgaacacattgctctgtaaaggaatgttttgcctactcagctgggaggccgacagcagaggcagacttggggagtacactctgcagcccctgtccctgcagactgaagagaccacagagctgggcagcaagaaggagctcaagtccatgcccttcatcacctacctctcaggtttgctgacagcccagatgctgtcagatgaccagctcatttcaggtgtggagattcgctgtgaggagaaggggcgctgtccatctacctgtcacctttgccgccggccaggcaaggagcagctgagccccacaccagtgctgctggaaatcaaccgtgtggtgccactttataccctcatccaagacaatggcacaaaggaggccttcaagagtgcactgatgagttcctactggtgctcagggaaaggggatgtgatcgatgactggtgcaggtgtgacctcagcgcctttgatgccaatgggctccccaactgcagcccccttctgcagccggtgctgcggctgtccccaacagtggagccctccagtactgtggtctccttggagtgggtggatgttcagccagctattgggaccaaggtctccgactatattctgcagcataagaaagtggatgaatacacagacactgacctgtacacaggagaattcctgagttttgctgatgacttactctctggcctgggcacatcttgtgtagcagctggtcgaagccatggagaggtccctgaagtcagtatctactcagtcatcttcaagtgtctggagcccgacggtctctacaagttcactctgtatgctgtggatacacgagggaggcactcagagctaagcacggtgaccctgaggacggcctgtccactggtagatgacaacaaggcagaagaaatagctgacaagatctacaatctgtacaatgggtacacaagtggaaaggagcagcagatggcctacaacacactgatggaggtctcagcctcgatgctgttccgagtccagcaccactacaactctcactatgaaaagtttggcgacttcgtctggagaagtgaggatgagctggggcccaggaaggcccacctgattctacggcgactggagagggtgagtagccactgctccagcctcctgcggagtgcctacatccagagccgcgtggaaacagtgccctatcttttctgccgcagcgaggaggtccggcctgcaggcatggtgtggtatagcatcctcaaggacaccaaaatcatgtgtgaggagaagatggtgtcaatggcccgaaacacgtacggggagtccaagggccggtgagggagggtattgccctccgtgagcacagagactctccatgggagggggagcagtattctcctggatcctggggcctgggtgggctgggggacagctgaggatgggcctagcagatgaagcttgccagcaaggccaaagcaaacggtttctcctgtggatagtggacagagacctttgtaaccaatggaattattcatttttctctatcttttattttttcaaagatattatttgactctatcaaaagtctctcctttttaaaccttttcttatggatggctgtcaatcccaaggcagaagttttcaggtggagaccaagcggcctttgctcttcttccttcttcctgccacactctgctttcttcctgccatggacccctggaggagacctatggagggacagttttgacctgacccctagaggagacagttttgacctcttcagcaccaggaaggaagctctgaggatggttgcagtgaggaagcatgggtctttaaggacttctctctcttttttgctggacattattgagtttgtgggaccctgcctcttcctgctacctgtgggtctgcccagagtccctgcaggcctgtccatgcattaaaaattcctattgtctctcaaaaaaaaaaaaaaa

SEQ ID NO: 26658 - DNA, 2225 bp, Homo Sapiens
ggcgcagccaatcctggccctaggattgtgttggggggcttggcaggcggtgtcccgacccccctttctgggcatcctggggatgaccccagcgccgggcccggcgccggccgcctgatgccaggcgagctgagctggggatgctggaacgaagggcgttgctatggcaacgggaggcagggcctggttggggggaccgggcccgggctgggaccgggggggccggcggtggctgtggtggggcgatggcggagcgcggcccggccttctgcggcctgtacgacacgtcctcgctgctgcgatactgcaacgatgacaatttgtcgggcacgagcggtatggaagtggacgaccgcgtgtcggcgctggagcagcggctgcagttacaggaagacgagctggcggtcctaaaggcggcgctggcggatgctctgcgtcgcctgcgggcatgcgaagaacagggagcggcgctacgcgcgcggggcacccccaagggccgggcgcctccgcgcttaggcaccactgcctcggtgtgtcagctcttgaaaggccttcccaccaggacgccccttaatggctcgggacccccgcggcgcgtgggtggctatgccacgtccccatcctctcccaagaaggaggcgacctccgggcgcagcagtgtccgccgctacttgtcaccagagcgcctcgcctcggtgcgccgtgaggacccccgcagccggaccacatcctccagcagcaactgtagcgccaaaaaggaaggcaaaaccaaagaagttatcttcagtgtggaggatggctccttgaaaatgttcctgaggggccgccctgtgcccatgatgatcccagacgagctggcacccacctacagcctggacacacgctcggagctgccttcttgccggctcaagctggagtgggtctatggctaccgtggccgagactgccgggccaacctttatttgctgcccaccggggagatagtgtactttgtggcctccgtagccgtgctatacagcgtggaggagcagaggcagcgacactacctgggacacaacgatgacatcaaatgcttggccatccacccagatatggtcaccatcgccacgggacaggtggcgggaaccactaaggaagggaagccgctgccgccccacgtgcgcatctgggactcagtttccctctccaccttacacgtgctgggcttgggggtgtttgacagagccgtgtgctgtgtgggcttctccaaatctaatggaggcaacctgctgtgtgcagtggatgaatccaatgatcacatgctctcggtgtgggactgggccaaggagaccaaggtggtggatgtcaagtgctccaatgaggctgtattggtggccaccttccaccccacggaccccactgtgcttatcacctgcgggaaatctcacatctacttctggaccttggaggggggcagcttgagcaagcggcaaggcctctttgagaaacatgagaaaccgaagtatgtgctgtgtgtgacctttttggaaggtggcgacgtggtcacgggggactctggggggaacctctatgtttggggcaaaggtgggaaccgtatcacacaggcggtgctgggcgcccacgacggcggcgtgtttgggctctgcgccctgcgggacgggacgctggtgtctggagggggccgtgatcggcgggtggtcctctggggttctgactacagcaagctgcaggaagtggaggtccctgaggactttggccctgtgcgcaccgtggcagagggccacggagacacactgtacgtggggaccacccgcaattccatcctgcagggctccgtgcacacaggcttctcactgctggtccagggccatgtggaagagctgtggggcctggccacacaccccagtcgggcccagtttgtgacctgcgggcaggataagctggtgcatctatggagctcagattcccaccagcccctgtggagcaggatcatcgaggaccctgcccgctcagccggcttccaccccagtggctctgtcctggctgtgggtacagtgactggcagatggctgctgctggacacggagacccatgacctggtggctatccacacagacggcaatgaacagatctcagtggtcagcttctccccagacggggcgtacctggccgtgggctcccacgacaacttggtgtacgtgtacacggtggaccagggcggccgc

SEQ ID NO: 26659 - DNA, 1431 bp, Homo Sapiens
gttgttgagagtgtgggaaaaatagagattgttctacaaaaaaaagagaatacttcttgggactttcttggccatcccctgaagaatcataattcacttattccaaggaaagatacaggtttgtactacagaaagtgccagttaatttccaaggaagatgttactcatgatacgaggcttttctgtttgatgctgccaccaagcactcatcttcaagtgcccattgggcaacatgtttacctcaagctacctattacaggtacagaaatagtaaagccatatacacctgtatctggttccttactctcagagttcaaggaaccagttcttcccaacaataaatacatctactttttgataaaaatctatcccactggactcttcacaccagagcttgatcgtcttcagattggagattttgtttctgtaagcagtcctgagggcaattttaaaatatccaagttccaagaattagaagatctctttttgttggcagctggaacaggcttcacaccaatggttaaaatactgaattatgctttgactgatatacccagtctcaggaaagtgaagctgatgttcttcaataaaacagaagatgatataatttggagaagccaattggagaaattagcatttaaagataaaagactggatgttgaatttgttctctcagcacctatttctgaatggaatggcaaacagggacatatttcaccagctcttctttctgaatttttgaaaagaaatttggacaaatccaaagttctcgtctgcatttgtggaccagtgccatttacagaacaaggagtaaggttgctgcatgatctcaacttttccaaaaatgagatccatagttttacagcataatgaagagctgtcattgtcctttattcaactagtttatctaaatttgtgattgcttagggttttttaagagaacatttttgtacataacaaaaggttaactagaatccagccttcagtttcttaaatgaaatcaaatgttccttcagtacaggtaacttcttggctttcttttgtaccacaacttattttactactgatatttgacctggaaagttaatcatggcaacaaatacatacaggattctttgttatgaatcacaaatttccttgccatttaaattatatcactgttctacaataagcacttgtgttttatgacatgataaagtaaatgatcacttcgatcatgtttctatgctgtaaaatgtcttattagcaatacagattaaattttaccttgcactgttaactcaggaaatgatcatttatgtccttgttattaatgttaaaacatagaatgttataacttattaagtgatccaaacatttttttgtgtgtgtatggcattgatgcagaatagaataaaattatacttaagttctttttaaaaaaaaaaaaaa

SEQ ID NO: 26660 - DNA, 867 bp, Homo Sapiens
aagaattctggttttgtcttactcttccagatgagatatcacagaggcttgggcctagattgtcatcagcatactgctatactattcgtttgttcttattaagccttattgtgtgtaatgctgttactttttcagagtgttgcggagataggaacatgggagagaaacaatctgggtaacatgaaagtgatgctggttgctaagggaaggcaacttgattctgtgggaagggctgtagctgatccatccgttgtctagatttgagtatgagcacagtggaagaggattctgacacagtaacagtagaaactgtgaactctgtgactttgactcaggacacagaagggaatctcattcttcactgccctcagaatgaagcggatgaaatagactcagaagatagtattgaacctccacataaaaggctttgtttgtcctctgaggatgatcagagtattgatgattctactccttgcatatcagttgttgcacttccactttcagaaaatgatcagagctttgaagtgaccatgactgcgaccacagaagtagcagatgatgaggttactgaggggactgtgacacagatacagattttgcagaatgagcaactagatgaaatatctcccttgggtaacgaggaagtttcagcagttagccaagcatggtttacaactaaagaagataaggattctctgactaataaaggacataaatggaagcaggggatgtggtccaaggaagaaattgatattttgatgaacaatattgaacgctatcttaaggcacgcggaataaaagatgctacagaaatcatctttgagatgtcaaaagacgaaaaaaaaaaaaaaaaaaaaaaaaaaaaaa

SEQ ID NO: 26661 - DNA, 1269 bp, Homo Sapiens
gaagagaaaaggatatggaacatactctccgaatccctgaagttggtgtcagtaagtttcatgcagaaatttattttgaccatgacttacaaagttatgtccctgtggatcaaggcagtcaaaatggcacaattgttaatggaaaacagattcttcagccgaaaactaaatgtgacccttacgtacttgagcatggagatgaagtcaaaattggagaaactgtcttatcctttcacattcatcctggcagtgatacctgtgatggctgtgaaccagggcaggttagagcccaccttcgccttgataagaaagatgaatcttttgttggtccaacactaagtaaggaggaaaaagagttggaaagaagaaaagaattaaagaaaatacgagtaaaatatggtttacagaatacagaatacgaagatgaaaagacattgaagaatccaaaatataaagatagagctggaaaacgtagggagcaggttggaagtgaaggaactttccaaagagatgatgctcctgcatctgttcattctgaaattactgatagcaacaaaggtcggaagatgttggagaagatgggttggaagaaaggagagggcctggggaaggatggtggaggaatgaaaacgccgatccagcttcagcttcggcgaacacatgcaggcttggggacaggcaaaccatcctcatttgaagatgttcaccttctccaaaacaagaacaaaaaaaactgggacaaagcacgagagcggtttactgaaaacttcccagaaactaagcctcaaaaagatgacccagggaccatgccttaggtaaaagggactttagagtgaaggctaatcatagaaaaaaaacctctagtttttttaaaaatagaatttggaaacttattttttctccccaaaagaatcagcagcacaggggaactatgtcacagtttacctcttcctgattcagaaatgtgtatggtttgcagcttttaaaaaccatttttttaaaactaataaatagtgactgaaccaatttatgcagtaaatagactaaagttcacagggcacggatgagtttatcaaacttcgttattttatcttgtcatttacaacatccatataagcaactagccatataagcaaaattcatagaactactaatgacttaagtgtacatctgttcttgtctccatatattcatgtaagatgcacaacaaaagaaacatcagaagtttataaaaataggaaaaaaaaaaaaaaaaaaaaaaaaaaaaaa

SEQ ID NO: 26662 - DNA, 1266 bp, Homo Sapiens
gaggagggtggcgagaggtggggtggggcccaggtgagtagcgggcgaaggcggggcctgaggaggactgagctggggcgggacccagcagctgctccaagcttttctgccatttgaagcttcttctgggagccagctgtgaccagaggaatagctccagccatccggttaaaagtttaacaaccggaacagctccagtctgcagctcccagcgtgatcgacgcagaagacaggtgatttctgcatttccgactgaggttttagctaaagaagatactgaggcagctattcaatcaatattatacaaagaaaattctgtaattaagggaaatgcatttatagaacattatgatccaaaagagtatgatcccttttatatgagcaagaaggaccccaattttctgaaggttaccatcccaccatttcatgaccctttgaaaaaagcacaatatgacaaggataatgaaaaaagaactcttcttcagtgtgagactggcaaaatatattcaataaaggaattcaaagaagttgagaaggttcagctgcattccagattcccacaaatttctaattcaaggcactttataactccaaacgagtggctgaaactgcctacaagatacatagaaagtgaattttgtagaaggagaaggttaaaggtgaaagtgaattttaatgactgtagttttgatttgaaacccttggcaagagctccttatcttttggaatcccaggaagaagaaaaaacagttatttacaaaaacaaagggtcatcctttctagaaagagaaccgctgtgctatcaggagggaaataatccaagtgccaaagaggccatctctgaagggtatttttcttccttgagcctcagccaggaacgggaggaagaccaggatgggtctccctccccgcgtttgggactgctgaagctggagctataagaaagaagagggaggtttcagcaaccaaggagcacacaccctgatccttgattggtgaaaggatacacaaaatcaggctgcttcagaggaagtcatctgctcacaggaatcagggtgaaggccaaggacggcactcaagaattgtcctgtctctaaaaaaaaagcatctgcaacgaacttcctttaatttttgagttcagtgtctgtgataattaagaaatggcaataccatgtattttccccagaagttaagaaatattgctgaacgaaccaataaaaataattacagctccctcaaaaaaaaaaaaaaaaaaaaaaaaaaaaa

SEQ ID NO: 26663 - DNA, 1283 bp, Homo Sapiens
atcctgcgtgagttcaaggtcacggatgcccgggatgggcagtcaaggacaatccggcagttccagttcacagactggccagagcagggcgtgcccaagacaggcgagggattcattgacttcatcgggcaggtgcataagaccaaggagcagtttggacaggatgggcctatcacggtgcactgcagtgctggcgtgggccgcaccggggtgttcatcactctgagcatcgtcctggagcgcatgcgctatgagggcgtggtcgacatgtttcagaccgtgaagaccctgcgtacacagcgtcctgccatggtgcagacagaggaccagtatcagctgtgctaccgtgcggccctggagtacctcggcagctttgaccactatgcaacgtaactaccgctcccctctcctccgccacccccgccgtggggctccggaggggacccagctcctctgagccataccgaccatcgtccagccctcctacgcagatgctgtcactggcagagcacagcccacggggatcacagcgtttcaggaacgttgccacaccaatcagagagcctagaacatccctgggcaagtggatggcccagcaggcaggcactgtggcccttctgtccaccagacccacctggagcccgcttcaagctctctgttgcgctcccgcatttctcatgcttcttctcatggggtggggttggggcaaagcctcctttttaatacattaagtggggtagactgagggattttagcctcttccctctgatttttcctttcgcgaatccgtatctgcagaatgggccactgtaggggttggggtttattttgttttgtttttttttttcttgagttcactttggatccttattttgtatgacttctgctgaaggacagaacattgccttcctcgtgcagagctggggctgccagcctgagcggaggctcggccgtgggccgggaggcagtgctgatccggctgctcctccagcccttcagacgagatcctgtttcagctaaatgcagggaaactcaatgtttttttaagttttgttttccctttaaagcctttttttaggccacattgacagtggtgggcggggagaagatagggaacactcatccctggtcgtctatcccagtgtgtgtttaacattcacagcccagaaccacagatgtgtctgggagagcctggcaaggcattcctcatcaccatcgtgtttgcaaaggttaaaacaaaaacaaaaaaccacaaaaaaaaaaaaaaaaaaaaaaaaaaaaaa

SEQ ID NO: 26664 - DNA, 2266 bp, Homo Sapiens
aagatgcagttccacctcccagattccctagttactatctctaagcactgaagtcggtgtttggagaaaaggactccggtgaggactggagcctaacagatgagacagaatataaacaggaagtctctaaggcagtgtggtggaaggataataccatgatggaggaagtgcacagtattatgggagaacatagcagtggcatctgaccaattttaagggaatccaggacagctttcctgaagctgaagaaagagtaaaagccaggcttatcaaagttttggctttgttgcaagagcaggtcaagatttagctgttcttcagtgaacaagtgtgcagattgtcaaatatgtcagttcatcaaataagaaaacatgcagttctcccacctatcatttgtagaagtgacaaggaatttttggaaagtgtgcagagatacataattacagaaactgaaagactgggctgtagtgaggaaggacctgctgatgaatattacatcatataccgaaatgtttttgataaggtaatagagcatatcactgcatacaaatccattcttacttcaatcaaaaaagaatatgatgcctttattgagacaataaagaaagaccgaagaactacattttgtcttcatggaaaacttaaaggtttggcagcagagcctacagctttggtatattacaggaaaagaacaatccaacttgaagcaaaaatgaggattatcgaaagtaattcctcgaagattcaatctcaaatagatcacatcaagcagtgtagggcagagtatgacacaaaagaagtaaaatattgtactttctccaaagatccttcaaaacctattccaggcatgactcttcaagaatccatgaatctagatgctctcactaaatacatgaaacatcttgaagataaatatgcagaaattaaacaagctatgttgataaaatatgtgccagctcagaggaaggctgatttagatgaagaaatgattgtgttattaaaacggcgagatgtagctgaaaatctgaacaaaaaattgcagttttgtcatcaaagactgcagataatttcacaggcacttagttcatgggtaaaatctgatatgagcagcccatttcaagactttgtggagcaaattcagaaaaccaaatatttacaaggtgaccaaggcattgttgaagaactaatggaagatgatccacgcagggcaaaagaagctgaaattatgcttcactacattgaaaggtttaatgagttaatctcacttggtgaatatgaaaaggcagcttgttatgcagcaaacagtcctagaagaattcttcgaaacattggtacaatgaatacatttaaggctgttggaaaaattagaggaaagcctcttccattactcttattttttgaggccctctttatcacaagtcatgcttttccatgtcctgttgatgcagctctaaccctggaaggaatcaaatgtggattatcagaaaaacggttagatttagttaccaattgggttacacaggaaagactgacattttctgaggaggctggggatgtgatttgtgattatggggagcaggatacttataacaaggccaagtgcctggctttagctcagattatctacagtgaatgtggcctgcacaagaaagctattctttgcttgtgtaaacagggtcagactcatagggtcatggagtacatacagcagttgaaggactttactaccgatgacctgttgcagctattaatgtcatgtccccaagttgaattaattcagtgtctcactaaagagttgaatgagaaacaaccatctttatcttttggtcttgctatacttcatctgttctctgtagacatgaaaaaagttggcattaagctacttcaagaaatcaataaaggtgggatagatgcagtagaaagtcttatgataaatgattccttttgctccatagaaaagtggcaagaagtggcaaatatatgttcacagaatggctttgacaaattatctaatgacatcacgtctattcttcgatctcaggctgcagttacagaaatttctgaagaggatgacgcagtcaacctaatggaacatgtgttttggtagttctatatcttaaccagctgagggagcttgtacaacaccttatgtatgctggttgggaaaaactgattttaacgtaactaacttataaataaatctagagtaagaagatctcagaaataaatcacacttttgttatgatgaaaaaaaaaaaaaaaaaaa

SEQ ID NO: 26665 - DNA, 1648 bp, Homo Sapiens
ggtggctgcggcggggcgggaagccatggagccgcgggcgctcgtcacggcgctcagcctcggcctcagcctgtgctccctggggctgctcgtcacggccatcttcaccgaccactggtacgagaccgacccccggcgccacaaggagagctgcgagcgcagccgcgcgggcgccgaccccccggaccagaagaaccgcctgatgccgctgtcgcacctgccgctgcgggactcgcccccgctggggcgccggctgctcccgggcggcccggggcgcgccgaccccgagtcctggcgctcgctcctggggctcggcgggctggacgccgagtgcggccggcccgtcttcgccacctactcgggcctctggaggaagtgctacttcctgggcatcgaccgggacatcgacaccctcatcctgaaaggtattgcgcagcgatgcacggccatcaagtaccacttttctcagcccatccgcttgcgaaacattccttttaatttaaccaagaccatacagcaagatgagtggcacctgcttcatttaagaagaatcactgctggcttcctcggcatggccgtagccgtccttctctgcggctgcattgtggccacagtcagtttcttctgggaggagagcttgacccagcacgtggctggactcctgttcctcatgacagggatattttgcaccatttccctctgtacttatgccgccagtatctcgtatgatttgaaccggctcccaaagctaatttatagcctgcctgctgatgtggaacatggttacagctggtccatcttttgcgcctggtgcagtttaggctttattgtggcagctggaggtctctgcatcgcttatccgtttattagccggaccaagattgcacagctaaagtctggcagagactccacggtatgactgtcctcactgggcctgtccacagtgcgagcgactcctgaggggaacagcgcggagttcaggagtccaagcacaaagcggtcttttacattccaacctgttgcctgccagccctttctggattactgatagaaaatcatgcaaaacctcccaacctttctaaggacaagactactgtggattcaagtgctttaatgactatttatgcgttgactgtgagaatagggagcagtgccatgggacatttctaggtgtagagaaagaagaaactgcaatggaaaaatttgtatgatttccatttatttcagaaagtttgtatgtaacaattacccgagagtcatttctacttgcaaaaggattcgtaacaaagcgagtataattttcttgtcattgtatcatgcttgttaaattttaatgcagcatcttcagaacttgtcctgatggtgtcttattgtgtcagcaccaaatatttgtgcattatttgtggacgttccttgtcacaggaagattcttcttctgttgccttattgtttttttttttttaagtctcttctctgtctttgtactggaatcgaaatcataagataaacagatcaaacgtgcttaagagctaactcgtgacactatgcagtattgtttgaagacctgttgttcaacctctgtctctttatgttaactggatttctgcattaaatgactgcccccttgttaaaaaaaaaaaaaaaaaaa

SEQ ID NO: 26666 - DNA, 1693 bp, Homo Sapiens
ctaggcggcggccgcggcggcggaggcagcagcggcggcggcagtggcggcggcgaaggtggcggcggctcggccagtactcccggccccagccatttcggactgggagcgagcgcggcgcaggcactgaaggcggcggcggggccagaggctcagcggctcccaggcctgctgaaaatgactgaataaacttgtggtagttggagctggtggcgtaggcaagagtgccttgacgatacagctaattcagaatcattttgtggacgaatatgatcgaacaatagaggtgttattaagcagtatgtaaaaagtccttacaatacttaatacattaagaaaacatacaatttcaagaggaaatccccgagtaatacattattgacattttcagcagttctagttatattgagaagagcatctcatggaattggcagaatgaagatggagattaaatgagatgatgtttgtaatatgcttatgacagtatctggcatataagtaagggctcagtaaatgttgactgctgtaattactattaatagtaatatgattacctttagtaaaagttattagtttctttaggttttttgtttactacaatatagtaaacaaaatctatacttggaatgtatatattgttttgttttgatacatggaatatgtctctgtgtcagagtcactgcctgagttggaaaacccatactcgagtatgttaaaaggtgaacacactgaataatttagttattaattataatggaaaaatgacaaacttgatgttctggttaatgaggttatcttatcttgaatgagttagcttttaaattcctcaaaataaaggcatttaataaaccaggaaacacttcattaaaaaaattatgcaagtcagtgtaaaagaagattaaaattccacatgggcaaaggacacacgttggcgataaatatgcagataagaaaaaaaacctatataacattattactcctcaaagaaattggtatgaaaacaataaaaatgtgtagcttatcaaaccaacaaaaatttaaaaatatgaaatccattttaagtaatgataaaatgggtgcactcttagtgctttatagaatagtagtataatgaacctcatgtgtgtaccaacagctctttcatatcttaacatttagcaacatttgatttagctctttcttttttccaagatagaaaagttaatattgttgaagactcctgcattcttttccctagtcttattttcttccctcccataaatgtgttaaaatctctgtgtgtattgttttggttgtatttttacataaaactttacatattatataaaatttaattgaaggtaaaatttattaaattattcttaatatatattgtaatttaaaaattaacagcttcattgtcttgataaaatttatggtatcttaaacatgtgcttgtttttctaagagaacattgaaacatagattttaaaacaaattgttgaaagattaaaaaatctgcctttgcacactgttacattgaaagtggggcatttgtcgtgaacattcatttcaaatatgtagtatcttcagaatatttgagaaggatttgtattatataattgaaaaatctgttaaattgtatttatgttaactgcttaattctaataaaatttccattcattttttagtatctgcaaaaaaaaaaaaaaaa

SEQ ID NO: 26667 - DNA, 724 bp, Homo Sapiens
gcggcgcgaggcgggcgctgcggcgccagcagccctgtggtggcgacgacgatggaccaggagccagtgggcggtgtggaacgaggagaagccgtcgcagcctcgggagctgcggccgccgcggcattcggggaatctgcagggcagatgagtaacgaaagaggctttgaaaatgtagaactgggagtcataggaaaaaagaagaaagtcccaaggagagtcatccactttgttagtggtgaaacaatggaagaatatagcacagatgaagacgaagttgatggcctggagaagaaagatgttttgcctactgttgatccgacaaaacttacctggggtccctacttatggttttacatgcttcgggctgctacatcaactctctcagtgtgtgacttccttggagagaagattgcatctgttttgggtatcagcaccccaaagtaccaatatgccattgatgaatattatcggatgaagaaggaggaagaagaagaagaagaagaaaacaggatgtctgaagaagcagaaaaacaatatcaacagaataaattgcagactgattccattgttcagacagatcaaccagagacagtgatatccagctcatttgtgaatgtcaattttgaaatggagggagacagtgaagtaattatggaaagcaagcaaaatccagtctctgtcccaccataaaatgaaatgactatcaaaaaaaaaaaaaaaa

SEQ ID NO: 26668 - DNA, 2532 bp, Homo Sapiens
ggagtaggttgaagtctcctaagatgcccggtgggctggggcaccgggagctgtgaagggaacgtgagggggcggcgtagtggagacccacggcaggcctgaagaagagcggcggccgagcccgccttccctgcaccatgctcatagaggatgtggatgccctcaagtcctggctggccaagttactggagccgatatgtgatgctgatccttcagccttagccaactatgttgtagcactggtcaagaaggacaaacctgagaaagaattaaaagccttttgtgctgatcaacttgatgtctttttacaaaaagaaacttcaggttttgtggacaaactatttgaaagtctctatactaagaactaccttccacttttggaaccagtaaagcctgagccaaaaccactagtccaagaaaaagaagaaattaaagaagaggtatttcaggagccagcagaggaagaacgagatggcagaaaaaagaaatatcctagtccccagaagactcgttcagaatctagtgaacgaaggacacgtgagaaaaaaagagaagacgggaaatggagagactatgaccggtactatgagcggaatgaattgtaccgtgagaagtatgactggagaagaggcaggagtaagagtcggagtaagagtcgaggcctgagtcgcagtagaagccgaagtagggggcgcagcaaagaccgggatccaaataggaatgttgagcacagggaaagatcgaagtttaagagtgaaaggaatgacctggagagttcctatgtgcctgtgtctgcaccacctccaaactcttctgagcagtattcctctggggcacagtctattcccagcactgttactgtgatcgcacctgctcaccactctgaaaacacaactgagagttggtctaattactataacaatcatagctcttccaattcttttggtcgaaacctaccaccaaagaggcgatgcagagattatgatgaaagaggattttgtgtacttggtgacctttgtcagtttgatcatggaaatgatcccctagttgttgatgaagttgctctgccaagtatgattcctttcccaccccctcctcctgggcttcctcctccaccacctcctggaatgttaatgcctccaatgccaggtccaggcccaggcccgggcccaggtccaggcccaggcccgggcccaggtccaggtcctggccatagtatgagacttcctgttccccaaggacatggtcagcctccaccatccgttgtgcttcccataccaagaccacctataacacaatcaagcttgataaacagccgtgaccagcctgggacaagtgcagtgcccaatcttgcatcagtgggaacaagactacctcctcctttaccccagaacctcctttacacagtatcagaacatacatatgaaccagatggttacaacccagaagctcctagtattactagttctggtagatctcagtacagacagttcttttcaagaactcagacacagcgtcccaatctgattggcctaacatctggagatatggatgtaaatccaagagctgctaacattgtgatccagactgaaccaccagttcctgtttcgattaatagcaacataaccagagtagttcttgaaccagatagtcgaaaaagagctatgagtggtttggaagggccactcacaaagaaaccttggctgggaaagcaaggaaataacaatcaaaataaaccagggttcttacgaaagaatcagtatacaaacaccaaattagaagtcaagaaaatccctcaggaattgaacaacattaccaagctcaatgaacacttcagcaaatttggaactattgttaatatccaggttgcttttaagggtgacccagaagcagccctaatccaatatcttaccaatgaggaggccaggaaagccatttctagcacagaagcagttctaaacaaccgattcattcgagtcttgtggcatagggaaaataatgagcaaccgacactacagtcctcagcacagctgctcctgcaacaacagcaaacacttagtcacctctcacagcagcaccatcacctgccacagcatctacatcagcagcaggtgctagtggcccagtctgctccttcaacagtgcacggaggtatccagaagatgatgagcaaaccacagacatcaggtgcatatgttcttaacaaagttcctgttaaacatcgtcttggacatgcaggtggtaaccagagtgatgcatcacatttgttgaatcagtctggtggtgctggagaagattgccagatattttcaactccaggccatccaaaaatgatttacagctcctcaaacttaaagacaccttcaaagctctgttcagggtctaaatctcatgatgttcaagaagtgcttaaaaaaaaacaggaagcaatgaagttacaacaagatatgaggaaaaaaagacaggaagtgttagaaaagcaaatagaatgccaaaagatgttaatatccaagttagaaaaaaaaaaaaaaa

SEQ ID NO: 26669 - DNA, 561 bp, Homo Sapiens
cttcaaggccctggggatggtctttcacctccctctttctgatctctttttcatgctcctccttgctccaaagaaaagccggatggcaaaagagcccagaacctattggaactgacaaaatcaagtcacggcgcctacaaagatgaggggcagattctggctgccttttaatttcgtccttcacctgatatctgtgccagagaatgataaaaatcataataaaggaaataatggaagaggagacttatgttactggggacatctaacataattattttcctgattcagtggcatggttcagtcttccaggagttctgctacagagaagagagtaacccccatccatcatggccaaagcacccagtcaggctccgctctggatccagcccgacaaatgcaacccttgaatagggtttgtgcaagcaaactggatgacgaccgaagaaaccctgtcgcttctgagaagacacccaatccaagaatgtgagttctggaaatgtcattaaatgtcagttatatacaaaaaaaaaaaaaaaaaaaaaaaaaaaaaaaaaaaaaaaa

SEQ ID NO: 26670 - DNA, 2319 bp, Homo Sapiens
cacaaggctacaggtgtctttatttccactgcacgctggtgctgggagcgcctgccttctcttgccttgaaagcctcctctttggacctagccaccgctgccctcacggtaatgttggactcggtgacacacagcaccttcctgcctaatgcatccttctgcgatcccctgatgtcgtggactgatctgttcagcaatgaagagtactaccctgcctttgagcatcagacagcctgtgactcatactggacatcagtccaccctgaatactggactaagcgccatgtgtgggagtggctccagttctgctgcgaccagtacaagttggacaccaattgcatctccttctgcaacttcaacatcagtggcctgcagctgtgcagcatgacacaggaggagttcgtcgaggcagctggcctctgcggcgagtacctgtacttcatcctccagaacatccgcacacaaggttactccttttttaatgacgctgaagaaagcaaggccaccatcaaagactatgctgattccaactgcttgaaaacaagtggcatcaaaagtcaagactgtcacagtcatagtagaacaagcctccaaagttctcatctatgggaatttgtacgagacctgcttctatctcctgaagaaaactgtggcattctggaatgggaagatagggaacaaggaatttttcgggtggttaaatcggaagccctggcaaagatgtggggacaaaggaagaaaaatgacagaatgacatatgaaaagttgagcagagccctgagatactactataaaacaggaattttggagcgggttgaccgaaggttagtgtacaaatttggaaaaaatgcacacgggtggcaggaagacaagctatgatctgctccaggcatcaagctcattttatggatttctgtcttttaaaacaatcagattgcaatagacattcgaaaggcttcattttcttctcttttttttttaacctgcaaacatgctgataaaatttctccacatctcagcttacatttggattcagagttgttgtctacggagggtgagagcagaaactcttaagaaatcctttcttctccctaaggggatgaggggatgatcttttgtggtgtcttgatcaaactttattttcctagagttgtggaatgacaacagcccatgccattgatgctgatcagagaaaaactattcaattctgccattagagacacatccaatgctcccatcccaaaggttcaaaagttttcaaataactgtggcagctcaccaaaggtgggggaaagcatgattagtttgcaggttatggtaggagagggtgagatataagacatacatactttagattttaaattattaaagtcaaaaatccatagaaaagtatcccttttttttttttttgagacgggttctcactatgttgcccagggctggtcttgaactcctatgctcaagtgatcctcccacctcggcctcccaaagtactgtgattacaagcgtgagccacggcacctgggcagaaaagtatcttaattaatgaaagagctaagccatcaagctgggacttaattggatttaacataggttcacagaaagtttcctaaccagagcatctttttgaccactcagcaaaacttccacagacatccttctggacttaaacacttaacattaaccacattattaattgttgctgagtttattcccccttctaactgatggctggcatctgatatgcagagttagtcaacagacactggcatcaattacaaaatcactgctgtttctgtgattcaagctgtcaacacaataaaatcgaaattcattgattccatctctggtccagatgttaaacgtttataaaaccggaaatgtcctaacaactctgtaatggcaaattaaattgtgtgtcttttttgttttgtctttctacctgatgtgtattcaagtgctataacacgtatttccttgacaaaaatagtgacagtgaattcacactaataaatgttcataggttaaagtctgcactgacattttctcatcaatcactggtatgtaagttatcagtgactgacagctaggtggactgcccctaggacttctgtttcaccagagcaggaatcaagtggtgaggcactgaatcgctgtacaggctgaagacctccttattagagttgaacttcaaagtaacttgttttaaaaaatgtgaattactgtaaaataatctattttggattcatgtgttttccaggtggatatagtttgtaaacaatgtgaataaagtatttaacatgtaaaaaaaaaaaaaaa

SEQ ID NO: 26671 - DNA, 511 bp, Homo Sapiens
cggagagccagggcgcagtgggcggcagggctgagcggccggtgatggggaccccacatcccaggcagtgccggcacccctggcgcctgacatgagcccttgcgggcccctcaacctgagcctggcgggcgaggcgaccacatgcgcggcgccctgggtccccaacacgtcggccgtgccgccgtcgggcgcttcgcccgcgctgcccatcttctccatgacgctgggcgccgtgtccaacctgctggcgctggcgctgctggcgcaggccgcgggccgcctgcgacgccgccgctcggccgccaccttcctgctgttcgtggccagcctgctggccaccgacctggcgggccacgtgatcccgggcgcgctggtgctgcgtctgtacactgcggggcgcgctccggccggcggggcctgccacttcctgggcggctgcatggtcttcttcggcctgtgcccgctgctgctgggctgtggcatggccgtggagcgctgcgtggggcgtcac

SEQ ID NO: 26672 - DNA, 2899 bp, Homo Sapiens
cggcggcggcggccggagcgggccatggacgcgctcaagtcggcggggcgggcgctgatccggagccccagcttggccaagcagagctgggggggcggtggccggcaccgcaagctgcctgagaactggacagacacgcgggagacgctgctggaggggatgctgttcagcctcaagtacctgggcatgacgctagtggagcagcccaagggtgaggagctgtcggccgccgccatcaagaggatcgtggctacagctaaggccagtgggaagaagctgcagaaggtgactctgaaggtgtcgccacggggaattatcctgacagacaacctcaccaaccagctcattgagaacgtgtccatatacaggatctcctattgcacagcagacaagatgcacgacaaggtgtttgcatacatcgcccagagccagcacaaccagagcctcgagtgccacgccttcctctgcaccaagcggaagatggcacaggctgttaccctcaccgtagcccaggccttcaaagtcgcctttgagttttggcaggtgtccaaggaagagaaagagaagagggacaaagccagccaagagggaggggacgtcctgggggcccgccaagactgcaccccccccttgaagagcttggtcgccactgggaacctgctggacttagaggagacggctaaggccccgctgtccacggtcagcgccaacaccaccaacatggacgaggtgccgcggccacaagccttgagtggcagcagtgttgtctgggagctggatgatggcctggatgaagcgttttcgaggcttgcccagtctcggacaaaccctcaggtcctggacactggcctgacagcccaggacatgcattacgcccagtgcctctcgcctgtcgactgggacaagcctgacagcagcggcacagagcaggatgacctcttcagcttctgagggcccggggccagccggacacaagcggccctgacacgtgatggaccaaagccacctgctgcgggggagccagttctggggcccgcctgccacctctcccagccctcagcattgtcagcctgaagatcagagctgcagccagtcaggcaggggagagatttttcttttaagccctgctctttctctgagaaccaaaagatgccttgaatatttattcagtgacttctggcttatgctcagaagccagtctgcgtcaggcacgtctcctgctgcgtgacatgtgcagtgctgtaatcggctcccgcttgctctcctggagcaagctctgccctggctgtgggtatcaggactgtgaccaaagcatttctagtcccttctctctttctaaggacccaaatttccctgggggcatcctgcttcctgaaagctgttggatttcagtgatttttccccccaccccccagcacaggagagcacccacagccgcagaaggggaatgtgtcctcctgctctgcttcctcagggcccagcaggcgggggtttgagccctggaccccaggctcttagagactaaggggcagctcctgaccaaagacgatacagcttggcactttaaagcattaacagcaggtgtgaccctgagggctcctccatggtgctgcattgagtccagctttccttctgcccttcctccaggagaaggggcccaaggtccccgtggatggtctccacctgtgcttggaaccagtgtaactggctgctccctgctcccagggactgacacggggatcatctctgtgaccgccctccgtcgggcccctgcctgccttctcccctccacgcaaggctgtgctcttcctctggtttctgtgtgtccgtttgagtgtctgcgccccgcctccccatacttcctgggatgatgtgtgaaacctgacacctagatttatttggaaatattctatgaccactttacagatgaggaaactgaggcctcaagcgtggaggggtagagtgaagagtagaacccaggtctgatgccaaagctgctttcttctctgcctcctcctcacgcaactcacacctccttttcttctagctttgttgtcctcccaggaaccaaaaaaccccagctattttctgaccaaaatgtgtttcataacaaaccatctggtgcctttccacacagaactggcaggagcctcgtgtcctgctagctgtctctcttgttgatttccgtgaaaatgcaagtgtttgaagtctgctcattccgagggtgaaacaaaatccaaccctgtcagaatcatgctgttctctttgctgacactgtgaccctgggtcgggacagaccagcagcaatctgtctttagaatcgctttccttcctccccttttgcccccgtggggctcccggcatcctgaaagccagcaaagcctccagcatcttttccatcctgaggtgcctcccagtggcctggcttgtcggagcaagtttcatcagccctagggaaaacacggccctcctgggaacctccttacctggagtaaccggacaccttagacggaggtgcctgagggtggggtgggatttgcagggtcattatcagaacatgaggataacttccttgcccctgctctgtagccacctccttggcaccggcctctatttgtcataaggcggcgtgggcgaggcctgacacaggccagccttggcacgaggggggccaggggttctgagaagcgctgccctgtgagagccacgctggccttcgtctccatctctggttgacgggctgtccgtgtgcctcctgtgtgtctgcagacaagtcttgctgtgctttatttgtgaaactttaatgaggaaaaaacaaataataaatgttctcgttttgaaactcaaaaaaaaaaaaaaaaaaaaaaaaaaaaaaaaaaaaaaaaaaaaaaaaaaaaaa

SEQ ID NO: 26673 - DNA, 2019 bp, Homo Sapiens
tcctttgagagtcgcgagggccgggccccactgagcctggtggtgctggaaggctgcacagtggaactggccgaggctcccgtgcccgaggagtttgcctttgccatctgctttgatgcccctggagtgcgcccacacctgctggccgcagaagggccggcggcccaggaggcctgggtgaaggtgctgtcccgggcaagctttggctacatgcgcctggtggtacgcgagttggagagccagttgcaggacgcacgccagagcctggctttgcaacgccgctcatcctggaagtctgttgccagccgctgtaagccccaggctcctaaccaccgagctgcgggcctggagaatggccactgcctctccaaggacagcagccctgtgggcttggttgaagaagggggcagcaggtctgcagggtgggggttggctgagtgggagctgcagggccctgccagcctcctcctaggcaaggggcagagccctgtgtcccctgagacctcctgcttctctaccctgcatgactggtatggccaggagatcgtggagctgcggcagtgttggcagaagagggcccaggggagccactcaaaatgtgaggaacaggataggccctaagtctgggccctttgagtcaggaaaccagggccagttctttttcaggagttaaatgtttacgcatttccaaggttgcgttttgggaggggacatgggttctctccttcctgctatttaggcattctccaggttcgagatccacccgtgtgtctggaagggactgcgggaccattccttccatcctctttatttcctgaggtccagagaaggaaggagacttagcagccacagagcaagaccccaatctcctgactgcactggcctgactgccccctcccaggggatgttaatgaaatgaaggaagtggggaatgtcacccgagactgtcacaggcttgccatacctttggcctacacaccgggctctagagccataatttccaacctggggagtctcctgtgcacttaaatccgaggtaggctgcagtatcggcttgaagctctgacactgtcagagaaagtggatttattgtgtcataggagtttctgggacccagctcttcctgagaggggtgggaagattggggatgggatcctcactcagcagtctgggtagggccctttgaggcagagggtcttcggccagtgaagagagatttattctgcttctgctcagagtgctggggtcccatcctttctccctggctgccctgttaacagatggtgctggaccttgccccggaaggggcttgtagcttttttacgtcaacgaaatgccctcctgtactctgtcttcagcagccaactcctggagctgccaagtgaggggttaaagaagaggtggggaggcagtgtggctccctgggaaaagtctgttgctttggttctcagtcctgggtattctaggagcttggacacgggattgcgtttcctgtgctaaaattctctctcctggctgggctccggtaaactgaagctgctcgagaaatcacctgggaactctcatagccgtttgtcacccagggtgtacttgccaggacctctccttgctactcttcccaaagtcgggaggcaaagcggctgggtcaccagagcctgaccatactgacgctccagggggaagacgcagaggccgggaagagacaccccctcccaaacacataaaacttgccccttcctagcctcggctcccctcactggggccttgggcaggaccgacccgcatccaactaggcctaaggggtaggctctgagcctcttacccctaagaggcggagatgcgcccaaggcgggcgcccggcctgttccccagccctgcctggaagccccgcagccactgcattttgtttaaacacagatagcacgggcctttctcttattgctacagtgttttgtacacggttaaaacactagtaaagctttttcgttattaaaaaaaaaaaaaaaaaaaaaaaaaaaa

SEQ ID NO: 26674 - DNA, 1284 bp, Homo Sapiens
cagggaagcagaggagcagcagggtcagggtgctgggttcctaaggtgcaaggatgcagaacagaactggcctcattctctgtgctcttgccctcctgatgggtttcctgatggtctgcctgggggccttcttcatttcctggggctccatattcgactgtcaggggagcctgattgcggcctatttgcttctgcctctggggtttgtgatccttctgagtggaattttctggagcaactatcgccaggtgactgaaagcaaaggagtgttgaggcacatgctccgacaacaccttgctcatggggccctgcccgtggccacagtagacaggccagacttttaccctccagcttatgaagagagccttgaggtggaaaagcagagctgtcctgcagagagagaggcctctggcattcctccacctctatatacagagacgggcctggaattccaggatggaaatgactcccacccagaggccccaccatcttatagagagtccatagccggcctggtggtgacagcaatctcagaggacgcccagaggcgaggccaagagtgctgaggcagagaaagctctccagcactcatgatgccaccactgtggggagcagctactgataataaaggcaaacgagggactgtgggaggaaaagccacaccagggaccccacaagagagcttggggaggggatgacagccctgaattccagacataactggccatgccagggcagggcaggccaggggccctggaagggtgtggccaacaccaagcagacatttcagaggattcacactaatcttaaccccggctggccttgggtccccaaaggtgtcactctgagagctctgcttacagagattctttctgctgtcactcaatttccctcccatcacctcaactccagccagggaggaatagatgctggttgtcaggacagccacatgccttcctgttctatatcacctagtaatctcaaagcgaaggtttgttgtttaatttattgattgttcagccttttgttttgttagcttgtttcctagttacctccagctgaccatactaccagagtgaggcagtacttcacatcctgggagatatgccctcggaacccatgaatgttattttgtattattttattttcatgatatgtattttttctatgtaaaaggaaaatgactgtaatatttgccttcaagatggttcaaacacaaaatattaaatgagctgtttcttaaaaaaaaaaaaaaaaaaaaaaaaaaaaaaaaaaaaaaaaaaa

SEQ ID NO: 26675 - DNA, 1677 bp, Homo Sapiens
gatacaatggtgtcgttcgggaaacgcagccctaacgttggtcctaagctgacaaattggtctgtggacgccaaacttccgtgctaggactttctgcgtgtggaccgggggcctagtcctgcgtgggtccaacacagacaggagaaagctgcctgcttttgtgcctcccggaggtcctggtagaagcgaaacggggacaggagctgcagcgtcccaagcccagtgaggcgaagctactggagacagctctgccgggtccaaagttgggctcaccggctggaacttgaaaccggagcacgccggactcctgctgaagccatcatctctctctcctggccccgggcgccttggccggcgggcacaactggtttcggggccaaggtggtctggaagcctgacggtggcgtctggcctgggctcccgcgagcggaaaaggttcccctcctgtgagagggaaactatggaagttcctacgcccggagccagaactcctgctgctcccgcccgacccaaggtctagcttggcggcctcccacctgtgcttctgagggttctgcttccaagaggctgctggtgcccgggacaccagcagtttcgccatgggtgtttcgccatgggagtttcgccatgggtgactttggcctgagatgcgctccatggagcagattctggagttgctggtgttggaggagttcctgactatcctgtcccaggacatccacagcagggtgcagaagctgcaacgggcgagctgtgaagaagctgtaactcttttaaagtatatgtatgacttttaaaagagagagcttgtgaaactgagggaatagggctgtgtgttccagaaggctgataccatggaagacatcaccttggcttcctggctgtctggttagtgatttgagcaatgagaggcagcagctagaaatgaaagagtagaagaagagagtgtctcctgacactgtgtgcatggtctccagtcagcctctgattcctgtgagtcagctgcatccagattcccacccccttccccgtcccgagaaggttacatttggccgccactaagatctcctgagaaaaatctcttcagaggaattttggccaaatcttctctccctctcctacagccactttcctcctgaatttcttcctttcccagggcctgattggttcagcaccaagtgaagtcatagtcactatggtgactcacaattgtcctcagaacctagtgccaacagtctgcaagattcaaacactggccaccatgcctggcttccttctggttcaagcctgaataaggtccctcttctgtgctgtcttcctgaagccatctgtggagtcaagcagtcatggctcagggacactctgaagtaggtcccagcacatctgcatggagcatcaggaggaaggtggatgaatacttaagacccagcctggcctctaaatcggtgctgagcgttttactcagtagacagcttgggaatcatagaaacgatgcggatctgacagagtggctgtggacactgaagcaagccataccagggtggacctggcctttgccgacacgccacacaatcaacccacctctgccccctggggaggatggaaaatccaagaaaatggtgtggatcaataaatccttcccctgatgcaaccataaaaaaaaaaaaaaaaaaaaaa

SEQ ID NO: 26676 - DNA, 1321 bp, Homo Sapiens
gctggatgtgttgtgttcctggcttccctctggatgctgacagaaacaagggaatttctgctgaagtgacaaggcaagccagagccaaagcaggttggacccagcttgtccccacagagacgtgtgcttccctctctctctgagagcgacctgttaaccgcaaatacctggaaggtctgggacatggagaacgacccctcgagacgaagagagtccatctctctcacacctgtggccaagggtctggagaacatgggggctgatttcttggaaagcctggaggaaggccagctccctaggagtgacttgagccccgcagagatcaggagcagctggagcgaggcggcgccgaagcccttctccagatggaggaacctgcagccagccctgagagccagaagcttctgcagggagcacatgcagctgtttcgatggatcggcacaggcctgctctgcactgggctctctgccttcctgctggtggcctgcctcctggatttccagagggccctggctctgtttgtcctcacctgtgtggtcctcaccttcctgggccaccgcctgctgaaacggcttctggggccaaagctgaggaggtttctcaagcctcagggccatccccgcctgctgctctggtttaagagggatcccaggccatggagcaaggagggcccgaatcagtacctccctcagatcacctggacagtgtgagacaaaaagccgcagggaccatccctggagggggattcagcaggctcgatcggggtccaggtgctggtatttttcattagcctccaggggattctgatgtagccagcagcgtccttggacaacagtttgagatctgctgcttttcaaactggattccttggagcgctggaaatctcagcgatgtcacagggcaggagagggaggttgtggagggaaaattcagacttcccgcccagcccaccatttcaccaggcagctctaaatttatgtgttttataagccaaggttcacacaaaaaagaaaattcgctggggggaaaaaaacagtttctatggcttaaaaaaaagtctgaagaccaccagtctatttcaatactctattttgttgatgaagaagctggtgaccaaagatacccaaagactaagtcagggggatgcaggggtacaggggtgcctctcactttcccaaagtgagatccacataccacagcaaaatgatttgagccagcctgtggatgaacacatttaaaattttatttataaatacatttactgttacatttgacttctctttattaaatacatttgtgatttaaaaaaaaaaaaaaaaa

SEQ ID NO: 26677 - DNA, 423 bp, Homo Sapiens
ggtgaccccaggccccaggaaagggagcgaggacagcgctggttcccggctccccgcaccatcatggctttgcctctgaggcccctgacccggggcttggccagcgctgccaaaggaggccacggaggagcaggagctcgtacctggcgtctgctgaccttcgtgctggcgctgcccagcgtggccctctgcaccttcaactcctatctccactcgggccaccgcccgcgccccgagttccgtccctaccaacacctccgcatccgcaccaagccctacccctggggggacggcaaccacactctgttccacaatagccacgtgaaccctctgcccacgggctacgaacacccctgaggccccggacgcccccggacacaataaaggtgtgaagcttaaaaaaaaaaaaaaaaaaaaaaaaaa

SEQ ID NO: 26678 - DNA, 1669 bp, Homo Sapiens
ccagggacagagggagacccaaagatctggtctgtagctaagtgaattttctaaaactcattgattcacacgccatcccttgaggtggctggtgtcccgcgatggccacaggcgccctcctgccgtgctcgcgcccgtgcccgatgtcccggctggacttcctcaaggcctcgcacttctcgctggggcctgacctgcggctgcacgagggcaccatgcgcaccacgtcgcaccgggactttgcctacccggctgccacccgggagccgccgagcctgcagccgccgcccgcgctgcttttcccaatggacccgcgctgggaccgggaagagcgcgtgtcggaggcgcaccgcgcgttcccgccgccatccacgccgccgtgggagctgctgcaagcgcaggcgcgggaacgcacgctcgccatgcaggccggcaacctgcacctgcacgaggacgcgcacgccgggatcggcctctccaacgcgcacgccgcctacggctggcccgagctgccggcgcgcacccgagagcggatccgcggcgcgcgcctcatcttcgaccgcgactccctgcctcctggcgaccgcgacaagttgcgcatcccgcccaccacgcaccaggcgctctttccaccccacgacgcgcgcccgcagcctcgcgcgcccagttgccacctcgggggccccaacaccctcaagtgggactacacgagacaagatgggacttcctaccaaagacagttccaggccctgccaggcccacctgccttgaggtgtaagagggcctcctccggagtggagctgggagactgcaagatcagctatggatcaacgtgttcggagcagaaacaggcctacaggccccaggatctgcctgaagataggtatgacaaggcccaggccacagcccacatccactgtgtaaatatccgtcctggtgacggcctcttccgcgacaggaccaccaaggccgagcacttctatgccagggagccagagccttttgttcttcaccacgatcagactccggagtcgcacatcctgaaaggaaattggtgccccggccccggcagtctggacaccttcatgcagtacttctacggccagccgccacccccgacccagccacccagccgccacgtgcctcatgagaaattgcagagtcatgtgaccctaggggagccaaagctactcaaacgcttcttcaagaccaccatgggctcggactactgcccttcagagtggagacaggtgcagaaagcgcccaacctccacttgcagcaaagctacctgccgcggggcacgggcgaattcgattttttaaccatgaaccagaagatgctgaagccacacagaacacctccggccccggtgactgaagagatgctacagcggtgcaagtacagccacatggagccccctctgggtggactgcgcttcttctcaacacaatacaaggacgagtttcctttcaagtaccagggcccagcagccctgagactgaaaaatcctcaggagggcttcgtgcccctgggcacgcctcaccagcgcggctgcagggagaagatagaccctctggtcccccagccccctatgtacctgtgccccagccagcaataaatgccatcttggcaacattcaaaaaaaaaaaaaaaaaaaaaaaaaaaaaa

SEQ ID NO: 26679 - DNA, 1930 bp, Homo Sapiens
cctacctaaccttgtttctctggatgtttctgggagaaagcacgtgacagataaagccgttgaagcctttatacaacaacgtccaagcatgcaatttgtaggtttgctggctactgatgctggttactctgaattcctcacaggcgaaggacatttgaaggtgtctggggaagccaatgaaactcagattgcagaagcactgaagcgttacagtgaacgggcattctttgttcgggaagctctatttcatctttttagtctgactcatgtgatggaaaaaacaaagccagaaattttaaagcttgtggttactgggatgagaaaccaccctatgaatttgccagtgcaactggctgcaagcgcctgtgtatttaacttaaccaagcaggatcttgctgcaggaatgcctgtccgactcctggctgatgtgacccatttgctgctcaaagccatggaacattttcccaatcaccagcagttacagaagaattgcctcctttcactttgcagtgaccggatccttcaagatgttccatttaacaggtttgaagcagccaagcttgtcatgcagtggctttgcaaccatgaggatcaaaacatgcaaaggatggcagttgctatcatttctatcctggctgccaagctttctacagaacaaactgcacagcttggtactgagctcttcattgtcaggcaacttcttcaaatagtgaagcagaaaaccaatcaaaattcagtggacactacattgaaatttactttgagtgcactttggaacctcacagatgaatctccaaccacttgtagacactttattgaaaaccaagggttagaactcttcatgagggttctagagtctttcccaactgagtcatccattcagcagaaagttctaggacttttgaacaatatagctgaagtacaagaattacattctgaattaatgtggaaagattttatagaccacatcagtagtctcctacacagtgtggaagtggaagtcagttactttgcagctggaattattgcccatttaatatccagaggtgaacaagcttggacattgagtcgtagccagaggaattctctgctggatgatttgcattcagctattttgaaatggccaactccagagtgtgagatggtagcatacaggtcctttaatccatttttcccattacttggctgtttcacaacaccaggagttcagctatgggcagtttgggccatgcaacatgtctgcagcaagaatccttcaaggtattgcagcatgctgattgaagaaggaggattgcagcatttatacaacatcaaagatcatgaacatactgatccccatgtccaacagattgctgtggccattctggatagcttagaaaaacacattgtgcgccatgggaggccacctccctgtaaaaaacagccccaagccagactaaattgatagccataagtattggatagttgaatcacaggaatcctttttgtgattggtccatttggaatatcttaccctccctgatgttttgggggtttctatgacaagagtcataaaatcagtttgggattgataatgtgtagtactgcccatgtgaacagtctctaatttgtcttgtgattttaaacttatgagtcaagaagggtctcttcctttatcattgccttttaggaaattttccacatctttcagtgtttgaacttacttgtgcttgagattctacagttttatggtaaagtttgcacgaacccttaggccagacttttctgatctcagagtcccttccaatcaatttgcagcttcacataagctgttgacctgatttctgacactgcttcagttgtaaattttatactgcttctgtataaaatgcctttcttctctaaaaaaaaaaaaaaaaaaaaaaaaaaaaaaaaaaaaaaaaaaaaaaaa

SEQ ID NO: 26680 - DNA, 2225 bp, Homo Sapiens
cagctgtttcctgtgactttaaccttaccttccccagacaattgagctgaacctgtatctgcgacctctgactatgtgaagatacggtgggaagatgactgaccgcaagacaggaagagagccctcaccgaggaaccaaattggccagtatcttgattttggatttctcaacctcaagaaccatgagaaatgaatgtctgctgttcaagccacccagtcaatgtccatgagagcaagcatctttgtccgtttggctcactgttggattccctgttttaaaaatatcacccggcccagcaaaaagtttggaaaccttcatctagaaagtggtctagcaaagtgtggtccatggatgagtttgatctgcaaactgcttgttattggttcatgacaaggtctaccaattgcattttgagagctcagataagcagagagcaatgcaatttgtcacagaaggatgattatgtatatgcactgtcatgtctatttccatgcctaactcaaaggagacacaaggagaaagtgagctcagcctggataaattggagattgtgatgacttctaggaagcctcaggaaagagaaacaaagacaacactggcctgctgctctctgcaatggtgggacccttgtgggataactgttttaggaatgaaggtgtctaccctctctagaaatgaaaatgcaagtttggctgtggttaagtattggatggaggcaaaaagaaactgacatattttcttcttttcaattgtttgattcaccctgaagggcatggctgcttaatttttttctccagagataggtggacagataaagacaggaaagtaacatccacagactgccctctgtgaaggtgacagtgatgaaaggaatgcttgatctgaacactggtaaataaagtgaccgcatatttccctagccaggagagcaatctggctcaaaagaaacgagaacaatgacattactgccaggctgctcctaagcctttggctattctgttcagtgcacaaaaaaaagcagtgaacatagctgtgacctgccttgttggtagtatcacaattctttggggctccactttaagaaattgagacctacctaccttaatccttggggggttaagctttcagactggaatgataactgaactattcatttgcagtaattctgggttttgtgcatattttaaaaaggaataccgggcttgcctatattcattacaacgtcctcccagctttcaaatcttccaatacaatgcctcttctctagtcttttaagcacatcctgtgactggatatgattatgggagatttacatgcatccttgtctattgtatcaaaagatcagggaataaaatgcccatcattaaaaccccaaagtgattggattggcatgaggaatggggatggggctggcatggaagagagggttctgactctgagatttcatgaaatgcaaaacaataggacagctgctcttccataaacagattattattattatttctacctagacagcttgatagcagccattatcttctttctgggtgtcttatcaagttccggctgtgtgcagcatgggtgataaggaaagagaaatgtcacccatgggattgccaaggattatttctatgcactgctgttcagcaacagccaatctctcagaactgagaagaagtcctattgttcacgctgggcagttgctattctgactatcccaagagagcagaaaagggatgtagttgccattgtgcaaaagattgatatttcattactctcagctaaagttctgaaaagcagaatcatcatgaaatatctttgaagagagaaaagacaagggaagaaaagaagaatgaaatgagttcagagctttttagaactgtgagggagtgcgaaaaaagaaaggtgtaatactttcaaacagtggaagttaaaatgccaggcgtgtaagcctcagtgaaattgagcagcatcacgtcaccacgacttgtggtccagctgtttattgcaaagactccatcctgcgttactcatcagaaaatagttaactttgtatctggcattattttaattaaaaaaaaagttaacttactagatttctgtttgtctgtgtttcatacaaggttcttgaatgaaaataatctgttgatatttaacatttttcctttccttctcaatgagaaaataaatgttttattatacaaaaaaaaaaaaaaaaaaaaaaaaa

SEQ ID NO: 26681 - DNA, 928 bp, Homo Sapiens
gggagaggggcggggccggctttccttgggtgcgcgcgcagctttctgtgcgccagttcacactccgggtcagagttcctggcccggtgcacctgagaggtcgctctccgactcccgcgctggaccctcttgcgccattgaaccccctgatccgggggcctcggaccccagggctcaggagatggatccagtccctggcgctcctacttcccaactgctcctcctcccgcatccccacagtaccccgtcctcacagcgggctgtgggtccaatcagactttcccctcggattcctctctaggactgaaccaagacttacccgaagttgccgcggggccttccgatcccctaggccattgcccaagtctggccaggctgatgggaccagcgaggagtctctgcaccttgacattcagaaactgaaggagaagagggacatgctggacaaggagatctcccagttcgtatctgaaggctacagtgtggatgaactggaggaccacattacccagcttcacgagtacaatgacatcaaggatgtggggcagatgctgatgggcaaactagctgtgatccgaggtgtcaccaccaaagagttgtatccagagtttgggctggacatgaatgactgagcaggctcatcgccccttgtccacagctcccagggacagaagggtgtggacatgataaacactgagagcccaaccagcacacctacagagtttccagcgagacaatgccagaagcacttttctagagagcccaagcccaatcaggaggaggctagagaagaggcgggcagggaggaaggggcgttcccagctccaaggttcctgaaatgtcgcagtgatacttgtgtaggggtacatgtactttatttgtcaataaacgtatctgtacactgaaaaaaaaaaaaaaaaaaaaaaaa

SEQ ID NO: 26682 - DNA, 956 bp, Homo Sapiens
ctctggtgtgtgactgagagaacacgccagtgttcttactgacagaggcttaggggtgaccctctctggacccagaggaagtacaacctctgtagcgagaattgtccttgggaacagaaacaggcattcctccacagtgagtggctccccctattttttttttatttggaagagaccaagaattgggggaattgatttccagtcttagctgtttcccggaatgtcatctgtgcaggcaggtaggcggctgccgggtgcagcaggcagcgtgactgatgtgaaggccgcccaatcctcacgtgctaagacccgagtatcgtgtttaattgcagtgtaggcacgtcgccattcaaactcagttctggggtggttttgcataaagttttgccaacgtgttcttttttctgtatgtattattgcctttttataaaaggtgttgaagtattgtctcagtgataaaaagagagagatgttaatggttgttgtatatttcaccgtatccaattgtaagtatttgcagggtacagcagagccttagcttgcaagagcgtttgtgcaggaggtgtccctcaacacccaggagctgaagggattggaaaggtttggattctttgtaaatgtcctgcttttctttctctctgtgtgtatctatttacatgccttagcacacgccctcccatcctgatctctttgccctgtcgccggaacaaccagaatgctggtgcgctgccggcacagtacaagttgatgaaaccctaatcagttatcttgtgtgacaggggaagaagagaaactccatagtattccttgtagaatatacatacctgtaggatgctgtgtaatgggaaaccatagaattgggcttttgtcatttcaaagttggagaaatgtatgaataaaatgtataaaacatgaaaaaaaaaaaaaaaaaaaaaaaaaaaaaaaaaaaaaaaaaa

SEQ ID NO: 26683 - DNA, 1135 bp, Homo Sapiens
atattttggtctatcttttcctgtcatcagaacttaatttaaaaaaattatcaaaggtcagatgtgactactacagtaagttggctatcataaagaatattccataaaatgttttatctgccatacaaaattactgggtttatggccggatgtggtggctcatgcctgtaatcccagcacttcaggattacaggttatatacaggttataacaatggataccaggacatcagaatatctgataaagcaaatatttatatgctaatttaaaatatcaaattgctactggacataaaatacatctggaagcttggggtaagaagaaagaaaagaagtgttccgttctgttttcaactaagggtaaacgaagtcccagagtgttttccctgtaggtcaaattaaggtaacatgtctttatttgatcatctattgtacaccagatacctggctaagggctttccttttttctcatgtagtcttccaaatgttctttgataattgtcactatattatagatgacaaagtgaagacttacgagaaattactttgccccaaggttacaacacttagatggctgtccaagggcggggaagagccctgcaaattctgtgtcttgaagaaagcagtggccacgcagtagttccgtgcccaggatctcccagaactagacttggcaaccacagctgggccagccttttttgttagaccattcttcctgactcctgcttaccatcagcacccttaaaatgacgaaatcaggcttaagttgcttttaggttacacagactggagtgtaggccctctcaggccaaacatctttcctcttctgtggtgctaaaattctgtatgaccagacaagtatggtaataggttttttttttttttttttgtgcaaatgattttgtgtttagtaaaataatggctaaacacatggatccattcaaacgcacaaatgtggaaagtattgacacggaaggaaaggctttgaagaattactgcctcaggaagcagtgccatggatgcgaatttaacacagtctacttcttcctaaaggaatatcatcccaaggaatgtcaaaaattaaaatcaccttttaatgtaaaaaaaaaaaaaaaaaaaaaaaaaaaaaaaaaaaa

SEQ ID NO: 26684 - DNA, 1685 bp, Homo Sapiens
gaatacttccagtagagttaatagctgtagcttacctagtgtgttaatgaagtgtgtttatttatgtgacttgataccagtagtcataatagagactgaagaggtatgcgttaagcacgcctacttctatgcagtaaacaggctgcagctgcctagattagattcttagaaatgtcatattttgaattgttttatttcttgtaggggaagctttgtcccacttcattcatttgcatgccataggaattacatattggttatcattacgtatctaacaagattcagaaacaaaaatcttggacttttcacatccgaaatatgtcagctcttaataaatgtgtggtgcttaagtctacatatggcatccatagttgatttagagtatggatatgagtgtgttgaccagttatcagtaggtggacaaatatttgggcatctacagatgagactatgcactaagtgtggactgagtcctaaagaagcttatagtcaggtgttgtttaaaacattatcagaattcttaaacccaaggaatttaattttatttggtatttcttaagcctaaaatgaaccaagagaaagatgattttagaaagtacttgtagtgaaagatgattttagaaagtacttgtagtgcatgtgtggcttctgacttttgggatggcaccattttataatagtttcaaaatttagcttttgaaattctcaacattttatggtagaagactttggacctcaagtataaaattatacgtttataatttttttaaaatttaaattataagtattgtgaattcacactctcaggctattgtctgacttgatctacgtctcataaagcctgtacctgagtggagtggaaggtggagtcttaggttaatcagttactgactctaccctcaccctctttcaattgaggtaaactttgctgtttttctttttcataaagcattctcaaattgttgagtttattgctgaaaaaaatctccatgactttacagatagaattacaaactaaatgatgtcttgtatttagaagcagagtacagacctaacgaactgttagattctccaccatcacttagggtttgcccagaagcaacaccagagaattacagacaacgcgcttttgctgaactgtccattttggtggttgtgtttttcagtcaaatataagcaggatgggcgatagagatatatttatatatagatacatattctatatatctaatgcctaaatatgggtattaaagggaaaatttttaaagtctgattaaatccaatatgacatgaaattaaatatatggattagtaaggaaaaatgttaaaaagtagagaggataccaagaagattaaactggactagccttatttgcaagtgaaggatctggtgctgctttcagatgtttatcttttatttttttcccttaagctttaatcttcgtcattgtcttaaagtcaactggtgtttcttgttcattgactttggtacgatggtgctttgcaaggatgtatttatgttataatggccaacatttggtcagcccttgtccacttattcacttccctccttttgtaaaataagtgctttaattataaactgtataaaaataccttgtataaaccccttttttgattattacaataaataagctgaattgtaataatcaaaaaagggcggccgc

SEQ ID NO: 26685 - DNA, 141 bp, Homo Sapiens
cacgatgcagacgatctcgcgggcatgcacggtcagcgacaggtcctgcaccgcatagcggcggtcgccgccgccgggcagccggacgtggagattgcggatgtccaggatgggcggtgcggagccggccggcgccgccgc

SEQ ID NO: 26686 - DNA, 2782 bp, Homo Sapiens
ctctgccccggcggttgtaatcttaaaccgccggagcccgaggcctatatttatagagaaacgcgtgtccccgaggccgccgtgggcagcgtccggtcgcctcttaaaggatttttacccttcggaaggggattccccgtttaatttttttcctactttgattttttgaaatttggagcttcgcaccaggaccgcggagaagtgcaaagtcgcggggagggccgtattgtgcggagagccttttgtctgcggtgctgcggccgtgggagccggcccccgcctcccgtttccgtcccgtctccaagcccgccgactccagctcgtcctcgccgcgccggtgccacctgtgagccgcggcgcgggcccgggctccgaaggcgcccctttgtcctgcggcgggcccgataagaagtcctcctggcggggctcggggtggtggggggcggggagatgaacgctgcggccagcagctaccccatggcctccctgtacgtgggcgacctgcattcggacgtcaccgaggccatgctgtacgaaaagttcagccccgcggggcctgtgctgtccatccgggtctgccgcgatatgatcacccgccgctccctgggctatgcctacgtcaacttccagcagccggccgacgctgagcgggctttggacaccatgaactttgatgtgattaagggaaagccaatccgcatcatgtggtctcagagggatccctctttgagaaaatctggtgtgggaaacgtcttcatcaagaacctggacaaatctatagataacaaggcactttatgatactttttctgcttttggaaacatactgtcctgcaaggtggtgtgtgatgagaacggctctaagggttatgcctttgtccacttcgagacccaagaggctgccgacaaggccatcgagaagatgaatggcatgctcctcaatgaccgcaaagtatttgtgggcagattcaagtctcgcaaagagcgggaagctgagcttggagccaaagccaaggaattcaccaatgtttatatcaaaaactttggggaagaggtggatgatgagagtctgaaagagctattcagtcagtttggtaagaccctaagtgtcaaggtgatgagagatcccaatgggaaatccaaaggctttggctttgtgagttacgaaaaacacgaggatgccaataaggctgtggaagagatgaatggaaaagaaataagtggtaaaatcatatttgtaggccgtgcacaaaagaaagtagaacggcaggcagagttaaaacggaaatttgaacagttgaaacaggagagaattagtcgatatcagggggtgaatctctacattaagaacttggatgacactattgatgatgagaaattaaggaaagaattttctccttttggatcaattaccagtgctaaggtaatgctggaggatggaagaagcaaagggtttggcttcgtctgcttctcatctcctgaagaagcaaccaaagcagtcactgagatgaatggacgcattgtgggctccaagccactatatgttgccctggcccagaggaaggaagagagaaaggctcacctgaccaaccagtatatgcaacgagtggctggaatgagagcacttcctgccaatgccatcttaaatcagttccagcctgcagcgggtggctactttgtgccagcagtcccacaggctcagggaaggcctccatattatacacctaaccagttagcacagatgaggcctaatccacgctggcagcaaggtgggagacctcaaggcttccaaggaatgccaagtgctatacgccagtctgggcctcgtccaactcttcgccatctggctccaactggtaatgctccggcctctcgtggcctccctactaccactcagagagtcgggtctgagtgcccggaccgcttggctatggactttggtggggctggtgccgcccagcaagggctgactgacagctgccagtctggaggcgttcccacagctgtgcagaacttagcgccacgcgctgctgttgctgctgctgctccccgggctgttgccccctacaaatacgcctccagtgtccgcagccctcatcctgccatacagcctctgcaggcaccccagcctgcggtccatgtgcaggggcaggagccactgactgcctccatgctggctgcagcacccccccaggaacagaagcagatgctgggagaacgcttgttcccactcatccaaacaatgcattcaaatctggctgggaagatcacgggaatgctgctggagatagacaactctgagctgctgcacatgttagagtcccccgagtctctccgctccaaggtggatgaagctgtagcagttctacaggctcatcatgccaagaaagaagctgcccagaaggtgggcgctgttgctgctgctacctcttagacaaggaaaaaccgattcaaaagccaaataaccccttatggaattcaactcaaggtttgaagacttcctagcttgtcctatggacctcaacaccaaggattacaaattgcaaatttaataggtcattttgtatcaaaaggtcaattatgaagcacctagaatttttcaattatacgaatatgttctttgggttctgctgtggcccagacagtgttaactttttttttattgtgggttttgattttttcccccagaaattggttttatttgatgtacccaagtcttacgtttcccaataaagaaaaaaaatctccataaaactgaaaaaaaaaaaaaaaaaaaaaaaaaa

SEQ ID NO: 26687 - DNA, 2821 bp, Homo Sapiens
cgccaggaggagcgcgcgggcacagggtgccgctgaccgaggcgtgcaaagactccagaattggaggcatgatgaagactctgctgctgtttgtggggctgctgctgacctgggagagtgggcaggtcctgggggaccagacggtctcagacaatgagctccaggaaatgtccaatcagggaagtaagtacgtcaataaggaaattcaaaatgctgtcaacggggtgaaacagataaagactctcatagaaaaaacaaacgaagagcgcaagacactgctcagcaacctagaagaagccaagaagaagaaagaggatgccctaaatgagaccagggaatcagagacaaagctgaaggagctcccaggagtgtgcaatgagaccatgatggccctctgggaagagtgtaagccctgcctgaaacagacctgcatgaagttctacgcacgcgtctgcagaagtggctcaggcctggttggccgccagcttgaggagttcctgaaccagagctcgcccttctacttctggatgaatggtgaccgcatcgactccctgctggagaacgaccggcagcagacgcacatgctggatgtcatgcaggaccacttcagccgcgcgtccagcatcatagacgagctcttccaggacaggttcttcacccgggagccccaggatacctaccactacctgcccttcagcctgccccaccggaggcctcacttcttctttcccaagtcccgcatcgtccgcagcttgatgcccttctctccgtacgagcccctgaacttccacgccatgttccagcccttccttgagatgatacacgaggctcagcaggccatggacatccacttccacagcccggccttccagcacccgccaacagaattcatacgagaaggcgacgatgaccggactgtgtgccgggagatccgccacaactccacgggctgcctgcggatgaaggaccagtgtgacaagtgccgggagatcttgtctgtggactgttccaccaacaacccctcccaggctaagctgcggcgggagctcgacgaatccctccaggtcgctgagaggttgaccaggaaatacaacgagctgctaaagtcctaccagtggaagatgctcaacacctcctccttgctggagcagctgaacgagcagtttaactgggtgtcccggctggcaaacctcacgcaaggcgaagaccagtactatctgcgggtcaccacggtgagctgtgtcccggccacatgctgtggctcgggagcccgagctgtgatcgggagcaggggcatgtgtgcttttgactgagcatttatcacacggcagaaaatagaaaactttaggcgcccctgttgccttgaagcctcatcacccactcagggaaaatataaccctgctttacaaaggagcaaagtaagagaggttccacagcttggccaaggtgtgatagctgacagatgacttggacgggtatttgaacctgactgcctggctgccaagcctgtattttgttgttgttgtttttgttttggtgcacaaatctgtgaataaaccagaagcctctgttcttttctcaaagctacaaggctgccctctggcatgtaaaatggcttatgaattagtacatcactctctgccagtgataaaaacttctctctaggccagacatggtggctcatgcctgtaatcccagcactttgggaggcagaggcaagaggattgcttgaggccaggaatttgagaccagcctgggcaacacagcaagattccctctctacaaaaaatacaaaaatcagtcaggtgtggtggcacacacttgtagtcccagctattcaggaggctgaggtgggaggattgcctgagccctgaagtggaggctgcagtgagctgtgatcacgccactgcactccagcctgggtgacagagtgagactctgtctcttaaaaaatatatatatataaaataataaaataaagttaaaaaatcaaataaaacttatttctagtactgggaactcttctttttcttttctttcttccctccaggccctctggattccttttctaccctactctgaccaagggctgcttctaaagcaaatgtttggaaaccacttttattctttggggtgctccctgggctggtcatttgcagatgacatttgccccaacacatgagtgtctgtgaaccaggtccgttctgtccactgagctgtacttacgtctagatgtataagaagcatggggtcagctctctaggtttccttggaggagcaggaggacttccttatcagaagcctgacttctgttgcagagcgcatgcattttgaccacagtgtttcagctcttcccttttctcttgttccatttaggtggcttcccacacttctgactcggacgttccttccggtgtcactgaggtggtcgtgaagctctttgactctgatcccatcactgtgacggtccctgtagaagtctccaggaagaaccctaaatttatggagaccgtggcggagaaagcgctgcaggaataccgcaaaaagcaccgggaggagtgagatgtggatgttgcttttgcacctacgggggcatctgagtccagctccccccaagatgagctgcagccccccagagagagctctgcacgtcaccaagtaaccaggccccagcctccaggcccccaactccgcccagcctctccccgctctggatcctgcactctaacactcgactctgctgctcatgggaagaacagaattgctcctgcatgcaactaattcaataaaactgtcttgtgagctgaaaaaaaaaaaaaaa

SEQ ID NO: 26688 - DNA, 1578 bp, Homo Sapiens
tgaacctccttggcctgggcgaagctgtgtggaccaagcaagtcaggagtgtggccatgttttctgagcaggctgcccagagggcccacactctactgtccccaccatcagccaacaatgccacctttgcccgggtgccagtggcaacctacaccaactcctcacaacccttccggctaggagagcgcagctttagccggcagtatgcccacatttatgccacccgcctcatccaaatgagacccttcctggagaaccgggcccagcagcactggggcagtggagtgggagtgaagaagctgtgtgaactgcagcctgaggagaagtgctgtgtggtgggcactctgttcaaggccatgccgctgcagccctccatcctgcgggaggtcagcgaggagcacaacctgctcccccagcctcctcggagtaaatacatacacccagatgacgagctggtcttggaagatgaactgcagcgtatcaaactaaaaggcaccattgacgtgtcaaagctggttacggggactgtcctggctgtgtttggctccgtgagagacgacgggaagtttctggtggaggactattgctttgctgaccttgctccccagaagcccgcacccccacttgacacagataggtttgtgctactggtgtccggcctgggcctgggtggcggtggaggcgagagcctgctgggcacccagctgctggtggatgtggtgacggggcagcttggggacgaaggggagcagtgcagcgccgcccacgtctcccgggttatcctcgctggcaacctcctcagccacagcacccagagcagggattctatcaataaggccaaatacctcaccaagaaaacccaggcagccagcgtggaggctgttaagatgctggatgagatcctcctgcagctgagcgcctcagtgcccgtggacgtgatgccaggcgagtttgatcccaccaattacacgctcccccagcagcccctccacccctgcatgttcccgctggccactgcctactccacgctccagctggtcaccaacccctaccaggccaccattgatggagtcagatttttggggacatcaggacagaacgtgagtgacattttccgatacagcagcatggaggatcacttggagatcctggagtggaccctgcgggtccgtcacatcagccccacagcccctgacactctaggttgttaccccttctacaaaactgacccgttcatcttcccagagtgcccgcatgtctacttttgtggcaacacccccagctttggctccaaaatcatccgaggtcctgaggaccagacagtgctgttggtgactgtccctgacttcagtgccacgcagaccgcctgccttgtgaacctgcgcagcctggcctgccagcccatcagcttctcgggcttcggggcagaggacgatgacctgggaggcctggggctgggcccctgactcaaaaaagtggttttgaccagagaggcccagatggaggctgttcattccctgcagtgtcggcattgtaaataaagcctgagcacttgctgatgcgaaaaaaaaaaaaaaa

SEQ ID NO: 26689 - DNA, 2400 bp, Homo Sapiens
atggctgcagtccgtatgctgagaacctggagcaggaatgcggggaagctgatttgtgttcgctattttcaaacatgtggtaatgttcatgttttgaagccaaattatgtgtgtttctttggttatccttcattcaagtatagtcatccacatcacttcctgaaaacaactgctgctctccgtggacaggttgttcagttcaagctctcagacattggagaagggattagagaagtaactgttaaagaatggtatgtaaaagaaggagatacagtgtctcagtttgatagcatctgtgaagttcaaagtgataaagcttctgttaccatcactagtcgttatgatggagtcattaaaaaactctattataatctagacgatattgcctatgtggggaagccattagtagacatagaaacggaagctttaaaagattcagaagaagatgttgttgaaactcctgcagtgtctcatgatgaacatacacaccaagagataaagggccgaaaaacactggcaactcctgcagttcgccgtctggcaatggaaaacaatattaagctgagtgaagttgttggctcaggaaaagatggcagaatacttaaagaagatatcctcaactatttggaaaagcagacaggagctatattgcctccttcacccaaagttgaaattatgccacctccaccaaagccaaaagacatgactgttcctatactagtatcaaaacctccggtattcacaggcaaagacaaaacagaacccataaaaggctttcaaaaagcaatggtcaagactatgtctgcagccctgaagatacctcattttggttattgtgatgagattgaccttactgaactggttaagctccgagaagaattaaaacccattgcatttgctcgtggaattaaactctcctttatgcctttcttcttaaaggctgcttccttgggattactacagtttcctatccttaacgcttctgtggatgaaaactgccagaatataacatataaggcttctcataacattgggatagcaatggatactgagcagggtttgattgtccctaatgtgaaaaatgttcagatctgctctatatttgacatcgccactgaactgaaccgcctccagaaattgggctctgtgggtcagctcagcaccactgatcttacaggaggaacatttactctttccaacattggatcaattggtggtacctttgccaaaccagtgataatgccacctgaagtagccattggggcccttggatcaattaaggccattccccgatttaaccagaaaggagaagtatataaggcacagataatgaatgtgagctggtcagctgatcacagagttattgatggtgctacaatgtcacgcttctccaatttgtggaaatcctatttagaaaacccagcttttatgctactagatctgaaatgaagactgataagacattcttgaactttttgagcttccaaagagtatgtaaaccctagctgtgccagcacatgttcatctttacaatttatattgtaaatgatttgtatcgtatgattaaggatctaaggcacaatatttgtcactgttctattagactttttactgaaaatgaataatggtgtaatggttctcctggggctgtcacattttataggtcagagtgtgacttcttaatatggtgctgatgtttttgtgtcaatggcttgaaactggcaagattaacaaaattaggccgggcatggtggctcacgcctgtaatcccagcactttgggaggcccaggtgggcggatcacctgaggttagaagtttgagaccagcctggccaacatggtgaaacctggcctctactaaaaatacaaaaattagccgggtgtggtggtgggtacctagaatcccagctacttgggaggctgaggcaggagaatcgcttgaacctgggaggtggaggttgcagtgagctgagatcgtgctattgcactccagcctgggcgacagagcaagacgccatctcaaaaacaaaaaaacaaaattcatgttactaaaagacaggtagccatatacagacagtatatgccctattttttttaactgactcttaatgaaactttaattttacttaattaagaaatggaatttatatacaaaaatattttccatttccgttattatgctaattgttgtatgaaataagtgcaattatacttctcttttgagatatccaagagtatattcttgctctgtatagagaatatcatctgatagtgtcttatttatattaattaatgtctttgaaaagggaaaagtataaactggccttaaaattgtccaattatagttttataaccagtctattaaaggtgtttgtttaaaatggaaaaaaaaaaaaaaaa

SEQ ID NO: 26690 - DNA, 2809 bp, Homo Sapiens
actcggctcgcctcgcggcgggcgccctcgtcgccagcggcgcaccatggacgggctgcccggtcgggcgctgggggccgcctgccttctgctgctggcggccggctggctggggcctgaggcctggggctcacccacgcccccgccgacgcctgccgcgcagccgccacccccgccacccggatccccgggtggctcgcaggacacctgtacgtcgtgcggcggcttccggcggccagaggagctcggccgagtggacggcgacttcctggaggcggtgaagcggcacatcttgagccgcctgcagatgcggggccggcccaacatcacgcacgccgtgcctaaggccgccatggtcacggccctgcgcaagctgcacgcgggcaaggtgcgcgaggacggccgcgtggagatcccgcacctcgacggccacgccagcccgggcgccgacggccaggagcgcgtttccgaaatcatcagcttcgccgagacagatggcctcgcctcctcccgggtccgcctatacttcttcatctccaacgaaggcaaccagaacctgtttgtggtccaggccagcctgtggctttacctgaaactcctgccctacgtcctggagaagggcagccggcggaaggtgcgggtcaaagtgtacttccaggagcagggccacggtgacaggtggaacatggtggagaagagggtggacctcaagcgcagcggctggcataccttcccactcacggaggccatccaggccttgtttgagcggggcgagcggcgactcaacctagacgtgcagtgtgacagctgccaggagctggccgtggtgccggtgttcgtggacccaggcgaagagtcgcaccggccctttgtggtggtgcaggctcggctgggcgacagcaggcaccgcattcgcaagcgaggcctggagtgcgatggccggaccaacctctgttgcaggcaacagttcttcattgacttccgcctcatcggctggaacgactggatcatagcacccaccagctactacgggaactactgtgagggcagctgcccagcctacctggcaggggtccccggctctgcctcctccttccacacggctgtggtgaaccagtaccgcatgcggggtctgaaccccggcacggtgaactcctgctgcattcccaccaagctgagcaccatgtccatgctgtacttcgatgatgagtacaacatcgtcaagcgggacgtgcccaacatgattgtggaggagtgcggctgcgcctgacagtgcaaggcaggggcacggtggtggggcacggagggcagtcccgggtgggcttcttccagcccccgcgggaacgggggtacacggtgggctgagtacagtcattctgttgggctgtggagatagtgccagggtgcggcctgagatatttttctacagcttcatagagcaaccagtcaaaaccagagcgagaaccctcaactgacatgaaatactttaaaatgcacacgtagccacgcacagccagacgcatcctgccacccacacagcagcctccaggataccagcaaatggatgcggtgacaaatggcagcttagctacaaatgcctgtcagtcggagagaatggggtgagcagccaccattcccacaagctggcccggccactctgaattgcgccttccgagcacacataaaagcacaaagacagagacgcagagagagagagagagccacggagaggaaaagcagatgcaggggtggggagcgcagctcggcggaggctgcgtgtgccccgtggcttttaccaggcctgctctgcctggctcgatgtctgcttcttccccagcctgggatccttcgtgcttcaaggcctggggagcctgtccttccatgcccttgtcgagggaaagagacccagaaaggacacaacccgtcagagacctgggagcaggggcaatgaccgtttgactgtttgtggcttgggcctctgacatgacttatgtgtgtgtgtgtttttggggtggggagggagagagagaagagggggctaaatttgatgctttaactgatctccaacagttgacaggtcatccttgccagttgtataactgaaaaaggacttttctaccaggtatgaccttttaagtgaaaatctgaattgttctaaatggaaagaaaaaaagttgcaatctgtgcccttcattggggacattcctctaggactggtttggggacgggtgggagtgacccctaggcaaggggatgagaccgcaggaggaaatggcggggaggaggcattcttgaactgctgaggatggggggtgtcccctcagcggaggccaagggaggggagcagcctagttggtcttggagagatggggaaggctttcagctgatttgcagaagttgcccatgtgggccccagccatcagggctggccgtggacgtggcccctgcccactcacctgcccgcctgcccgcccgccagcatagcacttgcagacctgcctgaacgcacatgacatagcacttgccgatctgcgtgtgtccagaagtggcccttggccgagcgccgaactcgctcgccctctagatgtccaagtgccacgtgaactatgcaatttaaagggttgacccacactagacgaaactggactcgtacgactctttttatattttttatacttgaaatgaaatcctttgcttcttttttaagcgaatgattgcttttaatgtttgcactgatttagttgcatgattagtcagaaactgccatttgaaaaaaagttatttttatagcagcaaaaaaaaaaaaaaa

SEQ ID NO: 26691 - DNA, 1136 bp, Homo Sapiens
agcggtttgtctatgttttattttgttgtttgtgcttttggtgtcatatctaagaaatctttgcctcatccaaggtcatgaagatttacctctatattttcttctaaagattttatggttttagctcttacatttaggtctttggtccattttgatttaatttttatataaggtgtgaggtaagggtccagcttcattcttttgcacgtggatattgagttgtgccggcactatttgttaaggctgttttcctctgtttaatcatcttaaccctttttggaaattaattgaccataaatgtgagtgcttatttctggactctcatttctataccattgaactataatatatatctgcccttacgccagtaccacactaattactatagcttcatagtatttgaaatcaggaaatacaagttctccaacttttgttctttttcaatattgttttggttattgcaagtctcttgaatttccatataaattttacgatcagcttgtctgtttctgcaaaaaaaaaacaacaacaactggggattttggtagggatttcattgaatctgtagatcattggccacttgattttaaacaaaatattgagatatctacttcttgaaatgattgcttgagacagtacctgtgtactccttgctatgaaaaatgaggaagttaacatactcatcttccacctttacttttccttactttttttgttgaagtatcattgtggacactttcccagttgacttccacttgatcccctgaattaactaactggcactggcgtttcctttgtaaaatgtacaatgtcagccaccatcttgctactaaagtgtggcctgtggaccacaacatggggggaatctcaggtctcacctcagacttgctgggtcagaacctgagttttgagaggctctgggcaaccggcacctctcagacctgctgttgggttctcatcgatggacccgatgcttcctagcaaatgatacctgttgtatgtgttattggtaataacatagtttacttagctattacattagttaataaaacatgagcgctgaaagagttgtttctgtgaaaataagctgattgctttaaaaagataagagacaaatcaccaaaaaaaaaaaaaaa

SEQ ID NO: 26692 - DNA, 2318 bp, Homo Sapiens
ctgtcttccgcctggaccaagttatccacagcaaccctgctggcatccaacaggctctggcccagcttagtagccgtcaagggagtgtaactgcaccagggggtcatccaaggcacaagcctgggcttccccaagcccctcagggcccctctcctaggcccccaacccgatacgagccccagagggtcaacagcggcctcagttctgacccccactttgaggagccggggccaatggtgagaggggtgggtgggactcctcgggactctgccggggttagtccctttccccctaaacgtcgggagcggcctcccagaaaaccagagctgctacaggaggaatctttgccacctcctcatagctctggattcttgggctctaagcctgagggcccaggccctcaggcagagtccagagatacaggcacagaggccctgacccctcacatctggaaccgtttacatactgccactagccgaaagagttaccggcccagctccatggagccttggatggagcccctgagtccttttgaggatgtggctggcacagaaatgagtcagtctgacagtggggtggacctgagtggggattctcaggtgtcatcaggtccctgcagccagcgaagttcccctgatggaggactcaagggggcagcagagggaccccccaagaggcctggaggctcctcacccctgaatgctgttccttgtgagggtccacctggctctgaacctcctaggagaccaccacctgccccccacgatggggacagaaaggagctgccccgggagcagcctctgccccctggccccattggcacagaacgatcacagcgtacagaccgaggcacagagcctggccccattcggccatcccatcgacctggtcccccagtccagtttggcactagtgacaaggactcagacttacgcctagtggtaggagacagcttgaaagcagagaaggagctaacagcatcagtcactgaggccattcctgtatcacgagactgggagctgcttcccagtgctgctgcctctgctgagccacaatccaagaacctggattctgggcactgtgtcccggagcccagctcctcaggccagcgcctgtatcctgaggttttctatggcagtgctgggccttccagttctcagatctctgggggagccatggactctcaattacatccaaacagtggaggcttccgccctgggacaccctcactgcacccttacagatcacagcccctatacctaccccccggcccagcccctccctcagcactgctctctggggtagctctcaagggccagtttctggatttctccacaatgcaagctacagagctggggaagttgccggctggaggagttctctaccctccaccttccttcctctactctccggctttctgccccagtcctttgcctgacacatcgttgcttcaggtacgccaggatctgccatccccttcggatttttattctactcctctgcagcctggtggccaaagtggctttctcccttcaggggctcctgcccagcagatgcttctacccatggtagactcacagctgcctgtggtgaactttggctccctgccgccagcaccacctcctgccccacctcccctttctctgttacctgtgggccctgctctgcagccccccagcctggctgtgcggcccccacctgctcctgctactcgggtgctgccttcacctgccaggcccttccccgctagcttggggcgagcagagctgcatccagtggaactaaagccgttccaggattatcaaaaactgagcagcaaccttgggggacctggatcatcacggactcccccaactggaaggtccttctctggcctcaattcccgtctcaaggccacgccttccacctacagtggagtcttccgcacccagcgcgtcgacctttaccagcaggcctccccaccagatgccctgcgctggatacctaagccttgggagcggacagggccgccacctcgagaagggccctcccgacgggcagaggagcctgggtcccgaggggacaaggagcctgggttgcccccaccccgctgagggagttcctcttgccccctacccccggggcttgtatatagattataaatatataagggggaaaggggtgggcggggagggttgtggggctggggctcacttcccctcctcccccttcccctggtcccctgtccctggggctgtttgttaaaaaagagtaataaaaggatttaaaaaaaaaaaaaaaaaaaaaaaaaaaaaaaaaaaaaaaaaaaaaaaaaaaaa

SEQ ID NO: 26693 - DNA, 3491 bp, Homo Sapiens
gcccggagaagcaggctcaggagggagggagccagaggaaaagaagaggaggagaaggaggaggacccggggagggaggcgcggcgcgggaggaggaggggcgcagccgcggagccagtggccccgcttggacgcgctgctctccagatacccccggagctccagccgcgcggatcgcgcgctcccgccgctctgcccctaaacttctgccgtagctccctttcaagccagcgaatttattccttaaaaccagaaactgaacctcggcacgggaaaggagtccgcggaggagcaaaaccacagcagagcaagaagagcttcagagagcagccttcccggagcaccaactccgtgtcgggagtgcagaaaccaacaagtgagagggcgccgcgttcccggggcgcagctgcgggcggcgggagcaggcgcaggaggaggaagcgagcgcccccgagccccgagcccgagtccccgagcctgagccgcaatcgctgcggtactctgctccggattcgtgtgcgcgggctgcgccgagcgctgggcaggaggcttcgttttgccctggttgcaagcagcggctgggagcagccggtccctggggaatatgcggcgcgcgtggatcctgctcaccttgggcttggtggcctgcgtgtcggcggagtcgagagcagagctgacatctgataaagacatgtaccttgacaacagctccattgaagaagcttcaggagtgtatcctattgatgacgatgactacgcttctgcgtctggctcgggagctgatgaggatgtagagagtccagagctgacaacatctcgaccacttccaaagatactgttgactagtgctgctccaaaagtggaaaccacgacgctgaatatacagaacaagatacctgctcagacaaagtcacctgaagaaactgataaagagaaagttcacctctctgactcagaaaggaaaatggacccagccgaagaggatacaaatgtgtatactgagaaacactcagacagtctgtttaaacggacagaagtcctagcagctgtcattgctggtggagttattggctttctctttgcaatttttcttatcctgctgttggtgtatcgcatgagaaagaaggatgaaggaagctatgaccttggagaacgcaaaccatccagtgctgcttatcagaaggcacctactaaggagttttatgcgtaaaactccaacttagtgtctctatttatgagatcactgaacttttcaaaataaagcttttgcatagaataatgaagatctttgttttttgttttcattaaagagccattctggcactttaatgataaaatcccattgtatttaaaacatttcatgtatttctttagaacaacataaaattaaaatttaacatctgcagtgttctgtgaatagcagtggcaaaatattatgttatgaaaaccctcgatgttcatggaattggtttaaacttttatgcgcaaatacaaaatgattgtctttttcctatgactcaaagatgaaagctgtttcatttgtgtcagcatgtctcagattgaccttaccaagttggtcttactttgttaatttatctgttgtccccttcctctcctctgccctcccttcttgtgcccttaaaaccaaaccctatgccttttgtagctgtcatggtgcaatttgtctttggaaaattcagataatggtaatttagtgtatatgtgattttcaaatatgtaaactttaacttccactttgtataaatttttaagtgtcagactatccattttacacttgctttatttttcattacctgtagctttgggcagatttgcaacagcaaattaatgtgtaaaattggattattactacaaaaccgtttagtcatatctatctaatcagatcttcttttgggaggatttgatgtaagttactgacaagcctcagcaaacccaaagatgttaacagtattttaagaagttgctgcagattcctttggccactgtatttgttaatttcttgcaatttgaaggtacgagtagaggtttaaagaaaaatcagtttttgttcttaaaaatgcatttaagttgtaaacgtctttttaagcctttgaagtgcctctgattctatgtaacttgttgcagactggtgttaatgagtatatgtaacagtttaaaaaaaaagttggtattttataagcacagacaattctaatggtaacttttgtagtcttatgaatagacataaattgtaatttgggaacataaaaactactgaataaatcatgtggcctaatattgaaaatgtcactgttataaattttgtacatttttgatcaaatgtacatctcccctttgctaacggccgtctgctctcaaggatgacgtgggtttgatttctaagtgtttcacagtgtctgtaaatcaagaccaaagagcctgtcgatgagactgtttattaccagattcacttctgaattggccagaggaaatctgaatgtattatcctgtgtgtgtctaggtagagatattggaaggctgccaggggatttcgaagtttgcaacctttataggataactgatggcaatattaagacagacgcctgcttttgcaaataacttacaagactgtaaattccaaagatctgaatggggctttcctgatgttggtatctaaggcttaggcctatagattgatttacctttggaattgtgctccaaatgtctactgaagcttaaccgaagaactaataaatggactacagtagctcacgttacagggaaggagggtaggcagggaggctctgtgtgttaaaatgagggtctcactgctttaggattgaagtggctggaaagagtgatgcctggggaaggagatggagttatgagggtactgtggctggtactttctgtactaaacatttcctttttctattttaccactaattttgttttaaactgtgagccgtccaagtcagaagaagacagcaaaaaaagcaacttttccaacatacaatttacttttaataaagtatgaatatttcattttgagaacattccctggaattgccacataattcattaaaaacatttttttaagcaacacttggaacagtgtttactttaaatccttaatggccttaattaattctcagattcctgccccatcacttacagaaccaattcactttagagtgactaaaaggaaacgatagcctagctttctaaagccacgctgtgtccctcaattacagagggtaggaatgggtatacctctaactgtgcaaagcagagtgaaattcaattcatagaataacaactgctgggaatatccgtgccaggaaaagaaaaatttctggcaaatattttgtcactgctgtaaagcaaaatatttgtgaaagtgccaaaataaagtctgtcatgccaaaagtaaaaaaaaaaaaaaaaaaaaaaaaaaaaaaaaaaaaaaaaaaaaaaaaaaaaaaaaaaaa

SEQ ID NO: 26694 - DNA, 2584 bp, Homo Sapiens
cgcggtgctccacacgctggttgctggtggttgtggggaccccgcggctgccggctatatcgggtagaggggcccggccgcccagggagggcgtggtgggggcatggctgagccgcaagctgagcgtccccgcctttgcgtcttccctgacctcttgcggcccccgagcgctgctgacattgagacctggtgtcagcctcacaggaacaaaacattaccctttcatttgtactgcctccttccacacgagtgcccctttggccaaagaagattattatcagatattaggagtgcctcgaaatgccagccagaaagagatcaagaaagcctattatcagcttgccaagaagtatcaccctgacacaaataaggatgatcccaaagccaaggagaagttctcccagctggcagaagcctatgaggttttgagtgatgaggtgaagaggaagcagtacgatgcctacggctctgcaggcttcgatcctggggccagcggctcccagcatagctactggaagggaggccccactgtggaccccgaggagctgttcaggaagatctttggcgagttctcatcctcttcatttggagatttccagaccgtgtttgatcagcctcaggaatacttcatggagttgacattcaatcaagctgcaaagggggtcaacaaggagttcaccgtgaacatcatggacacgtgtgagcgctgcaacggcaaggggaacgagcccggcaccaaggtgcagcattgccactactgtggcggctccggcatggaaaccatcaacacaggcccttttgtgatgcgttccacgtgtaggagatgtggtggccgcggctccatcatcatatcgccctgtgtggtctgcaggggagcaggacaagccaagcagaaaaagcgagtgatgatccctgtgcctgcaggagtcgaggatggccagaccgtgaggatgcctgtgggaaaaagggaaattttcattacgttcagggtgcagaaaagccctgtgttccggagggacggcgcagacatccactccgacctctttatttctatagctcaggctcttcttgggggaacagccagagcccagggcctgtacgagacgatcaacgtgacgatcccccctgggactcagacagaccagaagattcggatgggtgggaaaggcatcccccggattaacagctacggctacggagaccactacatccacatcaagatacgagttccaaagaggctaacgagccggcagcagagcctgatcctgagctacgccgaggacgagacagatgtggaggggacggtgaacggcgtcaccctcaccagctctggaaaaagatccactggaaactaggccgggaagcagcagcccctccaagggccagggcacctgggagacgggaggattccagaacagcagcactgagctcccacccgcagagcctctggacggccttggcaacagcaaaatcatgggacaacacctctctccacggaaaggtcacagtggacagcccgggcagtaggatgcagccccagaggctggtggcagtttcctgtccattggtaggtgacggcccctggctcaggcagagggagatggttagactcttgcagggctaaaactctaatttggaattgaatattgtggatatcttagttaaaggccatgcttacagcttagaaatgaagccttaagctgcatcaagttacgaagtgattaatttccttctcagcaaacctccgggaggttccagaatgagttcttcctgacaggttgtcttcactgggagcgtggggcccccaggccccaccagcaccgtcctcccctaatgaggggccctgccgaggcatcagctgctctgctcagttagtttttattcccggggtaccaagcagctgcacagtcggtgcctgggaggcacgtagaggcccagagagtccctgggggttctgctctgaccgtgtgggtggtgatccttgtcaggatgtacagtccttgctcccaccccatccgggatggccgcctgtccctgactattgagtcctgttgttgtaagccaggcatggagggctcctgcccttctgctgagccacagcccattgcagcactgtgctggccagacttcagctgccttgggaactgaagccctgccactgttgctagtcaggggcttggttctcccacttacactgttgacatctattttctgaagtgtgtttaaattattcagtgctaatcattgttttttcctttgtaaatgttgattcagaaaaggaaagcacaggctaagcagttgaaggttccccaccattcagtgagagcagaacccccattccccagcctctgctggtagcatgtcgcagtttccatgtgtttcaggatcttcgggctgtcgttagacaggttaatgaagaacacttctcaacagtttcctttttgttttcctttataattcactaaaataaagcatctattagtgtctgatttaggaatgtaaaatgattctgtattaatgtaaataagattatctattgcaaaaagaaaaaaaaaaaaaaaaaaaaaaaaaaaaaaaaaaaaaa

SEQ ID NO: 26695 - DNA, 2852 bp, Homo Sapiens
ctggaacaaacatggccgctctggcgcccgtcggctcccccgcctcccgcggtcctaggctggccgcgggcctccggctgctcccaatgctgggtttgctgcagttgctggccgagcctggcctgggccgcgtccatcacctggcactcaaggatgatgtgaggcataaagttcatctgaacacctttggcttcttcaaggatgggtacatggtggtgaatgtcagtagcctctcactgaatgagcctgaagacaaggatgtgactattggatttagcctagaccgtacaaagaatgatggcttttcttcttacctggatgaagatgtgaattactgtattttaaagaaacagtctgtctctgtcacccttttaatcctagacatctccagaaggtaagagtaaagtctccaccagaagctggtacccagttaccaaagatcatcttcagcagggatgagaaagtccttggtcagagccaggagcctaatgttaaccctgcttcagcaggcaaccagacccagaagacacaagatggtggaaagtctaaaagaagtacagtggattcaaaggccatgggagagaaatccttttctgttcataataatggtggggcagtgtcatttcagtttttctttaacatcagcactgatgaccaagaaggcctttacagtctttattttcataaatgccttggaaaagaattgccaagtgacaagtttacattcagccttgatattgagatcacagagaagaatcctgacagctacctctcagcaggagaaattcctctccccaaattatacatctcaatggcctttttcttctttctttctgggaccatctggattcatatccttcgaaaacgacggaatgatgtatttaaaatccactggctgatggcggcccttcctttcaccaagtctctttccttggtgttccatgcaattgactaccactacatctcctcccagggcttccctatcgaaggctgggctgttgtgtactacataactcaccttttgaaaggggcgctactcttcatcaccattgcactcattggcactggctgggctttcattaagcacatcctttctgataaagacaaaaagatcttcatgattgtcattccactccaggtcctggcaaatgtagcctacatcatcatagagtccaccgaggagggcacgactgaatatggcttgtggaaggactctctatttctggtcgacctgttgtgttgtggtgccatcctcttcccagtggtgtggtcaatcagacatttacaagaagcatcagcaacagatggaaaagctgctattaacttagcaaagctgaaacttttcagacattattacgtcttgattgtgtgttacatatacttcactaggatcattgcatttctcctcaaactcgctgttccattccagtggaagtggctctaccagctcctggatgaaacggccacactggtcttctttgttctaacggggtataaattccgtccggcttcagataacccctacctacaactttctcaggaagaagaagacttggaaatggagtccgtgtaagaaatctttcttccctcttccttagccctgacccctttgcctaacacaaagcagcacagtgtgaatcgggccggctgctctcagcatttcgtggctgcaggggtggttcctctatttttagcagaaggaagcggacactggagccccaggctgtctgatctggtttgaagtacagtatctgccaaacctagctgggtcttgtcagggaagatggaacttgccgttccactaagcatcattggagcctgctttcaagaactcagtggcaagaacttaggaatatacgtggccagttcacgagggagaacagggggccgactttctgtcaggcccgccatcaggcgcttacgtctgaaaatggaatcttctgagtcatctctaagtctgctaatgatcctcagacatcctctatcgtcagataactgcgtggcttttcacagcacaatgactttgacctatatctgagcactaataggggcttttctgagtcacacagtgaatgactctagggtcctattttctgggaaagggccatcattgtctagaaaaatgagtagtgattaagcatatttgcttgttaactgaaatttgataagccaggtcaatgctgtgtttgatgattagcctaaggcagagttttcccttcttggttcactggtatcaagtgttctgcccccagccctggcagcctttgaattcttcccaattcagaggctgagactcggcccatgctaagctctgcttggctgtcagcgggtcaggcagcatgggacagctctctctgctcagctccacggcaacagtaaaggaaggcaggtcctgccagcgggcgccaaacagcatctccccatgcagaggaagaaacacctccttctaaacagtggagaggagtgcaggaggcccatcagctgtgcctttcccagaagtagcaggatctgagcaagtgtctgttggttgaagaggcacacatgtcaggctggcaaccagcagcatcaggaaataacctaacacgcggtgtgtttatcattcccctgctgggagcctttggcttggtccgtccgcataacacggggttctttgggtaggcggctagaagccgagcggccgggtcgcagcatcgtctcctttactgcattgtactccacagtcgtaatgggaggttcccgcttcccacatcctttccctcagccgttacatcttggagcctggatgcattatgaaggtatttttgtttcgtggcaacaatttttttaaaatttaaaaaaaaaaaaaaaaaaaa

SEQ ID NO: 26696 - DNA, 1710 bp, Homo Sapiens
ctggagctttctgcacaccccccgaccgctcccgcccaagcttcctaaaaaagaaaggtgcaaagtttggtccaggatagaaaaatgactgatcaaaggcaggcgatacttcctgttgccgggacgctatatataacgtgatgagcgcacgggctgcggagacgcaccggagcgctcgcccagccgccgcctccaagcccctgaggtttccggggaccacaatgaacaacttgctgtgctgcgcgctcgtgtttctggacatctccattaagtggaccacccaggaaacgtttcctccaaagtaccttcattatgacgaagaaacctctcatcagctgttgtgtgacaaatgtcctcctggtacctacctaaaacaacactgtacagcaaagtggaagaccgtgtgcgccccttgccctgaccactactacacagacagctggcacaccagtgacgagtgtctatactgcagccccgtgtgcaaggagctgcagtacgtcaagcaggagtgcaatcgcacccacaaccgcgtgtgcgaatgcaaggaagggcgctaccttgagatagagttctgcttgaaacataggagctgccctcctggatttggagtggtgcaagctggaaccccagagcgaaatacagtttgcaaaagatgtccagatgggttcttctcaaatgagacgtcatctaaagcaccctgtagaaaacacacaaattgcagtgtctttggtctcctgctaactcagaaaggaaatgcaacacacgacaacatatgttccggaaacagtgaatcaactcaaaaatgtggaatagatgttaccctgtgtgaggaggcattcttcaggtttgctgttcctacaaagtttacgcctaactggcttagtgtcttggtagacaatttgcctggcaccaaagtaaacgcagagagtgtagagaggataaaacggcaacacagctcacaagaacagactttccagctgctgaagttatggaaacatcaaaacaaagaccaagatatagtcaagaagatcatccaagatattgacctctgtgaaaacagcgtgcagcggcacattggacatgctaacctcaccttcgagcagcttcgtagcttgatggaaagcttaccgggaaagaaagtgggagcagaagacattgaaaaaacaataaaggcatgcaaacccagtgaccagatcctgaagctgctcagtttgtggcgaataaaaaatggcgaccaagacaccttgaagggcctaatgcacgcactaaagcactcaaagacgtaccactttcccaaaactgtcactcagagtctaaagaagaccatcaggttccttcacagcttcacaatgtacaaattgtatcagaagttatttttagaaatgataggtaaccaggtccaatcagtaaaaataagctgcttataactggaaatggccattgagctgtttcctcacaattggcgagatcccatggatgagtaaactgtttctcaggcacttgaggctttcagtgatatctttctcattaccagtgactaattttgccacagggtactaaaagaaactatgatgtggagaaaggactaacatctcctccaataaaccccaaatggttaatccaactgtcagatctggatcgttatctactgactatattttcccttattactgcttgcagtaattcaactggaaaaaaaaaaaaaaaaaa

SEQ ID NO: 26697 - DNA, 2099 bp, Homo Sapiens
ggcggaggcggccgatttggggctgggggccgccgtccccgtggagctgaggcgggagcgacgcatggtgtgcgtggagtacccgggagtggtgcgtgatgtggctaagatgctgccgactctgggcggcgaggaaggcgtctcccggatctacgcagaccccaccaagaggctggagctgtacttccggcccaaggacccatactgccacccagtgtgcgccaaccgcttcagtaccagcagcctgctgctccgcatcaggaagagaacgaggcggcagaaaggggtgctgggcactgaggcccactccgaggtcacatttgacatggagatccttggcatcatctccaccatttacaaatttcaggggatgtctgacttccagtacttggctgtgcatacggaagcaggcggcaagcatacgtcaatgtatgacaaggtgctcatgctccggcccgagaaggaggcctttttccaccaggagctgccgctctacatccccccacccatcttctcccggctggacgccccggtggactacttctaccgaccagagacccagcaccgggaaggctacaacaatccccccatctcaggtgagaatctgattggcctgagcagagcccggcgcccccacaatgccatctttgtcaactttgaggatgaggaggtgcccaagcagccactggaggctgcagcccagacgtggaggagagtctgcactaaccccgtggaccggaaggtggaggaggagctgaggaagctgtttgacatccgtcccatctggtcccgaaatgctgtcaaggccaacatcagcgtccacccagacaagctcaaggtcttgcttcccttcatagcctattacatgataacaggcccctggcgcagcctatggattcgatttgggtatgacccccgaaaaaacccagatgccaagatttatcaagtcctcgatttccgaatccgttgtggaatgaaacacggttacgcccccagtgacttgccggtcaaagcaaagcgcagcacctacaactacagcctccccatcaccgtcaagaagacatccagccagcttgtcaccatgcatgacctgaagcagggcctgggcccgtcggggacgagtggtgctcggaaaccagcttccagcaagtacaagctcaaggactctgtctacatcttccgggaaggggccttgccaccctatcggcagatgttctaccagttatgcgacttgaatgtggaagagttgcagaagatcattcaccgcaatgacggggcagagaattcctgcacagaacgggatgggtggtgcctccccaagaccagcgacgagctcagggacaccatgtccctcatgatccggcagaccatccgctccaagaggcctgctctcttttccagctcagccaaggctgatggcggaaaagagcagctgacgtacgagtctggggaagacgaggaggatgaggaggaggaggaagaggaggaggaggacttcaagccatccgacggcagtgaaaacgaaatggagacagagattctggactacgtgtgacagggcccaaggctgggcctccctgacccggccagactggtgtctggcctaatgagggagccggggctccccattgccacccacagtgcccggaatggccctaggaggccctctgaggagagctagagtcccagcaaagggtgcagctgaccctagcactggctgtgacatgctgcttggtgctgcctctggtcctgaggggttagggacatccccaaagggtataccctggctctgccacccatgaaccagcccagcatccagccagtgagtgggcacccaatgcctctcaggatgagaccagtaaatgccggaggtggagctgggcagctgtggagccccaggccacaggccagtctcgcttggctctcatgactgtggtggtggagatagcgtggggagcctcgcccatggtctcacgtggcaagaagtgcctttagctctggatcccaaccgtttggcacagctttggccacagccaggcccctctggaattgtccttattaaaccagtttcccgagaaaaaaaaaaaaaaaaaaaaaaa

SEQ ID NO: 26698 - DNA, 948 bp, Homo Sapiens
ccgaagggcacagctccccgcgccgcgcacgccgcccgagcccggagtgcggacacccccgggatgcttgcgccccagaggacccgcgccccaagcccccgcgccgcccccaggcccacccggagcatgctgcctgcagccatgaagggcctcggcctggcgctgctggccgtcctgctgtgctcggcgcccgctcatggcctgtggtgccaggactgcaccctgaccaccaactccagccattgcaccccaaagcagtgccagccgtccgacacggtgtgtgccagtgtccgaatcaccgatcccagcagcagcaggaaggatcactcggtgaacaagatgtgtgcctcctcctgtgacttcgttaagcgacactttttctcagactatctgatggggtttattaactctgggatcttaaaggtcgacgtggactgctgcgagaaggatttgtgcaatggggcggcaggggcagggcacagcccctgggccctggccggggggctcctgctcagcctggggcctgccctcctctgggctgggccctgatgtctcctccttcccacggggcttctgagcttgctcccctgagcctgtggctgccctctccccagcctggcgtggctggggctgggggcagccttggcccagctccgtggctgtggcctgtggctctcactcctcccccgacgtgaagcctccctgtctctccgccagctctgagtcccaggcagctggacatctccaggaaaccaggccatctgggcaggaggcctggggatgagggtggggggggacccccaggtcccggaggggaagtgaagcaacagcccagctggaagggcgtcttctgcggagaaataaagtcacttttgagtcctgagaaaaaaaaaaaaaaaaaaaaaaaaaaaaaaaaaaaaaaaaaaaaaaaaaaaaaaaaaaaaaaaa

SEQ ID NO: 26699 - DNA, 3583 bp, Homo Sapiens
cacgcgccaccacgcccggctaattcttttgtatttttagtagagacagggtttcgctatgtagaccaggctggtctcgcactcctggcctccagtgattcacccaccttggcctcccagagtgctggaatgacacgtatgagccaccacactgacctttttattatttttatccaccatctcgctgcaatttcagtattgcccatcgacctatattgcctcctggtaatgacccctgaggaatgagccatgccatttccataggtggaggcgacgggtcatggtggtgagaacttcactgacctggaagaggtggagaagatgctgggaagctgctgagggctgcccacctgtgttaggagaaggcagatggggacccatggggacagtaatactattttggatccacacaacgggagtggaaaatgccttgaggcacagcagcgtctgaggcgggtgagaaatccggcctgcagagtcgcggctggccttcagatctgcgggctgcctgtgagatgccgtgttacctaaatccatttgggcactgagttccaggagtgggggcaagaattccgatgacggggctttatccggtgcgcatccagctcagagtggttcctgagaccagccaccatgggcagccaggatgtgctcatccttgaggctttccgaggcatcaaggagatggttggataaagaatttagcacagagcttgactgatggcaggcgcccacaacatgagacacattaataatgtgtgtggaggccaggtgtagtggttcatgcctgtcaccccagcactttgggaggcagaggtgggaagatttcttgaggccaggaattcaagaccagcctgggcaacacagcgagacctcatctctaccaaaaaaaaaaaaaaaaaaaaggaaaaaattcacctggcctagtggtgcacacttgtagtctccgctactcaggaggctgaggcaggaggattgcttgagctcgggagttccaggctgcagtgggctatgattgcatcactgcactccagtctgggcaatagagcaagaccctgtctcttaaaaaaataaagtctgttgaaaagaatgaatgaaggaaggaaggaatgagagggaaaccctgtctcagctcctcccgcagggaagctggggcagggcaggcagggggggcatccggccccgctccctcccttactctggcccagaaagcactggtgccatctgcacagggtggagccaaagaaagtgccccactcacagcagagggaggccatttgaggacagcagggaaaatgggatctcagccatctaggagggggccagagatgtgggatggacacctaggaaatccagccgaggacaccagagtggcttttgactctggtcccctggctgaacgcgttccctttacagtttaaatttaggctcaaggagaagaagctggcaatcggcagggccagtgctgtagagaggatgtagggtttccggaaaatagccaacacttcagcagtgctggctgcgagctcatccaagcatgttacgggtgttaactcatttcctctccagcaaccctgtgagagggtctgagtgttcccatctccattttacagaggctcagagaggtgcagtcctttgcctgaggtcacacagctagtaagaggcagagccgggatttgaaccctggcagtctggccctagagccccagctgttaaccattaggctttatagccccagttataacaacaataataatactaatacaagtgaaccttcactgagtgccatttatagatcaagcactattctaaggattttaaagcatatttaattctcacagcactctgatgaaggaggtattcattttacaattgaagaaacagaggcctagagacattgagtcacttgcgcaaggtcacacagctggccagtggcagagccagcctttgaacctgagccttctggttgcagagctacggcttttaggcaccgtgctgagggcctccagaatgacacagatgtggcctcgagttacacagggaggcaggttgagggtgacccccaccaggcctacccaaggctgggtattaataatcacagtgcatacaccaggcccagggaggttgagccactcatccaagctcacacagcaagctcacagcacactcaggctgtcatgcagcctgggctacccccttaaccctgcctggcccctgcagccaacagagacatggcatccatcgtgtctgagatcatgatgtatgtgctcattgtggtgttgaccatatggctcgtggcagagatgatttactgctacaagaagatcgctgccgccacggagactgctgcacaggagaatgcgtgagtagggtggctgggaggtgggagggcacccagggcaccgtcacacttgccagagaggaactccggagcccgggcagggaggaggcagcggagcggcccagggcgccatctctcagtactacccagaggggagtgctccctgtcagacacaggataggggtcgtcagacccagccccttcctccctccaactcaggagcccaggctcccagccagattcctcaaagaccctgaggagtccacccatagactccttctctctctaactaaggagccctgtgtacctggggtggagaccgctaccttcccccatcccccgggggttgggtcggtctgatgatggggtcactgtatacctggcctttcccccacagctcggaatacctggccatcacctctgaaagcaaagagaactgcacgggcgtccaggtggccgaatagccctggccctgggccccgcctcaaggaagagccagccgtaatggggactctccaggcaccgcctgcccccagcgtgggggtggccactcctgggccccagaaagcctcagagtcctgccgacggagccactggggtgggagggggcagggggcttggctcgcacccccactttcgcctcctccagctcctgccccgccggccgcgcaccgccatgcatgatgggtaaagcaatactgccgctgcccccaccctgcttctgctgcctgtttggggaggggggcggtgaggtgggggcagcggccccgcacccctcctccttgctgatttgcacacattggccgcttcagacacgcacttctggggccagcccctccccgcctcctccctgcctggcggcaggggtcgcgatgatgggctggagcagtttggggcagggggttctgggacccactccgactccccctccccggcatcatttcccctcccgcttcctccggctggacctggggtcccccctccctgtaatgcactcctgccccggcccaacctcgccctctctcaccagccttgaactgtggccacctagaaaggggcccattcagcctcgtctctttacagaagtagttttgttcatgaaataaagactcttggacttgaaaaaaaaaaaaaaaaaaaaaaaaaaaaaaaaaaaaaaaaaaaaaaaaaaaaaaaaaaaaaaaaaaaaaaaaaaaaaaaaaaaaaaaaaaaaaaaaaaaaaaaaaaaaaaaaaaaaaaaaa

SEQ ID NO: 26700 - DNA, 1685 bp, Homo Sapiens
cgcccccagatctgcaccgccagccgccgggagctccgggctccgggcgtagaggctgcgctgtcacatgggcggcggcgacggggccgcatttaagcggccgggggacggcgcccgcctccagcgcgtcctcgggcttggctcccgccgggagccccgttctctgcccgccgggggccccgcgccgcgccgcaccgcgccgcccccgccgggccatgcgagcgcgggccccgccgcgatgagctcgcacatcgccaaaagcgagtccaagacgtcgctgctgaaggcggcggcggcggcggcgagcgggggcagccgggctccccgccacggccctgcccgggacccggggctgcctagccgccggctacccggctcctgcccggcgacgccgcagtcgtccggggaccccagttcgcggaggcccctgtgccggccggcgccgcgagaggagggcgcgcgggggagccagcgtgtgctcccccgggcgcactgcaggccccgggaggcgctgccggccgcggcgtcccgaccttcgccgtcgtcgccgctgccgccggcccgcgggcgggatggggaggaacggggactgtccccggcgctcggcctccggggctctctgcgagcccggggccgcggggactccgttccagccgccgcgtccgaggcggacccgttcctccaccggctgcgccccatgctcagctccgcctttggccaggatagatcactgcgaccagaggaaattgaagagctccgagaggccttcagagaattcgacaaggacaaggatggctacatcaactgccgggatctgggcaactgcatgcgcaccatgggctacatgcccaccgagatggagctcatcgaactgtcccagcagatcaacatgaacctgggtggccatgtagattttgatgacttcgtggagctaatggggcctaaactcctggcagagacagcagatatgattggtgtaaaggaactgcgagatgctttccgagagtttgacaccaatggtgatggggaaataagcaccagtgagctgcgagaggctatgaggaagctcctgggtcatcaggtgggacaccgagacatagaggaaattatccgagatgtggacctcaatggggatggacgagtggactttgaagagtttgtccggatgatgtcccgctgaggccgcgagggcccctccaggactgccaagctcccaaaggcggggctaagaggagctagagcttgcctcacccgctgtagccgccgagagcccaggatgtactggcggatggggcctgcctgcaccccggggaggcgcccaccccggacccccacccctccgcactgtgaaagactaactcctgcaactggaaagcgggggcgcccgccgacgaggaggccaccgtgccaagccggcagaggtcatgccaggcgccaagggccatgtgcccagctgctgctggctgggtgggccagggagcccgccagcagaccccacacagcatgtccgccccagggcaaagcctcccaccttcgctctgcgcccgtcccagctcgcctcagccctgttatctcagaaccaataaaaatatttccaagagcaaaaaaaaaaaaaaaaaaaaaaaaaaaaaaaaaaaaaaaaaaaaaaaaaaaaaaaaaaaaaaaaaaaaaaaaaaaaaaaaaaa

SEQ ID NO: 26701 - DNA, 3939 bp, Homo Sapiens
ctggagagtaaaaagaactgggggtaagagcccctctgcctagcactgctcccccaaggctcccagaaatctcaggtcagaggcacggacagcctctggagctctcgtctggtgggaccatgaactgccagcagctgtggctgggcttcctactccccatgacagtctcaggccgggtcctggggcttgcagaggtggcgcccgtggactacctgtcacaatatgggtacctacagaagcctctagaaggatctaataacttcaagccagaagatatcaccgaggctctgagggagagtcctggcccatgccgacatcccagagctgggcagtgtgcacttcgacgaagacgagttctggactgaggggacctaccgtggggtgaacctgcgcatcattgcagcccatgaagtgggccatgctctggggcttgggcactcccgatattcccaggccctcatggccccagtctacgagggctaccggccccactttaagctgcacccagatgatgtggcagggatccaggctctctatggcaagaagagtccagtgataagggatgaggaagaagaagagacagagctgcccactgtgcccccagtgcccacagaacccagtcccatgccagacccttgcagtagtgaactggatgccatgatgctgggtgaggcccctcccctccaggctgttggcaggcggtgggggcagcctgctgatcctgaggcctggacaaatgggagtgacatgggacttcagcatgagcaatggaggttagaccccaggcattaatgaccatggaaggagacatgtgacatggggagggagagttcggagccaaattaaaggtggcttaggcaggcacttaccaaggctgccacgctctaagggccactagaacacatctggaaatgcagcaagatggagaaaactatattacccagattgcctgttagagagggtgcacctggttggaaggacaactaggaagccacttggaggggagggtgaggttcctaaggaggaatagctatctgcagggcttttgttttgttgagtggaccaaagctgaaacgctctgagcaacaaagcattctgagtcctctttgtctgcctttaattttctctttgaattaaagttgaatgaatttttgaagaatcagcctgcagggagagggcaaattgttagtcagcctgagatacccccaagtttctgtctacttgacctctgtctttttgacttgttgacacaccattacgctcagggccccgtgggaagacctatgctttcaagggggactatgtgtggactgtatcagattcaggaccgggccccttgttccgagtgtctgccctttgggaggggctccccggaaacctggatgctgctgtctactcgcctcgaacacaatggattcacttctttaagggtaaggaggctagttacagtgtcttacttgaggagggcctaatcttaaagaaactataaaagggagggagatgagaagtttctgaataggtggaccggaggagaccaaaagctatcacctgaggacagaggtgacttgttctttcctcacatgctctcaggagacaaggtggcgctacattaatttcaagatgtctcctggcttccccaagaagctgaatagggtagaacctaacctggatgcagctctctattggcctctcaaccaaaaggtgttcctctttaaggtataaagttcaaagcaagggcaaatcccttcttaggaggagtgggctaccttatactgagaagcaaagcttgcgcttgaagggagatgttctgcagctgcagtgggctgggggtggacccctgggggtcctaagctctctcctcttcctctcccctctccccacccatcccatatccagggctccgggtactggcagtgggacgagctagcccgaactgacttcagcagctaccccaaaccaatcaagggtttgtttacgggagtgccaaaccagccctcggctgctatgagttggcaagatggccgagtctacttcttcaagggcaaagtctactggcgcctcaaccagcagcttcgagtagagaaaggctatcccagaaatatttcccacaactggatgcactgtcgtccccggactatagacactaccccatcaggtgggaataccactccctcaggtacgggcataaccttggataccactctctcagccacagaaaccacgtttgaatactgactgctcacccacagacacaatcttggacattaacccctgaggctccaccacccaccctttcatttcccccccagaagcctaaggcctaatagctgaatgaaatacctgtctgctcagtagaaccttgcaggtgctgtagcaggcgcaagaccgtagatctcaggcctctaacacttccaactccagccaccactttcctgtgcattttcactcctgagaagtgctcccctaactcagatcccctaacttagatttggcccccaactccatttcctgtctgtcttagacagcccttccaactgtgtcatctcttctctggaggtcaatggtggagggagatgcctgggtcctgttcttcctacataaaatgcaagaaaacagcatggccagtaaactgagcaagggccttggaatccttgagaatcacatttatgtgcttatgattacgggcaagctaattaaccttgttgaatctcagattccccatttgcaacattaggttaagaccagtactgcaggattgttgcactaaatgaaatactgtatgtgaagtgcctggcacagtgtctggtacatttgtgtttaataaaagctaactccatgttcataagagaggactgaacagctcttcctctagctgtctggctgtataactcttacagtagtctgtataataagggcatctctattagatctttaggggacagaggatttgtcaagatggttagctctttgttttggggtgcagagaaagaaaagagcagcaacagcagaggctggactccctggttcagtatttaatgccattttattcacatgctcccatgttctccctccctcccattgtagccttgctgcccaggggagggatatgtcttcctttatgcatctgggaaaccaggaacagaccctgcgcaggagagtcagagggggaagagttagaatgggtcagtggctggaacaaagttctggttaaggaggaaattagtgccacccacggtgagaagcagagaaggcacttgcatcctatgcagccctgaagaccaggctcctttgggcaaaaggcaagactctggcaggtgggtcaatgctctctccttggagcaagaagccagcttttggggaaggcaggtcctgaggcaggcactgccctgtggtcttccccaggttgaggagagaagtggaagccccatggaagacagtgctcccagctgaggtaggaggcggaggtgggggtgggggtagtttaagcctatggggcccagggggaaaggccaaacagaaacccaactaccccctaatgaagggcctggaggttggggtatcttggagctcctcagagcccttcttcccatcaaaaaggtatcaaatgccttggaagctccctgatcctacaaaacaaaaaaatgcttatttttaccactgtgaggcaagctgaggtgaacatttaaaaggctatttcaagacgaggtgcggtggctataatcctagcactttgggaggctgaagcaggaggatcacttgagcccaggagttcaagaccagcttgggcaacatagggagaccctgtctctgcaaaaaaataaaaacgaatacataaaaaaaaaaaaaaaaaaaaaaaaaaaaaaaaaaaaaaaaaaaaaaaaaaaaaaaaaaaaaaaaaaaaaaaaaaaaaaaaaaaaaaaaaaaaaaaaaaaaaaaaaa

SEQ ID NO: 26702 - DNA, 2210 bp, Homo Sapiens
ctggtgtggccagcacagcctctccaaacctgagtgggaagacactgagttccagtggattcaacacacagaagcgtggattgaagtgagacagacttgggaaacaacttctccccaggggcccctgggagagactttggcagtgccttttgttggaagtctttaaaaactggaccggaacaaggagacccctgcccagagttggtgagctggacaacatgacccctaccctcttgagccacggcccctgttctgctggagaaagccctgcagaggaggtcatccgtggcctccttttgggctctgttccaggcccccggcccacgtgtcccctgccctctgtgggcttctgggtatgggtgagtggcagaggggtaaggagagccttcttggcttgcggcgtatggagagaagacgtcccagggaatcctcgctcctgatttaagcagctccgacagctttatggtgcctcctcgagtgagcccccagcgttggctgtttaactttttagcgtcgtttaacgcttagactctggtggacaggcaggccccaaggccccagaggcagcggcactaaatcaggacactctgaggccccgataaataatttttacagggcacgcagcccatagatcaccagtgggggtggggggagagtggctgtgatatttcaaccaattgtcatatgtgactgccccgtgctctgactccaggtcgcccacatggcagccggcttcataaccacagccagctctggggctcttcactgtggggcatgggagaggagtaggagatggggcctttgataaccccagccagcagatgacccgttgcctccccgggaatgatgttaaggtctgctcaacttgctgttgtccatagagcatgggtgctcaatccaagcctcctctggcactgggagaagggacagctgaaggcacgagggcagggtggcagagaggaacacaaataactttctgtagccaaaaagtcacttttctgaccaccttccctgttctgttgaccacctccaaacttgtggtctgtgtgagagaacagtacagagggagggaggcatcagacctgaccccaggagaggagggcagagctaaggctgacgttcagagaaactggcagcatccctctaccatttatacctctagagaaagagatggaaagtgtgggagtgtggaaagcgggggaatgtggaaggagagagacagaaacacagagaaggctaggtagtgagagggacagaaaaatgaagatgaaagacagatgaagatgtagagagaacaagagacagaggcaagaggagacagaccaaaacggactcagaaaggacactccaacagttggtttggtgtggagaaggaggccttttcctaaagcttggtaccaagcaagaggaacagtggtatcaacagaccaaggcaggggttgcatctgtgccaggctgacctgccccatgccctctgagggtgcccttcccctggcttcaggaccgtgtttccctgcaccagctccacgctgcttccccactctctcccctcccctcagtgcccttgccccatcccctcatctgtaagatctgggatttgcggggacacttaatccatatggagctgattcattcccatctaaatcatctccatgagcttccctaagagccctctgatgtgccagccaccattcctctcccctgggcgatggcgggctgggggctgccagtaaacaaacctcagctgccatccatccatcttggcctcgcccatcagtccagccaagaccattcatctctccagcactgctccctgcactcctccatccctccatccatctgtctgtccctccttctcatgcccctctactggaaactttacctctctgccttttcctgggtagcatcttgaggggtcatctcaaccatccccctgccttcagacaggagccttattttacccctggcccagcaaggcgggggctctcccagttcatcaccttccgagaatgagggcttcgagtctgatgattttactctacagtactgacaacctagggaagttctttcttctgtctagcttgtgtgcttgacattcacatatgaccacacgtctgaatgggagtgggtataagattataggattatactcaagcaaaaaaaaaaaaaaaaaaaaaaaaaaaaaaaaaaaaaaaaaaaaaaaaaaaaaa

SEQ ID NO: 26703 - DNA, 3023 bp, Homo Sapiens
cggaacacgccccgcgctgctgggtcccgccagacacgccgccgccgcaggaaagtctacagtttggtaccccaggactcgctggtcaggaaagccctgcaggacatgagtgttaggcccgacgcctggcccttggcagcttgggaggtggctggggctgcttttgcctttgccagagacagctccaactgaggacctctccaacgggcccatccacagtccttccttcccctagtgtctgggaagacaggcgcgatgatggactccccgttcctggagctgtggcagtccaaggcagtgtccatcagggagcagctgggactcggggaccggcccaacgactcctattgctacaactcggccaaaaacagcaccgtgctccagggggtcacctttggtggcatccccactgtcctgctcatagacgtcagctgcttcctgttcttaatcttggtgttttctattataagaagaagattctgggactatggccgcattgccctggtgtcagaagcagacagcgagtccagatttcagagattgtcatcgacttcctcctcaggtcaacaagactttgaaaatgagctgggatgctgtccctggctgactgccatcttccgtctgcatgatgaccagatcctggaatggtgtggggaggacgccatccactacctgtccttccagaggcacatcatcttcctgttggtggtggtcagctttttgtccctgtgtgtcatcctgcctgtcaacctctcaggggacttgctggacaaagacccgtatagttttgggaggacaacaatagcaaacctacagactgacaatgacctcctttggctgcacaccatctttgctgtcatttacctcttcctcactgtgggtttcatgcggcaccacactcagtccattaagtacaaagaggagaacctggtgaggcggaccctgttcatcacaggactccccagagatgccaggaaggagactgtggagagccacttccgggacgcgtatcccacgtgtgaggtggttgatgtgcagctgtgctacaacgtggccaaactgatctacctgtgcaaggagaaaaagaagactgagaagagcctgacctattacacaaacctgcaggtgaagacaggccagcggaccctcatcaaccccaagccctgtggccagttttgctgctgtgaagtgctgggctgtgagtgggaagacgccatctcttactacacacggatgaaggacaggctgctggagaggatcacagaggaagaacgccacgtccaggaccagcccctgggaatggccttcgtcaccttccaggagaagtccatggccacctacatcctgaaagatttcaatgcctgcaagtgtcagagccttcagtgcaaaggtgagccccagccgtcctcccatagcagggagctctatacctccaagtggacagtcacctttgctgctgaccctgaggacatctgctggaagaacctctctatccagggcctccgctggtggctacagtggctgggcatcaacttcaccctcttcctggggctatttttcctgaccacaccctccatcatcctgtccaccatggacaagtttaatgtcaccaaacccatccatgcgctgaataacccgatcatcagccagttcttccccaccctcctgctctggtccttctcggccctgctcccctccattgtctactactctacactgctggagtctcactggaccaagtcgggggaaaaccagatcatgatgaccaaagtctacatattcttgatcttcatggtgctgatcctgccctccctgggtctcaccagtctagattttttcttccggtggctctttgacaaaacttcctcggaggcctccatcaggttggagtgcgtcttcctgcctgaccagggtgccttctttgtgaactatgtcatcgcctcggccttcatcggcaatggcatggagctgctgcggctgccaggtctcatcctctataccttccgcatgatcatggccaagacggctgctgaccgcaggaatgtcaagcagaaccaggccttccagtacgagtttggagccatgtatgcatggatgctgtgtgtcttcactgtcatcgtggcctacagcatcacttgtcccatcatcgcgccatttggcctcatctacatcctgctcaagcacatggtggaccggcacaacctctacttcgtctacctcccagccaagctggagaaggggatccactttgccgctgtgaaccaggccttggcagcccccatcctgtgcctcttctggctctacttcttttccttcctgcgcctgggtatgaaggcccccgccactctgttcaccttcctggtgctgctgctcaccatcctggtctgcctggctcacacctgctttggatgcttcaagcacctcagccctctgaactacaaaacagaagagcctgcaagtgacaaaggaagtgaggcagaggcccacatgcccccaccgttcacaccctacgtgcctcggattctgaacggcttggcctcggagaggacagcactgtctccgcagcagcagcagcagcagacctatggtgccatccacaacatcagcgggactatccctggacagtgcttggcgcagagcgccacgggcagtgtggctgctgccccccaggaggcctgaggctgggtctcactgctctgaaaagacacaaccagaatggcctggggctcaggcccttggctgagtgggaatgcgttgggactgcccagctgagctatcaggtgcccatcttttctggtcccagcagtggtgaggagagcacaggcaggcctcgcccctcccttgctcacccagtttcccctccggcacaagcttccagctctgcagctggggtgacatccccagtggtttgtcgccaagaccatgtggtggacttttcgccccccaaactgatgagtccgggagaatatatggagagagagatgtaaaaaaaaaaaaaaaaaaaaaaaaaaaaaaaaaaaaaa

SEQ ID NO: 26704 - DNA, 1935 bp, Homo Sapiens
ggtccttaagcccgggcggccggcgggaccggcggagacccgtggaggccgccgacgatggcggggccgacggaggccgagacggggttggccgagccccgggccctgtgcgcgcagcggggccaccgcacctacgcgcgccgctgggtgttcctgctcgcgatcagcctgctcaactgctccaacgccacgctgtggctcagctttgcacctgtggctgacgtcattgctgaggacttggtcctgtccatggagcagatcaactggctgtcactggtctacctcgtggtatccaccccatttggcgtggcggccatctggatcctggactccgtcgggctccgtgcggcgaccatcctgggtgcgtggctgaactttgccgggagtgtgctacgcatggtgccctgcatggttgttgggacccaaaacccatttgccttcctcatgggtggccagagcctctgtgcccttgcccagagcctggtcatcttctctccagccaagctggctgccttgtggttcccagagcaccagcgagccacggccaacatgctcgccaccatgtcgaaccctctgggcgtccttgtggccaatgtgctgtcccctgtgctggtcaagaagggtgaggacattccgttaatgctcggtgtctataccatccctgctggcgtcgtctgcctgctgtccaccatctgcctgtgggagagtgtgccccccaccccgccctctgccggggctgccagctccacctcagagaagttcctggatgggctcaagctgctcatgtggaacaaggcctatgtcatcctggctgtgtgcttggggggaatgatcgggatctctgccagcttctcagccctcctggagcagatcctctgtgcaagcggccactccagtgggttttccggcctctgtggcgctctcttcatcacgtttgggatcctgggggcactggctctcggcccctatgtggaccggaccaagcacttcactgaggccaccaagattggcctgtgcctgttctctctggcctgcgtgccctttgccctggtgtcccagctgcagggacagacccttgccctggctgccacctgctcgctgctcgggctgtttggcttctcggtgggccccgtggccatggagttggcggtcgagtgttccttccccgtgggggagggggctgccacaggcatgatctttgtgctggggcaggccgagggaatactcatcatgctggcaatgacggcactgactgtgcgacgctcggagccgtccttgtccacctgccagcagggggaggatccacttgactggacagtgtctctgctgctgatggccggcctgtgcaccttcttcagctgcatcctggcggtcttcttccacaccccataccggcgcctgcaggccgagtctggggagcccccctccacccgtaacgccgtgggcggcgcagactcagggccgggtgtggaccgagggggagcaggaagggctggggtcctggggcccagcacggcgactccggagtgcacggcgaggggggcctcgctagaggaccccagagggcccgggagcccccacccagcctgccaccgagcgactccccgtgcgcaaggcccagcagccaccgacgcgccctcccgccccggcagactcgcaggcagggtccaagcgtccaggtttattgacccggctgggtctcactcctccttctcctccccgtgggtgatcacgtagctgagcgccttgtagtccaggttgcccgccacatcgatggaggcgaactggaacatctggtccacctgcgggcgggggcgaaagggctccttgcgggctccgggagcgaattacaagcgcgcacctgcaaaaaaaaaaaaaaaaaaaaaaaaaaaaaaaaaaaaaaaaaaaaaaaaaaaaaaaaaaaaaaaaaaaaaa

SEQ ID NO: 26705 - DNA, 2566 bp, Homo Sapiens
tcaccatggaatatgaagtcaagaaagggaagaagggctttgtatcccccatccgaaggctggtgttccccaaggccgggcgccgggcagcctgtaggagcagcgtgagccgccggcccctgcactcgatgcccctttatccccccgactacctcatcgacccccagattctgctgtgtgactacctggagaaagaggtcaagttcctgggccaccttacctgggtgacttcctcactgaacccctccagtcgggacgagctcctgcagctgctagacaccgccaggcagctgaaggagctgccgctgaagaccacggcggagcaggacagcatcctgagcctgtctgcccgctgcctgctgctcacctggcgcgacaatgaagagctcattctgcgaatccctacgcacgagatcgccgccgcctcctacctgcaggacgacgcgctgcacctgctagtgctcaagaccggtctgggtgtggacccggtgccggccggcgtggatgccagcccaggcggcgcaggacgcgaccccggcccgccaggcggggcgcccgagaagcggcgggtgggcaccgcggagcggcgccacaccatctgcagcctggactggcggatggggtggggtgggggcgccgcggaggcccgggccgggggaggcggcggcggcagcttggagcgccagcgcgccggggcgcgggcgtcgggcagctgggagcgacggcagacgttcagcggcagctgggagcggcggcacggaggcggcggcggcggcggcggcgcgggaaagccgggcggtagctgggagcggaggcaggcgggcagcggcgggggaggcagctgggagcggcgccaccccggccccaacccgctcgacccgcaggaccccagccccgacgcctactgcaacctggtcatcctggctgtagccaacagggacgctgcagaggagtcctgcgcactcatctgtcaggtcttccagatcatctacggggaccagagtattgagtgtgtggaccgggctggctaccactacacatccacacctgaacggccatggctctgcagccgcataatggctcccaggacacctttgaagcatgttacagcggcacgtccacaccttctttccatggctcccactgcagcggcagcgaccacagcagtctgggcttggagcagttacaggattacatggtcacgttgcggagtaagctggggcccctcgagatccagcagtttgcgatgctgctgcgggagtaccggctggggctgcccatccaggactattgcacaggcctgctgaagctctacggagaccggcgcaagttcctcctccttgggatgcggcccttcatcccggaccaggacatcggctacttcgagggcttcctggagggcgtgggcatccgcgagggcggcatcctcactgacagcttcggccgcatcaagcgcagcatgagctccacgtcggcctccgcagtgcgcagctacgatggcgcggcgcagcggcccgaggcacaggccttccaccggctgctggctgacatcacgcacgacatcgaggcgctggcccccgatgacgacgacgacgacgaggatgagccccggggctccaggggcgggagcgacgccgcagaagacaactacctgtagccaccgcccctgcggacggcgtggctcagcagcccacctctgagtctcagctttgcttcggggaccctatccccagggcccccccatcacacctggcggggccggggggtcttcactccagggtctcgctccctgcccttggggcccggggccatgcagtacctggagtgtcctgcagggggaaagcgaagccgggccctgaagtccggggcagtcacccggggctcctgggccgctctgccgggctggggctgagcagcgatcctgctttgtcccagaagtccagagggatcagccccagaacacaccctcctccccgggacgccgcagctttctggaggctgaggaaggcatgaagagtgggctccacctgctggccgactgagaaaagaatttccagaactcggtcctattttacagattgagaaactatggttcaagaagagaggacggggcttgagggaatctcctgattctccttatatgacctcaaactgaccatactaaacagtgtagaaggtctttttaaggctctaaatgtcagggtctcccatcccctgatgcctgacttgtacagtcagtgtggagtagacggtttcctccacccagggttgactcagggggatgatctgggtcccattctggtcttaagaccccaaacaagggtttttttcagctccaggatctggagcctctatctggttagtgtcgtaacctctgtgtgcctcccgttaccccatctgtccagtgagctcagcccccatccacctaacagggtggccacagggattactgagggttaagaccttagaactgggtctagcacccgataagagctcaataaatgttgttcctttccacatcaaaaaaaaaaaaaaaaaaaaaaaaaaaaaaaaaaaaaaaaaaaaa

SEQ ID NO: 26706 - DNA, 3478 bp, Homo Sapiens
ccacgcgtccggggaacccgggctcgggcccggccgggcgccgggcggcggcggccgtggagcagcagcctcggtgcgacgtggagggctggaggcggcggcgatgcactaggcctcgctcagggcggctgccccgggacccgcagttgagtggtgattttatgcaatggcttcaagccacagttcttcaccagtgcctcaaggaagcagcagtgatgttttctttaaaatagaggtagatccgtcaaaacacattcgacctgtgccatcactgccagatgtgtgtcccaaggaacccacagttacagatcaacatagatggactgtatatcattccaaagtaaatctcccagcagcattaaacgatcctagattagcaaaaagagaatctgacttcttcacaaaaacatggggattggactttgtggacactgaagtcataccttcattctacctcccacagatcagcaaggaacattttacagtatatcaacaggaaatctctcagagagagaagattcatgagagatgcaagaatatttgtcctcctaaagataccttcgaaaggactcttttacatactcatgataaatccaggacagatctggagcaagtacctaagatttttatgaaaccagattttgccttggatgattccttaacttttaattcagttttaccatggtctcattttaatactgctggtggaaaaggaaatcgtgatgcagcttcctcaaagttgcttcaagaaaagctgagccattatctggatattgtggaagtaaacattgctcaccagatctctctacgttcagaagcattttttcatgcaatgacctctcaacacgagttgcaggactacctcaggaaaacttcccaggctgtaaaaatgcttcgagataaaattgcacagattgataaagtaatgtgtgaaggatcactccacattttaagactggcacttaccagaaataattgtgttaaagtatacaataagctgaagttaatggccactgtacaccagactcagcctacagtacaggtgttattatctacttctgaatttgttggagcattggacttaatagcaacaacacaagaggttctacagcaggaacttcagggcattcacagtttccggcatttgggatcacagctttgtgaattagaaaaactgatagataaaatgatgattgcagaattttctacttattctcacagtgacttaaatagaccactggaagatgactgtcaagttttagaagaggaaagactaatatctcttgtatttggacttttaaaacaaagaaagcttaattttttagaaatctatggtgaaaaaatggttattacagcaaagaatatcattaaacagtgtgtgattaataaagtttcacaaacagaagaaatagacacagatgttgttgtgaagcttgcagatcagatgagaatgttgaattttccccagtggtttgatctgctcaaggatattttctctaagtttacaattttcctacagagagtgaaggcaacattaaatatcattcacagtgttgttctctcagttcttgacaaaaaccaaaggactagagaattggaagagatttcacaacagaagaatgctgcaaaagataattcactggacacagaggtggcttatttaatccatgaaggcatgtttataagtgatgcattcggtgagggtgagctaacacctatagcagttgacactacctctcaaagaaatgcatctccaaatagtgagccctgcagcagtgattctgtatccgagccagaatgtactactgattcttcatccagcaaagagcacacatcatcatctgctattccaggaggtgtggatattatggtcagtgaagatatgaaattaactgactcagagctaggaaagctggcaaataatatccaggaattattatatagtgcctcagatatatgccatgatcgagctgtcaaatttctcatgtcaagagcaaaggatggttttcttgagaagctaaattccatggaattcataacactttctagattaatggaaacattcattttagacaccgaacagatctgtggaagaaaaagcacgtcattacttggagcacttcagagccaagctattaagtttgtaaataggtttcatgaagagagaaaaaccaagctcagcctcctcttagacaatgagcgctggaagcaagcagatgttcctgcagaatttcaggatcttgttgattctctgtcagatgggaagattgctttacctgaaaaaaaatcaggagccacagaagaaaggaaaccagctgaagttcttattgtcgagggacaacagtatgcagttgttggaaccgtattgctgttaataagaattatccttgaatattgccagtgtgtggataacatcccatctgttactactgacatgcttactcgtctgtcagatttattgaagtacttcaattcaagaagttgccagttagttcttggagctggtgcactgcaagttgttggactaaaaacgataactacaaaaaatttggctctttcttcacgatgtttgcagttaattgtgcactacattcctgtgatccgggctcattttgaagctcgactaccacctaagcaatatagcatgcttaggcattttgatcatatcactaaggactaccatgatcacatagctgaaatatcagctaagcttgtagcgataatggatagcttatttgacaagctgttatctaagtatgaagtgaaggctcctgttccttctgcctgtttcaggaatatttgtaagcaaatgacaaaaatgcacgaagctatatttgatctccttccagaagaacaaacacagatgttatttttaagaattaatgcaagttataaactccacttgaaaaagcagttatctcacttaaatgtgataaatgatggaggacctcaaaatgggttggtcacagcagatgtagctttttacactggaaatcttcaagccttaaaaggccttaaagatttggacctaaatatggccgaaatttgggagcagaagaggtgatgtcatcctggaaaactgggtagttcatctgaccatgggatgtgtttgttatgaagaaaatctggatgcctgtgattcgagaattgaacctgaaacccaaagtgaactggggtgggggaagggaaaaaggaaagtatcaagtgttgggaaactggattcagtgggatctacaaggaatgtcatttttgtgcatcctacagtgaggagtaactgatcaggtgtctataacatttttcattctctctggaaacagactcaggtttctttggaccaaatccaaaagaacacatagctgtaacacagctgtagttgactagaatgctctgtatactttatattaaaaaatgctttgcatttcttccagtgcaaaaaaaaaaaaaaaaaaaaaaaaaaaaaaaaaaaaaaaaaaaaaaa

SEQ ID NO: 26707 - DNA, 1216 bp, Homo Sapiens
ggacgcgtgggcggcggggtgtgtgtcctctgttaagagtgctactcgcccggggttgatctgtgcatgccactcctgggtcagacggtgaggtcggcgtctgcgaggacgcggcggtggagtagaagggcagccggagacaggcccggcgccccttccgaggctagacggccccagcttcgcggggatcatggcattgctggtggaccgagtgcggggccactggcgaatcgccgccgggctcctgttcaacctgctggtgtccatctgcattgtgttcctcaacaaatggatttatgtgtaccacggcttccccaacatgagcctgaccctggtgcacttcgtggtcacctggctgggcttgtatatctgccagaagctggacatctttgcccccaaaagtctgccgccctccaggctcctcctcctggccctcagcttctgtggctttgtggtcttcactaacctttctctgcagaacaacaccataggcacctatcagctggccaaggccatgaccacgccggtgatcatagccatccagaccttctgctaccagaaaaccttctccaccagaatccagctcacgctgattcctataactttaggtgtaatcctaaattcttattacgatgtgaagtttaatttccttggaatggtgtttgctgctcttggtgttttagttacatccctttatcaagtgtgggtaggagccaaacagcatgaattacaagtgaactcaatgcagctgctgtactaccaggctccgatgtcatctgccatgttgctggttgctgtgcccttctttgagccagtgtttggagaaggaggaatatttggtccctggtcagtttctgctttgcttatggtgctgctatctggagtaatagctttcatggtgaacttatcaatttattggatcattgggaacacttcacctgtcacctataacatgttcggacacttcaagttctgcattactttattcggaggatatgttttatttaaggatccactgtccattaatcaggcccttggcattttatgtacattatttggcattctcgcctatacccactttaagctcagtgaacaggaaggaagtaggagtaaactggcacaacgtccttaattgggtttttgtggagaaaagaatgttgtcccaagaagataaaaaatattgttaagtgtgcaagttattaaaaaaaaaaaaaaa

SEQ ID NO: 26708 - DNA, 1559 bp, Homo Sapiens
ccacgcgtccgccgccctagaggccacaaaattagcccaaaattatcaaagaacattaactggaaggtcaggtttttcaaggaacatagcttacaaatgcatcagtgtgtatctggagagcatcctaactgcatttcaactcatcttttaagtgatttcagtcaaaactggaaaacaactaagatgtagtaatttttttttcctggttcaaaccttcaataacttgctcattcagcagtctctctgagctacatttttatttgtaaagtgactctgtctgcatggcaatgagcaggtgcgtgttttttccacattcgccctttcttgcagtatccagggaaacacatcattacaaagggtttctacctgaaatctttcatggaaggcctacaattcgaaaagctgcacatgtttacagaagagctcttaccctccatgcaaacactttgctctgtggtgtcacagctttgtgacaataagatggcaatctcggatctacaaggtgctgtcgggaatcaaataaaatatgttatcagagatatcatcacatctatagtgtttaacagagctttatgccaactactaagacaaagctttaacaaagtttatagaatactgaaactcgtaacaattacctctctacgtgatgctgtaaggaatcttgctaatttggtaggaagaggaagcatttaggaaagggtttagtatctaccaaaagtacttgacctcaagtaaccaatagtaatgcaaacttgctttaaaggaaccaaaggcattgccaagtatttgccaaaaggaggcactttttatttaaaatttgagactaatgagatctcaaaaatcagccccaaaaaggtattatccatttaaggttataattttcactaagatgtagatatttctcttattgttttcatgtaaaatagtatagagttgttttgttggtttaagagtaacattcagtagtaatacaaagttttttttctatgtagaaattagttttcttttcttgcttgcaatagaaatgcaatgtgataggtgtttctcttcttattttcattgtcacattatgtcttagcatctcactttatgaaaaaaaggagaaagataccaatctacagagccctgcttgttgaagcactagtttaatcaacaaaaaattatggcaatcgggggtccattcatctattgcctttatgttgttttttaaaagaaaaaccatgatgcctttgtatttgctgtttgcacccctgaaatcaattccatatcatgtttgaatgccatacattttgcacatgtactgtacataagtaatgcatactgtatttttatatgtgtgcacatttatcatcagatcttttgtacatagtggcagtattgtagctgatcgggaaatgtttgatatctcagcaattttgcatttttgtgtctcaaataaaagacattttgatgtaaaaaaaaaaaaaaaaaaaaaaaaaaaaaaaaaaaaaaaaaaaaaaaaaaaaaaaaaaaaaaaaaaaaaaaaaaaaaaaaaaaaaaaaaaaaaaaaaaaaaaaaaa

SEQ ID NO: 26709 - DNA, 2550 bp, Homo Sapiens
ccacgcgtccgccgcctgtgggcgctgcaaacgccacacttttgctctacgaagaacctcctcgcgactttccaaggtatctttcagatgaaggcattgaagcttgcacaagctctccagacaaagtcaatgtaaatgacatcatcctgattgctctcaatatctgagaacaattggcaagaaattcctccccagtgacatcaatagtggaaaggtagaaaagctcgaaggtccatgtgttttgcaaattcaaaaaattcgcaatgttgctgcaccaaaggataatgaagaatctcaggctgcaccaaggatgctgcgattacagatgactgatggtcatataagttgcacagcagtagaatttagttatatgtcaaaaataagcctgaacacaccacctggaactaaagttaagctctcaggcattgttgacataaaaaatggattcctgctcttgaatgactctaacaccacagttcttggtggtgaagtggaacaccttattgagaaatgggagttacagagaagcttatcaaaacacaatagaagcaatattggaactgaaggtggaccaccgccttttgtgccttttggacagaagtgtgtatctcatgtccaagtggatagcagagaacttgatcgaagaaaaacattgcaagttacaatgcctgtcaaacctacaaatgataatgatgaatttgaaaagcaaaggacggctgctattgctgaagttgcaaagagcaaggaaaccaagacatttggaggaggtggtggtggtgctagaagtaatctcaatatgaatgctgctggtaaccgaaatagggaagttttacagaaagaaaagtcaaccaaatcagagggaaaacatgaaggtgtctatagagaactggttgatgagaaagctctgaagcacataacggaaatgggcttcagtaaggaagcatcgaggcaagctcttatggataatggcaacaacttagaagcagcactgaacgtacttcttacaagcaataaacagaaacctgttatgggtcctcctctgagaggtagaggaaaaggcagggggcgaataagatctgaagatgaagaggacctgggaaatgcaaggccatcagcaccaagcacattatttgatttcttggaatctaaaatgggaactttgaatgtggaagaacctaaatcacagccacagcagcttcatcagggacaatacagatcatcaaatactgagcaaaatggagtaaaagataataatcatctgagacatcctcctcgaaatgataccaggcagccaagaaatgaaaaaccgcctcgttttcaaagagactcccaaaattcaaagtcagttttagaaggcagtggattacctagaaatagaggttctgaaagaccaagtacttcttcagtatctgaagtatgggctgaagacagaatcaaatgtgatagaccgtattctagatatgacagaactaaagatacttcatatcctttaggttctcagcatagtgatggtgcttttaaaaaaagagataactctatgcaaagcagatcaggaaaaggtccctcctttgcagaggcaaaagaaaatccacttcctcaaggatctgtagattataataatcaaaaacgtggaaaaagagaaagccaaacatctattcctgattatttttatgacaggaaatcacaaacaataaataatgaagctttcagtggtataaaaattgaaaaacattttaatgtaaatactgattatcagaatccagttcgaagtaatagtttcattggtgttccaaatggagaagtagaaatgccactgaaaggaagacgaataggacctattaagccagcaggacctgtcacagctgtaccctgtgatgataaaatattttacaatagtgggcccaaacgaagatctgggccaattaagccagaaaaaatactagaatcatctattcctatggagtatgcaaaaatgtggaaacctggagatgaatgttttgcactttattgggaagacaacaagttttaccgggcagaagttgaagccctccattcttcgggtatgacagcagttgttaaattcattgactacggaaactatgaagaggtgctactgagcaatatcaagcccattcaaacagaggcatgggaggaagaaggcacctacgatcaaactctggagttccgtaggggaggtgatggccagccaagacgatccactcggccaacccaacagttttaccaaccaccccgggctcggaactaataggaaaagtagactctttgtgaagaaacgagccagtgactgaaacaccctggtggaaacctgttgacagaccttccactttctcttcagaataagtagctgtggtggatattattatttgaagaaagaaaaaacagattttagggtggaaaaaacagtcaactcacacaaagaatggaaaaaaatactgagttaaattaagcaaataccttttacaagtgaaaggaagaatttttcttctgccgtcaataaaaccattgtgctattaaaaaaaaaaaaaaaaa

SEQ ID NO: 26710 - DNA, 1480 bp, Homo Sapiens
gtttgagttcatttatagtcagagggttttaatttacttgtgaagttcacactattgaaactaattgcaatgcttgactttattttctttagagtccaagaaagagaaaaacaaggcatagcacaaatccccctctagagtgtcatgttggttgggtaatggattccagagaccatgggccaggaacatcctctgtcagcacttcaaatgcttcaccttcagaaggcgcaccactagcaggaagttatggatgtactcctcattcattcccaaagttccagcatccttctcatgaacttttgaaggaaaatggctttacccaacaagtgtaccacaagtatcgtcgaagatgcctaagtgagagaaaacgcttgggaattggtcagtcccaagaaatgaataccctctttcgtttctggtcctttttcctcagagatcacttcaataaaaaaatgtatgaggaatttagacaacttgcttgggaagatgcaaaagaaaattacaggtatgggttagaatgtctgttcaggttttatagttatggactggaaaaaaaattcaggcgagaaatttttcaggatttccaagaagaaaccaaaaaagactacgaatctggtcagctgtatggactagaaaagttttgggcttatttgaaatattctcaatctaagacacagtctattgacccaaaacttcaggaatacctctgtagttttaagaggttagaagacttccgtgttgatgaggctgatccgatagagtaatacctaattatatcaccatgagatggcaaaacggaatgtcagatctgtagacttttgacaggaaaaatcaccatgatcgattacttctgctcatcataaacatctagttcctaagcaggatatgagaatctgccttcctgtgacctctcctgggctcagtgacactccagtcgccgccccaccccacatcaatgccacttccaagtttgacttgcatcttacaaaccatatttctgtttactttttttctgccctgggacatttttaataacttttagataacaacttcaacaaaaatttacctcccaccaagagaagttgtctttattgtgagaagttgtctttattcccaagaaggggaataacttactctttaagtcagttttattacaggtaaatttgtaccagctttttcctctacttgtgttaagacctgtctccaatagacattccaattgaggattgtggaaatagcaaattacattggtgtctgcccaccactgaaggcaaaaagctggtttatctaggccacaggcagagcccgcaggggaggcaggtaacttctcggaccaccagattatcttgatcttcagccagctttattgttgttctacattttaataaacactacatgtttattttaaaaaaaaaaaaaaaaaaaaaaaaaaaaaaaaaaaaaaaaaaaaaaaaaaaaaaaaaaaaaaaaaaaaaaaaaa

SEQ ID NO: 26711 - DNA, 2184 bp, Homo Sapiens
cagctcggggccagcgcatggggctgctgagaccgctccggacgtgcgaagcgttcgcggtgcggtaggaagctgaagtcttcagcagaaccctgacctaggtagggagtctcaatggccctgggtgaagaaaaggcagaagcggaagcatctgaagacacaaaggcccagtcctatgggagagggagctgcagggagcgggagctggacatcccagggcccatgagtggggagcagcccccacgcctggaagctgagggagggctcatctcccctgtatggggggcagaagggatacctgcccctacttgctggattgggactgaccctggcggcccctctagagcccaccagccacaggccagtgatgccaacagagagcccgtagctgagaggtctgagcctgcactcagtggcctgcctcctgccaccatggggtctggagaccttctgctctccggggaaagccaggtggagaagaccaagctttcttcctccgaggagttccctcagactctgagccttcccagaacaacaactatttgctcaggacatgatgctgataccgaagatgatccatccctagcagatttgccccaggcactggacctcagccagcagcctcacagctcaggtctctcttgcctgtcacagtggaagtccgtgctgagcccaggttccgcagctcagccttccagctgcagcatctctgcttcctccacaggcagcagtctccagggtcaccaggagagggcggagcctcgtggtggttctctggccaaggtctcctcctccctggagccggtcgtcccccaggaaccttcctctgtggtggggctaggacctcggccccagtggtcaccacagcctgtgttctctgggggtgatgcttctgggctaggcaggagacgcctctccttccaggctgagtactgggcctgtgtgctgccagattccctgcctccatcacccgaccgccactcccctctctggaacccaaataaagagtatgaagatctgcttgactatacttacccactgaggcccgggcctcagctcccaaagcaccttgatagccgtgtgccagctgaccctgtcctgcaggactccggggtagacctggatagcttctctgtctctccagcaagcaccctcaaatcacctactaatgtctcccccaactgcccaccagcagaggccactgccctgccattttctgggcccagagagccaagccttaagcagtggccctccagagtaccccagaaacagggtggcatgggcttggcatcttggagccaacttgcatctacccccagagccccaggcagtagggatgctcgttgggagcgcagagagccagccctgaggggtgcgaaggaccggctgactataggcaagcaccttgatatgggctctccccagctaaggacacgggacagagggtggccctcgcccaggccagagagggagaagaggaccagccagagtgcccggcgccctacctgcacagagtctaggtggaaatcagaagaggaagtggaaagtgatgacgagtatcttgccctccccgctcggctgacacaggtttctagcctggtttcgtatctaggatccatttctaccttggttaccctgcccactggggatatcaaagggcagagccccttggaagtgtcagacagtgatgggccagcttccttcccttcaagctccagccaaagccagcttccccctggagctgccctccaaggatctggggatcctgagggccagaatccctgtttcctgcgctccttcgtccgtgcccacgactccgcaggggaaggcagtctggggagcagccaggccctcggggtctcctctggactgctgaaaacacgcccctccttgccagctaggttggaccggtggccattctcagacccagatgttgaagggcagcttcccaggaaaggaggagaacagggaaaagaatcactggtgcaatgtgtgaaggtaatgacactcaacgttaggaagctttgtgtacaggtgtcttgtctcttcccccaatccactaacatcataataaaacatgttcatgttgaccaggcactttttatgtgccaggcaaaaaaaaaaaaaaaaaaaaaaaaaaaaaaaaaaaaaaaaaaaaaaaaaaaaaaaaaaaaaaaaaaaaaa

SEQ ID NO: 26712 - DNA, 2918 bp, Homo Sapiens
cacgccgcccctcctttccctttccgctctctccgcctccggaagcgcgggcgcgcggcgccgggagcccgttcagggccgcgggagtgcgccagcgccgcgcgtggggctgtggtggccgcggctctcaggtgaggggcgcgcgagcggctcctggcttcctgctcgcggggcgcccgccacgctcctttccgttcgcatccgtctccccgctccggagccaggcggcggcgagtactcgggatatatttttgccatcatggatcagtttggagatatattagaaggtgaagtggaccattctttctttgacagtgactttgaagaaggaaagaaatgtgaaactaactcagtttttgacaagcaaaatgatgacccaaaggaaagaatagataaagatacaaaaaatgtaaattcgaacactggaatgcaaacaacagaaaattatcttactgagaagggaaatgaaagaaacgtgaaatttcccccagaacaccctgtagagaatgatgttacacaaactgtaagttctttctcattgccagcctcttcaagatcaaaaaaattgtgtgatgttacaacaggacttaaaatacacgtgtccattccaaatagaattcccaaaattgtaaaagaaggtgaagatgattactacacagatggagaggaaagcagtgatgatgggaagaaataccatgtgaagtccaagtccgctaaaccatctactaacgttaaaaaaagcataaggaaaaagtattgcaaagttagctcctcttcctcctcctctttatcttcctcatcttcaggttcaggtacagattgtttagatgcagggtctgatagccatctatctgattcgtctccgtcatctaagtcatctaagaaacatgtatctggtataaccctcctgtcaccaaaacacaagtataaatcaggaataaaatcgacagaaacacagccttcaagtactgcaccaaaatgtggccactaccctgaggagtctgaagatactgtgactgacgtaagtcccttatcaactccagacattagccctcttcagtcttttgaactgggcatagcaaatgatcaaaaagtgaaaattaaaaagcaagaaaatgtgagccaagaaatatatgaagatgttgaggatttgaaaaataattcaaaatatttgaaagcagccaaaaaagggaaagaaaaacatgagcctgatgtctcctcaaagtcgtcttcagtgttagactccagtttagaccacagacataaacagaaagtcttacatgacacaatggatctgaatcatctcttgaaagcttttctgcaattagataaaaaaggaccacaaaaacatcactttgatcagccttcagtagcacccgggaaaaactactctttcacaagagaagaggtgagacagatcgatcgggaaaatcagaggcttttgaaagaactgtcaagacaggcggaaaagccgggaagcaaaagtacaattcctagatcggctgatcatcccccaaagttatatcacagtgctctcaacagacagaaggaacaacaaaggattgagagagaaaacttgactatctcgctctgtcacccaggctggagtgcagtgacgtgatcttggctccttgcagcctccatctcctgggttcaagtgattctcctgcctcggcctcccaagtaactggaactacaggcttacaccaccacacccagctaatttttgtatttttagtggagatggtattgccatgttagccaggctggtctcaaactcctgacctcaagtgatccatctgcctcagcttcccaaagagcaaggattacaggtgtgagccactgtgcctggcctgtaggagtaacttcagaactcttatgtggaataattaaagggagattgtgataaattgtcacaaaaatgatttatagcaagtctcatacctactatgaatattaatctgttgattaacagtacttttgttctaagatcttgaaataatgtatactttacttcactggggtttccttcttgtctggttaaggtctgttatctccttccgttgaagaaagcaagctaatgataactcagtgtgactcccactgttgaaatgtagagagcagtcgtcttgattctgcctgtgtgggggacagttgttactttttagtgtccttacaaggtctttgcttcatcgctctagaaacactaaagcaactctcctctgctaacggctgcagaaatcattaagacatttatttgtttacatttgtttaaacatcaaaagatgggctaggttaattttttttccaaagagaataattcctggatataaaataaatgtttggacaagtgtattagtccattttcatactgctgtaaagatactacctgagactgggtaatttataaacaaaagagttttaattgacttacagttctgcaaggctggagaagcctcaggaaacttagaatcatgctggaaggcgaagcagaagcaaggcatgtcttacatggtggcaggatagagagagaacacaggggaaactgccacttttaagtaactcagatctcatgagaactccctcactatcacgagaacagcatgggggaaccacccccatgatccaatcaccttccaccaagtccctccctccatacgtggggattacaattcgagatgagatttgggtggggacacagagtcagaccgtatcaataggtatataacacagtattgttaactatagtcaacatgctgtacattagatctccagaacttactcatcttgcatgactggaactttgtaccttgggtacttgacatttgctaagagactagatcttaggtgttctcaccacacacataaataaaaatggtaactctgtgagatgaaaaaaaaaaaaaaaaaaaaaaaaa

SEQ ID NO: 26713 - DNA, 4498 bp, Homo Sapiens
ccacgcgtccgcagccggcggcgggctgggtgtttgcaatacaaaggcggccacgcgcggcgccgctcggtgcagaccatgaattacgtggggcagttagccggccaggtgtttgtcaccgtgaaggagctctacaaggggctgaatcccgccacactctcagggtgcattgacatcattgtcatccgccagcccaatggaaacctccaatgctcccctttccacgtccgctttgggaagatgggggtcctgcgctcccgagagaaagtggttgacatagaaatcaatggggaatctgtggatttgcatatgaaattgggagataatggagaagcattttttgttcaagaaacagataatgatcaggaagttatccctatgcacctggccacctcccccatcctgtcagaaggagcttcgagaatggaatgccagctgaaaaggggctctgtggacaggatgagaggcctggaccccagcacgccagcccaagtgatcgctcccagcgagacgccgtcaagcagctctgtagtaaagaagagaagaaaaaggaggagaaagtcacagctggacagcctgaagagagatgacaacatgaacacatctgaggatgaggacatgttccccatcgagatgagctcggatgaggccatggagctgctggagagcagcagaactcttcctaatgatatacctccattccaagatgatattcctgaggaaaacctctccctggctgtgatttaccctcagtcagcctcataccctaattcggatagagagtggtcacccactcccagtccttccggttcccgaccttcaacacctaaaagtgattcagaattggtcagcaagtccacggaaaggacagggcagaagaacccagaaatgctttggctgtggggagagctgccgcaggctgctaagtcttcttctccacacaagatgaaagagtccagcccattgagcagtagaaaaatttgtgataaaagtcactttcaggccattcacagcgaatcttcagacacttttagtgaccaatcgccaactctggtcggtggggcacttttggaccagaacaagcctcagacagaaatgcagtttgtgaatgaagaagacctggagaccttaggagcagcagcgccactcttgcccatgatcgaggagctcaaacccccctctgccagtgtagtccagacagcaaacaagacggattctccttccaggaaaagagataaacgaagccgacatcttggtgctgacggcgtctacttggatgacctcacagacatggatcctgaagtggcggccctgtattttcccaaaaacggagatccttccggactcgcaaaacatgcaagcgacaacggagcccggtcagccaaccagtccccgcagtcggtgggcagctcgggcgtggacagtggcgtggagagcacctcggacgggctgagggacctcccttccatcgccatctccctctgcgggggcctcagcgaccaccgggagatcacgaaagatgcattcctggagcaagctgtgtcatatcaacagtttgtggacaaccccgctattatcgatgaccccaatctcgtggtaaagattgggagtaaatattataactggacaacagcagcacccctcctcctggcaatgcaggccttccagaaacctttgccaaaggccactgtggaatctatcatgagggataaaatgcccaaaaagggaggaagatggtggttttcatggaggggaagaaacaccacaatcaaggaggaaagtaagccagagcagtgcttggctggcaaggcccatagcaccggagagcaaccgccgcagctcagcttggccaccagggtaaagcatgaatcatcctccagtgatgaggagcgcgcagctgccaagccatcaaacgcaggccacctccctcttctgcctaatgtcagctacaagaagactctccggctgacttccgagcagcttaaaaccttgaagttgaagaatggccccaacgacgtggttttcagtgtcaccacgcagtaccaaggcacgtgccgctgtgagggcaccatctatctgtggaactgggatgataaagtcatcatttctgatattgatgggacaattaccagatcagatactcttggccacattttgcccacccttgggaaggattggacccatcagggcatcgctaagctgtaccataaagtgagccagaatggatataaatttctctactgttctgcccgtgccatcgggatggcggacatgacgcggggctacctgcactgggtcaacgagaggggcacggtgctgccccaggggcccctgctgctgagtcccagcagcctcttctctgccctgcacagagaagtgattgaaaagaagccagaaaagtttaaagtccagtgtttgacagacatcaaaaacctgtttttccccaacacagaacccttttatgctgcttttggaaaccgaccagctgatgtgtattcatacaagcaagtaggagtgtctttgaatagaatatttaccgtcaaccctaaaggagagctggtacaggaacatgcaaagaccaacatctcttcgtatgtgagactctgtgaagtagtcgaccacgttttcccgttgctgaaaagaagccattcttcagactttccctgttcggataccttcagtaacttcaccttttggagagagccactgccaccttttgaaaaccaggacattcattctgcctcagcgtaaaatgtcccaagcagcctcttgccagcagtgcagagcctggttgtcacccattaaaggataggtctccccggagtgcacagctccacctgggagcctggcgcgtcatcattggcctgacagcagagagaattgagaagcatttctcccctgccccaccccggggctgacatttctaagcaagataggaagggagcactttctaggctaggagttgggtgcatttgtaccgtgaaaagcattcctcagttgtggcttaatgccagttacgacgctgcctttccggcctgctccagcaagtagctactggttcacgtgcagtttggggctgtgaaacctaggcagaaggcggctgtctgagggctgtccccgcctaggacagggtcaatcgaggaatgccagatgtgcacggtttttggcaaagtagggggcacatttccattatagcaatgttagtgccaccaccttctgaacacagtggggagggctgtgaaggctcatgtgacctggatctgaggtctctgatagaaatctggacgccaccgggtccaggcctggcctcagacttggccttgtggatgggccccttacagtatttgctgactagtctcatttttaggtgataaatttttctttaattcctttggttaaagatagtctatttcattggcatatctccccccagtttttgtggctcaaggctggaatatttatgccttaatatatctatggcagacatttaagaatgcgctttatctagctcatggtaactttgcaacgccttagattaaaatgacagtaaatattactaaggcagtattttgaatgagtttgacactgccggcttccttccatccagcgaggtggtgctgacagtgtggacttgagcacacttatgccaaatgataatgatactgacttctgttgggagctctccaaagaaactggttggttttaagaaaatagtttcaagaagttcaactatattcttttagatattatgtattgttttactctgattaggttactgtgataggcatttattcatattctttctataccactgtcattaatatattaaaaagatgtatgtgttagactatcgaaagggccttattctctctttctcatagactgaccttcttttggaatttctgagtcatttattttccttagctttttccactcaaattaagggcaagcgaaaaagtaataatttggcattctttaagcctacagaatgtgattctttcacttgtttattacactggctcgtggacagaacaatttgaaaagtgaaagaattattttggtaaaagattttgctttacttttcgaagcattatttttttaaagagtgttttactccaacgattgaaacattttcctatttaaatttcattgttagaatcacaggaggcaaaaaatggaacggttgaatgaaattttactctttctgtgaaagaaaatccacagagttgttgcctccgttgtagttggtgggccccgttagcattggatgcctttgccaaatggttcatgtggacacacaaaggcaaacagatctgccatcgatcgcagatttctgtagaaacacggatgtgcatgtgcagattcccttttgcaggtattaaaaataattaaaaatagtcctgcctgaggttgcagtgagccgagcttgcactactgcactccagcctgggtgacagagtaagactccatgtcaaaaaaaaaaaaaaaaaaaaaaaaa

SEQ ID NO: 26714 - DNA, 2991 bp, Homo Sapiens
ctgggcctgagctccggctccggctggggcgcctgcgatgtctcaagatggcggagctgggcgaattaaagcacatggtgatgagtttccgggtgtctgagctccaggtgcttcttggctttgctggccggaacaagagtggacggaagcacgagctcctggccaaggctctgcacctcctgaagtccagctgtgcccctagtgtccagatgaagatcaaagagctttaccgacgacgctttccccggaagaccctggggccctctgatctctcccttctctctttgccccctggcacctctcctgtaggctcccctggtcctctagctcccattcccccaacgctgttggcccctggcaccctgctgggccccaagcgtgaggtggacatgcacccccctctgccccagcctgtgcaccctgatgtcaccatgaaaccattgcccttctatgaagtctatggggagctcatccggcccaccacccttgcatccacttctagccagcggtttgaggaagcgcactttacctttgccctcacaccccagcaagtgcagcagattcttacatccagagaggttctgccaggagccaaatgtgattataccatacaggtgcagctaaggttctgtctctgtgagaccagctgcccccaggaagattattttccccccaacctctttgtcaaggtcaatgggaaactgtgccccctgccgggttaccttcccccaaccaagaatggggccgagcccaagaggcccagccgccccatcaacatcacacccctggctcgactctcagccactgttcccaacaccattgtggtcaattggtcatctgagttcggacggaattactccttgtctgtgtacctggtgaggcagttgactgcaggaacccttctacaaaaactcagagcaaagggtatccggaacccagaccactcgcgggcactgatcaaggagaaattgactgctgaccctgacagtgaggtggccactacaagtctccgggtgtcactcatgtgcccgctagggaagatgcgcctgactgtcccttgtcgtgccctcacctgcgcccacctgcagagcttcgatgctgccctttatctacagatgaatgagaagaagcctacatggacatgtcctgtgtgtgacaagaaggctccctatgaatctcttatcattgatggtttatttatggagattcttagttcctgttcagattgtgatgagatccaattcatggaagatggatcctggtgcccaatgaaacccaagaaggaggcatctgaggtttgccccccgccagggtatgggctggatggcctccagtacagcccagtccaggggggagatccatcagagaataagaagaaggtcgaagttattgacttgacaatagaaagctcatcagatgaggaggatctgccccctaccaagaagcactgttctgtcacctcagctgccatcccggccctacctggaagcaaaggagtcctgacatctggccaccagccatcctcggtgctaaggagccctgctatgggcacgttgggtggggatttcctgtccagtctcccactacatgagtacccacctgccttcccactgggagccgacatccaaggtttagatttattttcatttcttcagacagagagtcagcactatggcccctctgtcatcacctcactagatgaacaggatgcccttggccacttcttccagtaccgagggaccccttctcactttctgggcccactggcccccacgctggggagctcccactgcagcgccactccggcgccccctcctggccgtgtcagcagcattgtggcccctgggggggccttgagggaggggcatggaggacccctgccctcaggtccctctttgactggctgtcggtcagacatcatttccctggactgagttccctggattatggaaacttcgctgtcccccaacactgagcaagtatgctgtggagtcccaaccccagctactctgatccctctgggggctctggccaagggccagacagaccttcacagatgcctacttttggcctcatctctgcctgacaaggccagcacccaaagggttaatatttaacctctttttaaggacactggggtctgtttctggaaatgttctttagatggtggcacattcctttgggtatgttaacctaggcagtgggaggcaaatgggatggtatgtgagctaggagaagggctgaaccctcagccttgactatgtctagagcctcttggggaaggggcacctctcttgaaccccaaatgctctctcttcttattacccaaacccatggctctatttcttcttcacatccattgtctcttcatgtctattccattcccttcggccaaacagacaggtggaaaaactgagacaggcagtttcagagatggacagagaactttattttggattgtggatgtggacttttttgtacataaataagaaaaaccaaaatactccaaagatgacttcccctgcctcctactccagtatgacagaggaggatgtaaggccttagccatgatctgcaggggtctgggagtcaggcccggcctattgcttgggtctctctctatttatatatctaagttcacagtgtttcttattcccccctaagcttctagaggctcatggccctgtagttaggcctggctcattctgcacctttccagggaggtggaaggaccctgtgccctccttcccaatcttctttttcaggctcgccaaggcctaggacctatgttgtaattttactttttatttctaaagttgtagtgaagctctcacccataataaaggttgtgaatgttcaaaaaaaaaaaaaaaaaaaaaaaaaaaaaaaaaaaaaaaaaaaaaaaaaaaaaaaaaaaaaaaaaaaaaaaaaaaaaaaaaaaaaaaaaaaaaaaaaaaaaaaaaaaaaaaaaaaaaaaaaaaaaaaaaaaaa

SEQ ID NO: 26715 - DNA, 2781 bp, Homo Sapiens
gccggctcggacgcggccggctaccgagccctttgtgagggctgtgagctgcgcctgacggtggcaccatgagcagctcaggtggggcgcccggggcgtccgccagctctgcgccgcccgcgcaggaagagggcatgacgtggtggtaccgctggctgtgtcgcctgtctggggtgctgggggcagtctcttgcgcgatctctggcctcttcaactgcatcaccatccaccctctgaacatcgcggccggcgtgtggatgatcatgaatgccttcatcttgttgctgtgtgaggcgcccttctgctgccagttcatcgagtttgcaaacacagtggcggagaaggtggaccggctgcgctcctggcagaaggctgtcttctactgcgggatggcggtcgttcccatcgtcatcagcctgaccctgaccacgctgctgggcaacgccatcgcctttgctacgggggtgctgtacggactctctgctctgggcaaaaagggcgatgcgatctcctatgccaggatccagcagcagaggcagcaggcggatgaggagaagctcgcggagaccctggagggggagctgtgaagggctgggcgcccctccctccctgtcccctcttctggctctgtgtgggtccaagtgaggcctggactgtccacgctgaggcacagcctggagaggggcctttgcacgtgtccctacacctggagtcctctgctcctttctccagactggcttaagccaggagccactggctgctggtgtgagggtctgggctgctggacttgaggcagagcctgcagcagctgtgtggacactacccagccctactcctctgctgggtgggtctgcagatctcacaccacagacagggctgcctgtgacctgctgtgacctgggagcagcttcccctggagatgctggtcctggcttgaggggaggggcaagtgggaccctgccacctgggcactgagcagagggacctcccccagctctcttagcaggtggagccccagggcctgggacagcctgccgctgccagcaacctcccactgctgcctagggtgcagcgcccactgtcaccctgccttctgaagaagcccacagggctcctaaggtgcaccccggtacctggaactgcagccttggcagtgactggacagctgggtgggggatgctccctgctggccctgggaaccttggacaggccacctcaaggcccctcggctgcccctcctccctgggcctgctggggcccctaggttctgcccatcaccccccgcccctgctggccttggtgctaaggaagtggggagagcaggctctccctggcaccgagggtgcccaccctctccctggtgtggccccgtcaacatcagccacagcccagccccattagtgggttagtgggtctgacctcagccccactcaggtgctcctgctggcctgcccaagccctgccctcagggagcttctgccttttaagaactgggcagaggccacagtcacctccccacacagagctgtccccactgccctgggtgccaggctgtccggagccaggcctacccagggaggatgcagagagctggtgcccaggatgtgcacccccatattccctctgccctgtggcctcagcccgctggcctctctgaccgtgaggctggctctcagccatcgggcaggtgcctggtcgggcctggcttagcccaggtggggcttggcagaagcgggcgggtgtggaagatattccatctggggccaaccccaggctgggcctgcgctgagcttctggagcgcaggtactgggtcttgctaagtgaactgtttcccaggaacacctctcgggcccatctgcgtctgaggctgggagtggcatctgaggccgggagtggcatctgaggccaggagtggcaggctggtgggctgggcgtggggttttctgggccctgcccagtactgccctggggacttggtgggctcctgggtcagcagcatcccacccctgggagtctggccagctgagccccagggtggcaggggcattatagcctggtggacatgtgccttcagggttcctccggggccaccttcctcaggccagtgctgggttcaaagggctgtgtgtgtgtgtgtgtgtgtgtgtgtgtatgtatatgtgtgtgggtgcacacatctgtcccatgtatgcagtgagacctgtctacctcccacaaggagcaagggctctgcccgccctctgctcattcctacccaggtagtgggaccccgggcccccttctgcctggcttgcctgcttctgccctttccagaggggtctcactgacagccagagacagcaggagaagggttggctgtggatcaaggaaggctgcccctgtaccctgtggggaaatggtgggtgcatggctggatgcagaggtggaaggccctgggccacaggcgagagtgggcgtgtcacctgtcccaggttcccagcaagtctgcagctgtgcagtcctggggtccctgaccctgtcgcccagggggcgtgctgtccagcaggggccctgccttgcaaggaacgtctcttccggcggctgggccgctcctgcctggtctgggctgtgtgtggcgccctttcctccttgtttgttcctctgtgttctgtgtgcgtcttaagcaataaagcgtggccgtggaaaaaaaaaaaaaaaaaaaaaaaaaaaaaaaaaaaaaaaaaaaaaaaaaaaaaaaaaaaaaaaaaaaaaaaaaaaaaaaaaaaaaaaaaaaaaaaaaa

SEQ ID NO: 26716 - DNA, 2241 bp, Homo Sapiens
ccacgcgtccgcagaagtccaaggtaccagtgttggacgaaggattaacatctgttgaaacctacacccctgcaattagagcaaatgacaataaatctatggctgatgtccttggtgatggtggaaactcctcgctcactatctctgaaggtcctattgtctctgagcgcaggcttaaccaggaagtagcgctgaacttaaaagaagatcatgaagtagaagttggtgtactaaaagaaagtgttgacttaccagaagaaaagcttccaatttctgacagccctcctgatactcaagaaattcatgtgattgaacaagaaaagcttgaagctcaagattcaggagaagaggctaggaatctttcatttaatgagttatatccctctggaacacttaagcttcagtacaattttgatactattgaccaacagttttgtgacttagctgataacaaagacactgctgaatgtgacattgctgaagtagatggggaactttttgtggctcaaagcaactttaccttgatattggaaggtgaagaaggagaagttgagccaggtgattttgcatcatctgatgtgttacctaaagcagctaacacagcaactgaagaaaaacttgtatgcagtggggaaaatgataatcatggacaaattgcaaatttgccatctgccgtaactagtgaccaaaagtcccaaaaagtagacactttaccatatgtgcctgaacctattaaagtagcaattgcagaaaatttactagatgtaattaaagacacaagaagtaaagaaattacttcagatacaatggaacagtccattcatgaaacaatacctttagtgagccaaaacataatgtgtcccactaaattggtcaaatctgcatttaagactgctcaggaaacaagcacaatgactatgaatgtcagccaggttgatgacgtggtttcctccaaaactcgtacgagaggtcaacgtatccaaaacgtgaatgtcaaatcagcacaacaggaagcatcagcagatgttgctactcctaagatgccagggcagtcagtcaggaagaaaactaggaaggcaaaagaaatttctgaagcttctgaaaacatctattctgatgtcagaggactatctcagaaccagcaaatacctcaaaattctgttacgcctaggagaggaaggagaaagaaagaagttaatcaggacatactagaaaacaccagttctgtggaacaagaattacagatcactacaggtagggaatcaaaaagattaaaatcatctcagctgttggaaccagcagttgaagaaactactaaaaaagaagttaaggtttcatctgttacaaaaaggactcctagaagaattaaaagatctgtagaaaatcaggaaagtgttgaaattataaatgatctaaaagttagtacggtaacaagtcctagcagaatgatcagaaaattgagaagtactaatttagatgcttctgaaaatacaggaaataagcaagatgataaatccagtgacaagcagctgcgtattaaacatgttagaagggtcagagggagagaagttagtccatcagatgtgagagaagactccaaccttgagtcatctcagttgactgttcaagcagaatttgatatgtctgccatacctagaaaacgtggtagaccaagaaaaatcaatccatctgaagatgtaggatctaaggctgttaaggaagagagaagccccaagaagaaagaagctcccagcattagaaggagatctacaagaaataccccagctaaaagtgaaaatgttgatgttggaaaaccagctttaggaaaatccattttagtgccaaacgaggaactttcgatggtgatgagctctaagaaaaaacttacaaaaaagactgaaagtcaaagccaaaaacgttcattgcactcagtatcagaagaacgcacagatgaaatgacacataaagaaacaaatgagcaggaagaaagattgctcgccacagcttccttcactaaatcatcccgcagcagcaggactcggtctagcaaggccatcttgttgccggacctttctgaaccaaacaatgagcctttattttctccagcgtcagaagttccaaggaaagcaaaagctaaaaaaatagaggttcctgcacagctgaaagaattagtttcggatttatcttctcagtttgtcatctcacctcctgctttaaggagcagacaaaaaaaaaaaaaaa

SEQ ID NO: 26717 - DNA, 3043 bp, Homo Sapiens
gcaacctccgcagcggtcgcgcgcacccttcacccctcttgctgcttttgtctggcacaaccttctcaggccctccgcgaggccggccctttttttctttcactttccccacccggagagccaggtgccgagaactaggacctcgtccccttctctatcccttcccctgatccatctcgtctctgttctccttcccttttccgttcccgaagccggaaggagccgaggtacccacggaaaaagtcgaagctgtccccggagagtgaggccttcacgaagcggtggcggaaggagccgaagttctctgatcggaggcgtgagcaagtggcatctccggaaagagccgaaacacggactcgagcttaatcccaggaggggcccgagggcgagatccggaaatctccggaaagagccgaaggccgggacggttaggattgtcggaagtggccgattgcttggacagggccggcggagaagatcggagcaagtccgtggaagaagccaaagactgggacggattgaattgttggaagaacccgaactcgcagaggggactgggcgcagtggcacacgaggacacacggaaacctccgaacgttgaggagataatctcggaaaagttacggaaacctgggaagtcggcgaaaccctacgttcgggtgttttcggaagcagccgaagcggccgcctgcttcgccttcgtccagtatccggagatagccgaggcgcttcggagccaggctcggggggaggggcaagctcgcgggcgggcgggcgggtgagggggcggagcccgggcggggcggggagggctgccggaggcttgattaggtaggaggtggcgaagcgccggcggcggccggaagtagccgaagccagcggcggaagtagccgaagcggctggagcgggcggcaaggcgaggcgaaagctgcacagggccctacgcggccgcctcagcatgtcggacttcgacgagttcgagcggcagctcaacgagaataaacaagagcgggacaaggagaaccggcatcggaagcgcagccacagccgctctcggagccgggaccgcaaacgccggagccggagccgcgaccggcgcaaccgggaccagcggagcgcctcccgggacaggcgacgacgcagcaaacctttgaccagaggcgctaaagaggagcacggtggactgattcgttccccccgccacgagaagaagaagaaggtccgtaaatactgggacgtgccacccccaggctttgagcacatcaccccaatgcagtacaaggccatgcaagctgcgggtcagattccagccactgctcttctccccaccatgacccctgacggtctggctgtgaccccaacgccggtgcccgtggtcgggagccagatgaccagacaagcccggcgcctctacgtgggcaacatcccctttggcatcactgaggaggccatgatggatttcttcaacgcccagatgcgcctgggggggctgacccaggcccctggcaacccagtgttggctgtgcagattaaccaggacaagaattttgcctttttggagttccgctcagtggacgagactacccaggctatggcctttgatggcatcatcttccagggccagtcactaaagatccgcaggcctcacgactaccagccgcttcctggcatgtcagagaacccctccgtctatgtgcctggggttgtgtccactgtggtccccgactctgcccacaagctgttcatcgggggcttacccaactacctgaacgatgaccaggtcaaagagctgctgacatcctttgggcccctcaaggccttcaacctggtcaaggacagtgccacggggctctccaagggctacgccttctgtgagtacgtggacatcaacgtcacggatcaggccattgcggggctgaacggcatgcagctgggggataagaagctgctggtccagagggcgagtgtgggagccaagaatgccacgctgagcaccatcaatcagacgcctgtgaccctgcaagtgccgggcttgatgagctcccaggtgcagatgggcggccacccgactgaggtcctgtgcctcatgaacatggtgctgcctgaggagctgctggacgacgaggagtatgaggagatcgtggaggatgtgcgggacgagtgcagcaagtacgggcttgtcaagtccatcgagatcccccggcctgtggacggcgtcgaggtgcccggctgcggaaagatctttgtggagttcacctctgtgtttgactgccagaaagccatgcagggcctgacgggccgcaagttcgccaacagagtggttgtcacaaaatactgtgaccccgactcttatcaccgccgggacttctggtagaggcggctgggggagggtgggggcagggctggctgggggcttctccccactcccgccccccccttatccccctctgaagacgatgggcagaggagtgacagccgcagacacacgacagccggcagcaactggaatggcagcaattaagggtggggggcgggggttggggggttggggggttagggcagggatgggactggggaagtgcgcacacagcccacacagacaacacgcacccacacagacacagagggaaggggttgggatggggacagggtgcacagcagggcggggtaggaccccagcccctcccaaaacagcctctccttctcccatagacccctttcttctccccttccccacggtaggaacatagcgtgtttatattttatggccaaactattttgaattttgttgtccggccctcagtgccctgccctctcccttaccaggaccacagctctgttccttcggcctctggtcctctctggtcccctcctgggtttcttacgtagttgatttttcctctttagtctcccccgacctgcgcccagccccgtggcccctgcccctctcctactctctgtggcagtttcatatttgctaagacgaatttgctcattaaacattttgttgtattttactttaaaaaaaaaaaaaaaaaaaaa

SEQ ID NO: 26718 - DNA, 2774 bp, Homo Sapiens
gcggttggtggggttgggtgagaggaggagctgtcgcggaccctgtagagtcggtctctgttgctctttttgcctgaggagtcttccatcctacgtcgagctctgactcccgtgctgtcgagagggagtccccggggacacctcggcacgcagcggagatgcctctttttgccaccaatcccttcgatcaggatgttgagaaagcaaccagcgagatgaatactgctgaggactggggcctcattttggatatctgtgataaagttggtcagtctcgcactggacctaaggattgtcttcggtctattatgagaagagtgaaccacaaagatcctcacgttgctatgcaggctttgactcttctaggagcatgtgtatcaaactgtggcaaaatttttcatttagaagtatgttcaagagattttgctagtgaagtaagcaacgtattaaataagggtcatcctaaagtatgtgaaaaattaaaggctcttatggttgaatggacagatgaatttaagaatgatccacagcttagtctaatatcagcaatgattaagaaccttaaggaacaaggagttacgttcccagctattggctctcaggctgcagaacaagcaaaagcaagcccagctcttgtagccaaggatcctggtactgtggctaacaaaaaagaagaagaagatttagcaaaagccattgagttgtctctcaaggaacaaaggcagcagtcaaccaccctttccactttgtatccaagcacatccagtctcttaactaaccaccaacatgaaggccgaaaagttcgtgctatatatgactttgaagctgctgaagacaatgaacttacttttaaagctggagaaattattacagttcttgatgacagtgatcctaactggtggaaaggtgaaacccatcaaggcatagggttatttccttctaattttgtgactgcatatctcactgctgaaccagaaatgattaaaacagagaagaagacggtacaatttagtgatgatgttcaggtagagacaatagaaccagagccggaaccagcctttattgatgaagataaaatggaccagttgctacagatgctgcaaagtacagaccccagtgatgatcagccagacctaccagagctgcttcatcttgaagcaatgtgtcaccagatgggacctctcattgatgaaaagctggaagatattgatagaaaacattcagaactctcagaacttaatgtgaaagtgatggaggccctttccttatataccaagttaatgaacgaagatccgatgtattccatgtatgcaaagttacagaatcagccaggcagtggtcccaccatccgcaaacccagcccttcctagtcagcagactcaggccgcttacccaaatacaatggtcagttccgttcaaggaaacacatatcccagccaggcgccagtatatagtcctcctcctgccgctactgctgctgctgcaactgccgatgtcactctgtaccagaatgcaggacctaatatgccccaggtgccaaactataacttaacatcatcaactctgcctcagcccggaggcagccaacagccacctcagccacagcaaccatattctcagaaggctctgctataggacccggtgttcctcttggtggcagatacctgctaaatgccactgacaatgttatgagattcattactatcttaagatgtgtttatcctcagcttataggaatctctccaggtcaacaggttcaaatattcaagaaggtagaactctcctcaatttacactgactttttagaggttcttccccccccgcccctgcagaggaatgaaactacttacaacatttaattcctttcataatatgaaagaattgatacaaggctatttgtctcgtaaacctggtctgcagaaagtcaaacttacaaaaactgttgtgacaaatgttatgtacatatattgatatgtaactgcattagtggccattttgaatcacagtggtgatcgtgtgaatatatttaacactgtgttaaattaatttacgttgctattttattttaatcataaacaactaccatgtttcttaatgttttgtgtaaatttaaggtaattatactatccttttaaacttcaagaaaacaaagttgttagcgtatttacatgaaggcgcattatgttgtcgtgtgtttcagtttcacattaaactgaaccttttactaattgtgagctaaagagatatatatatatatgtgtgtgtatatatatatatctacatgtctttctgtagcctctgcatactactggctgtcatcacaccagcgtacagtagctaaatttttggtgcaattatagcaaatgataatgttcccttttgaacttttacattttggcatgacatttcagagtattgtgggaccatgagacaaaattaagtacgatcacattctttatttctcattttaaagaaatgatgttggtttaccttttcctagttgaagatagtaattaggtttctaagctgtatactgtgtttattggtggcagtgacaccaaagatagaggcaatggatagaaatttttaaactggaaagaaaacctgaattacactacattttcgaagtctcttgtaattatttgggatatcaacaaaatttgattcgtctgtctaatcccttgctagtattttaaatatgtctttaacacattgtatcctttaattcttcattaaaatggaaataagtagatgttccaaaaaaaaaaaaaaaa

SEQ ID NO: 26719 - DNA, 4145 bp, Homo Sapiens
agcgggagtggcggcggcggggcgctggggcggagactgcgacccggagccgcccggactgacggagcccactgcggtgcgggcgttggcgcgggcacggaggacccgggcaggcatcgcaagcgaccccgagcggagccccggagccatggccctgagcgagctggcgctggtccgctggctgcaggagagccgccgctcgcggaagctcatcctgttcatcgtgttcctggcgctgctgctggacaacatgctgctcactgtcgtggtccccatcatcccaagttatctgtacagcattaagcatgagaagaatgctacagaaatccagacggccaggccagtgcacactgcctccatctcagacagcttccagagcatcttctcctattatgataactcgactatggtcaccgggaatgctaccagagacctgacacttcatcagaccgccacacagcacatggtgaccaacgcgtccgctgttccttccgactgtcccagtgaagacaaagacctcctgaatgaaaacgtgcaagttggtctgttgtttgcctcgaaagccaccgtccagctcatcaccaaccctttcataggactactgaccaacagaattggctatccaattcccatatttgcgggattctgcatcatgtttgtctcaacaattatgtttgccttctccagcagctatgccttcctgctgattgccaggtcgctgcagggcatcggctcgtcctgctcctctgtggctggtaggtgtggaatgcctgagtgagttcgtgaggggccccttgcagagtgagctggactcattcagggaattcaggtattggtggtggttggggtgctggggattcttggagaaggcacccactttcctcttgggttctgcttggtcttacattttagtgaatctgacaggtttgggaagatcacaaggctggctggagagggaaggcgagtcacgcattattcttttgctgttccccggagctggcctgttgactatttctttccctgtgtagggatgggcatgcttgccagtgtctacacagatgatgaagagagaggcaacgtcatgggaatcgccttgggaggcctggccatgggggtcttagtgggcccccccttcgggagtgtgctctatgagtttgtggggaagacggctccgttcctggtgctggccgccctggtactcttggatggagctattcagctctttgtgctccagccgtcccgggtgcagccagagagtcagaaggggacacccctaaccacgctgctgaaggacccgtacatcctcattgctgcaggctccatctgctttgcaaacatgggcatcgccatgctggagccagccctgcccatctggatgatggagaccatgtgttcccgaaagtggcagctgggcgttgccttcttgccagctagtatctcttatctcattggaaccaatatttttgggatacttgcacacaaaatggggaggtggctttgtgctcttctgggaatgataattgttggagtcagcattttatgtattccatttgcaaaaaacatttatggactcatagctccgaactttggagttggttttgcaattggaatggtggattcgtcaatgatgcctatcatgggctacctcgtagacctgcggcacgtgtccgtctatgggagtgtgtacgccattgcggatgtggcattttgtatggggtatgctataggtccttctgctggtggtgctattgcaaaggcaattggatttccatggctcatgacaattattgggataattgatattctttttgcccctctctgcttttttcttcgaagtccacctgccaaagaagaaaaaatggctattctcatggatcacaactgccctattaaaacaaaaatgtacactcagaataatatccagtcatatccgataggtgaagatgaagaatctgaaagtgactgagatgagatcctcaaaaatcatcaaagtgtttaattgtataaaacagtgtttccagtgacacaactcatccagaactgtcttagtcataccatccatccctggtgaaagagtaaaaccaaaggttattatttcctttccatggttatggtcgattgccaacagccttataaagaaaaagaagctttctaggggtttgtataaatagtgttgaaactttattttatgtatttcattttattaaatatcatacaatatattttgatgaaataggtattgtgtaaatctataaatacttgaatccaaaccaaatataattttttaacttacattaacaaacatttgggcaaaaatcatattggtaatgagtgtttaaaattaaagcacacattatctctgagactcttccaacaaagagaaactagaatgaagtctgaaaaacagaatcaagtaagacagcatgttatatagtgacactgaatgttatttaacttgtagttactatcaatatatttatgcgttaaacagctagttctctcaagtgtagaggacaagaacttgtgtcagttatcttttgaatccataaatcttagctggcattagttttctatgtaatcacctacctagagagagttgtaaattatatgttaacatgttatctggttggcagcaaacactaaagccaataaaggaaaaacagtaaatgttccgaaagcagagaaaagcaaccaaacatattgttatgaactaaaagctttccctttaagatgcatacttgtcttactggatgaagaaaattgagggtacatgtaccttatactgtcaaggttgtttaaacatgataaggttaatcgccatctacttcaagttttagaaaaggaaacaagaagctaaaaacagctgctctgactttaatatctgactatatctttgatctgtttgcaggtcatccaagtgttttctaggaatatatttattttaggttgtctgaaactactattttttagactcctgaaagttgttcacatcaatgtgaagacaaattttaaatgaaaatgaagaatgaaattatgtcttgaatcatatattaagaagtaaaaataatagtgatcaggcagaaaagaaaaatggaacatctaaaaatgtatgtgctaactatatcatccagtgtgcagtgttgtgtatttttctaagcatgacaacattgatgtgccttttcagtgtaacagcaaatactgttagtgaacattgtcaatttatgtcattttgttaagagatatgactggagtgtgcagtgtggaatgtctctaatactacttgagaatcccgcagttctataatcataaacaaaaattacttagtttcgttaagctaagattgtgtttgtgttaacttcgacatcaaggagcaaagaactttagaacagactcctcaatcttgtgactttcttattctctaggaaagtaacacttcgtttcatgaagcttttctgtggggcttcgattatttcaagtctggtttctaagtgcagtgtgtttgaagcaaacgaacttccaactcacttatttggcattgggcaacttggccaagtctgctactttggaagatggctctggaggaaactctcatatggctaaaaaggcaggctagtttcttacttctacaggggtagagccttaaaaaagaacgtgctacaaattggttctctttgagggtttctggttctccctgcccccaataccatatactttactgcaattttatttttgcctttacggctctgtgtctttctgcaagaaggcctggcaaaggtatgcttgctgttggtccctcgggataagataaaatataaataaaaccttcagaactgttttggagcaaaagatagcttgtacttggggaaaaaaattctaagttcttttatatgactaatattcttggttagcaagactggaaagaggtgtttttttaaaatgtacataccagaacaaagaacatacagctctctgaacatttattttttgaacagaggtggtttttatgtttggacctggtaatacagatacaaaaactttaatgaggtagcaatgaatattcaactgtttgactgctaagtgtatctgtccatattttagcaagtttacttaataaatcttctgaaccatgaaaaaaaaaaaaaaaa

SEQ ID NO: 26720 - DNA, 3473 bp, Homo Sapiens
gcactcttgttgcatcatcagcgtgcacctccacgatgaaacaggtctgggctacaaaagtatggccgcttctgaggcggcggtggtgtcttcgccgtctttgaaaacagacacatcccctgtccttgaaactgcaggaacggtcgcagcaatggctgcgaccccgtcagcaagggctgcagccgcggtggttgcggccgcggccaggaccggatccgaagccagggtctccaaggccgctttggctaccaagctgctgtccttgagcggcgtgttcgccgtgcacaagcccaaagggcccacttcagccgagctgctgaatcggttgaaggagaagctgctggcagaagctggaatgccttctccagaatggaccaagaggaaaaagcagactttgaaaattgggcatggagggactctagacagcgcagcccgaggagttctggttgttggaattggaagcggaacaaaaatgttgaccagtatgttgtcagggtccaagagatatactgccattggagaactggggaaagctactgatacactagattctacggggagggtaacagaagaaaaaccttacgataaaataacacaagaagatattgaaggcattctacagaaatttactggaaatataatgcaagtgccccccctctattctgcattaaagaaagatggacaaagactttcgactttgatgaagagaggtgaagtcgtagaagcaaaacctgccaggccagtgactgtatacagtatctcccttcaaaaattccagccaccatttttcacattagatgttgaatgtggaggaggtttttatatcagaagcttggtcagtgacattggaaaagaactatcttcctgtgccaatgtgctagagctgacccgaaccaaacagggaccatttacgctagaagaacatgcccttcctgaagacaaatggacaattgatgacattgcacagtctcttgagcattgctcatctcttttcccagcagagttggcacttaaaaaatcaaaacctgagtctaatgaacaggttttgagctgtgaatatataactctaaatgagccaaagagagaagatgatgtaattaagacgtgttgagattggcctgggaatatcatcattttctagttgacatttgaatcctgtgtgcagatgcagaatgacaagctgcattcaaaagacaaacaatatgtctttttttttttgcatgaagaaaaatgtctatcatttacagtttcaatagcacataatttattttctatgcattataaatggccttgcagttggctcagttgtttgttgtgttgtgaaatgttttaggattttttgtattgtgaaaatatgaatatgattggattcagaaaaattaactttctgaatttgatctgtcttcagtcttgtgaaaaagttgaacaaatttcctaatcaaagaaaaaagtatgagctccatgtttctttagtttcacaaaaatgaccataatttagtgttatttttactttatttaggcttcctggtggcttcattttattgaaattctttaaattgtttaaagtggccattattgatctctttcttctgttttggagagtttattattaaaaacatttctttgataaaatggccatcatctagtaatacctgtgtttgtttagatcttggaaatgaataagctttgataatatttgtaaatgaaccaaattattactgctaccactaacaggttgtaaatagaagactaatacttaattaaagtcaccttcctaccattagagcagaagacagctcctatagttttgtattttggcagctatgagatattttcatggtaatgtcaacatggtcaagcactttgtaccaagttattaagtaacataatttttaaaatttaaagaatgtgtcttcaactaaaaactttattctttagcatttatttatatttctctgtagggtgttccctgtgacattgtctctttagtttgctctttcaagagatacttacagatgttgagatggctgccctgcatttccagctaatctcttctgctctaaatatttaaaaacagttcttctcaaacattttcattcagatagctttctgaaagttccctatccctctttaccataattttttaaatgtagccacattgtaatagtaaacttcatatataatgagtgcttcatatttttgttatgggaaagcaatatattatgcagccagtctgtagaaacattcagatccctcttcctttactcaaatacagtttcaaaaggaagactcatgagaaatttcataaaatacaagtttttagatgtttatgctttgcctttctttttaaaggtgttttcctgctttgtagtctctaactctgaaatttaaaatatgtaaactaaagtggttttatttgtgcttaacccaatttaaactcaatgtaaaatgttatatatgcatcagtacagcattttcaacatattggcaacatattttaaatgaaaacactaaaacaattcttagtatgagacaaaactgtaaggaaaaagagtgttaataccatgatgcattaacataaaatatcaaacacacaaagtcataaaatgaaaatttacagttttacctgttcatatctagtgccccacagtgtgtgtcaaccaaaggtggcagtggctacatctgcctgttggactggtacaggttacaatatgtcctcttccattgcaaattaaagtccaaatagagaaatacttaggttttagaacacatcagaggtatttctgctgtatttttcaccttaaaaattgacacagagtttactaatagaggagtagagattgttgaccatttttaaaaaacgatagccactctttttcttttatgtttaaaactgaagttttgccaaatgggaaaattactgttacctctaccatcttaatgtagtaactttagaatttaaatttttatattactattttcctttttgttgttcacatagtcttaaggcacctatacttttaaattgactttttcatttgatattatctatatgtatgtagttgtgataatgattattttaattatattactttatactcttaatttatttagagtatttctctattgctgaatacttaagtagttttaaattttattatgataaattcctgggagggggattatttagtgaaataatatgaagaactttatgacttatgtttgccttattgcattcccaaagagttgtaacattttacagtgttaccatttgagtaggggttttatatgttgttgctaatttagtaaacataggagagaaatcaaagtttttctgatttgcttttatgtgatttatctgtatactttgttcatttatataaataaatgtcttaatggttttttttaaaaaaaaaaaaaaaaaaaaaaaaaaaaaaaaaaaaaaaaaaaaaaaataaaaaaaaaaaaaaaaa

SEQ ID NO: 26721 - DNA, 4549 bp, Homo Sapiens
agcgggctctgcccccgacatcgtggtgagaggggaaccttcctcatatctgggcgctggcctctccgggcttgggagagaggaactcagtgatcatagagctggccgaatgccggggtagaggggaccggaagttgtttttttcgcccccgcccagcggccggatcgcatctcagctggttggctttggttagagctcccgtcagactttcgttcggccctaggatttggtagccccgaagtgtgggctctctccagtaccagactcatttcagtaccagcctttgggaagtcgtgtgaatacctcggtctcttagccacagggatagaatggcggcctgacggagccgcggcgccggcgaagtcgctgaggcgcgagctggaacccccagaccagctcaaacgggagccaaaactcgaagcttggaagaattagcaggaaatggcggatgaggcgttgtttttgcttctccataacgagatggtgtctggagtgtacaagtccgcggagcagggggaggtggaaaacggacgatgtattactaagctggaaaacatggggtttcgagtgggacaaggattgatagaaaggtgagcaggttggatttgaaaattttcttgcaggtaggttataaacaaaggtgatctatttcaaaagattgcataaaacttgggatattttaattttaattcctgaatgttattctctttacttcaaaaattaaaatttctttttagatccaatgccatttaactcatttattcaaattttattttaatgtttaaagaaaatatatattttatatattttagactttcttcctgaagctattttagactttattcctgaagctattgaagcaactatctaaaatcttactgcattttcaacttaagatctgctaggttctttaacctgcatagaatttttaagtacataggtttgaaataactatagtctatgtttatgcgtgtaattatctttgaacttataaatcagttctttttagtatttctttctcactacctgaatagttaaactcggagtatattttatataacaatgtcatgataatgctcagctctttgttcttttgtggttttttgatgtgctagaatgcattgcacctggaattttggctataatgttagactaatttgaggcctcataatttatataacataatgtgaatccattgagataggatcatgttacctggtgcttatgactttattagtgttaataaatgttcagccaggtgtggtggctcatgcctgtaatcccagcactttgtgaggccaaggtgggagaatctcttgagctcaggagtttgagaccagccagggtaacaaagtggaaccctgtctctacaaagatatacagattagctgagcatggtgacatgtgcctgtggtctcagctgctagggaggctgaggtgggaggatagcttgagcctgggagggaggtagacgttgcaatgagccgagattatgctattgcactctaacctgggcgacagagccagaacctgtctcaaaaaaaaaattaaaattaaaaaacccaataaatgttcagtgctattctggcatttggaaattagttaataattagtccctcttgctttttttggaggagaaatactgtattacttctagttgatctttttaggtttacaaaagatactgcaaggttcaaggatgagttagatatcatgaagttcatttgtaaagatttttggactacggtattcaagaaacaaatcgacaatctaaggacaaatcatcagggcatctatgtacttcaggacaacaaatttcgcctgcttactcagatgtctgcaggaaaacagtatttagaacatgcatctaagtatttagcatttacgtgtggcttaatcagaggtggcttatcaaacttgggaataaaaagtattgtaacagctgaagtgtcttcaatgcctgcttgcaaatttcaggtgatgatacagaagctgtagaacatactgaaatgcaaggcttcaacagtgtaaagagataaattattcatgtaaaagtatttcaagtagtgatgatttaattacattgttcgatgtttgtacaggagtaagcatgtatttttatcaatttaacacagatcaaaggagatgaagggacattctgccatgacatacacttaaccaaaactattcaaaatgaaaaccggatttcaaataaccagacaccaagatgcagggcccttattttaaacctttttatttggttagagtgatatgtatttagccatagatggagaaacaaagctcagggtttgttgaattagcatgagagaaaattatgtaccaacagaattatttgtgagaagaatgaacaaattttgataaagtatgaatttgttttattttaaaaagcaaacatactaaattttttttattttattgcttataatttattaagaatgtttacacctgtataaggatttcatatatacattgtatgtgtgtatatataaatacatatatgactgcctaaattgtttataaatttaatttttctttaataggtttcattccttcagagctccattaatgtaatcaaaatgaaatatagattagtttaaatgtgaattcagtgactctagggccaaagaatattgggtatgtttggaaagaatttttgtatttattcctgttacagttttgactttcaacttctctccccgtgcatggaagtcctggtaaaggatctaacatctttattcccttctttcctcttccagctgagcagagttggataattgaattagtcattctgacattctttggaccatatcatcttagtggtttggggtcagtgctcatctgatatatctttcttaccacctcttctacttactttctcttacttaaattatctggcataagcagttatctccagcttttgttagaatcttgcatgttgattactaaaactatactttgtttcccatttatttattacccttttgcatgtatttgtgtgacagggaactctgcagcagggggtgactgacacaccaaacaagatgtttcactgggtactctgccatagaaatggcagattaagaagattgactataccaaacattatattaaaaacacagaataaaaactataaaaatgtactttaggacattaaagaaaactcaagttagaagcataccattttcctttcatggaagggtacagtattacaaagataatttgtttaacttgatttattaaattctagttatgtgccctataatgatgtttcagtcagtgacagacctcatatatggcagtggttccataagattacaatactgtatttttactgtaccttctttatgtttagatatgcaagtacttaccattgtgttacagtgtcctacagtattcactacaataatatgctgtacaggtttgtagcctaggagcaataggccatagcttaggtgtatagtagatcataccatctaggtttgtgtaagtacactctgtgattgtacaattttaaaatctcctaatgatgatgcatttctcagaatgtatcccctttgctaagcaatgcatgactgcaatcctaattctcacatgttttggggaaaaaattttaattttgaaaaaatttaggaaagttcctaccaaatatacatgtataagtttattaaaagtcataatgacccaggaatagctaatgacacagaagtagatcaaaatagaacacaatagagaacttcaaaataaaacaggtgtgagaattgtgtgtgtgaaaaagctgggttcaaataagttggtttgttagacattcatatgcctactcatcagccatttcgttctcccttccttgctgacaaagccccattttttttttctttttttttggcctaaaactctgtatggctgccttgtgctatagaatagggtgcttccctagcctagagagggtgagtgttgattagattctgtgccaatcatggtaattggcttacttgatcatttgatggaatctaggctaacgagacaaaggaagtctgaaggctttgaataagaaattttctgttgctcttaacaattgatacaagttagggatttgccagcatccctcttctgcttctcagtgaagatatgtgatatggatgtttgaagctaatctgcaacagccttctgatggccatgaaaggacaagtatggagatgaaagctatcacactgagaatagtgggatgtagatagaaagcacctgaattgtgcttctgaattaaccaatccaggaactgctttacctttggactttttgttatgtgagatattctttatattgttccatttgctttgggtatatgtatattgttacttgtagccaaaaagaaacctctcttagtagaaacaaagggagagttaggttattcaaaaattagtatgggacagttgaatatgcctttttctgcgggagtaggtggggagaaacttaaaggttcacttgtaaaacaataaagtactaaagaaaatgcgaaaaaaaaaaaaaaaa

SEQ ID NO: 26722 - DNA, 3506 bp, Homo Sapiens
gctgggcccgcagcctccggcagccgggaaagtgcgggcgcggggccgcagcctgcccgcccggagcggcccaggagcacgccgcggggagcgcgggcgtccggggctggagtcgcgcagggctccagtttgtgttttcagctgcctactagacctcactacctggatggcccacagctctggagactggaaggtccaagatcaagatactacagatttgatttctggacgttgaacatggtgtaggagtagaaaagcaacagggacggaaggagagaacttaccccttcaagcccttttataaggcactaaatcccatcattgagggcagagtcctcatagcctaatcacctcctaaatgctccatttcttaatattgttgcactgaggattaagcttcaacatgaattctgaagaggacacaaacatccaaaccatagcagtcaatgccttagcccttgatgttgctatcaacctgagattcggggatcaaggaaggacaggtaatagttaacctcttctgtgagaagtcagaaggtgatctctttaatgctttctttttaagaatttttcaaattgagactaattgcagaggttccagttgaccagcattcataggaatgaagacaaacacagagatggtgtgtctaagaaacttcaaaaggtgtagacctcctgactgaagcatattggatttatttaatttttttcactgtatttctgtcctcctacaagggaaagtcatgattacactaactgagctaaaatgcttagcagatgctcagtcatcttatcacatcttaaaaccatggtgggacgtcttctggtattacatcacactgatcatgctgctggtggccgtgctggccggagctctccagctgacgcagagcagggttctgtgctgtcttccatgcaaagtggaatttgacaatcactgtgccgtgccttgggacatcctgaaagccagcatgaacacatcctctaatcctgggacaccgcttccgctccccctccgaattcagaatgacctccaccgacagcagtactcctatattgatgccgtctgttacgagaaacagctccattggtttgcaaagtttttcccctatctggtgctcttgcacacgctcatctttgcagcctgcagcaacttttggcttcactaccccagtaccagttccaggctcgagcattttgtggccatccttcacaagtgcttcgattctccatggaccacccgcgccctttcagaaacagtggctgagcagtcagtgaggcctctgaaactctccaagtccaagattttgctttcgtcctcagggtgttcagctgacatagattccggcaaacagtcattgccctacccacagccaggtttggagtcagctggcatagaaagcccaacttccagtgtcctggacaagaaggagggtgaacaggccaaagccatctttgaaaaagtgaaaagattccgcatgcatgtggagcagaaggacatcatttatagagtatatctgaaacagataatagtcaaagtcattttgtttgtgctcatcataacttatgttccatattttttaacccacatcactcttgaaatcgactgttcagttgatgtgcaggcttttacaggatataagcgctaccagtgtgtctattccttggcagaaatctttaaggtcctggcttcattttatgtcattttggttatactttatggtctgacctcttcctacagcctgtggtggatgctgaggagttccctgaagcaatattcctttgaggcgttaagagaaaaaagcaactacagtgacatccctgatgtcaagaatgactttgccttcatccttcatctggctgatcagtatgatcctctttattccaaacgcttctccatattcctatcagaggtcagtgagaacaaactgaaacagatcaacctcaataatgaatggacagttgagaaactgaaaagtaagcttgtgaaaaatgcccaggacaagatagaactgcatctttttatgctcaacggtcttccagacaatgtctttgagttaactgaaatggaagtgctaagcctggagcttatcccagaggtgaagctgccctctgcagtctcacagctggtcaacctcaaggagcttcgtgtgtaccattcatctctggtcgtagaccatcctgcactggcctttctagaggagaatttaaaaatcctccgcctgaaatttactgaaatgggaaaaatcccacgctgggtatttcacctcaagaatctcaaggaactttatctttcgggctgtgttctccctgaacagttgagtactatgcagttggagggctttcaggacttaaaaaatctaaggaccctgtacttgaagagcagcctctcccggatcccacaagttgttacagacctcctgccttcattgcagaaactgtcccttgataatgagggaagcaaactggttgtgttgaacaacttgaaaaagatggtcaatctgaaaagcctagaactgatcagctgtgacctggaacgcatcccacattccattttcagcctgaataatttgcatgagttagacctaagggaaaataaccttaaaactgtggaagagatcattagctttcagcatcttcagaatctttcctgcttaaagttgtggcacaataacattgcttatattcctgcacagattggggcattatctaacctagagcagctctctttggaccataataatattgagaatctgcccttgcagcttttcctatgcactaaactacattatttggatctaagctataaccacttgaccttcattccagaagaaatccagtatctgagtaatttgcagtactttgctgtgaccaacaacaatattgagatgctaccagatgggctgtttcagtgcaaaaagctgcagtgtttacttttggggaaaaatagcttgatgaatttgtcccctcatgtgggtgagctgtcaaaccttactcatctggagctcattggtaattacctggaaacacttcctcctgaactagaaggatgtcagtccctaaaacggaactgtctgattgttgaggagaacttgctcaatactcttcctctccctgtaacagaacgtttacagacgtgcttagacaaatgttgacttaaagaaaagagacccgtgtttcaaaatcatttttaaaagtatgctcggccgggcgtggtggctcatgcctataatcccagcactttgggaggccaagatgggcggattgcttgaggtcaggagttcgagaccagtctggccaacctggtgaaaccccatctctgctaaaactacaaaaaaattagccaggcgtggtggcgtgcgcctgtaatcccagctacttgggaggctgacgcaggggaattgcttgaaccagggaggtggaggttgcagtgagccgagattgtgccactgtacaccagcctgggtgacagagcaagactcttatctcgaaaaaaaaaaaaaaaa

SEQ ID NO: 26723 - DNA, 2777 bp, Homo Sapiens
agcgggggggttcgcggggcggcgggtagaggcgagtgtttagagacttcgggtccctgactcgcctccagcagtggagacaggtcatcggtctggtctgcgtgggcttctgggatgtttcaggggcagggagagcgcgcttttttttttctgttgttcgctagcgcgtgaggtccgtgttgcggggagctctcggggagtcctcgctcggagttcgtttcgcagtcgtgttggagttcccagagtctgggagcccatggtctccgcattggaaccagtgcttgggaggtcttcgttgcacagtagcgctagggcgtcgtggtggggaagcgaatcgtgtcagtgttggagactgctctgggcagttcgtgttcattgcttatcacatgcgtacttaaaaaggggtctgctggtccccttgcttccctgctgctgtatattctgtagaaaatgggttttcaggttcattgcgaccccagtaataacatccccatcattttaaatactcctccagaaaataactctggtttagtgtatttcatgtttaatgttgggatcaggtgtctaggtattggtataattttattcgtctttaataacatcttgtcaacttcgtattcccatattacatgctctttgagagttttttaaattgctgcagtttcatcaagtggttgctttaatttgggtagaattgatgtagatctagatacaacactttcaggaacatgtgatggatttctattaacccaatatttttatttgtttgactatctgtagtgtttttccatacgtatcttggacatttctggttatgcttatttctacatagttaatactttttgttgtaaatcgtgactttttttttgcataagacccctccccctttccttttttgttcctaattttacttagttgacaagaatagaagttaaaaatatatatgtttattctgtcacttcattgtactcatgtcattacatataacttataaattgacgtcttttttctagttgagcatttttgtcatctgcaaataattttagccaggtggcaagtgtatggactgtggagtaagaagtacctgcctctgcctctgacttgggttctggcctataggaacaagacattttcagtaatggaagaaggagcttccaggctggggaagatcatcatttccagtggtagcttgacctgagatgatacctgaccaccacttctgggaaggcccagaatagacagaagagagagaacatactagagttgctagcccctaagagttgaacgaaatgggcaaggcccagctgaaataacaggaaacacatgaaaaatgccacgattgtaatgtctgtgaggagagagcaaggcagttcttcaggggaggggtcattgtcattcgaagatgtggctgtgggcttcaccagggaggagtggcagtttttggaccagtctcagaaggtcttgtacaaggaagtaatgttggagaactacatcaacctagtatcaatagggtatcgaggcaccaagccagattcgctcttcaagttggagcaaggagaacccccagggatagcagaaggagcagcccacagtcaaatctgtccaggttttgtaatccagagtagaagatatgcaggaaaagattctgatgcatttggtggatatgggagatcatgcctccatatcaagcgtgacaaaactcttactggagttaaataccatagatgtgttaaacccagcagccctaaatcacagctcaatgacctacaaaaaatttgtgcaggagggaaaccacatgaatgcagtgtgtgcgggagagccttctccaggaaagcacagcttattcaacatcagagaactgaaagaggagagaaaccccatggatgtggtgaatgtgggaaaacattcatgaggaagattcagctcactgagcatcagagaactcacacaggagagaagccccatgaatgtagtgaatgtggaaaagccttctccagaaagtcacagctcatggtccatcagagaacccatacaggagagaaaccctacagatgcagcaaatgcggaaaagccttcagccggaagtgccggctcaatagacatcagcgatcacatactggagagaaactctatgggtgcagtgtgtgtgggaaagccttttctcagaaggcatacctcactgcacaccagagacttcacacaggagataagccttataaatgcagtgattgtggaagaaccttctattttaagtcagacctgaccagacatcagaggattcatacgggagagaaaccttatgaatgtagtgagtgtgaaaaagcctttagaagcaagtcgaagctcattcagcatcagcgtactcacaatggagagagaccatattcatgcagagaatgtggcaaagcctttgcccacatgtcagtcctcattaaacatgagaaaactcacataagagagacagccataaattcactgacggtggagaaaccttcctcaaggagtcatacctccttatacatgagcgaactcatacaagagcaaaagactgtgaacacagtacctatagaaatgccttcctcaggaaccccgccattgttaaacaagagtgagcgcctagtgggcagaaatgtagtgattgtggaacaaccttttccaagaaatcaagcctttgtagttaatcaggaatttgaacagagaataagcctcacaaatgaagtgaatgtggccccatcagtaataaattatatcttgtatcttacaaaaaaaaaaaaaaa

SEQ ID NO: 26724 - DNA, 2262 bp, Homo Sapiens
agcgggtgcggcggctgctgccgggccgggcggcgggagcgcgcggcgtcggaggccgcccctctgcggaacgccgagagccccgggagagtgaagggccggggaggacaaggcgccccgggcccaaagcgcgccggctcccgctcgggcggccgcggacatgtgcaggatgtccttcaagaaggaaactccacttgccaatgctgcattctgggcagccaggagaggaaacctggcgctgctgaagctgctgttgaacagcggccgggtggacgtggactgcagagacagccatggcaccacactcctgatggttgctgcctacgctggccacatagactgtgtgagggaactggttctgcaaggagcagacatcaatctccagagagagtcaggtacaactgccctattctttgccgcccagcaaggccataatgatgtcgtgagatttctctttggatttggagcatccactgaatttaggaccaaagacgagggcaccgccctgttggctgccagtcagtacgggcacatgcaggtggtggagaccttgctgaagcacggagcaaacatccatgaccaactttatgatggagccactgccctcttcctagctgcccaaggtggttacttggatgttattcgattactgctggcttcaggagcaaaagtcaaccagccaaggcaggacgggacagcgcccctgtggatcgcgtcccagatgggccacagcgaggtggtgcgggtgatgctgctgcgcggagccgaccgcgacgctgcgcggaacgatggcacaacagcattattgaaagcagccaacaaagggtataatgatgtcataaaagagttgcttaaattctcacccactcttggtattttgaagaatgggacatcagcgctccatgcagcagtgctcagtggaaacattaaaacagttgcgctgctcctagaagcaggggcagacccatccctgagaaacaaggccaatgaacttccggcagaactaaccaaaaatgaacgtatattgcgtctcctgagaagtaaagaaggtcccagaaagagctaacttagctccatatttgacagaaagatagaaagcttaaccacattgtccaaaaagaaattgcatttcaagcagtgttggaaattcttttatgaaaaaaaaagatgcccagaatgcccatcctgtgggtccctgacaaagaagagctacgctctgtgcacgaagtcaagaaccaaacagctcagggaccctcttgccccttcaccatggacttctcatggtgtcctgtaactcatctcccggggggcctggcatgttcacagattccacagaaactcattttcaacaatgctaacttggacctgtcagttaaactctaaggtggacagggttctcagtactaagcaaggagacagaatgctttgttcctttaaaagactgaaaagctgaccttcaatggattgaggcacttttgcttttgtgttaaatgtagatgtgctaaaatatatagatctatcatattttacctacatatgtatgtcattccagtataaaacattctcctctacccaagaaccatagccatgattgttataaatcaatgaagtgtaaacatacattattaaaaaaccacttctgacattccattatgtgctattcaaagatggactattgaactatagaaaagacagactgtgcatttgttcgttgatcctcatcttattcctgacatgtaaaaatcaattttacgtagagtcaacattgtaggtaggttaaaataccagtggcaaatttggaaattcagaaacttataaaccacgagaaatatataggcttgtctctttggtcttttattttggctctattgttgggaatctatttcctattccataagtaagtatacctaacatgctgtggaatcttgagtttccaacaccgtgctgcttgatagaatgactttgaggtccttggataaaatgtgatatatgcaagtacagtatgttgctattactattgcaggaatataaataataaaagactgttattagcacttagtaagtcttcatctatgcatgtttttgagttgactgattccaagaatgaaatatgaggtttattgaattattcctttgaaagggatcaaaacttatattcaatgcactttataattaatggtgtctaaatgcctcagtcagtgcctaactgcacatacaaaaataaaaccttctttctgtaatctaccaaaaaaaaaaaaaaaa

SEQ ID NO: 26725 - DNA, 2185 bp, Homo Sapiens
agcgggtgaccctgccgtgatgggcggggcggcaggggaggaaccagactgcgagcggagaagcggagtttgcagcctcggaattggctagagcgccagagccgagtcagccataaagctacgcgctaggctcttggccctgacgtgaggcgcgcagagatggcgtaacgggaatagttttcaacgtctatttcattccctgcttcagaggacctctttaatctttgattttggtccctgtttctaagaaaagcaactgaaaaggtcgtaataccgcccctgagaaaaaaggagcagcgctaaataatcgagaaaatgcctcctcttgaaacggatatagagatggaaacaagatataagaaggattgagaatcatataatacaggagcttaaacacctatgcgcgatgataaagagggtactattagagcgcttggaaaataccaggaagttgagagagttaacagaagggcgcacgctggattggccacaaaatcgaattactgaagtaagtgcaaaacgacaaattgtcacagaatacagagaaaaggggaaaagaaattaagaggagaaaaagagagatctagagggccggtccaggagatacaatctatgcataataggaatacctgaaactgaggacagagcaagtggagctgaaacaataaaggatctacttgaaaaaattttccagaattgaagaacgaactagatctacaaatggaaaaggctcataggatacctttaaagtttaatgaaaagaaagcagcatctagacatatccgggtgacgtttttgaatttcaaagacgaaacattttacaagcatccagtcagagaaagcaggttacttacaaaggggcaaaagtcaggctgacctcagatttttctcctgcaattctaaatgccagaagacagtggaacaatatctagagtgttaagggaaaataattttgagccaagaattatatactctgccaagttatcatttctttacaaaggaaactggaagacattcttagatatacaggggataggaaagtatatcaaccaagaactttccctgaaaattttgctgaaggatttactgcagctaacagagaacctgaattaaaataagaatagggaggcaattgtatgaaagaactgatggtatgcattaaaactagttaaggagcattaagtttaaattgttatgtatagggcattaaaactaaatacaaaaatagaaacataagctgggtgtaaaatttcagtttacgtttaaactggaagggcataccacatgttcaatatattggacaaatactgttttatttttagcatgtagtattgtagatacaaatacgcatgttcttaagctaaacctaagtaaaagggctttgtcactgtagatttgacaaataacattctaaatgtcaaatctgacaattggaaaacagtacagttttatttcccttatttttaagtatagcaggaaaaaaataacaagtttgtccatgttactactgatactgtaaagaaacttccaaatcactggtttgggagggggtggatacatcctcattttctgtacatgatgcatggggaaaaacagtagttactgcatcatatagttccaagtaaatcatatagttccaagtaaatttgacatggaaataagtgttaactacaaaaatagaatatatacattccaatgtttggaaaagaagtggtaaaaagaaaaatagcaaaaagacattaaaattagcaaaaagtagattgacagtacagatgacctataaactggttaaatagccctattacaattgaaattgggtcaaaaatcaatctctaacctgagatacatttgtataaaacaaatgatcaaagagtttaaagataatggaaactataaatcatagaaatagcaacatttttcttaaaatctaaacataagacattttatgtaaaacatacaatataggatgtaacatttaacaaactatatggtaaataatatgacattaatatataaaatatatgttccagatcttgatgtgggtgatagttttacttatgtacatcgatatacatctatttaaaaacatgtacatttaaattgttgcattttatgtatttaaaatttattgagtaatccttctgtatgtattattaaagagaatatagcaaaaaaaaaaaaaaaa

SEQ ID NO: 26726 - DNA, 2916 bp, Homo Sapiens
agcggagtggcgcattcccggaggaaggtcatgtaccagttaaacgccaccgttttgcctcttagtgcacatgcttgagcccacttgcccaactcctgagatcatatcgggaagctgatcaccaatttcaggctgagaagccagactgcatggaacgcttgcagctgcaaaggagactgggttgtcggacattccactggtttctggctaatgtctaccctgagctgtacccatctgaacccaggcccagtttctctggaaagctccacaacactggacttgggctctgtgcagactgccaggcagaaggggacatcctgggctgtcccatggtgttggctccttgcagtgacagccggcagcaacagtacctgcagcacaccagcaggaaggagattcactttggcagcccacagcacctgtgctttgctgtcaggcaggagcaggtgattcttcagaactgcacggaggaaggcctggccatccaccagcagcactgggacttccaggagaatgggatgattgtccacattctttctgggaaatgcatggaagctgtggtgcaagaaaacaataaagatttgtacctgcgtccgtgtgatgaaaagcccgccagcagtggcgttttgaccagatcaatgctgtggatgaacgatgaatgtcaatgtcagaaggaaaagagaattttggccatcaaaatccagctccaagtgaacttaaagagcttatatatttcatgaagctgatccttttgtgtgtgtgctcctggtgttaggagagaaaaaagctctatgaaagaatataggaagtttctccttttcacaccttatttcattgactgctggctgctttaaaaaaaaaaaaaggatccattgtaccgttgtcttcatcactgggaaatgattattacatagtacagaagattctttgtttttctccactgagcacttaacaattgctttctctctggcctggacattctctggcagcacctccaggatacataaattcaatggatcaatttatttgtcttcaaatggccttaacttggattgtctgtttggccaaccatgaaaattaaagagtgaagcagatgtaatggcctgacattccaaaaactctgaattgggtttattagcacaaatgttgtgttcatttgttgagccatatctcagaagaaggaaagggagctacagaaaggaggtttaggattgcagagaagatgcaagagcactttggcccaattctccagctcaacccagcagctgaaaagcttcaagagatctaggaaaagacattttcatgttaatgagaatttccaccattgtagagaatttccttcctactgagaatctacctctattccccctgccctagctcttctctaacttggttaaccataaccataaccagattcccttgcaatcgatttctctttagtcgttggtgttagaagtaccagcacaatttgagcattcccattaacaaaggtgttcacagttgagaaactctcctgccgggcgcggtggctcatgcctgtaattccagcactttgggaggcagagttgggaggatcacctgatgtcaggggtttgagaccagcctggtcaacattgcaaaaccttgtctctactaaaaatacaaaaattagctgggcatggtggcgcatacctgtaatcccagctacttgggaggctgaggcaagagaatcgcttgaacccaggaggcagaggttgcagtgagctgagatcatgccattgcactccaacctgggtgacagagtgagactccatctcaaaaaaaaaaaaaagagagaaactctcctgatgccctgttacagggtttgcactgactggagcagaaacagcaacctttctaaaaaagcaaacctttttcctgggaggaaaatgccagagcctgagccaaaattcttatgacaggtaacatttgggtgttaatgtccatgagagctgacagggccatctctgagcccatataactgtctggaacccccaaatgtgtccacaggttgaatgtccatgagtgtgggaagaacacggctcatctggagcacagctgaggctagtaagagctaaatgactttccttgctatggcttggcttacctgaattagctgtaagagttgccgaatgggatgggttctgctatttaataaacagcattcatattcatttttccccagatggagttacctacctttccacatggtcagcttagaaatcttcccctaaagatgctaatctcctttgggctgtctcagaacacagtatccttcaaataagaaaaactgagtgggaagtgcagtgtttccaaacaatacctatcataactacgtattcattgtctacctgctaagtcaagggttcactgcatttctccttcctcagaatacactctggacctgtgctgtctaatatggtagccactaacaaaatgtggccattttgatggaaatccattaaaatcaaagaaaatttaaaactcaattcctcaactgggctggccacatttcaaatgctcactacccacctgtggctagggtctacttctactgtattggcgagcatggatatagaacatttcatcacagttctgttggaccaatctagatagattcattatcccatctagagaagagactttagtcactgtcttcttgcttcagacccatctatatttaaaacaaatttccctaaatcctgagactgagacggagctacaaattctcagatggcgaccgtgtaaatggtattagcggctgaagaaaaaaaatttttcaagacctctgttttttaactgaactttatcattggcattgtgggtctttgaagttgctgggataaattaatataattaaataaaagactgaatttaattgcaaaaaaaaaaaaaaaa

SEQ ID NO: 26727 - DNA, 3189 bp, Homo Sapiens
agcgggcgggactgccgggtgatgagatactcggtcggcgacggtagaacgggcgacggcgacaaccgcaatcacatccacgacggtgatcatggcagagaatcacgcccagaataaagccaagctcatctctgagacccggaggaggttcgaagctgagtatgtgacagataagtcagataaatatgatgcacgtgatgttgaaaggctacaacaagatgataactgggttgaaagttacttatcttggagacataatattgtagatgaaacactgaagatgctcgatgagagttttcagtggaggaaagaaatttctgtcaatgaccttaatgaatcctccattcccagatggttattggaaattggtgttatttatctccatggttatgacaaagaaggtaacaaattgttctggatcagggtgaagtatcatgtaaaagaccagaaaaccatattggacaaaaagaagctcatagcattctggttggaacgttatgctaagagggaaaatgggaaacctgtaacagtgatgtttgacctgtcagaaactggaataaatagcattgacatggactttgtacgctttatcatcaactgctttaaggtttattaccctaaatacctctcaaaaatagtgatctttgatatgccttggttaatgaatgctgctttcaaaattgtgaaaacctggcttggtccagaagcagtgagcttgttgaagtttacaagcaaaaatgaagtccaggactatgtcagtgtagaatacctgcctccccacatgggtggaactgatcctttcaagtatagctatccaccactagtagatgatgacttccagaccccactgtgtgagaatgggcctattaccagtgaggatgaaacttcaagtaaagaagacatagaaagtgatggcaaagaaacattggaaacaatttctaatgaagaacaaacacctcttcttaaaaagattaacccaaccgaatctacttccaaagcagaagaaaatgaaaaagttgattcaaaagtgaaagctttcaagaaaccattgagtgtatttaaaggccccttactacacatcagcccagcagaagaactgtactttggaagtacagaatccggagagaagaaaaccttaatagtgttgacaaatgtaactaaaaatatagtggcatttaaggtgagaacaacagctccagaaaaatacagagtcaagccaagcaatagcagctgtgacccgggtgcatcagtggatatagttgtgtctccccatgggggtttaacagtctctgcccaagaccgttttctgataatggctgcagaaatggaacagtcatctggcacaggcccagcagaattaactcagttttggaaagaagttcccagaaacaaagtgatggaacataggttaagatgccatactgttgaaagcagtaaaccaaacactcttacgttaaaagacaatgctttcaatatgtcagataaaaccagtgaagatatatgtctacaactcagtcgtttactagaaagcaataggaagcttgaagaccaagttcagcgttgtatctggttccagcagctgctgctttccttaacaatgctcttgcttgcttttgtcacctctttcttctatttattgtacagttaaagaagtggtgccgggtaggaaccacggttccttcgtccattagttggaaaaagtaacagacctaaaactctaccaagctactaaaaacattgcacatctgtgcttcctaaaaggaaatatgcagcacgtggaggggaacacatacatgtcttgaaaataaactgctagaataaagaaatgctggagaaattgattataagagactatagctatttagtaaagtaagtaaaggcatatccattgtgtaaattaatagtttaaatataatttattttttccttttgatctgaatacttttaaagcttaagttttatcgtgtaaatacattagctaaactgaaaagtataagtaacatgctttgttgcagccaaaaaatgtaatctgcttttttatgacagaattattatagctgagctgacttactagcttttctatactatgtatatagaagaacatgtatattgagaaagaaaacatacttatatagaggaatttatgtaaccatgactttgtaattttgagaattcctcccagtgatggtcagtattcttttggaatgtaaaccgatttaatgccaaaccaccttaacctttgtttctcagtgttccttaacagcctgccttttattaatctcaggtttttttatgaacactctcatttcagtagaatttggaaaactaagcgtggttggaatttctttgaattctgttagtaatgcccaaaagaaaagtctcaagcagtccccctatccagtcatttttatggagtttcatgttgtccactatagctggacactgaaccttttgcctaatttattataaaggcctgaccctctattgtcccatcttcacccccattccagagcagaggagtctctgtggaccatgaattgcactgtctccctcctcatttctaaatgaaaggtattagatataaatttttttgaaaggttagttgtttgagatgctaagcaggataataaatttagattttaaaatgttccctgtaaaagtcagcccatgacaaggaaatttacaaaatactagagtatctagaagggtgaaaacaaaaaaaaataaaaagaaacacagacgcccaggtgtcagctctccgtttaaagaatgaaaaatgtaactcatgatgatctgtgaaaccttcaaactaggaccaattgacttacttgatattctgcctttgatatggtagtacccacccggtattcctaaaatcctaaaaagatacaccttgcagtagcagaggcaatgacatgagtttgttttctcattaatatgaccagtttgggtctatgttggttcacatgtacatctactttatatgaaagaaaaaacagttgtctgcctgtaaaatgttgagtttcgattgagccatgtttggagattttattactattctgaagggtagtgttgttggttttcatcttcaagaagttgattccaaaactgagttatgaagaatgatataacagttccttcaaaattggcctaggaaataaaaccttaaaaggaaaaaaaaaaaaaaaa

SEQ ID NO: 26728 - DNA, 3818 bp, Homo Sapiens
ctctcctcaaagcctggctcccacggaaaatatgctcagtgcagccgcgtgcatgaatgaaaacgccgccgggcgcttctagtcggacaaaatgcagccgagaactccgctcgttctgtgcgttctcctgtcccaggtgctgctgctaacatctgcagaagatttggactgcactcctggatttcagcagaaagtgttccatatcaatcagccagctgaattcattgaggaccagtcaattctaaacttgaccttcagtgactgtaagggaaacgacaagctacgctatgaggtctcgagcccatacttcaaggtgaacagcgatggcggcttagttgctctgagaaacataactgcagtgggcaaaactctgttcgtccatgcacggaccccccatgcggaagatatggcagaactcgtgattgtcggggggaaagacatccagggctccttgcaggatatatttaaatttgcaagaacttctcctgtcccaagacaaaagaggtccattgtggtatctcccattttaattccagagaatcagagacagcctttcccaagagatgttggcaaggtagtcgatagtgacaggccagaaaggtccaagttccggctcactggaaagggagtggatcaagagcctaaaggaattttcagaatcaatgagaacacagggagcgtctccatgacacggaccttggacagagaagtaatcgctgtttatcaactatttgtggagaccactgatgtcaatggcaaaactctcgaggggccggtgcctctggaagtcattgtgattgatcagaatgacaaccgaccgatctttcgggaaggcccctacatcggccacgtcatggaagggtcacccacaggcaccacagtgatgcggatgacagcctttgatgcagatgacccagccaccgataatgccctcctgcggtataatatccgtcggcagacgcctgacaagccatctcccaacatgttctacatcgatcctgagaaaggagacattgtcactgttgtgtcacctgcgctgctggaccgagagactctggaaaatcccaagtatgaactgatcatcgaggctcaagatatggctggactggatgttggattaacaggcacggccacagccacgatcatgatcgatgacaaaaatgatcactcaccaaaattcaccaagaaagagtttcaagccacagtcgaggaaggagctgtgggagttattgtcaatttgacagttgaagataaggatgaccccgccacaggtgcatggagggctgcctacaccatcatcaacggaaaccccgggcagagctttgaaatccacaccaaccctcaaaccaacgaagggatgctttctgttgtcaaaccattggactatgaaatttctgccttccacaccctgctgatcaaagtggaaaatgaagacccactcgtacccgacgtctcctacggccccagctccacagccaccgtccacatcactgtcctggatgtcaacgagggcccagtcttctacccagaccccatgatggtgaccaggcaggaggacctctctgtgggcagcgtgctgctgacagtgaatgccacggaccccgactccctgcagcatcaaaccatcaggtattctgtttacaaggacccagcaggttggctgaatattaaccccatcaatgggactgttgacaccacagctgtgctggaccgtgagtccacatttgtcgacaacagcgtgtacactgctctcttcctggcaattgacagtggcaaccctcccgctacgggcactgggactttgctgataaccctggaggacgtgaatgacaatgccccgttcatttaccccacagtagctgaagtctgtgatgatgccaaaaacctcagtgtagtcattttgggagcatcagataaggatcttcacccgaatacagatcctttcaaatttgaaatccacaaacaagctgttcctgataaagtctggaagatctccaagatcaacaatacacacgccctggtaagccttcttcaaaatctgaacaaagcaaactacaacctgcccatcatggtgacagattcagggaaaccacccatgacgaatatcacagatctcagggtacaagtgtgctcctgcaggaattccaaagtggactgcaacgcggcgggggccctgcgcttcagcctgccctcagtcctgctcctcagcctcttcagcttagcttgtctgtgagaactcctgacgtctgaagcttgactcccaagtttccatagcaacaggaaaaaaaaaaatctatccaaatctgaagattgcggtttacagctatcgaacttcacaactaggcctcaattgttccggttttttattttctttacaatttcacttagtctgtacttcatcattttgacagcatcttcctccctcctttaattaatggaatcttctgaattttccctgaatgtttaaagatcatgacatatgacttgatcttctgggagcaggaacaatgactactttttctggtgtgttaacatgtcgctagccagtgctccaggcacccagctttgtctgtgggttagtattggtgtatgtatgagtatctgtatgtatatatacacggtatttatagagagagactatcctggagaagcctcgttttgatgccattcttccttgcaaggttaagcaaggtgggtggaaactaagacacctgaaccctccagggcctcccgcatcaaggtcagcatgaggacagaccacagagctgtcacttttgctccgaagctacttctccactgtcccgttcagtctgaatgctgccacaaccagccaggcaggtccacagagagggagagcagagaaagaagtcctttctctttattgagttcgaggactacaaccaatttacactgccatctgatgccgtgatcctgagccaaggaggtgaggagcagagcaggcaatttcaccaccaaatgccaagaaaagggctgacattttctttcatgggcaccaacctgcatttgtatgtgtcccgaatccacagtcgtactgattctaatggggacacagatcatggtagagaatctctccctcctcagtaaatgtacaactgcacctgtcatcatggaggtcatacatgcatacaaagaggtgtacaggtaccatcttgtatacacatatatacccacatgtacagacatacatttatgcgcattcacgctgtttgtttcatatatacaggcataaaatagagtaaatacaggtagttttaaaagtacccttttgtgtgaattgactaccgttgtttgcaaacccgaaaataaaagacgttcattatgtatgaaaagtaactgatttgtattctgtgagcatgtaaaagcggaaagttagtgcttgttttaagattaccttcttgttgataaaccataaatgaatcatcaaagctcacaccaaatttttctatcaaataaaactagtgacagcttgtggctttttattagagctcgccacgaactagggtaaggtgagtgtcttagcatattttaatgcagttgcttactaaaggttttaaccgcacatgcacacacacacgctttcttatgcaatctatgtttgcacttgtgctttcagttagccttctgtaggaagtagaagtcatatgttgtctttgttgtagtgaaattatacagatagagttccatatattgtatttgtttcaatggtaaatccttttggaacatatagaatgcagagatttttttttccattaaaataaatgggtattggtggttaaaactgaaaaaaaaaaaaaaaa

SEQ ID NO: 26729 - DNA, 3117 bp, Homo Sapiens
ggggtgggcgtgatccgggcacttagggcaggatgaacgctgctttccaagatggcgacggagggaggagggaaggagatgaacgagattaagacccaattcaccacccgggaaggtctgtacaagctgctgccgcactcggagtacagccggcccaaccgggtgcccttcaactcgcagggatccaaccctgtccgcgtctccttcgtaaacctcaacgaccagtctggcaacggcgaccgcctctgcttcaatgtgggccgggagctgtacttctatatctacaagggggtccgcaaggctgctgacttgagtaaaccaatagataaaaggatatacaaaggaacacagcctacttgtcatgacttcaaccacctaacagccacagcagaaagtgtctctctcctagtgggcttttccgcaggccaagtccagcttatagacccaatcaaaaaagaaactagcaaactttttaatgaggaaaactcttgtcagcacttgtggaaggtggattggaatgaagaaagacagaatgaaggtagcaagaccagtgaggaggctctagtaactgtccagccggcagagcacttctgcaggcaggaggacaggatgcaaggtgttctccaagaccagaactaaaagtgcccaacagcttgagaagagggcactggagagaggggcagggaagcgcccttctcctcggctgtgcttctgagtaatggctccggcagacctggggagggcctggggaggggtggccgcggtggttcctgatatcaggtgtgtaaggtgcaatgcgtgctgctaaccctaggagaaatttggggaaaatatttgtagttttctcgccaaactttgagcttcctcattgaaatttttcagtctttcagcctaaacgttattatgagcaagaatatcttttctaacctaatctgtggaataaaacacagcatttggcaagaagaggctgttaaatactcagtcagcatcactgttccagcgtgtaccaaaccacagagatgaaaggctcagacgaaagtcaggtgcacgctgcgtggctggagaatcccgctcccacccggcaagggggcgagctggtccctgggcggtgtcagacaccttctgaaggtgccaggccagggccaggggagcttcaactcgccctccttgggttggcctttttcaccagaattcaagaagccagatttgtgctgtgactgcgatggggcaggcttctaaacactactggtggccctggagcctttctctgaggcttttttcttattcagaaggagaattaaaaattcccccagcggcctggagaagggaacctttggaaaagcttgccttcttttaaaagcaaatgcatgtgcaggagtagacactttacaaataaccagtagccttggggtcgaaatttgcttaaatcatggtaaaggatctcatttctcttttgtgctgattgaaccttctagcagtttggaagtgttttcctgtgaacccttagctggggactgagggtaaatgccttaaaaatggaggcatggaaaatcagaaaggagctatcacaatcattcttttctcaaaggcgttcaggaattctgaggaagaaatgcagtgacaggatgggattttaggggcaaggacaccgtccgggcggggcccagggctctccactggctgacttcacccccagggcccagctggcacgtggccaggcagccatttctccccagttcctccacttcctggggttcattttaaataataaattgtaaagtatgaaatgagtgctgaagttgcctgcatacaaggtcctcatcacctctcgcctgggagggagacgttttctttctttgttgagcgagctcaaagtgtgaggcggagaaaacctaggggttgggggcggctggagaagggatccacggaaacccaagcgccacatcatgcgtgtctgactgcccacggaagaactagaagcagttcaccagtggattttctggggaacgattcatggaacacagcgtctggcgtccagctttgtgggtgagggcatggcgggggatccggtggccctgccctgcctccggtgccggtggatgggggagggactggcctctgactgcggggttgcaccatggcggcggtcggtgtgcccttggctgaggtttcgttccttagcagtgagaacctccacatgcgtgggtaggggtcgggtgacctggagacgcctcctccggtctggtctgggtgacaaaggtgaaggtttatagtctaccaccctggcagcagcctgcagggccccccccttgtctggagcacacccttcgccacgggctgattgggactgtcgggtgttgctttaagttaacaaggtgcacatcacagcgaccccaagtgatgtcccaaagggaggagacattagtctggccgaagtgaagtctgtggctttatatgtaaaagcactcgtatgcaactgttacctttgaaactcagatcctagttacgaactataagaacgtgcccctccagtagagggagactgtctcactgatgttgatttctttattcatttccgcatctgttacacgaacttcgtgtcataaattgctatcctttcatttgaaagtgtaaaaaatttcctgcatttttatcatttctgtacttgagtttattagagattgttatgttaggcgacactgtataaaattgtatggatattttgagtgaaaatcaaaagtaaaattcacatgtatttccttttttatattttcatccaatttcttgacaacttgaataaatttcataaagagccttcctaacatgaaatattggtaaattaaattctttactgttgcaataattaatgaaactttagtatcagtattgttttataattttaaggaaatcatgtttgtttcactgctttgtttttttttttagctgttgccttgtcactgtcacagctaacaagacttactacatacttgatattctgaagtactgtggggctgtcctctgtatactgacattaaataaacgtgtgtgagtgaactgtaaaaaaaaaaaaaaaaaaaaaaaaaaaaaaaaaaaaaaaaaaagaaaaaaaaaaaaaaa

SEQ ID NO: 26730 - DNA, 3322 bp, Homo Sapiens
agcggaggcgccgccgcagccggagcggctcccgggccctgggccgccgccggccaggaagaaatacttgtgttggctgcatttccagggatgctaccagagctcaaggctgtcacctggtcttgcccagaagagccgttcttagaggcaggacttgatgaaggctttcctgctgatggaataggtttgctagagctggccttggaattagaacccttcatgtggcctttataaatatgcgtttgagacagagttatatgcagaagttgaaaatgcctggaagatttctggtttctttcactacttatcctgcctttttgcatcgctgccagatttggatgatatgatattcagaggggcaccttaatcaaagccattcttcaacaagacccacctggcataagattgcacacataattcaagatggccagtcaacctcctgaagacactgcggagtctcaggcctctgatgagctggagtgcaaaatctgttacaatcgatacaatctgaaacagaggaaacccaaagtgctggagtgttgtcatagggtttgtgccaaatgcctctacaagatcatagactttggggactccccacaaggtgtcattgtctgtcctttctgcaggtttgagacgtgcctgccagatgatgaagttagtagcctgcccgatgacaacaacatccttgtaaacttgacttgtggaggcaaagggaagaagtgcctgccagagaaccctactgagctgctgctcacccccaagaggctggcctctctggtcagtccttctcacacgtcctccaactgcctggtcataaccatcatggaggtgcagagagagagctccccgtccctgagctccactcctgtggtagaattttataggcctgcgagtttcgactctgtcaccactgtgtcacacaactggactgtgtggaactgcacgtccctgctgtttcagacatccatccgggtgttagtgtggttgctaggtttgctctacttcagctccttacccttaggaatctacttactggtgtctaagaaagtcacccttggggtcgtctttgtcagcctggtcccttcgagcctcgttattcttatggtgtatggtttttgccagtgtgtttgtcatgaatttctagactgtatggcacctccttcttaactgatatgcaaaataagaaattggacacacattgccctgtttgagtgtgaagttagataatttataatttattttcttttatgttctttatgattagtatccatgacattaacaaaacccttggccacatgttgacttgattggttttcctgtaggctggaagtaaaaatgttcatttctacttaggggttagcaaaattgtataagctcacacttcatggagcactgacagcagtgagtcttcccagagaaaggacagggtttctctcagcactgccagacagacggcaggggtgtggtgtgttatactatagggagagcatggatccctcctttcgtattcatggatgttctatgatggcagttggacacaagaggaaagttgctctgagacacaaagtgtgtactcctttcccaccccatacccctggtattggaacaccctagaattgtcttcaggtgttttctctcttaagtcactctctgtggtcggcgatcccattgagatacttgtttcctctgcccattctcccttgccaagaggaaactcggttccattcccttgggtagtttcaactgaataccagttttgccacattactaaggagaatgaaaagcactgaggaatttgcatcacagtcagcttcatggcagaatgtggccatttgtccttgagacacactctttcctccatgtctgttttcctctctcctcagtcttatctgagaagaatggaggagaaggaacttctcatacagctgttattattgatgaaaaccttcatttgagtctttccttataacatcttagttttggtttttttaaaccacattgcccaatcagcctcaccccttgtcctgaaaaggttccatttaaattagttgctataaattcatcaatactttttttccctattatatttttggttctattaggatttacttaactgaatcttataacaattcgaggtgaactgtggcaatgaaaaccagaaacagttaatgagatgcttcagctcacagtttgaagtgctgagaacctaagtattttgctgtacggtactgagctgtaccaaaatatgatggtttaggtttatgtgcaagactttgtgttgtagtctagacaaaggggtgggcaagagacatgcaaagctgaagccctgcttgaaaagacccttcaaggaagtaaaatggcaggggcagagtgcagcttaacatgttgctatccctgttgtttttgagttggttttggaatggattcaagttcttacacaatttattttgaatacaagcataatctaggtgatttgagttaatgaacttcttttcatgatgtagggaaagttgaatgtatatatttctaagaagaatttgtttagcagattacaagttggcaaaatagactgttcacagaaactaggcaaaaatttaagaaaacattctagtctctaaaacccattactaatgattaacattaaaatatttgtaactcttagaaagggggcattactaagacgactttaacttgttatgaaatctttgttgtgtgatgcaggtacagtgcgcccattccaactggaatagcagtttgattttaatcgtaaaactaaacttcgggaatatgtatgcccaaagtaagtaggatgagaatagtatacatgggatatggtccaatgaatttaagccccaagatacagctaaatacatttatgatttcataaaatctagtttagatagcattgtgatgcaatttccagaaatccatttgtgtttagagtaaataccatgtttagaagatgttttgtggtttggatttatatatttgtaaggtttttttaaaaaaatgttcgttttgtttgaaatgtaacattgagtaaattggtgagttatataatgagatttctagaaagctctggacatgggtacgatgtgttttgcttctctgtataatgtctacagtgataaacttgtgtctccgtgtattgtggcagtctttttttctagttaatttggctttagagagcaatctttgtatgacaccagaaaactcttcatgctattgaatgataaaaaaataatgctttaatattttattcactgtgatactattttgtttgtctattaaattgttattatttccaaaaaaaaaaaaaaaa

SEQ ID NO: 26731 - DNA, 3866 bp, Homo Sapiens
agcgggcgcagcggccgaggtggcggcggctgcagctgcggcggcgcgctccgagcctgcgtctagggcgcccccgggtcagagctgtcgccgtggccgccgctgcaagaaccatgtaccgcagcagcgctcgctcctccgtctcttcccaccggcctaaagacgacggcgggggcggcccgcgcagcggccgcagctctggctcctcctcaggcccggctcgccgcagctcaccgccgcctccgccctccggctcctcgtcgcggaccccggctcgccgaccccgctcgccctcagggcaccgcggccgccgggcctcgccgtccccgccacggggtcgtcgcgtctccccgtccccgcctcgggcccgtcgcggctccccgtcgccaccgcggggccgacgactcttcccgccgggcccggccggcttcagaggcagcagccgaggggagtcccgcgccgactatgcccgggacggccgcggagaccatccaggcgacagcggcagccggagacgctctcctggtctgtgttctgactctttggaaaagagcttaaggatcactgttggcaatgaccacttctgtgttagcacaccagaacggcgacggcttagtgatcggctggggtcaccagtggataatctggaagacatggacagggatgacctgactgatgattctgtcttcactcgaagctcccagtgctctcggggtcttgagcgatatatttcccaggaggaagggcctctcagtcccttcttgggacaacttgatgaggactaccgaacaaaagaaactttcctgcatcgatctgattatagtccccatatcagttgtcatgatgagctgttgcggggaacagaacggaatcgagaaaaactcaaaggctactccatacgatctgaagaaaggagccgggaggccaaaagaccccgttatgatgacacagtgaagataaacagcatgggaggggatcacccaagttttacatcaggaactcgcaactatcgacagcgtagaagaagcccaagtcctaggtttctcgaccctgagtttcgagaactggatcttgccagacgaaagcgagaggaagaggaggagcgaagtaggagcttgagtcaggagctggttggagttgatggtggtggtactggctgttccatccctggattgtcaggtgtcctaacagcatcggagccaggatattctttgcatcggcctgaggaagtatctgtgatgcccaagaaatccattttgaagaagcggattgaggtggacataatggagccctccatgcagcttgagagtttttccagcagtaccagctccagccaggatcaccctctctactctgggcacccatcccttccactaagtggtgctattgctgcttttgcctcagagattgaaaacaaggggactatggtagagactgccttgaaggaacctcagggcaacctctaccaatggggtccccttcctgggattcccaaagacaacagtcctctcagagaaaaatttggaagttttctatgccacaaggataatttggatttgaaggctgagggacctgagcgacacacagacttcctgctgccccatgagagagctagccaggatggcagtggtttttcccgcattctgagcatgttggctgattctaccagtacacaggaaaaaaggcgacgtagctttcccgacattgaagatgaggagaaatttctctatggggatgaagaagaggatttaaaggcagaatccgtaccaaagccccttgggagctctgagagtgaagttatgaggcagaaggcaagctccctgccgtcttcagctccagctgtaaagctagaatcactagaagagaccaatccagaatatgcgaagatccatgacttgctcaagacaatagggctggatattggagtagcagagattagtcaattggctgcacgcacccaggaacgacttcatggcaagaagccatcattacgctcctcagctgaccgccgttcctcagttgaccgatacttttcagctgaccactgttcctcagttgaccaccgcttctcagctgaccgctgttcctcagttgaccactgcttctcagctgatcgacgttcctcagatccccacagactagagagcagggaggcacatcatagcaatacccactctccagaggtgtcccatccacacccaccttctcctgtggatccttacctgctcacaaaaaacagccctccattcctaaagtctgaccatccagtgggtcatatttcaggaccagaggtggttggtagtgggtttcagtcatctgttgcagtcaggtgcatgttgccatcagccccatctgccccaattagacttccacacactgctgctttatctcagtttcacatgccaagggcctctcagtttgctgcagctcggatacctccgaactaccagggacctgccattccccctgcctcttttgatgcctataggcactacatggcatatgcagcctccagatggcccatgtatcccacctctcaaccgtcaaaccaccctgtacctgaaccacacaggataatgccaataaccaaacaagctactcgtagccgtcccaatcttcgtgtgatccccactgtgactcctgataagcctaagcagaaagagtctctgcgaggctcaattcctgcggcccaagtgcctgtccaggtgtccattccatcactcataagatataatccagagaagatctctgatgagaagaaccgtgcttcccagaagcaaaaggttattgaagagagggaaaaactaaagaatgaccgggaagcccgccagaagaagatgtactatcttaggaccgagttagagcggcttcataaacaacaaggagaaatgctgcgcaagaaacgaagggagaaggatggccacaaagatcctctcttggtggaggtgagtcggcttcaggataacattatgaaggacattgcagagctacggcaagaggcagaagaggcagaaaagaagcaatctgaactggacaaagtggctcagatcttgggaattaacatcttcgataaatcccagaagtctttaagtgacagtagagagcctacagagaagcctgggaaagcagaaaaatctaagagcccagaaaaagtgtcatcgttctcaaactcctcctccaacaaggaatcaaaagtaaacaatgagaagtttcgtactaagagccccaagcctgccgaaagcccccagtcagccactaagcagttggatcagcccactgctgcttatgagtattatgatgctggcaatcactggtgcaaagactgcaacaccatctgtgggaccatgtttgatttcttcactcatatgcacaataagaagcacacacaggggcaattccaaaagtcttcagatttccaaaaggaaggactgcagcagacatttctgcccccagaaaggcagggatagaaaccacagaggccacggaaatgatgggtgcccttgtggccagtaggcaatcacctgaaggatctgacttccagaaggagggtagaaattacaaataagcgctttatagctctgcctgttccaaaagcccaggagaagaagaggaaaagcccaatcattttggatttgggaagagggtggaatttgactcctgattctgtgaccttgagcttcatagaggaaatgaaagactcctctatggaaagagaagcttcgaacccattagtggacatttccaattccatctccttgactggccaaccactaatctactgtctgtctctgtggatttacctattctaaatatttcatatgaattgattcatatgaaaaaaaaaaaaaagaaaaaaaaaaaaaaaa

SEQ ID NO: 26732 - DNA, 3125 bp, Homo Sapiens
ggatcgcaacgaaccggaagtgctaaagcctccgaggccaaggccgctgctactgccgccgctgcttcttagtgccgcgttcgccgcctgggttgtcaccggcgccgccgccgaggaagccactgcaaccaggaccggagtggaggcggcgcagcatgaagcggcgcaggcccgctccatagcgcacgtcgggacggtccgggcggggccggggggaaggctttgatggtgaggaaaggaaagattcctgtgagaagagcaggatgagcagagggattctatgcttgaagtcgagtcacttgaaaaagatctctttgaatgtggaagagatctgagcagatgaaaataaaatcaggaaaatgcaacatggcagcagcaatggaaacagaacagctgggtgttgagatatttgaaactgcggactgtgaggagaatattgaatcacaggatcggcctaaattggagcctttttatgttgagcggtattcctggagtcagcttaaaaagctgcttgccgataccagaaaatatcatggctacatgatggctaaggcaccacatgatttcatgtttgtgaagaggaatgatccagatggacctcattcagacagaatctattaccttgccatgtctggtgagaacagagaaaatacactgttttattctgaaattcccaaaactatcaatagagcagcagtcttaatgctctcttggaagcctcttttggatctttttcaggcaacactggactatggaatgtattctcgagaagaagaactattaagagaaagaaaacgcattggaacagtcggaattgcttcttacgattatcaccaaggaagtggaacatttctgtttcaagccggtagtggaatttatcacgtaaaagatggagggccacaaggatttacgcaacaacctttaaggcccaatctagtggaaactagttgtcccaacatacggatggatccaaaattatgccctgctgatccagactggattgcttttatacatagcaacgatatttggatatctaacatcgtaaccagagaagaaaggagactcacttatgtgcacaatgagctagccaacatggaagaagatgccagatcagctggagtcgctacctttgttctccaagaagaatttgatagatattctggctattggtggtgtccaaaagctgaaacaactcccagtggtggtaaaattcttagaattctatatgaagaaaatgatgaatctgaggtggaaattattcatgttacatcccctatgttggaaacaaggagggcagattcattccgttatcctaaaacaggtacagcaaatcctaaagtcacttttaagatgtcagaaataatgattgatgctgaaggaaggatcatagatgtcatagataaggaactaattcaaccttttgagattctatttgaaggagttgaatatattgccagagctggatggactcctgagggaaaatatgcttggtccatcctactagatcgctcccagactcgcctacagatagtgttgatctcacctgaattatttatcccagtagaagatgatgttatggaaaggcagagactcattgagtcagtgcctgattctgtgacgccactaattatctatgaagaaacaacagacatctggataaatatccatgacatctttcatgtttttccccaaagtcacgaagaggaaattgagtttatttttgcctctgaatgcaaaacaggtttccgtcatttatacaaaattacatctattttaaaggaaagcaaatataaacgatccagtggtgggctgcctgctccaagtgatttcaagtgtcctatcaaagaggagatagcaattaccagtggtgaatgggaagttcttggccggcatggatctaatatccaagttgatgaagtcagaaggctggtatattttgaaggcaccaaagactcccctttagagcatcacctgtacgtagtcagttacgtaaatcctggagaggtgacaaggctgactgaccgtggctactcacattcttgctgcatcagtcagcactgtgacttctttataagtaagtatagtaaccagaagaatccacactgtgtgtccctttacaagctatcaagtcctgaagatgacccaacttgcaaaacaaaggaattttgggccaccattttggattcagcaggtcctcttcctgactatactcctccagaaattttctcttttgaaagtactactggatttacattgtatgggatgctctacaagcctcatgatctacagcctggaaagaaatatcctactgtgctgttcatatatggtggtcctcaggtgcagttggtgaataatcggtttaaaggagtcaagtatttccgcttgaataccctagcctctctaggttatgtggttgtagtgatagacaacaggggatcctgtcaccgagggcttaaatttgaaggcgcctttaaatataaaatggttgctattgctggggccccagtcactctgtggatcttctatgatacaggatacacggaacgttatatgggtcaccctgaccagaatgaacagggctattacttaggatctgtggccatgcaagcagaaaagttcccctctgaaccaaatcgtttactgctcttacatggtttcctggatgagaatgtccattttgcacataccagtatattactgagttttttagtgagggctggaaagccatatgatttacagatctatcctcaggagagacacagcataagagttcctgaatcgggagaacattatgaactgcatcttttgcactaccttcaagaaaaccttggatcacgtattgctgctctaaaagtgatataattttgacctgtgtagaactctctggtatacactggctatttaaccaaatgaggaggtttaatcaacagaaaacacagaattgatcatcacattttgatacctgccatgtaacatctactcctgaaaataaatgtggtgccatgcaggggtctacggtttgtggtagtaatctaataccttaaccccacatgctcaaaatcaaatgatacatattcctgagagacccagcaataccataagaattactaaaaaaaaaaaaaaaa

SEQ ID NO: 26733 - DNA, 4996 bp, Homo Sapiens
agcgggtgctgggcggcgcgccggggcagccggagccgcgcgccgcggcgctgtaatcggacaccaagagcgctcgcccccggcctccggccactttccattcactccgaggtgcttgattgagcgacgcggagaagagctccgggtgccgcggcactgcagcgctgagattcctttacaaagaaactcagaggaccgggaagaaagaatttcacctttgcgacgtgctagaaaataaggtcgtctgggaaaaggactggagacacaagcgcatccaaccccggtagcaaactgatgacttttccgtgctgatttctttcaacctcggtattttcccttggatattaacttgcatatctgaagaaatggcattccggacaatttgcgtgttggttggagtatttatttgttctatctgtgtgaaaggatcttcccagccccaagcaagagtttatttaacatttgatgaacttcgagaaaccaagacctctgaatacttcagcctttcccaccatcctttagactacaggattttattaatggatgaagatcaggaccggatatatgtgggaagcaaagatcacattctttccctgaatattaacaatataagtcaagaagctttgagtgttttctggccagcatctacaatcaaagttgaagaatgcaaaatggctggcaaagatcccacacacggctgtgggaactttgtccgtgtaattcagactttcaatcgcacacatttgtatgtctgtgggagtggcgctttcagtcctgtctgtacttacttgaacagagggaggagatcagaggaccaagttttcatgattgactccaagtgtgaatctggaaaaggacgctgctctttcaaccccaacgtgaacacggtgtctgttatgatcaatgaggagcttttctctggaatgtatatagatttcatggggacagatgctgctatttttcgaagtttaaccaagaggaatgcggtcagaactgatcaacataattccaaatggctaagtgaacctatgtttgtagatgcacatgtcatcccagatggtactgatccaaatgatgctaaggtgtacttcttcttcaaagaaaaactgactgacaataacaggagcacgaaacagattcattccatgattgctcgaatatgtcctaatgacactggtggactgcgtagccttgtcaacaagtggaccactttcttaaaggcgaggctggtgtgctcggtaacagatgaagacggcccagaaacacactttgatgaattagaggatgtgtttctgctggaaactgataacccgaggacaacactagtgtatggcatttttacaacatcaagctcagttttcaaaggatcagccgtgtgtgtgtatcatttatctgatatacagactgtgtttaatgggccttttgcccacaaagaagggcccaatcatcagctgatttcctatcagggcagaattccatatcctcgccctggaacttgtccaggaggagcatttacacccaatatgcgaaccaccaaggagttcccagatgatgttgtcacttttattcggaaccatcctctcatgtacaattccatctacccaatccacaaaaggcctttgattgttcgtattggcactgactacaagtacacaaagatagctgtggatcgagtgaacgctgctgatgggagataccatgtcctgtttctcggaacagatcggggtactgtgcaaaaagtggttgttcttcctactaacaactctgtcagtggcgagctcattctggaggagctggaagtctttaagaatcatgctcctataacaacaatgaaaatttcatctaaaaagcaacagttgtatgtgagttccaatgaaggggtttcccaggtatctctgcaccgctgccacatctatggtacagcctgtgctgactgctgcctggcgcgggacccttattgcgcctgggatggccattcctgttccagattctacccaactgggaaacggaggagccgaagacaagatgtgagacatggaaacccactgactcaatgcagaggatttaatctaaaagcatacagaaatgcagctgaaattgtgcagtatggagtaaaaaataacaccacttttctggagtgtgcccccaagtctccgcaggcatctatcaagtggctgttacagaaagacaaagacaggaggaaagaggttaagctgaatgaacgaataatagccacttcacagggactcctgatccgctctgttcagggttctgaccaaggactttatcactgcattgctacagaaaatagtttcaagcagaccatagccaagatcaacttcaaagttttagattcagaaatggtggctgttgtgacggacaaatggtccccgtggacctgggccagctctgtgagggctttacccttccacccgaaggacatcatgggggcattcagccactcagaaatgcagatgattaaccaatactgcaaagacactcggcagcaacatcagcagggagatgaatcacagaaaatgagaggggactatggcaagttaaaggccctcatcaatagtcggaaaagtagaaacaggaggaatcagttgccagagtcataatattttcttatgtgggtcttatgcttccattaacaaatgctctgtcttcaatgatcaaattttgagcaaagaaacttgtgctttaccaaggggaattactgaaaaaggtgattactcctgaagtgagttttacacgaactgaaatgagcatgcattttcttgtatgatagtgactagcactagacatgtcatggtcctcatggtgcatataaatatatttaacttaacccagattttatttatatctttattcaccttttcttcaaaatcgatatggtggctgcaaaactagaattgttgcatccctcaattgaatgagggccatatccctgtggtattcctttcctgctttggggctttagaattctaattgtcagtgattttgtatatgaaaacaagttccaaatccacagcttttacgtagtaaaagtcataaatgcatatgacagaatggctatcaaaagaaatagaaaaggaagacggcatttaaagttgtataaaaacacgagttattcataaagagaaaatgatgagtttttatggttccaatgaaatatgttggggtttttttaagattgtaaaaataatcagttactggtatctgtcactgacctttgtttccttattcaggaagataaaaatcagtaacctaccccatgaagatatttggtgggagttatatcagtgaagcagtttggtttatattcttatgttatcaccttccaaacaaaagcacttactttttttggaagttatttaatttattttagactcaaagaatataatcttgcactactcagttattactgtttgttctcttattccctagtctgtgtggcaaattaaacaatataagaaggaaaaatttgaagtattagacttctaaataaggggtgaaatcatcagaaagaaaaatcaaggtagaaactactaattttttaagaggaatttataacaaatatggctagttttcaacttcagtactcaaattcaatgattcttccttttattaaaaccagtctcagatatcatactgatttttaagtcaacactatatattttatgatcttttcagtgtgatggcaaggtgcttgttatgtctagaaagtaagaaaacaatatgaggagacattctgtctttcaaaaggtaatggtacatacgttcactggtctctaagtgtaaaagtagtaaattttgtgatgaataaaataattatctcctaattgtatgttagaataattttattagaataatttcatactgaaattattttctccaaataaaaattagatggaaaaatgtgaaaaaaattattcatgctctcatatatattttaaaaacactactttgcttttttatttaccttttaagacattttcatgcttccaggtaaaaacagatattgtaccatgtacctaatccaaatatcatataaacattttatttatagttaataatctatgatgaaggtaattaaagtagattatggcctttttaagtattgcagtctaaaacttcaaaaactaaaatcattgtcaaaattaatatgattattaatcagaatatcagaatatgattcactatttaaactatgataaattatgataatatatgaggaggcctcgctatagcaaaaatagttaaaatgctgacataacaccaaacttcattttttaaaaaatctgttgttccaaatgtgtataattttaaagtaatttctaaagcagtttattataatggtttgcctgcttaaaaggtataattaaacttcttttctcttctacattgacacacaggaatgtgtcaatgtaaagccaaaaccatcttctgtgtttatggccaatctattctcaaagttaaaagtaaaattgtttcagagtcacagttccctttatttcacataagcccaaactgatagacagtaacggtgtttagttttatactatatttgtgctatttaattctttctattttcacaattattaaattgtgtacactttcattacttttaaaaatgtagaaattcttcatgaacataactctgctgaatgtaaaagaaaattttttttcaaaaatgctgttaatgtatactactggtggttgattggttttattttatgtagctcgacaattcagtgacttaatatctattccatttgtattgtacataaaattttctagaaatacacttttttccaaagtgtaagtttgtgaatagattttagcatgatgaaactgtcataatggtgaatgttcaatctgtgtaagaaaacaaactaaatgtagttgtcacactaaaatttaattggatattgatgaaatcattggcctggcaaaataaaacatgttgaattccccaaaaaaaaaaaaaaaa

SEQ ID NO: 26734 - DNA, 3149 bp, Homo Sapiens
agcgggcgtgtgcgtgtgtgctggctgccgggctgccccgagccggcggggagccggtccgctccaggtggcaggcggctggagcgagggagcggacatggactacgactcgtaccagcactatttctacgactatgactgcggggaggatttctaccgctccacggcgcccagcgaggacatctggaagaaattcgagctggtgccatcgccccccacgtcgccgccctggggcttgggtcccggcgcaggggacccggcccccgggattggtcccccggagccgtggcccggagggtgcaccggagacgaagcggaatcccggggccactcgaaaggctggggcaggaactacgcctccatcatacgccgtgactgcatgtggagcggcttctcggcccgggaacggctggagagagctgtgagcgaccggctcgctcctggcgcgccccgggggaacccgcccaaggcgtccgccgccccggactgcactcccagcctcgaagccggcaacccggcgcccgccgccccctgtccgctgggcgaacccaagacccaggcctgctccgggtccgagagcccaagcgactcggagaatgaagaaattgatgttgtgacagtagagaagaggctctctgggtattcggaagccggtcaccatcacggtgcgagcagaccccctggatccctgcatgaagcatttccacatctccatccatcagcaacagcacaactatgctgcccgttttcctccagaaagctgctcccaagaagaggcttcagagaggggtccccaagaagaggttctggagagagatgctgcaggggaaaaggaagatgaggaggatgaagagattgtgagtcccccacctgtagaaagtgaggctgcccagtcctgccaccccaaacctgtcagttctgatactgaggatgtgaccaagaggaagaatcacaacttcctggagcgcaagaggcggaatgacctgcgttcgcgattcttggcgctgagggaccaggtgcccaccctggccagctgctccaaggcccccaaagtagtgatcctaagcaaggccttggaatacttgcaagccctggtgggggctgagaagaggatggctacagagaaaagacagctccgatgccggcagcagcagttgcagaaaagaattgcatacctcagtggctactaactgaccaaaaagcctgacagttctgtcttacgaagacacaagtttattttttaacctccctctcccctttagtaatttgcacattttggttatggtgggacagtctggacagtagatcccagaatgcattgcagccggtgcacacacaataaaggcttgcattcttggaaaccttgaaacccagctctccctcttccctgactcatgggagtgctgtatgttctctggcgcctttggcttcccagcaggcaactgactgaggagccttggggtctgcctagctcactagctctgaagaaaaggctgacagatgctatgcaacaggtggtggatgttgtcaggggctccagcctgcatgaaatctcacactctgcatgagctttaggctaggaaaggatgctcccaactggtgtctctggggtgatgcaaggacagctgggcctggatgctctccctgaggctcctttttccagaagacacacgagctgtcttgggtgaagacaagcttgcagacttgatcaacattgaccattacctcactgtcagacactttacagtagccaaggagttggaaacctttatatattatgatgttagctgacccccttcctcccactcccaatgctgcgaccctgggaacacttaaaaagcttggcctctagattctttgtctcagagccctctgggctctctcctctgagggagggacctttctttcctcacaagggacttttttgttccattatgccttgttatgcaatgggctctacagcaccctttcccacaggtcagaaatatttccccaagacacagggaaatcggtcctagcctggggcctggggatagcttggagtcctggcccatgaacttgatccctgcccaggtgttttccgaggggcacttgaggcccagtcttttctcaaggcaggtgtaagacacctcagagggagaactgtactgctgcctctttcccacctgcctcatctcaatccttgagcggcaagtttgaagttcttctggaaccatgcaaatctgtcctcctcatgcaattccaaggagcttgctggctctgcagccacccttgggccccttccagcctgccatgaatcagatatctttcccagaatctgggcgtttctgaagttttggggagagctgttgggactcatccagtgctccagaaggtggacttgcttctggtgggttttaaaggagcctccaggagatatgcttagccaaccatgatggattttaccccagctggactcggcagctccaagtggaatccacgtgcagcttctagtctgggaaagtcacccaacctagcagttgtcatgtgggtaacctcaggcacctctaagcctgtcctggaagaaggaccagcagcccctccagaactctgcccaggacagcaggtgcctgctggctctgggtttggaagttggggtgggtagggggtggtaagtactatatatggctctggaaaaccagctgctacttccaaatctattgtccataatggtttctttctgaggttgcttcttggcctcagaggaccccaggggatgtttggaaatagcctctctacccttctggagcatggtttacaaaagccagctgacttctggaattgtctatggaggacagtttgggtgtaggttactgatgtctcaactgaatagcttgtgttttataagctgctgttggctattatgctgggggagtcttttttttttttatattgtatttttgtatgccttttgcaaagtggtgttaactgtttttgtacaaggaaaaaaactcttggggcaatttcctgttgcaagggtctgatttattttgaaaggcaagttcacctgaaattttgtatttagttgtgattactgattgcctgattttaaaatgttggcttctgggacatcttctaataaaagatttctcaaaaaaaaaaaaaaaaaa

SEQ ID NO: 26735 - DNA, 3472 bp, Homo Sapiens
agcggggagacttaaggttattgcttggccgcggcctggtattccggcgattcgtttcttgctcggcttcctggagctgtggtccgtgtgggcttccacctcagacagttgcgctggctcagcggggccggaacatggctgcgtccggtctggatcatctcaaaaatggctacagaagaagattttgtcgaccttccagggcacgtgacattaacacagagcaaggccagaatgttctggaaatcttacaagactgttttgaagaaaaaagtcttgccaatgattttagtacaaattctacaaaatcagtgcctaattcaacacgcaaaataaaagacacttgtattcagtcaccaagcaaagagtgccagaaatcacatccaaagtcagttccagtttcttcaaagaagaaagaagcctctctacagtttgttgtagaaccaagtgaagccacaaacagatcagttcaggcccatgaagttcatcagaaaattctggcaactgatgttagttccaaaaatacacctgactcgaaaaaaatatcaagtagaaacataaatgatcatcacagtgaagctgatgaagaattttacttatccgttggctcaccttctgttcttttggatgcaaaaacatctgtatcacaaaatgttattccatctagtgcccaaaagagagagacttacacttttgaaaattcagtaaatatgctgccttcaagtacagaggtttcagttaaaaccaaaaaaaggttaaactttgatgataaagttatgttaaagaaaatagaaatagataataaagtatcagatgaagaggataaaacatcggaaggacaagaaagaaaaccatcaggatcatctcagaatagaatacgagattcagaatatgaaattcaacgacaagctaaaaaaagtttttcaacattgtttttagaaacagtaaaacgaaaaagtgaatccagtcccattgttaggcatgcggcaactgctccacctcattcgtgtcctcccgatgatacgaagttgatagaggatgaatttataattgatgagtcggatcaaagttttgccagtagatcttggattacaataccaagaaaggcagggtctctgaaacaacgcacaatatccccggctgagagcactgcactccttcaaggtagaaagtcaagagaaaagcatcataatatattacctaagactttggcaaatgacaaacattcccataaacctcacccagtagagacatctcagccctctgataaaacagtactggatacaagttatgctttgataggtgaaacagtaaataattatagatctacaaaatatgaaatgtattccaagaatgcagaaaaaccatctagaagcaaaaggactataaaacaaaaacagagaagaaaattcatggctaaaccagctgaagaacagcttgatgtgggacagtctaaagatgaaaacatacatacatcacatattacccaagacgaatttcaaagaaattcagacagaaatatggaagagcatgaagagatgggaaatgattgtgtttccaaaaaacagatgccacctgtgggaagcaagaaaagtagcactagaaaagataaggaagaatctaaaaagaagcgcttttccagtgagtccaagaacaaacttgtacctgaagaagtgacttcaactgtcacgaaaagtcgaagaatttccaggcgtccatctgattggtgggtggtaaaatcagaggagagttgcctgaaatgctaagtactatgtggcagatgaatacataaacagatgggtaaataaattcttacagaacttggataaatgtgctagatctctgaaactatcaaaaaacacttatttaagagtcctgaaatagatgttggatttttgatcaagctgggagtcgaaaaagtggaggaatctttatatatcatatagtctaaactctcatctgatggaagaagaaactgaagtctgaagttaagaagaacaacttgacctgcccccagcctgcctgtcgtacgtgtgacactgttgcccttccatatatatgaagaaatgtatatggagtacttgccatggggcaggaatgaggtcctgtttatagcaattcttcagtaagaaatgaattaccaatgcatcacaatagtagccgaaaatctactaagaaaacaaatcagtcatctaagaatattaggaaaaaaactattccacttaaaaggcagaagacagcaactaaaggcaaccaaagagtacagaagtttttaaatgctgaaggttctggaggtatcgttggtcatgatgaaatttccagatgttcgctgagtgagccattggaaagtgatgaggcagacttggctaagaagaaaaatcttgattgttctagatctacaagaagctcaaagaatgaagataacattatgactgcacagaatgttcccctaaagcctcagaccagtggatatacatgtaatataccaacagagtcaaacttggattctggagagcataagacttcagttttagaggaaagtggaccttccaggctcaataataattatttaatgtctggaaagaatgatgtggatgatgaggaagttcatggaagttcagatgactcaaaacaatctaaagtgataccaaagaacagaatccatcacaaactagtattgccctccaacacaccaaatgttcgcaggaccaagagaacacgtttgaaacctttggagtactggcgaggagagcgaatagattatcaaggaaggccatcaggaggattcgtgattagtggagtactatctccagacacaatatcgtctaaaaggaaggcaaaagaaaatattggaaaagtcaacaaaaaatctaataagaaaaggatctgtcttgataacgatgaaagaaagactaacttaatggtaaatctaggtatacctcttggagatcctttgcagccaacgagggtaaaggacccagaaacaagagagattattctcatggatcttgtaaggccacaagatacatatcaattttttgttaagcatggtgagttgaaggtatacaagacattggatacaccctttttttctactgggaaattgatattaggaccacaagaagaaaagggaaagcagcatgttggccaggatatattggttttttatgttaactttggtgaccttttgtgtactttacatgaaacaccttatatattaagtactggggattcgttctatgttccttcaggtaactattataacatcaaaaatctccggaatgaggaaagtgttcttctttttactcagataaaaagatgaaagatcaaccaaccttaaatatatgtatgtatatatgtatatgtgaaaaacagtttgtatagttggaatatttgtctttgtaattacttgtgatgttttaaaataaaaattttattcagttttgaaaaaaaaaaaaagaaaaaaaaaaaaaaa

SEQ ID NO: 26736 - DNA, 3224 bp, Homo Sapiens
agcggtaaatttgaaatggctgacgggtcgctgacgggcggcggtctggaggcagcggccatggcgccggagcgcacgggctgggcggtggagcaggagctggcgtctctggagaaaggtttgttccaagatgaagattcatgcagtgattgtagctaccgtgataaaccaggttctagtttacaaagttttatgccagaaggaaaaacctttttcccagaaattttccaaacaaatcaacttttgttctatgagcgattcagagcctatcaagattacattttagctgactgcaaggcctctgaggtacaggaattcacagctgagttcttggagaaggtccttgagccatctggatggcgggcagtctggcacactaatgtgttcaaggtgctggttgagatcacagatgtggactttgcagccttgaaggcagtggtgaggcttgctgaaccatacctctgtgactctcaagtgagcacttttaccatggagtgcatgaaggagctccttgatctgaaggagcatcggttgcccctgcaggagctgtgggtggtgtttgatgattcaggagtgtttgaccagacagcccttgcaattgagcatgtcagatttttctaccaaaacatttggaggagttgggatgaagaagaggaggatgaatacgattattttgtcagatgtgttgaacctcgattaagattgcattatgacattcttgaagaccgagttccatcaggacttattgttgactaccacaatctgttgtctcaatgtgaggagagttacaggaaatttttaaatctgagaagcagtttgtcaaattgtaactctgattccgagcaggaaaatatctccatggtggaagggttaaaattgtattcggagatggaacagttgaaacaaaagctgaaactcattgagaatcctttgttgaggtatgtgtttggttatcagaagaattctaacatccaagcaaagggtgtccgttccagcggtcagaagatcactcatgtggtctcctccaccatgatggctggtctcctgcggtccctgcttacggacaggctttgccaggagcctggtgaggaagaaagagaaattcagttccatagtgatccattgtctgctataaatgcctgcttcgaaggtgacactgttattgtttgtcctggccattatgtggtacatggcactttctccattgctgactccattgagttggaaggatatggcctaccagatgacattgtgatagaaaagaggggcaaaggcgacacttttgtggactgcactggtgctgatattaaaatctcaggcataaaatttgttcagcatgatgctgtagagggaatcttaattgttcaccgtggtaagactacgctggaaaactgtgtgctgcagtgtgagacgaccggagtcacagtgcggacatcagcagagtttctaatgaagaactcggatttatatggcgccaagggtgctggtatagaaatctaccctgggagtcagtgcaccctgagtgacaatgggatccatcactgcaaggaagggatcctcattaaggacttcttagatgaacattatgacattcccaagatatccatggtgaataatataatacataataatgaaggttatggtgttgtcttggtgaaacctacaatcttctctgacctgcaagaaagtgctgaagatggaactgaagaaaataaagcgcttaaaattcagacaagtggagagccagatgtggctgaaagagtggatctagaagagctgattgagtgtgcaactggtaaaatggagctttgtgcaagaactgacccttctgagcaagtcgagggaaattgtgaaattgtaaatgaactaattgctgcctccacacagaaaggccagataaagaagaaaaggttgagtgaactggggatcacgcaagctgatgacaacttaatgtcacaggagatgtttgttgggattgtggggaaccagttcaagtggaatgggaaaggtagttttggcacatttcttttctgactacagtgatgtaagtagatagcaaaatactggattttgcacatgctgccctaagaatcactgctgccattgtagtttgctgtattgtctgtattttatatttgattatttgggcttgagtgaaaggtagatttatttccatttgcaggtgttgcacataaaacactccctctttataagaaaaatcataaatgcatataaaatagaaaatatttggagattgcttatctgaaagtcttgctttcttatacacatggttctctcatattaagcctggtggtaactttttagtgtaattacctttagcacttcaaagacgaggaagtaaggaagggaatgcaagactagtgcataaaaatgcaataggtgtcatatgtacagcattcttcttagagttgccttttcatcccaattacagtgagtctgatttccatcctgtatttgcataatacttgtcttaaaataaaagcttttatgattgggaatttatctgcctaatcagacttattattgagacgtcaatgggacgcatttttctgttgagctatgcagtcgtcaaaacagcgatagacagcataggaggtttgaagcagaaatgaaatgtgttattcagagccaatgttgtacatagagcattttcactattgctgaatgggaatgattaaaaacaaggtatttttcgggccaggcggtggctcacgcttgtaatcgcagcactttgggaggctgaggcaggaggatcacttgagcccaggagttcaagactagcctaggcaacatagtgagaccctgtctctactaaaaataaatttaaaaaaaattagctgagtgtggtggtgcatgcatgtagttccagctactcaggaggctgaggctagaggatccttgagcccaggaggttgaggctgcagtgaggtgtgattgcgccactgcattccagcttgggcgacagagcgagacccagtctcaaaaaaaaaaaaagtatttttctcttaccgttacagtattctgattatattactgacacagtcaaaatgattaactgtacaacctgtatctgctgggtgttcttgttatcatattgtaaaacagctttaaaaatatttatattttaaaaactgtatgtgacattaatatgcctaatgattaaaattatagtgatgaaataacaaagaaaaaaaaaaaaaaaa

SEQ ID NO: 26737 - DNA, 2940 bp, Homo Sapiens
agcggagtgcccgcgcgcgccgccaggctcgcaagcaccgcgtaggccagctggccggatcccgccgtctgtcatggcggcccccatcctgaaagatgtagtggcctatgttgaagtgtggtcatccaatggaacagaaaattattcaaagacatttacaacacagcttgtggatatgggggcaaaggtttcaaaaacttttaacaaacaagtaactcacgttatcttcaaagatggctaccagagcacttgggacaaagctcagaagagaggcgtaaagctcgtttcggtgctctgggttgaaaaatgcaggacagctggagcacacattgatgaatcattgttccctgcagctaatatgaatgaacacttatcaagcctaattaaaaaaaaacgtaaatgtatgcagcccaaggattttaattttaaaacaccagaaaatgataagagatttcagaagaaatttgagaaaatggctaaagagctacaaaggcaaaaaacaaatctagatgatgatgtacctattctcttatttgaatctaatggttcattaatatatactcccacaattgaaattaatagtagtcaccacagcgcaatggagaagagattacaagagatgaaggagaaaagggaaaatctttcccccacctcttcccaaatgattcagcagtctcatgataatccaagtaactctctgtgtgaagcacctttgaacatttcacgtgatactttgtgttcagatgaatactttgctggtggcttacactcatcttttgatgatctttgtggaaactcaggatgtggaaatcaggaaaggaagttggaaggatccattaatgacattaaaagtgatgtgtgtatttcttcacttgtattgaaagcaaataatattcattcatcaccatctttcactcacctcgataaatcaagtcctcagaaatttctgagtaatctttcaaaggaagaaataaacttgcaaagaaatattgcaggtaaagtagtcacccctcaccaaaagcaggctgcaggtatgtctcaggagacgtttgaagagaagtatcgtttgtctcctaccttatcttcaacaaaaggccaccttttgatacattcaagacccaggagttcctcagtaaagagaaaaagagtatcacatggctcccattcacctccgaaggaaaaatgcaagagaaagaggagcaccaggagatctatcatgccgaggctgcagctgtgcaggtcggaaggcaggctgcagcacgtggcgggacctgccctggaggctcttagctgtggggagtcttcatatgatgactatttttcacctgataatcttaaggaaaggtattcagagaatcttcctcctgaatctcagctgccatcaagccctgctcagttgagctgcagaagtctttctaagaaggagagaacaagcatatttgaaatgtctgatttttcctgcgttggcaaaaaaaccagaacagttgacattaccaatttcacagcaaaaaccatctccagtcctcggaaaactggaaatggtgaaggccgtgcaacttcgagttgcgtgacttctgcccctgaagaagccctaaggtgttgtagacaggctgggaaagaagacgcatgcccagagggaaatggcttttcttacaccattgaggaccctgctcttccaaaaggacatgatgatgatttaactcctttggaaggaagccttgaagaaatgaaagaagcggttggtctgaaaagcacacagaacaaaggtaccacttccaaaatatcaaactcctctgaaggcgaagcccagagtgaacatgagccatgttttatagttgactgtaacatggagacgtctacagaagagaaggaaaacttacccggaggatacagtggaagtatgtgaatctccttttccaagtcaccttcgctaaataaacatgtaacagtgcatccatattttaaatttatcacaactttttcataacttatttccccatttactcctctttttacttaaagaatgtgcatttgatcattccaatgataaactctttaggaatagatgacttgctgtcttgtggaacttctagacttattggttaagtctgttaggaatctatttctccaagacttttccttcttataggtcaaaaggataagtagtccatagtatgaataactgaggggagtgaagtctttttccttattccattggagtcttggcgctgcagcgtgtgtaaagatgtatacgatagagagtattttaaaacctaggttcttaatagtgaggctatttaaagaaagaaattaaggtagattaagccatcgattgtatcaaagagaaagtgtgaaaaactacttttagaaatctgttgtcaatattgatttttgaagaaactttggtcagtgttaactatgaagaaacatttaaacatttttgctcatttgtaacaagccttgtttaacttgtacttattttgcttgaagcatcacttgaaaaggtttactcctattcataatttaattgtaattataataaaccatatcattttattaaaagtcaaaacaataaaaaattttgcacttcacagttataagcacaaataggttccagcaaccaaaaattgaagaaatcttgaactttgaccgtctttacctaaagattaggttaaaatttgagtgagaatgcattctctctgcatgatttctctgctctacaaatgttttaactgcctctttgaaggtggagaagtcatggtagcgtttgaaatcatcacagacatgttacataccttttccttgagtatacgctccccaaaattgtttcacaaaaagaatgaaaataattttatgtttttggcctgctatttatatcttggctttctgaacatatattaaatttgacaagaaactgtaaaaataaaaaaaaaaaaaaaa

SEQ ID NO: 26738 - DNA, 3563 bp, Homo Sapiens
aacgcagctgcggcggctgcgggtctcgtgggggcggagcggtcgccgctgccgccgcagctcgggtcgggatttgaaagattagaaacttcgggtggagagggcggcggcgttgaatgtgtggcggaagcgctgggggtcacggctccgcgcgccgccggacagccggcggcgtctccacagcatgaattacccgggccgcgggtccccacggagccccgagcataacggccgaggcggcggcggcggcgcctgggagctgggctcagacgcgaggccagcgttcggcggcggcgtctgctgcttcgagcacctgcccggcggggacccggacgacggcgacgtgcccctggccctgctgcgcggggaacccgggctgcatttggcgccgggcaccgacgaccacaaccaccacctcgcgctggacccctgcctcagtgacgagaactatgacttcagctccgccgagtcgggctcctcgctgcgctactacagcgagggtgagagcggcggcggcggcagctccttgtcgctgcacccgccgcagcagcctccgctggtcccgacgaactcggggggcggcggcgcgacaggagggtcccccggggaaaggaaacgtacccggcttggcggcccggcggcccggcaccgctatgaggtagtgacggagctgggcccggaggaggtacgctggttctacaaggaggacaagaagacctggaagcccttcatcggctacgactcgctccgcatcgagctcgccttccggaccctgctgcagaccacgggtgcccggccccagggcggggaccgggacggcgaccatgtgtgctcccccacgggcccagcctccagttccggagaagatgacgatgaggaccgcgcctgcggcttctgccagagtacgacggggcacgagccggagatggtggagcttgtgaacatcgagcctgtgtgcgtgcggggcggcctctacgaggtggatgtgacccaaggagagtgctacccggtgtactggaaccaggctgataaaataccagtaatgcgtggacagtggtttattgacggcacttggcagcctctagaagaggaagaaagtaatttaattgagcaagaacatctcaattgttttaggggccagcagatgcaggaaaatttcgatattgaagtgtcaaaatccatagatggaaaagatgctgttcatagtttcaagttgagtcgaaaccatgtggactggcacagtgtggatgaagtatatctttatagtgatgcaacaacatctaaaattgcaagaacagttacccaaaaactgggattttctaaagcatcaagtagtggtaccagacttcatagaggttatgtagaagaagccacattagaagacaagccatcacagactacccatattgtatttgttgtgcatggcattgggcagaaaatggaccaaggaagaattatcaaaaatacagctatgatgagagaagctgcaagaaaaatagaagaaaggcatttttccaaccatgcaacacatgttgaatttctgcctgttgagtggcggtcaaaacttactcttgatggagacactgttgattccattactcctgacaaagtacgaggtttaagggatatgctgaacagcagtgcaatggacataatgtattatactagtccactttatagagatgaactagttaaaggccttcagcaagagctgaatcgattgtattcccttttctgttctcggaatccagactttgaagaaaaagggggtaaagtctcaatagtatcacattccttgggatgtgtaattacttatgacataatgactggctggaatccagttcggctgtatgaacagttgctgcaaaaggaagaagagttgcctgatgaacgatggatgagctatgaagaacgacatcttcttgatgaactctatataactaaacgacggctgaaggaaatagaagaacggcttcacggattgaaagcatcatctatgacacaaacacctgccttaaaatttaaggttgagaatttcttctgtatgggatccccattagcagttttcttggcgttgcgtggcatccgcccaggaaatactggaagtcaagaccatattttgcctagagagatttgtaaccggttactaaatatttttcatcctacagatccagtggcttatagattagaaccattaatactgaaacgctacagcaacatttcacctgtccagatccactggtacaatacttcaaatcctttaccttatgaacatatgaagccaagctttctcaacccagctaaagaacctacctcagtttcagagaatgaaggcatttcaaccataccaagccctgtgacctcaccagttttgtcccgccgacactatggagaatctataacaaatataggcaaagcaagcatattaggggctgctagcattggaaagggacttggaggaatgttgttctcaagatttggacgttcatctacaacacagtcatctgaaacatcaaaagactcaatggaagatgagaagaagccagttgcctcaccttctgctaccaccgtagggacacagacccttccacatagcagttctggcttcctcgattctgcattggagttggatcacaggattgattttgaactcagagaaggccttgtggagagccgctattggtcagctgtcacgtcgcatactgcctattggtcatccttggatgttgccctttttcttttaaccttcatgtataaacatgagcacgatgatgatgcaaaacccaatttagatccaatctgaactctcttgaaggacatgaatggcctaaaactgattttttttttttccgttaaaatgtgtgtgtcaagatacggagatttcagggttaaagtatatttcagttttctttagggcaacatatatttgaatttaaaagcactttatttaaaaaaaaaagaagttttcagttctgaagaagtcatttacagtttgcatcattttaattatgagtctgacaaaaccttctccagagaatcaagcaagacctggatgtgaagaaggtttgggtaaactgcatgtaaaggctacaaatcacaatctgattcctcccaaatataaaggcatatggaacataatgtattaaccaaagtatgttataaatcaaaaatggtcaaggttcagcatattctatatgaagatcacaaggtggtatcgttttagatttctatgaaggctttcatttgtacatccctttgaaaaaatataacagatttaaaatgttttgaatttaacttgtttagaaaaactaatgcttaaaacaatatttgaactactgtatttataatttattacctctaattgctttatttcagtgtatgagacattactgttttaatgtttgctttgaacataatttaagaaccagatttattttctatagtgataaacccttttttctcagaactccatctttgtactcttcagatgaatatatagacactgtggcatacattttttttcattaaaaacttatggcttcatacaaaaaaaaaaaaaaaaa

SEQ ID NO: 26739 - DNA, 1129 bp, Homo Sapiens
agcggtctctactggaagtgcaaaaaattggccgggcgcagtggcaggcacctgtggtcccagctactcgggaggctgaggcaggagaatggcgtgaaccctggaagcggtgtttgcggtgggcagagattgcaccactgcactccagcctggggaacaaagcaagactccgtctcaaaaggaaaaaaaaatatatggtcagatttaacgtatgcatttaaaaggacaaaaattctgcattaagaacttgggagaggggttaaaaaaactcaaatttaactgtttaaagagctcctaagaaaagcattgcgatattttgataaaagatcaaaaacattctaatagacaattttttaaaatatggctttacttttgcctaatgttgcattgggttcattcattacaataaaacttattggccggacacggtggttcacgcctgtaatcccagcactttgggagtctgaggcaggtggatcacctgaggtcgtgggttcgagaccagcctaaccaacgtggagaagccccgcctctactagaaatacaaaattagacgggcatggtggcacatgcctgtaatcccagctacttgggaggctaaggcaggagaactgcttgaacccaggaagcagaggttgcactccagcctgggcaacaagagcgaaactccgtctcaaaaaaatacaaaacttactgagagcttaccatgtatcaggcactgtgattgatgctaccatacaacatagtgcttataattaacaatactgtaatatatacttaaaatatattttaataataaatacaacagtgcttttaattaacaatactgtaatatatacttaaaatatatttttattaataataaaaatattttttaagtatatgttacagataaatcttacatgtaagtttttaaatcacaaaacaatagaggctgagaggaaattttgggcatgatatgtttatggcattgtgatgggttcatgggtggatacttatctccaaactcatcaagttgtatactttagatatgtacagcttttttgtatgtcaatcatacctcaataaagtgcttttttaaaaaaattaaaaaaaaaaaaaaaaaaaaaaaataaaaaaaaaaaaaaaa

SEQ ID NO: 26740 - DNA, 3404 bp, Homo Sapiens
agcggggtggcgcccggagcccgagagtttccaggatggcttctgcatcaacttctaaatataattcacactccttggagaatgagtctattaagaggacgtctcgagatggagtcaatcgagatctcactgaggctgttcctcgacttccaggagaaacactaatcactgacaaagaagttatttacatatgtcctttcaatggccccattaagggaagagtttacatcacaaattatcgtctttatttaagaagtttggaaacggattcttctctaatacttgatgttcctctgggtgtgatctcgagaattgaaaaaatgggaggcgcgacaagtagaggagaaaattcctatggtctagatattacttgtaaagacatgagaaacctgaggttcgctttgaaacaggaaggccacagcagaagagatatgtttgagatcctcacgagatacgcgtttcccctggctcacagtctgccattatttgcatttttaaatgaagaaaagtttaacgtggatggatggacagtttacaatccagtggaagaatacaggaggcagggcttgcccaatcaccattggagaataacttttattaataagtgctatgagctctgtgacacttaccctgctcttttggtggttccgtatcgtgcctcagatgatgacctccggagagttgcaacttttaggtcccgaaatcgaattccagtgctgtcatggattcatccagaaaataagacggtcattgtgcgttgcagtcagcctcttgtcggtatgagtgggaaacgaaataaagatgatgagaaatatctcgatgttatcagggagactaataaacaaatttctaaactcaccatttatgatgcaagacccagcgtaaatgcagtggccaacaaggcaacaggaggaggatatgaaagtgatgatgcatatcataacgccgaacttttcttcttagacattcataatattcatgttatgcgggaatctttaaaaaaagtgaaggacattgtttatcctaatgtagaagaatctcattggttgtccagtttggagtctactcattggttagaacatatcaagctcgttttgacaggagccattcaagtagcagacaaagtttcttcagggaagagttcagtgcttgtgcattgcagtgacggatgggacaggactgctcagctgacatccttggccatgctgatgttggatagcttctataggagcattgaagggttcgaaatactggtacaaaaaaaatggataagttttggacataaatttgcatctcgaataggtcatggtgataaaaaccacaccgatgctgaccgttctcctatttttctccagtttattgattgtgtgtggcaaatgtcaaaacagttccctacagcttttgaattcaatgaacaatttttgattataattttggatcatctgtatagttgccgatttggtactttcttattcaactgtgaatctgctcgagaaagacagaaggttacagaaaggactgtttctttatggtcactgataaacagtaataaagaaaaattcaaaaaccccttctatactaaagaaatcaatcgagttttatatccagttgccagtatgcgtcacttggaactctgggtgaattactacattagatggaaccccaggatcaagcaacaacagccgaatccagtggagcagcgttacatggagctcttagccttacgcgacgaatacataaagcggcttgaggaactgcagctcgccaactctgccaagctttctgatcccccaacttcaccttccagtccttcgcaaatgatgccccatgtgcaaactcacttctgaggggggaccctggcaccgcattagagctcgaaataaaggcgatagctgactttcatttggggcatttgtaaaaagtagattaaaatatttgcctccatgtagaacttgaactaacataatcttaaactcttgaatatgtgccttctagaatacatattacaagaaaactacagggtccacacggcaatcagaagaaaggagctgagatgaggttttggaaaaccctgacacctttaaaaagcagtttttgaaagacaaaatttagatttaatttacgtcttgagaaatactatatatacaatatatattttgtgggcttaattgaaacaacattattttaaaatcaaaggggatatatgtttgtggaatggattttcctgaagctgcttaacagttgctttggattctctaagatgaatccaaatgtgaaagatgcatgttactgccaaaaccaaattgagctcagcttcctaggcattacccaaaagcaaggtgtttaagtaattgccagcttttataccatcatgagtggtgacttaaggagaaatagctgtatagatgagtttttcattatttggaaatttaggggtagaaaatgttttcccctaattttccagagaagcctatttttatatttttaaaaaactgacagggcccagttaaatatgatttgcattttttaaatttgccagttttattttctaaattctttcatgagcttgcctaaaattcggaatggttttcgggttgtggcaaaccccaaagagagcactgtccaaggatgtcgggagcatcctgctgcttaggggaatgttttcgcaaatgttgctctagtcagtccagctcatctgccaaaatgtagggctaccgtcttggatgcatgagctattgctagagcatcatccttagaaatcagtgccccagatgtacatgtgttgagcgtattcttgaaagtattgtgtttatgcatttcaatttcaatggtgttggcttcccctccccaccccacgcgtgcataaaaactggttctacaaattttttacttgaagtaccaggccgtttgctttttcaggttgttttgttttatagtattaagtgaaattttaaatgcacagttctatttgctatctgaactaattcatttattaagtatatttgtaaaagctaaggctcgagttaaaacaatgaagtgttttacaatgatttgtaaaggactatttataactaatatggttttgttttcaatgaattaagaaagattaaatatatctttgtaaattattttatgtcatagtttaattggtctaccaagtaagacatctcaaatacagtagtataatgtatgaattttgtaagtataagaaattttattagacattctcttactttttgtaaatgctgtaaatatttcataaattaacaaagtgtcactccataaaaagaaagctaatactaatagcctaaaagattttgtgaaatttcatgaaaactttttaatggcaataatgactaaagacctgctgtaataaatgtattaactgaaaaaaaaaaaaaaaa

SEQ ID NO: 26741 - DNA, 3765 bp, Homo Sapiens
agcggagcggcgacggcgtcggcggcggcggcggcagcggctccggccgaggtgcgcgctgggggggagggggggccggagaggagcatgaatggagcaaaatggcggatcatgtgcagagcctggcccaactagagaatctgtgcaaacagctgtatgaaaccacagacacaaccactcgactccaggcagagaaagccttggttgaatttaccaacagccctgattgcctgagcaagtgccagctactcctcgaaagaggaagttcctcttactcccagttactggcagctacatgccttaccaagcttgtatcacgcacaaacaaccccctaccattggaacagcgaatagatattcggaactatgtgctcaactaccttgccactcggccgaagttggctactttcgtgacacaagcacttattcagttatatgccagaatcacaaaactgggctggtttgactgtcagaaggatgactatgtcttcagaaatgcaatcacagacgtcacaaggtttttacaggatagtgttgaatactgcatcattggtgtcacaattttatctcagctaaccaatgaaattaatcaagcagacaccacccatcctttaaccaagcacagaaaaatagcctcttcttttcgcgattcatcattatttgatatcttcacactttcctgcaatttactaaaacaggcttcaggaaagaatctaaacttgaatgatgaaagtcagcatggcttgctcatgcaactgctcaagctcactcataactgcctcaactttgacttcatcggcacttccactgatgagtcctcagacgacctgtgtacagtgcagattcccaccagctggagatcagccttcttagattcttcaaccttgcagctgttttttgacctgtatcattccatccctccttcattttcacctctggtattatcctgcttggtacagatcgcttcagtcagaagatccctgtttaacaatgcagagagggccaagtttctctctcatcttgttgatggtgttaaacgaatactggaaaacccacagagtttatcagacccaaacaattaccatgagttttgcagactactggcccgattgaagagtaactatcaactgggagaattggtaaaggtggaaaactaccctgaggtcatccgattgatagccaacttcacagtgaccagcctacagcactgggaatttgctccaaatagtgtgcactatcttctgagcctgtggcagcggctggcagcctctgtgccgtatgtcaaagccacagacccccacatgctggaaacttacactcctgaggtcaccaaagcctacatcacatcccggttggaatctgtgcacatcatactgagagatggcctggaagatcccctggaggatacggggctggtccagcagcagttggaccagctgtccaccattgggcgttgtgaatatgagaagacgtgtgcactcctcgtgcagttgtttgaccagtcggcccagtcgtaccaggagctgctacagagcgccagcgcaagcccaatggacattgcagtgcaggagggaaggctgacatggctggtttacattattggagcagtgatcggtggccgggtttcttttgccagcactgatgagcaagacgccatggatggtgagcttgtctgtcgggtgctccagctgatgaacctaacagattctcgtttggcccaggcgggtaatgagaagctagagttggccatgctgagcttttttgaacagtttcgtaagatctacattggggaccaagtgcagaaatcctctaagctgtaccgccgactctcagaagttctgggcttgaatgatgagaccatggtcctaagcgtcttcataggaaaaatcatcaccaacttgaagtactggggccgttgtgaaccaatcacctccaagacactacagcttctcaatgacctgtccattgggtacagtagcgtaaggaagctagtgaagcttagtgcggtacagttcatgctgaacaatcacacgagcgagcacttttcatttttgggtattaacaatcagtccaacctgacagacatgcggtgtcggactaccttctacacagcacttgggcgtctcctcatggtggatttaggagaggatgaagatcagtatgagcagttcatgctgccactcacagcagcatttgaggctgtggcccagatgtttagcaccaatagtttcaacgagcaggaggcaaagcgaactctagttggcctagtaagagacctgagagggatcgctttcgctttcaatgccaagaccagcttcatgatgctctttgaatggatatatccatcctatatgccaattctccaacgggcaattgagctctggtaccatgatccagcctgtactacacctgtactcaagttgatggctgaattggttcataataggtcccagcgactccagtttgatgtctcttcccccaatggcatcttactcttccgagaaaccagcaagatgataacaatgtatggcaatcgcatcctgacactaggagaggtcccaaaggatcaggtctatgctctgaagctcaagggcatctccatctacttctccatgctgaaggctgctctcagtgggagttacgtcaatttcggagtctttcgtctctatggagacgatgccctggacaatgctctgcagaccttcatcaagctgctcctctctattcctcacagtgatctcttggattaccccaagctcagccagtcttattattcactactggaagtcctgacccaggaccatatgaactttattgcaagcctggaacctcacgtcatcatgtatattctctcttccatttctgaaggacttactgcacttgacaccatggtatgcacaggctgctgctcctgcctggaccacattgtgacatacctcttcaagcagctgtcacgtagcaccaagaagaggaccacacccctgaaccaggagagcgaccgctttctgcacatcatgcagcagcatccagagatgatccagcagatgctgtccacggtgctgaacatcatcatctttgaagactgtaggaaccagtggtctatgtcccgaccactacttggcttgatattgcttaatgaaaagtatttttctgacctaagaaacagtattgtgaacagccagccaccggagaagcagcaggccatgcacctgtgttttgagaacctgatggaaggcatcgagcgaaatcttcttacgaaaaacagagacaggttcacccagaacctgtcagcattccgtcgagaagtcaacgactcaatgaagaattccacttatggcgtgaatagcaatgacatgatgagctgacacctccttggactctacctgtacagagcagcgtccctttggtttggcccagaggggcgaacaattgcaagggagagggcctggctgatcctggctcttttctccaggggtgtggggaaaatggcaaaggtcaactagctgcttccccagggaataggggtgtgagtacactcactagggggcagggcgctgctggttcctgggggactgggtgggaagggtggtgggaggagataagagatacaaactgagactccagcctctcctcctggggccacccaagtggggagaacccctagtgtcctgccataacctgccttgtataaacatgtacattttttcataacattttgaacaaggtttatattgactcaagtttaaaaacgaaaaaaaaaaaaaa

SEQ ID NO: 26742 - DNA, 5276 bp, Homo Sapiens
cggacgcgtgggtcgacccacgcgtccgagcagaggtgctgttatcagaatagtcttctgggtataaattaaaaatgactgaagttcaagcaatggtagaattctctgtggagctaaacaagttctacaatgtggatttgtttcagagaggtttttaccagattcgtgcttctatgaaaattccatcaagaattccccacagagtagaagctagtttgttgcatgcaacaggtatgactttagcctttccagcctcagttcatgattctctaatttgcagtaaaacatttcaaattttgtacaaaaatgaagaggttgttttaaatgatgttatgatcttcaaagtaaaaatgctattggatgaaagaaagattgaagaaacccttgaggaaatgaattttctattatccttggatctacacttcacagatggagattattcttcatgcatcattggttgcactacaccagccactaataagctttcctcgccctgtgaagacaacttggttaaatagaaatgcaccagcacaaaacaaagattccgtgattcctactcttgaaagtgtggtctttggtattaactacacaaaacagttatcaccagatggttgtagcttcatcattgcagactccttcctacatcatgcgtatcgttttcattatacactttgtgccactttgctgctagccttcaagggattgcacagctacttcattacagtaacagaagagattccttcttgtcagaaactagaactggccaaggccaacatgcagctcctatatgagcgtcttctcagaagaaaacagctacgaacacagaaagacaaccatctagaggaaatggatgtagaagctcgacttactgaactatgtgaagaagttaagaaaatagagaatcctgatgaactggcagaacttataaatatgaatcttgcgcaactttgctcacttttgatggctttatggggacagtttctggaagttataacgctacacgaagaactaagaatattattagcacaagagcaccatactttgagggtacgcagattttctgaggcattcttttgttttgagcatccaagagaagctgccattgcataccaggaacttcatgctcagagtcatctacagatgtgcaccgctatcaaaaatacttccttctgcagttctcttccacccttacctattgaatgtagtgaattagatggagatctcaattcattacctataatctttgaagataggtatttagattcagttactgaaggtaaacttgatatctcccaggacgatagtgaaattacacaaatggaacacaatctggcatccagaaggtcatcagacgattgccatgatcatcaaacaaccccatctttgggagttagaacaattgaaataaagcccagtaataaagatcctttcagtggagagaatataactgtcaaactaggaccttggacagagcttcgacaagaggaaatacttgtggataatttactacccaactttgagtccttagaatctaatggtaaatctaaatctatagaaataacatttgaaaaggaagctttgcaagaagcaaagtgtctttctattggagaatcattaactaaattacgaagtaatctacctgccccttctacaaaagaatatcatgttgtagtaagtggagatacaattaagttaccagatattagtgccacatatgcctcatctagattttcagattcaggtgttgaaagtgaaccgagttcttttgcgacacatccaaacactgatttagtctttgaaactgtgcaagggcaaggtccttgcaatagtgaaagattatttcctcagcttttgatgaaacctgattataatgtaaaattttcattaggaaatcattgtactgagagtacaagtgctataagtgaaatacagtcatctttgacatccataaactctctaccctccgatgatgaactgtcacctgatgaaaattctaagaaatctgttgtacctgaatgccatctaaatgatagcaaaactgtattaaatctaggaacgactgatttgccaaaatgtgatgatactaaaaagtcaagtatcactttgcaacagcagagtgttgtattttcagggaacttggacaatgaaactgtagcaatacattccttaaattcaagcattaaagaccctttacaatttgttttttcagatgaagagacttccagtgatgtgaaaagtagttgcagctccaaacctaacttggatactatgtgtaaaggcttccagagtcctgataaatctaataactctacagggacagcaattacattaaattcaaaactgatttgtttaggcactccttgtgtcatttcaggttccatttctagtaatacagatgttagtgaagatagaactatgaaaaaaaatagtgatgtattaaatctcacacagatgtattcagaaatccctacagttgaaagtgaaactcatctgggtacaagtgatcctttttcagccagtactgatatagtaaagcaagggcttgtggaaaattattttggttctcaaagcagtacggatatttctgacacatgtgctgttagctacagcaatgcacttagccctcagaaggaaacttctgaaaaagaaattagtaatcttcagcaggaacaggataaagaggatgaggaggaagagcaggatcaacaaatggttcaaaatgggtactatgaagaaacagattattcagctttggatggaacaataaatgctcactatacaagcagagatgaactaatggaagaaagacttacaaaatctgaaaaaataaacagtgactatctgagagatggtataaatatgcctactgtctgtacttctggttgtttgtccttcccgtctgcaccacgagagtctccttgtaatgttaaatattcttccaaaagtaaatttgatgccattacaaagcagccaagcagtacttcttacaacttcacttcttcgatttcctggtatgaaagttcaccaaaacctcaaatacaagccttccttcaggcaaaagaagaactgaagctactaaaacttcctgggttcatgtacagtgaagttcctctgctggcatcctcagtaccttattttagtgtagaagaagaggatggttctgaagatggagtacatctgattgtctgtgtgcacggtttagatggaaacagtgcagatctccgattagtaaaaacttacattgaacttggattgcctgggggaagaattgattttcttatgtctgagagaaatcagaatgatacttttgctgattttgatagcatgactgatcgtcttttggatgagataatacagtatattcagatatatagtctaacagtctcaaaaataagctttattggacattcgttgggcaatttaataattcgttcagtgcttacaaggccaaggtttaaatattacctcaacaaacttcatacctttctgtctctttctggacctcaccttggtacactctacaacagcagtgctcttgttaatacaggtctctggtttatgcagaaatggaaaaaatcaggttcgcttttgcagctgacatgtcgagatcactcagaccctcgccaaacttttttatataagcttagtaacaaagcagggcttcattatttcaaaaatgttgtgctagtgggatccctacaggatcgctatgttccttatcactctgcccgcattgaaatgtgtaaaacagctttaaaggacaaacagtcaggacagatctattcagaaatgatccacaacttgcttcgacccgttctgcaaagcaaggactgtaatttggttcgctataatgtcatcaatgcattgcccaatacagctgattcactcattgggagagctgcacatatagctgttcttgattcggaaatatttttagagaaattctttctggttgctgccctcaaatatttccaatagtataaaagcattgttagcgactggacaattacctcattcaacaatgtttcaaataatgtattatattaaaatgtagatgctgataagttctaagaaatatttatacctttttatatggaagataatttatatcatccatgtttagtgctttttaaacatcaactttactttctaggtaatgtggctgtgcaatatttttttaattttatctttttacttttctattactttttcatatattttgctacctaagtatttcagtgaaactttaagcccatacctgtgtctgattgtttattattggctttccacaattcttacatcagactacattatattagagaccattattgctagaatagcatgggatttaaaattttctaatactgggggtattatttagttaattataaatttttcttttcacattttactgtgttttaactggaaataaaattatggctgctacaatatattttttgaaatcaacttctgtagttctaaaatacaactttatcatacaatcaaaccaggtagttcatataaaacagtgtaatacaagttttctataaagtcattactgttgcttaaacatatttcatgcctattaaaatatattttctactggtgatttcaacattatttctcatactgacttttattactggaaatgttcctgtacatgttggcagcagataaagatttttgaatgtttgaatgccctctgccttgatttggttggaatttttgctaaattggtaatgttgcttgaactttatgactacattttcttttaacttttttcatggacttccttatatgtacataataattaaatgttgaaatttatgaaatacttttatgaatttagataatttttaaatattgttaaaatttattgaactaaaaagtaatgtaaataaaataattcatgttaaagatggaacaaaataattaactttacatgtttggtgatacagatgcaaatgtttttgatatatggagatgttgagtcttttgactttactaaaggtgctgaatagcattaaattcactattttccttttctgttttacttgtgaaaataaaaatgcactaaggttgggtagaagttctgtttgcactcactaattgtgacagacagaggtttttgtaagtatttattgtacaattgatgcatgtttatttttagcgttgttattgcctctggtgttaataaatgaacaaatggctatctggaggaacagctaaaaaaaaaaaaaaaaaaaaaaaaaaaaaaaaaaaaaaaaaaaaaaaaa

SEQ ID NO: 26743 - DNA, 1902 bp, Homo Sapiens
ataccatgaatgtactgcaagggaacacatttgtgtcatgtgaagagacatgacaaaaacagccctccttaaattatttgtggcaatagtgatcacattcattttaattttgccggaatatttcaagacaccgaaagaaagaacattggagctatcatgtctggaagtgtgtttgcaatctaattttacctattcactctcctccttaaatttttcttttgtgacttttctgcaaccagtaagggaaactcagattatcatgagaatctttctaaatccctccaattttcgtaacttcaccaggacttgccaagacatcacaggtgaatttaaaatgtgctcctcgtgtttggtttgtgagcctaaaggaaacatggattttatttctcaggaacaaacatcaaaagttcttatcaggagaggatcaatggaagtgaaagcaaatgattttcattcaccttgtcagcactttaacttcagtgtagctcctctggttgaccacttggaggaatataacactacctgtcatctaaaaaaccacactggaagatcaacaatcatggaggatgagccaagcaaggagaaatcgataaactacacttgtagaatcatggaatacccgaatgattgtatacacatttctttgcacctggagatggatataaaaaatatcacttgttccatgaagatcacttggtatattttagttctattagtttttatatttttgatcatcctcactatccgcaaaatacttgaaggccagagaagagtgcaaaagtggcagagtcatagagacaaacctacatctgttctcttaagaggaagtgattcggagaaactgagagcattgaatgtgcaggttctttcagcagagaccacgcagaggctgcctttggatcaagtccaggaagtgcttcccccaattccagaactataagttacttccacagtgcatcagtgagatcaatatacacgaatatccccgggcaagttggaccgagccctttgaagaatactcagaagtttattttgtgaatgagtagactggaaaatgtttgtgtccagctgaggatgcacagttggaaagcaggaggaatgctgactggttgatgaaaactagcttaagagcattcattcgctccatgagatcaagggaacaagagtgtttgcaagaagccattatgagtcatggaaaaaaagatgatgaaacccatggaaacagcaagagaattcccactctctctcttcttaaaaaaaatctatcattatacagcacagagtggagccaagtttttaattttgaggaaccaaaaacaggatcaaatatgaaaaccctttcttttattgggccacattgtagatgctgatttgataattgtttcctatgcagatagattatttttatttcacagattatttaaaagggaagagggcctggttgtttatttatatgtttgtttgcatttatgaatcttgctgccttttagcaccaggatgtttttaaaaaaattcaaagaggccaggcgcagtggctcatgcctgtaatcccagcactttgggattctgaggtgggaggatcatgaggtcaagggatcgagaccatcctggccaacatggtgaaaccctgtctctactaaaaacacaaaaattagctgggtgtggtggtgcgcgcctgtagtcccagctcctcaggaggctgaggcaggagaatcacttgaacctggcaggcagagtttgcagtgaaccaagatcacgccactgcattacagcctggtgcagagcaagactctgtctcaaaaaaaaaaaaaaaaaaaaatcaaagataccaataaaacgaatttaaataaaatacttaagtactttaatagcaaaaaaaaaaaaaaaaaaaaaaaaaaaaaa

SEQ ID NO: 26744 - DNA, 3833 bp, Homo Sapiens
agatttatcggcagccatcttcttgggggtgctgggagccgggaagaccccctgaatcgttcccattgagctgcccttcgccttcgctttctttacttttgccttttcgacgtagccaacaagcacctggtcccgaggctgagagaaggctcgggtctaagcgcgtgtcgcgcttccggtctgggtagatttgctggggaagagggaagggggagggcccgggcaaaccgttgctgtttcagcccgggctgggggccggggacggggagctcctggcaccccgtgcacttgtggcctgcggcggtccttgcagagctgttcgccgaccggggcccgcgggaacctgccaccggcgcctcccaccgcggcccacgcgggcggcgcgcggaggagggggcgggggcagcggcggctgtagcggccgcgacctgggcgggcggaggagtgtgacgggccttagggccgctgtggatggtttctaaaatgatcattgaaaacttcgaggcactcaagtcctggctcagcaagactctcgagcccatgtgagtatccgggggatatctctttgcagggatggcagtgggagataggcggacccagagatctgtgcagtttccccaagtgcctgcggtggaggccgaagcggtgaacggaggtcccagggttctgtggcttctcctcctcgtccacctcgcttccaggttcaggatacccccgagagcctgagtcgagctttattttattgctgagctgctctcgttttcccgttatatatagaccgtctccaacccccacccgcaatattttccgggggcctcaaaatcggtttattttagtgaaaccgactgtattttacttcctacagattattttaccttgtttttctaaatgaagtagacggcctttattggggattcgggcagttctagcttaaatcactcacgtttcacctaaatataattcctgaaagcaaggccacgtctcccatgtgctgtctggctcatctgcacctctcttcactgattgaagatgtaacaggtgctgaggtggccagtaaaattcccctttcccgcctacgcgttcgttagcttggagaggaggaagaaaattgaatcttcatccatatggaatatttagcagttttaagtgggatgctatagatagattttgtgttgggggctgcggttagagtgctgaaatagtcttagattggaaaatttaaggagtgttttgacgacttgttaatacaaaatatgacatggaccaaagtgcttaatcagaattggttgatttacaataatgcaatggggaaaattcacgtatttaataaagttattaggtacctactgtatactacgggaggctttggggatagagcttttaaattctaaaatcgacaagacataaataaatccagatattaatagagttgtgactattgtaataatagagaatcatgtaaaagtgattatgaggggggctatttcatattggtcaaggaaggactctcagagaaggtgacattggagtaacatctaaagagaagggaccatgtgtgtcaaagtcttggaaaagaacattccttgcaaaaggaagagcaaatgaaaggccctgtagcagaagtgattgtggtgtgtttcaggaagagaaaggccactgtggctggaaagagccttgtgatgagggagaggatataaaggcaacaagttggacaagtaggtaggggccacatcatgtatgggaagacgtgagatgatttaaagcagacaaggactgatttaattttgttttaactctgcctattttgtagagactgaaagggcaagaatggaagtaagaagattattcagaagtgtgttgtaggcagagatgtggctagtttgcattagagtgatggtggagacaggcagatccaaatacatttcataagtaaaattaatggattaaatgcgggagatgagggaaagggaaatcaagggtggtgccttagataacccaagcaacagaatgggtgatagtagagaaggcagagaacaggttaaggggagaaggaaagtggatggctagttttgataataataaatacagtaagtatgaagtctgtgggatacagctgagtgtgatagcagatcattgaatatatgagtctaaaactcaggacaggactggagaaatctggagtcatgcagatagtatttaagacgatgacattgtgggaaatttcatagaaaaagtgtgtagatagagaagagaagagggcctagtactgaggcaggaggaaaactgggctttatgtcattaaaaaacaagtgtatggcaaaagagaggagtttatgaaatgctgcagaatgcatgaaaaaatggaggcaaataggtagcccttagatttagcaaagtggaagtcattggtaaccttagcaaaatagtttcactggagtagagttgtgcagatggaagtcctatttcggtgtattggagagtgggcatcatagtatagcggtgaggagaactctggagcagaatgtctggctttgaattctgcctctgccacttaccagctgtatgatattgggtaagttacttaactcagggcttccatttcctcaactgtaaaattgggaaaataatgggtgtatattaaggaaatcttagactactgtctggtgtgtaattagcattcagtagttattaggtgaatacaaaacttataaatgttttggattgaaatagctttcctttaagcgttcagtttcatattagatttactgccgtatccctccatcttacctaaatgagaagactgtagctacttagagtgtatgcttgtaatttttctttagtcttaatgaaacatattccatgtatcataaagcctactctcgatggctgtagcactgcagtcattatgttgtaataaataaggctctgctagtagagcctagacactgggaattgtaattggtccttttctaatgtgtgtagctgtggtaaaattgagcccttattcaagttcttgtccttttaattgcatttcaggtggattcttttgtatgatgacttataaaagctgatcccaattatggatcagtggtttctaacgttggttttgtgaaatgttatgatctgttatctaaaaggaatttttttttttttttgctttaacattgtaattaccaaacgacctctgtttgagagaggaacatacagaggaccaagggtaagctgtaacttgaaacttacataaaactttttagttacctgtggtggttaaatacttcatggttttggacttactccacattttgaatgtgttaattcagcaaacatttattttaagagtacttaacctactctgtgctaagcagtgtgcaagatattggggaaatagtaggtaacaagacatgaaatgactcacttcattttatttaccatttagcaggaaagataggtgttgaagtctgggaacatcaggaaacacttccctggtgtaatgtttatctcagcttggaaggatgaagaatactttgctggggcaaaaggatgggattggagacctgtgaaagcgttataggtttggtgaacagattgtatggaggtcctaaaaatggacaaaaaagatatgttggaggaattgaaagaaataggaaaaagcaaaggagaagaatggcagtggaaagctccagagataggagccagatcacacaggactttgttgagtcatgtttaagactttggatgttattgaaggatagtgggaagccagtgaagggttttagggcaagagggttttcagatggatgtttaaaaaaaaaaaaaaaaaaaaaaaaaaaaaa

SEQ ID NO: 26745 - DNA, 2427 bp, Homo Sapiens
attacaaagaaagccggactcttttcttataactgagctcagccaaggaaactcttgcacaaatgtacaatactgtttggaatatggaagacctggatttagaatatgccaagacagatataaattgtggcacagacttgatgttttatatagaaatggacccaccagcactgcctcctaaaccaccaaaacctactactgtagccaacaacggtatgaataacaatatgtccttacaagatgctgaatggtactggggagatatctcgagggaagaagtgaatgaaaaacttcgagatacagcagacgggacctttttggtacgagatgcgtctactaaaatgcatggtgattatactcttacactaaggaaagggggaaataacaaattaatcaaaatatttcatcgagatgggaaatatggcttctctgacccattaaccttcagttctgtggttgaattaataaaccactaccggaatgaatctctagctcagtataatcccaaattggatgtgaaattactttatccagtatccaaataccaacaggatcaagttgtcaaagaagataatattgaagctgtagggaaaaaattacataaatataacactcagtttcaagaaaaaagtcgagaatatgatagattatatgaagaatatacccgcacatcccaggaaatccaaatgaaaaggacagctattgaagcatttaatgaaaccataaaaatatttgaagaacagtgccagacccaagagcggtacagcaaagaatacatagaaaagtttaaacgtgaaggcaatgagaaagaaatacaaaggattatgcataattatgataagttgaagtctcgaatcagtgaaattattgacagtagaagaagattggaagaagacttgaagaagcaggcagctgagtatcgagaaattgacaaacgtatgaacagcattaaaccagaccttatccagctgagaaagacgagagaccaatacttgatgtggttgactcaaaaaggtgttcggcaaaagaagttgaacgagtggttgggcaatgaaaacactgaagaccaatattcactggtggaagatgatgaagatttgccccatcatgatgagaagacatggaatgttggaagcagcaaccgaaacaaagctgaaaacctgttgcgagggaagcgagatggcacttttcttgtccgggagagcagtaaacagggctgctatgcctgctctgtagtggtggacggcgaagtaaagcattgtgtcataaacaaaacagcaactggctatggctttgccgagccctataacttgtacagctctctgaaagaactggtgctacattaccaacacacctcccttgtgcagcacaacgactccctcaatgtcacactagcctacccagtatatgcacagcagaggcgatgaagcgcttactctttgatccttctcctgaagttcagccaccctgaggcctctggaaagcaaagggctcctctccagtctgatctgtgaattgagctgcagaaacgaagccatctttctttggatgggactagagctttctttcacaaaaaagaagtaggggaagacatgcagcctaaggctgtatgatgaccacacgttcctaagctggagtgcttatcccttctttttctttttttctttggtttaatttaaagccacaaccacatacaacacaaagagaaaaagaaatgcaaaaatctctgcgtgcagggacaaagaggcctttaaccatggtgcttgttaatgctttctgaagctttaccagctgaaagttgggactctggagagcggaggagagagaggcagaagaaccctggcctgagaaggtttggtccagcctggtttagcctggatgttgctgtgcacggtggacccagacacatcgcactgtggattatttcattttgtaacaaatgaacgatatgtagcagaaaggcacgtccactcacaagggacgctttgggagaatgtcagttcatgtatgttcagaagaaattctgtcatagaaagtgccagaaagtgtttaacttgtcaaaaaacaaaaacccagcaacagaaaaatggagtttggaaaacaggacttaaaatgacattcagtatataaaatatgtacataatattggatgactaactatcaaatagatggatttgtatcaataccaaatagcttctgttttgttttgctgaaggctaaattcacagcgctatgcaattcttaattttcattaagttgttatttcagttttaaatgtaccttcagaataagcttccccaccccagtttttgttgcttgaagatattgttgtcccggatttttgttaatattcatttttgttatccttttttaaaagtaaatgtacaggatgccagcaaaaaaaaaaaaaaaaaaaaaaaaaaaaaa

SEQ ID NO: 26746 - DNA, 2410 bp, Homo Sapiens
gcttccgctgcccgccggggaatcccccgggctggcgcgcagggaagttcccgaacgcgcgggcataaaagggcagccggcgcccgcgcgccacagctctgcagctcgtggcagcggcgcagcgctccagccatgtcgcgcggcctccagcttctgctcctgagctgcgcctacagcctggctcccgcgacgccggaggtgaaggtggcttgctccgaagatgtggacttgccctgcaccgccccctgggatccgcaggttccctacacggtctcctgggtcaagttattggagggtggtgaagagaggatggagacaccccaggaagaccacctcaggggacagcactatcatcagaaggggcaaaatggttctttcgacgcccccaatgaaaggccctattccctgaagatccgaaacactaccagctgcaactcggggacatacaggtgcactctgcaggacccggatgggcagagaaacctaagtggcaaggtgatcttgagagtgacaggatgccctgcacagcgtaaagaagagacttttaagaaatacagagcggagattgtcctgctgctggctctggttattttctacttaacactcatcattttcacttgtaagtttgcacggctacagagtatcttcccagatttttctaaagctggcatggaacgagcttttctcccagttacctccccaaataagcatttagggctagtgactcctcacaagacagaactggtatgagcaggatttctgcaggttcttcttcctgaagctgaggctcaggggtgtgcctgtctgttacactggaggagagaagaatgagcctacgctgaagatggcatcctgtgaagtccttcacctcactgaaaacatctggaaggggatcccaccccattttctgtgggcaggcctcgaaaaccatcacatgaccacatagcatgaggccactgctgcttctccatggccaccttttcagcgatgtatgcagctatctggtcaacctcctggacattttttcagtcatataaaagctatggtgagatgcagctggaaaagggtcttgggaaatatgaatgcccccagctggcccgtgacagactcctgaggacagctgtcctcttctgcatcttggggacatctctttgaatttcctgtgttttgctgtaccagcccagatgttttacgtctgggagaaattgacagatcaagctgtgagacagtgggaaatatttagcaataatttcctggtgtgaaggtcctgctattactaaggagtaatctgtgtacaaagaaataacaagtcgatgaactattccccagcagggtcttttcatctgggaaagacatccataaagaagcaataaagaagagtgccacatttatttttatatctatatgtacttgtcaaagaaggttgtgtttttctgcttttgaaatctgtatctgtagtgagatagcattgtgaactgacaggcagcctggacatagagagggagaagaagtcagagagggtgacaagatagagagctatttaatggccggctggaaatgctgggctgacggtgcagtctgggtgctcgcccacttgtcccactatctgggtgcatgatcttgagcaagttccttctggtgtctgctttctccattgtaaaccacaaggctgttgcatgggctaatgaagatcatatacgtgaaaattatttgaaaacatataaagcactatacagattcgaaactccattgagtcattatccttgctatgatgatggtgttttggggatgagagggtgctatccatttctcatgttttccattgtttgaaacaaagaaggttaccaagaagcctttcctgtagccttctgtaggaattcttttggggaagtgaggaagccaggtccacggtctgttcttgaagcagtagcctaacacactccaagatatggacacacgggagccgctggcagaagggacttcacgaagtgttgcatggatgttttagccattgttggctttcccttatcaaacttgggcccttcccttcttggtttccaaaggcattttattgcttgagttatatgttcactgcccccctaatattagggagtaaaacggataccaagttgatttagtgtttttacctctgtcttggctttcatgttattaaacgtatgcatgtgaagaaagggtgtttttctgttttatattcaactcataagactttgggataggaaaaatgagtaatggttactaggcttaatacctgggtgattacataatctgtacaacgaacccccatgatgtaagtttacctatgtaacaaacctgcacttatacccatgaacttaaaatgaaagttaaaaataaaaaacatatacaaataaaaaaaaaaaaaaaaaaaaaa

SEQ ID NO: 26747 - DNA, 2085 bp, Homo Sapiens
atgctcagctcagctcggccctcgcctttgatttattttttttctgggcggccgctgcgacccgggactgacttcgggatgggaagtggagcccccggagctgctaccgtggcggcggcgctgtgaggagcagccagggggaggcagctgcggctcgccggtgagtatccgggaagcgccaccatggggctccgtaagaagagcaccaagaacccccccgttctcagccaggaattcatcctgcagaatcatgcggacatcgtctcctgcgtggggatgttcttcctgctggggcttgtgttcgagggaacagcagaagcatccatcgtgtttctcactcttcagcacagtgttgctgcccctgcagcagaggaacaagccacgggctcaaagtccctctattattatggtgtcaaagatttggccacggttttcttctacatgctggtggcaatcattattcatgccacaattcaggaatatgtgttggataaaattaacaagagaatgcagttcaccaaagcgaaacaaaacaagtttaacgagtctggtcagtttagtgtgttctactttttttcttgtatttggggcacattcattttaatctctgaaaactgcctgtcagacccaactcttatatggaaggctcgtccccatagcatgatgacatttcaaatgaagtttttctacatatcccagttggcttactggtttcatgcttttcctgaactctacttccagaaaaccaaaaaacaagacatccctcgtcaacttgtctacattggtcttcacctcttccacattactggagcttatctcttgtacttgaatcatttgggacttcttcttttggtactgcattattttgttgaattactttcccacatgtgcggcctgttttactttagtgatgagaagtaccagaaaggcatatctctgtgggccattgtgtttatcttgggtagacttgtgactttaattgtttccgtactcactgttgggtttcacctggctggatcgcagaatcggaatcctgatgcccttactggaaatgtaaatgtgttggcagctaaaattgctgttctgtcgtccagttgcacgatccaagcctacgtaacatggaacttaattactctctggcttcagaggtgggtagaagattctaatattcaggcctcatgtatgaaaaagaaacggtcgagatcttctaaaaaaagaacagaaaacggagtgggagtggaaacttcaaatagagtagactgtccgccaaagaggaaagagaaatcttcataatctttgcaagcgcattgattaatgtctgcaaaggaatctgctctttgaggtttctttctgcactagagatttttctgtttttgaaaatagttcgtgctcttcggtttttgttattgaactgtttcatgtattttttaaagacatttgaggggaggaggattattatgaatgggaaaaaaagattttggttgagactaaattactcatcgtcaaaataatgtcaaaatagttttggggatcaccactatattttgttttgatttttaacctttcaacattttcctaatgatttgcagagataactgcacaattttgcatatcaatgatactggttcttactcccaccagtgtttcataatactaacaagatggtctctcctagcaagattatgtgtttaatgcttgctttggggtaaaataaaagtacgaaaaaggtggaagtcaaatcagtattctgtaattgttagaatttattttttaagaacttacaactcagaaaagattgctagactcaccaaaataataaatgttctttattttacaggtagtgattattagtgcttcatccccatttaaaaaaacacagtactaatgggtaacacatatggaggtttgctgccatatatattgtatcaaaatatcattaattaatataaaaatattaaaatcattcctgtccattccacttgtaaatgggaattcatgaaattaaatattactttaaaaaggaaaaaaaaaaaaaaaaaaaagaaaaaaaaaaaaaaaaaaaaaaaaacaaaaaaaaaaaaaaaa

SEQ ID NO: 26748 - DNA, 4905 bp, Homo Sapiens
ataatctggagagacagaggagttgagagtgcccctttaaactgcaggactgcaattgatctctgtatgttttctggttttcgtccctttgaaaggggaatgagagccaggatcattggctgtactgtggagctgtcacatctccatactgaaaaggtacactgcaagtgaatttaaaccgtttttggctttctattgcatattgccaagagctttgagactgatgaaccaagtaaatgctctatttagggctaagtgagatacagattcctccaatctgatagcgtttcagcctccggagtgaggaagcagcagaaacagaagcagcagaagcaacagcagtagcagcggcagcagcaacagcagcagcccctactgaagtccaatagaggagacttgatctctagttcattctggaactccgcctgggattgtgcactgtccagggtcctgaaacatgaaccaaactgccagcgtgtcccatcacatcaagtgtcaaccctcaaaaacaatcaaggaactgggaagtaacagccctccacagagaaactggaagggaattgctattgctctgctggtgattttagttgtatgctcactcatcactatgtcagtcatcctcttaaccccagatgaactcacaaattcgtcagaaaccagattgtctttggaagacctctttaggaaagactttgtgcttcacgatccagaggctcggtggatcaatgatacagatgtggtgtataaaagcgagaatggacatgtcattaaactgaatatagaaacaaatgctaccacattattattggaaaacacaacttttgtaaccttcaaagcatcaagacattcagtttcaccagatttaaaatatgtccttctggcatatgatgtcaaacagatttttcattattcatatactgcttcatatgtgatttacaacatacacactagggaagtttgggagttaaatcctccagaagtagaggactccgtcttgcagtacgcggcctggggtgtccaagggcagcagctgatttatatttttgaaaataatatctactatcaacctgatataaagagcagttcattgcgactgacatcttctggaaaagaagaaataatttttaatgggattgctgactggttatatgaagaggaactcctgcattctcacatcgcccactggtggtcaccagatggagaaagacttgccttcctgatgataaatgactctttggtacccaccatggttatccctcggtttactggagcgttgtatcccaaaggaaagcagtatccgtatcctaaggcaggtcaaatgaacccaacaataaaattatatgttgtaaacctgtatggaccaactcacactttggagctcatgccacctgacagctttaaatcaagagaatactatatcactatggttaaatgggtaagcaataccaagactgtggtaagatggttaaaccgagctcagaacatctccatcctcacagtctgtgagaccactacaggtgcttgtagtaaaaaatatgagatgacatcagatacgtggctctctcagcagaatgaggagcccgtgttttctagagacggcagcaaattctttatgacagtgcctgttaagcaagggggacgtggagaatttcaccacatagctatgttcctcatccagagtaaaagtgagcaaattaccgtgcggcatctgacatcaggaaactgggaagtgataaagatcttggcatacgatgaaactactcaaaaaatttactttctgagcactgaatcttctcccagaggaaggcagctgtacagtgcttctactgaaggattattgaatcgccaatgcatttcatgtaatttcatgaaagaacaatgtacatattttgatgccagttttagtcccatgaatcaacatttcttattattctgtgaaggtccaagggtcccagtggtcagcctacatagtacggacaacccagcaaaatattttatattggaaagcaattctatgctgaaggaagctatcctgaagaagaagataggaaagccagaaattaaaatccttcatattgacgactatgaacttcctttacagttgtcccttcccaaagattttatggaccgaaaccagtatgctcttctgttaataatggatgaagaaccaggaggccagctggttacagataagttccatattgactgggattccgtactcattgacatggataatgtcattgtagcaagatttgatggcagaggaagtggattccagggtctgaaaattttgcaggagattcatcgaagattaggttcagtagaagtaaaggaccaaataacagctgtgaaatttttgctgaaactgccttacattgactccaaaagattaagcatttttggaaagggttatggtggctatattgcatcaatgatcttaaaatcagatgaaaagctttttaaatgtggatccgtggttgcacctatcacagacttgaaattgtatgcctcagctttctctgaaagataccttgggatgccatctaaggaagaaagcacttaccaggcagccagtgtgctacataatgttcatggcttgaaagaagaaaatatattaataattcatggaactgctgacacaaaagttcatttccaacactcagcagaattaatcaagcacctaataaaagctggagtgaattatactatgcaggtctacccagatgaaggtcataacgtatctgagaagagcaagtatcatctctacagcacaatcctcaaattcttcagtgattgtttgaaggaagaaatatctgtgctaccacaggaaccagaagaagatgaataatggaccgtatttatacagaactgaagggaatattgaggctcaatgaaacctgacaaagagactgtaatattgtagttgctccagaatgtcaagggcagcttacggagatgtcactggagcagcacgctcagagacagtgaactagcatttgaatacacaagtccaagtctactgtgttgctaggggtgcagaacccgtttctttgtatgagagaggtcaaagggttggtttcctgggagaaattagttttgcattaaagtaggagtagtgcatgttttcttctgttatccccctgtttgttctgtaactagttgctctcattttaatttcactggccaccatcatctttgcatataatgcacaatctatcatctgtcctacagtccctgatctttcatggctgagctgcaatctaacactttactgtacctttataataagtgcaattctttcattgtctattattatgcttaagaaaatattcagttaataaaaaacagagtattttatgtaatttctgtttttaaaaagacattattaaatgggtcaaaggacatatagaaatgtggatttcagcaccttccaaagttcagccagttatcagtagatacaatatctttaaatgaacacacgagtgtatgtctcacaatatatatacacaagtgtgcatatacagttaatgaaactatctttaaatgttattcatgctataaagagtaaacgtttgatgaattagaagagatgctcttttccaagctataatggatgctttgtttaatgagccaaatatgatgaaacattttttccaattcaaattctagctattgctttcctataaatgtttgggttgtgtttggtattgtttttagtggttaatagttttccagttgcatttaattttttgaatatgataccttgtcacatgtaaattagatacttaaatattaaattatagtttctgataaagaaattttgttaacaatgcaatgccactgagtgctattttgctcttttggtggagaaggcttttttcaaaactcttggtccttttacttctttctctcagtgcagaatcaattctcattttcatcgtaaaagcaaatagctggattatttcatttgccagtttctatttagtattccatgcctgcccaattcatctgttactgtttaatttcaattcttctggtgagaattagaaatgaaatattttttattcattggccaaaaagttcacagacagcagtgtttgctatttactttgaattgaaggcacaaaatgcatcaattcctgtgctgtgttgacttgcagtagtaagtaactgagagcataaaataaacctgactgtatgaagtcaatttaagtgatgagaacatttaactttggtgactaaagtcagaatatcttctcacttcacttaagggatcttccagaagatatctaaaagtctgtaataagcttagaagttcagataaatctaggcaggatactgcatttttgtggttttaaaaaagtccttaggacagactgaattatcataacttatggcatcaggaggaaactttaaaatatcaaggaatcactcagtcaccctcctgttttgttgaaggatcaaccccaaattctgggtatttgagtacatgtgaatcatggatttggtattcaactttttccctggatgctttggaatcgtgtcttccatgctccactgggttcaatttaaaataggagaggctttctcttctgaaagatccattttaggtctttttcaagaatagtgaacacattttttaacaaaataagttgtaattttaaaaggaaagttttgcctattttattaagatggaaatttctttttaggctaatttgaaatccaactgaagctttttaaccaatattttaaatttgaaccactagagtcttttatgatgcaaatgattatgttgtctgaaaggtgtggttttattgaatgtctatttgagtatcatttaaaaagtatttgccttttactgtcaaaaaaaaaaaaaaaaaaaaaaaaagaaaaaaaaaaaaaaaa

SEQ ID NO: 26749 - DNA, 2036 bp, Homo Sapiens
agtgctcatgctcgctgcaggggtcggaggtcagggcgagcgtctcgcaggccgtaggaggaagatggcggtggagtcgcgcgttacccaggaggaaattaagaaggagccagagaaaccgatcgaccgcgagaagacatgcccactgttgctacgggtcttcaccaccaataacggccgccaccaccgaatggacgagttctcccggggaaatgtaccgtccagcgagttgcagatctacacttggatggatgcaactttgaaagaactgacaagcttagtaaaagaagtctacccagaagctagaaagaagggcactcacttcaattttgcaatcgtttttacagatgttaaaagacctggctatcgagttaaggaaattggcagcaccatgtctggcagaaaggggactgatgattccatgaccctgcagtcgcagaagttccagataggagattacttggacatagcaattacccctccaaatcgggcaccacctacttcagggcgcatgagaccatattaaattctatttactatttgttgaatttatttttccgtcagttatgtaaaataaacatactcttcttcctcccctgattattgccattaagcctttaaattctaaacaaattataatgcatcatctatttaggagttagatttggatgtgctattgtatgattacgaatagtctgtatgtttcaagcccttctgtaaaatatgaagaaaagtgctcttagcattctgtgtaaaactgtactgttaaatatatgtgtgtaatcagcctgagtgtgaaagttaatggaggcctgggaacagggtttatactaagtagtggaggagcgtatggttaagcccaaaggggcagaacaagaaagccacgggattgtatgaaatcaaacatgagtttgtggtgtagactgctgtatgcagttggaaaggacacgtgagagtgagctcaagtggcagcagaggcagtttggaataagctgcggcaagttgaagaagctgtgttggacgagattgccccgccttgatcagggtaccatgacataaaaggttaaagaacaggcaacacaatgagcacttaagtttttaacatgtggggaatagggcattttaaaggctggaaccagttcagaggaaacaagggtttgggtagaggtagaaaggtttaattaaccctggagatctgcaaatggagggaggggtgaaggaggaatcttaagacggagggagaagagccaaggacaaggtcaggttgaatgagtaggaggtgttcacacatcctcttgtgtgctaggtagtggcgtgcatctgatctgagaggcagtaaagcagtgatgaagacagtgcagcagaacattgaagtcctgattgcagcagtgactctgcaaccttggataaattatttcaatctttattttgtaaaacggagataacggcctataggattgttaagactgaatattttaaaagagcttagaatggtgcctgacaaatgagaaacaataaatactgattattggccataaagtggtattaaaactggatctcttttcttccatggcactactctcattttgaagtttatgaacggtacgacagtgtattgtaaattccctttagtttgttacagtagccaattgaaaatgtatatcccaaaatttaaaaaaaaaaagtactagcagcaataaaattgcactagttttatctggtacatacaaaaacagccatttaaaatctgatgattctgtggaattggtgtccctgttagcaatggcagagaccagcctggagcctagatctggtgcttcttctgtgctgtggtttaccccaaacctttaggttgtttattcattcagattagatagactggagccataaagttaatttgcacctagctttttggagaatagccatgattaactgctattcgtggtgggggtgggggggaaccctatgatttactatgcagatgaagagggtaggaactaaataaaggactttgtaagccaaaaaaaaaaaaaaaa

SEQ ID NO: 26750 - DNA, 2347 bp, Homo Sapiens
aggaggggaagtgagtggttagacctcagctcatctgagggctaaaggttctttgtgacacatcacacagaattggagtgctgtccttctggagagtggtggagaaccaagatacagttcagaaccaaaggaatagagaagggctttgatttctttttggctttagattggggatttgggaggcttagcaggaaagatgtccactgaaaatgtggaagggaagcccagtaaccttggggagagaggaagagcccggagctccactttcctcagggttgtccagccaatgtttaaccacagtattttcacttctgcagtctctcctgctgcagaacgcatccgattcatcttgggagaggaggatgacagcccagctccccctcagctcttcacggaactggatgagctgctggccgtggatgggcaggagatggagtggaaggaaacagccaggtggatcaagtttgaagaaaaagtggaacagggtggggaaagatggagcaagccccatgtggccacattgtcccttcatagtttatttgagctgaggacatgtatggagaaaggatccatcatgcttgatcgggaggcttcttctctcccacagttggtggagatgattgttgaccatcagattgagacaggcctattgaaacctgaacttaaggataaggtgacctatactttgctccggaagcaccggcatcaaaccaagaaatccaaccttcggtccctggctgacattgggaagacagtctccagtgcaagtaggatgtttaccaaccctgataatggtagcccagccatgacccataggaatctgacttcctccagtctgaatgacatttctgataaaccggagaaggaccagctgaagaataagttcatgaaaaaattgccacgtgatgcagaagcttccaacgtgcttgttggggaggttgactttttggatactcctttcattgcctttgttaggctacagcaggctgtcatgctgggtgccctgactgaagttcctgtgcccacaaggttcttgttcattctcttaggtcctaaggggaaagccaagtcctaccacgagattggcagagccattgccaccctgatgtctgatgaggtgttccatgacattgcttataaagcaaaagacaggcacgacctgattgctggtattgatgagttcctagatgaagtcatcgtccttccacctggggaatgggatccagcaattaggatagagcctcctaagagtcttccatcctctgacaaaagaaagaatatgtactcaggtggagagaatgttcagatgaatggggatacgccccatgatggaggtcacggaggaggaggacatggggattgtgaagaattgcagcgaactggacggttctgtggtggactaattaaagacataaagaggaaagcgccattttttgccagtgatttttatgatgctttaaatattcaagctctttcggcaattctcttcatttatctggcaactgtaactaatgctatcacttttggaggactgcttggggatgccactgacaacatgcagggcgtgttggagagtttcctgggcactgctgtctctggagccatcttttgcctttttgctggtcaaccactcactattctgagcagcaccggacctgtcctagtttttgagaggcttctatttaatttcagcaaggacaataattttgactatttggagtttcgcctttggattggcctgtggtccgccttcctatgtctcattttggtagccactgatgccagcttcttggttcaatacttcacacgtttcacggaggagggcttttcctctctgattagcttcatctttatctatgatgctttcaagaagatgatcaagcttgcagattactaccccatcaactccaacttcaaagtgggctacaacactctcttttcctgtacctgtgtgccacctgacccaggtgagggcattacgctttgtgtttatgctcgctttgtatttggaggaaggtgtaggctccatgcttgcaaattttcaacatgctgtcatggtcctcaggaattagtcttgtttttttctctgaaaaactctgctactgaatttgatgtctcattgcctgaggtattttagctgtatgattcaaccaggaaggagaccaggagctctggaatgtgaacataaccaactcaatattttgaaattaactcaaactgtgggatttgcaaggaattcatgtgtacattattcttgattttataagtggggaaacctggatacatgtattaacagatataaatatgtgacaaacccaaaaaaaaaaaaaaaaaaaaaaaaaaaaaa

SEQ ID NO: 26751 - DNA, 2418 bp, Homo Sapiens
agtttcccccaggggcaggacctagacgcgcggcgcattcaggttctcctggaccgtagtggtagccgctggcccgagttagaggccagctgagaagtcttcgtgcttcagatttgtttacctacaaaatgcttcggtatccatatttttgtagaatgtataaagaatgcctttcatgttggctggaatctggcatacctaatttaggtgtctggccaaaaagaatacatactacagcagaaaaatatagagaatatgaagcccgggagcaaacagatcaaactcaagcccaggagttacacagatctcaagatagagattttgaaactatggctaaattacatattccagtaatggtggatgaagttgttcattgtttgtcaccacaaaaaggacagatttttctagatatgacatttggttcgggagggcacacaaaagccattctgcagaaggagtcagatattgttctctatgccttggacagagacccaacagcttatgcattagctgaacatctttcagagttgtatcctaaacaaatccgagctatgttgggccagttcagccaggcagaagccttattaatgaaagctggagtgcagccaggaacttttgatggagttcttatggatcttgggtgttcctccatgcaacttgatactcctgaaagaggtttttcccttcggaaagatggctctttggacatgagaatggatggtggcagatcaacaggcacttgcatctatcctaagaacatacggggaggagaagcatgccaagaaaatcgcttcagcaattgttcaggcacgcagcatctaccccatcaccagaacccagcagcttgccagcatcgttgcaggagcatttcctccctctgctatttatacacggaaagacttactacagcgatctacccatattgccaccaagactttccaggctcttcgcatatttgtgaacaatgagctcaatgaactctacacgggactgaagacagctcagaagtttctgagacctggtggtcgtcttgttgccctctccttccattcactagaggatcgcatcgtcaaaagatttttgcttggaataagcatgacagaaagatttaacctaagtgttagacaacaagtgatgaaaacatctcaattgggttcagatcacgaaaacacggaagaagtctctatgagaagagctcctttaatgtgggaattgatacacaagaaggtacttagtccacaagatcaggatgtacaagataaccccagagggcgctcagccaagcttagagcagctatcaaattataagttatcatcatcttattcttcaaatttttttctcacaatttctctaatctttactcatgttatgtccctgaatgtcttggtataggtttaagtgtgggacagtctgaaaattgatagcatttagcatttcttttttctcaaaaagaaactgtaggaaatacatgacagagaaagttacactcagggagcagcagcacctccagactggaaaaatgtgttaatctttgcatcatattggactcttgaaggcaatccttcctctggccaggaaattttttaaaaaataatactgtgttgtgtttatctaaatacgtaaactcaagctaccaaagagaaagatgttgtaatcatatctgcatgtcctaaattttgaatttagatattccaatttgcatcagtctttctgtggctcaaataatgatgattatggaatgaattttaatgtccctacttgtgaataattagctttctcaaatgtaggctttttacaaattttaaattttaaaatattagtttaaatgtgtgttatactgataaaatttcatctttcaaattatagtctattattttaaagggatttttcagtatgatatgggccattttgttcatctatcgcaaagtaaaaatgtaaaatccttacagagaattgtttcacaaaacttatatttcatgtcaattgtatttattttaataatagctcacaatgcctttagtaagtaataaagtctcttattagaatcttgtattttttaattgagctaatcaaaataattcagccaagtctatttgaaatagaaaactgtctatttaatatagtaaaatcaatgctcccttaatgttgttacaaagatatggtaactgtaatatgggtaaaagtttattcaagaaaagagtacttggtagaagattctttaacaaattgaggagattgattcataattcacatgtcaattttttatagtaatatgtacttctaatttattatttatacttaaattgtgacctgaaagatgagttggagataattagtcaaagggcacatggagtatggaagggggcatgttgattaaccatacatagaaaaaaaaaaaaaaaaaaaaaaaaaaaaaa

SEQ ID NO: 26752 - DNA, 2347 bp, Homo Sapiens
ggaaatggaagccaaaaaacgagccctggaagaagaaaaacgacgccgggaaatcctggaaaaacgattacaggaagaaactagccagaggcagaagttaatagaaaaggaagtaaaaataagggagagacaaagggcacaggctcgtcctttgacacgctacctgcctgtccggaaggaagactttgatttgcggagccatgtagagactgctggccacaatattgacacctgttaccatgtatcaatcacagagaagacctgccgaggattcctcatcaaaatgggtgggaaaattaaaacgtggaaaaaacgttggtttgtttttgatcggaacaagcgaacattctcttattatgcagacaagcatgaaactaaattgaaaggagtaatatactttcaagccattgaagaagtctattatgatcacctcaagaatgctaataagagtcctaatccgttactcacctttagcgtcaagactcatgacagaatctattatatggtagccccatcgccagaagccatgcggatctggatggatgttatagttacgggggcagaaggttacactcacttcttgttgtagtgaactgaggcaacagtccacttcagggcagacggcaataatctcttacaagaatgaagccatattcaaccccagatgagaaaacccaacagatccatcccttgagctgtaaacactcagaactcctttcatatcaagacaagctatttgtaaaaaataaagaaggggttttaatacaaaccttcataataaatagcaaaataattgaagcttccatgagaaagaaaacactattttgataaattggatcacttataggaacatttctaataaactgtttttaatcagttgtcggatttggtgaaataaactaaacaggttacagaatatctgtatgtacttggaaatacagaataactttatcacccaaatcactggcattgacattattggtaatcaactggctttttttaaaaaaggtagcattttgttgacagttattttgtaaacataagcaaataagggcttggagggaaatacattttaggaggagttttgccttaattttttaagtactgcaccaaaaccaaagagctgacctgacttctgtggaacagtagtaactgcaagtgatgaactgcatttcgtattgttctgtatatttcaaaatggtattttgatgccatcaaatgcccaggaaattgactttgcagtgtcaccactggtgtaagctactatatatgtatatatatatgtagtaaaccactttttgtaaaagaagaaagagcaaaaagctgtgtgttttagaaaaaaaagccaggttacgcaacaggcattctgtcatgttgaacaattttaaataaagagaatatctggtgttaggagcttgttttgctgaagatttctccattcctggtgctgagaataaaggcaaccagtagccaatgtcctttagattgtctgatttctttttgttgtggagcacacctgctaactgctccctcaacataactatgaaatcatagctctgttttcaccaaagaacagaccaattaacatacttatttgcagaagtggtgtagttctacaaaacggcaaatgaagttcaacttaatattctctataatgtattattttattttattttttacaattagccttttttttagttaatttttgtcaaatgaaacgacttcaggcaagtctcttttataatggtttttcaagtgccatttattctagtttatcatgttttgcatgtttgaaagtatgaatgtgctctttcctaaaacatggcaaatgaatagatgtagagaataacaatattacttacaagatgaaatgattagattagaagtgtccctttattaaactttgtcagcctgactgggtacaattcttttgttaatttgcagtgtggtttgtatacacgtatacgtgttatcaataataagattttgcaactggatgacacaagattttacttgaacagtgaaggacaaaaatcatgattgtggaagatatttttaaaatctgattttgcagcgatcacttttaaaccctgtagtgatgtaagactaaaatataattgctaagattttgttggttaatgtaaagatatgacttttctgcactgtactctcttcataggattgtaaaggtgttctaatccaattgcatgatgtagtaagcctcttaaatatgtgtgttaaatatattgagtttggattaaaatgttgacatgatttcacatttgaaaataaactcatctcttattttgaagttaacaaaaaaaaaaaaaaaaaaaaaaaaaaaaaa

SEQ ID NO: 26753 - DNA, 1625 bp, Homo Sapiens
gtcccgcccctgcccctgagtgacagaaccgtggacagcaacatttcccacaggacacgaagtttgtcggcccttgccttggcagagctgagtaagaaaaatcaccaagaatattatttttggtatttggaattgaatttgccaggaatgcaagcactgctacctaactaaagaccttggctttggaaacatcttaccccttggcagctctccagagtttagacttggcagcatcaaagacacaacgcaagcaatatgaaacagaaaaacaagttggttggatagctgtcctccatgcagtcattcatgatccaggctgtcatcatcttcatcactcatgttcagagttaccctagaggtcatctccatttcatccagataaatgagtatgcaaggaacgtttttataggcattttggagatcaaagatgggtagaaaagatgctgctactataaaacttcctgttgatcagtacagaaaacaaattggtaaacaggattataaaaaaactaaacctattttacgagcaaccaaattaaaagcagaagcaaagaaaacagcaataggcataaaggaagttggccttgtacttgcagctatattggcactactactggctttctatgctttcttttatctcagactcaccacggatgttgaccctgatctggaccaagatgaagattagctaagcaacaatcaatgcatgaaagagaaataactttacgaaagcaccttttgggaccaaaactttcaatactgaaactgtaacatctttaattctttctgctaatattttcagtttgcagacatatgatttttgatagttgcataggatgtcaggaaaagaaccttacctagcaatgcagtatagtatgtgctactggatacttttatatatctttctgctttgacagccaccctatacatggtacatttagatgaaatgggaaccagatcctaaatttttcaaatgtcattgccaatttatgtgtataattccatcacttcctgatgagtaagtctatttttgttctatatacatcataagttagtatatattcttatttacagaaacatgctcaaatcacattcagaaagaacaaaaagtcatgggaaattttttattttacaacaaagccctgctttctttctggacgtattttacatcattagagagactatctgcacatacatctaccataatctttttccttctttgccaactgttcagtgcacatgtgctgcatcagaaatggcacctggatgacagaagctcaaagagtcacatatgtctctaaaatagagttcttttcctcttgggctgtctgaactggtgtaaatagaagctcagttgatcttggttttaattaacttattactctattaatataaccttggaattctattctaattatgttgttctggctgcttgtagtatcagttcgcccctcttgttagggagatatgtaacaatctgtcatttaattgagcagtctttttcacataacagtaatagcaaaaatcctacctactcagaatcatcttcttaggttgtctcctaaatctgaacaatacagttgttttataaaatcaaaaaaaaaaaaaaaaaaaaaaaaaaaaaa

SEQ ID NO: 26754 - DNA, 1625 bp, Homo Sapiens; identical to SEQ ID NO: 26753

SEQ ID NO: 26755 - DNA, 1028 bp, Homo Sapiens
agtcttcctgtgctccagaattagtgatttgctttggtgcttaatttgaagtgggagtaagcttccttaaaccacttcctaaagcagctacatgaaacagcttcactagactacctcaatatgaggaatgttttgatcctggacatatggtgtcttcctacctccatactttatagattcctaaacccatctatataatacaagcatgtgccatacgatcatttagtttcttattacctccctatgccaggaaagaaatagttgcaatttattgtagtcatcatgaaatcttcccttgcacataaatttaaaatgtacctgctgcacattttaatatgtcttaattgcttttaaacttggctgtattgtgtacaactattataccatcttttataaacacagttttttaagaaatttctttttgtaagttacaacattccactggatccttatattgcctgtagtggaagagggtcttgtgtgtctgccccttctagttttcactcatgcagaagcaacataaccttctgatttgcacaataaattacatatatttagcaggatttttatttgccgtgatatataggataatttagtctttggcatgtggcattatatttattttggtttttttttttaaacaggttatcaacgaaacttctcagcatcacgatgaccttgaataaaaattgcacacactcagtgcagcaatatattaccagcaagaataaaaaagaaatccatatcttaaagaaacagctttcaagtgcctttctgcagtttttcaggagcgcaagatagatttggaataggaataagctctagttcttaacaaccgacactcctacaagatttagaaaaaagtttacaacataatctagtttacagaaaaatcttgtgctagaatactttttaaaaggtattttgaataccattaaaactgcttttttttttccagcaagtatccaaccaacttgtttctgcttcaataaatctttaaaaaaaaaaaaaaaaaaaaaaaaaaaaaa

SEQ ID NO: 26756 - DNA, 2353 bp, Homo Sapiens
gagatttggacgctccggcctgggaggtgcgtcagatccgagctcgccatccagtttcctctccactagtccccccagttggagatctgggaccaacaaggcaccatggcgcagaagggccaactcagtgacgatgagaagttcctctttgtggacaaaaacttcatcaacagcccagtggcccaggctgactgggccgccaagagactcgtctgggtcccctcggagaagcagggcttcgaggcagccagcattaaggaggagaagggggatgaggtggttgtggagctggtggagaatggcaagaaggtcacggttgggaaagatgacatccagaagatgaacccacccaagttctccaaggtggaggacatggcggagctgacgtgcctcaacgaagcctccgtgctacacaacctgagggagcggtacttctcaggactaatatatacgtactctggcctcttctgcgtggtggtcaacccctataaacacctgcccatctactcggagaagatcgttgacatgtacaagggcaagaagaggcacgagatgccgcctcacatctacgccatcgcagacacggcctaccggagcatgcttcaagatcgggaggaccagtccattctatgcacaggcgagtctggagcctggaaaaccgaaaacaccaagaaggtcattcagtacctggccgtggtggcctcctcccacaagggcaagaaagacacaagtatcacggtgagtggcagttcccaatcagaggccatgatttagccaaccggtctccagcttgcagcccaaccgagatacaaacagaacatcattgcaagaactcaggccccatctgactacccctcccctgaagactcaaagagggaccgtctttttggcgggcaggcctgttgagtgtgggtgatttcttggctcagctagaagcatccctccagaagggggcccgttttgtgaaatgagaataagccctttccttccatagcgagatcttcctccacgtcggggcttctcagtggtggcactgatgtcattttggaccagataactcttccttggaggggcttccctgtggctcgtagaatgtttcacaacatccctggcctcgacccgccagatgccgacagcccccttccctccagttgtgacaaccaaaaatatctctagacattgtcagatgttccctggggtgggacagttgcccttgattgagaagcactcctttcatgaatctctgtaacgtcccaggggttaaggtaccttttgggttcccggattcctccacgtgtccccctgtccctgggatggagatgctggtatcactcagcccgtgggcttcagtgcaatgccattcagtaactgtggattgagcacctactgtatgccaggaaccacttggggtggggacctggggataagtctgagagatgctgttattctcttctctgagcttccagacctgtggaagagcatgtagttgtcaaagaatccctcaaataaacagatgatgacacggtatgactaagagcttgggaggaaaagaagagcaggtttctagagtcatcacctctagggcccatccttctcttcctcctcgtgtgtcagccctgccccatctatcccacaggagggggcacgtggtagggccgctaggactggccggtgcctccgtctgcaggtttgtgggtgggaagatggtaggatggagatctgaccacggcatggggtgtctccagtgttcgccattccagatgtcactttgcgtcctcagaggggactctggggcagccaccatggccggcttgtctggaggcccttggagatctaggatgggcgctggtcatggctttggagaactttccttctccaaacaaatgcaggaaactcaagattcagcatcctagaattgtctctggcaagttggtttccagccatagtgagtgggaacaatggccccagaggctgtgtggcagtttaaacacagtttccactgccttccctttccctaaagagtaaacacaggagataatactttctaacaactcatcgttatcaagggcctactatgtgctgcttgttttggctgcatgcgtaaacacatctcagacattgtctcactggatactgttttaaggagcctaatgtggccccagtaattatgaaaacctttgaaatgtctggatctctaagaaattagaaaaaggagggaatggctgagcatgggggctcatgcctgtaatctgtgttttgggaggccaaggtgggaggatggtctgagcccaggagttcaggaccagcctgggtgacatagtgagaccctgtctgtaccaaaaaaaaaaaaaaa

SEQ ID NO: 26757 - DNA, 1875 bp, Homo Sapiens
gtggttggaaaccgcgcctccgcggaggtagccgttccctgacctagccatggcacagaacactgaaaaccacgaccctgtcggatccatcttaatccagatccatgaagacctttatcagttaaaggagaaattaacaaaattctcacctgaggaaaaaggagagactctagacattcagagtcttgaaacagcaatcaaagggactgaagtggggttaagaggattttaagtatgatagaacgagggctgattccaccaacagcaaggattacctttcagaatccacccattacacccagagcagctcctctgcatagttttgatgaagcacgtaagattccaactgtagccactttcactatacctcgggaaccacctccatctccagcagaagtgaagttctttcccaagaaacaaagatcaaaggggaaaagcagaaggtcaagaggacatcatgataggaaggccatgaaagtcaaaacacctttgagagccctgaaatcactgtgggattatgactttttaatttatgatggtgtcatagacaatacagccccagacttcttagcattcaaggaacattttagcttagcttggggaggtattttttctctcttggaacacgtcgagaagtttctcaggaactatgctataccagaagtcaaaataaaagggaataatttggtggccctccttccagagtttgagctgacgaataaacttaccagatatgaccttctctcagtgttagaggacccagctcatgtccaaatgctgataaatcttccagggcaaaggtacaagggccaagatggaaattcggaggccgccatgaagatccaagccacatggaaatgctacaaagcaagaaaattcttcctcttttatcgccagcagaagtgggcatcaggtgtgattgccattgcttggctgttatattgccataagactcgactaaagaagatactaaaggaatcacgtcagagacacctggagaattttcgcattcgagccaagcatctggcagccaactggaatcgcatcaggacctccaggaggactattatccatatcccatcattaggtataacacttttgcctgcaaatctatcagcaacctctattacccaccacattatggctccttgattgagttcaaggaaggccccttgttttattcaaattggtctcggcaggaaaatgttctcgacatgatgagagtaataacacaggaccctcgcttggaacggcgtttaatttggggattaagcaaataaagtcattatgtgggggctgctattcagtggagaggtgatttgctgtaattcgctttcatctgtatgaaatgaactaaaaagttgtatttttccccgaaataacagataatgttttcgatcttctttaatgatagaagaactcaggcttgtatgtgttgttgctgttacgccaataagccaggatattgcttgtacactgtttttaatcaaatgtgcagtcaaaatgataagctacattctctgaaattatttagttctaattacgagcagatgggatgctttatttgcacctagggcgcctgagcaaaaggaaatgctgtgtgaacaagaataattaagaagttgaatagtgttttttgcacttaaataatctgcagtttcatgttaattagcactaatgtaattatttaattacatttatgaattggggaacttaaaagctgttgtctgaaacacactggtaaaaaaggtatgccaaaatgacattgggaatttcagaaatttgcattggagtttcttttaagacatgagctactgtcaccaaaaaaaaaaaaaaaaaaaaaaaaaaaaaaaaaaaaagaaaaaaaaaaaaaaa

SEQ ID NO: 26758 - DNA, 1874 bp, Homo Sapiens
ggggctgctggctgctgcgtttgcggcgggaggtggtggccgcggtcccacgagagggggtatttttcgtcagccaagatgggttccaaaaggagaaatttgagctgtagtgaaaggcatcagaaattagtagatgaaaactactgcaaaaaattacatgtccaagctctaaaaaacgtcaacagtcaaatcaggaatcaaatggtgcagaatgaaaatgataaccgtgttcagcgcaagcaatttctcagattattacaaaatgaacaatttgagttggatatggaagaggccattcaaaaggcagaagaaaacaagagattgaaagaactccagctcaaacaagaagaaaaactggctatggaattggcaaaactgaaacatgaaagtctaaaggacgaaaagatgaggcaacaagtaagagaaaacagcattgagcttagagaattggagaagaaattaaaagcagcttacatgaataaagaaagggcagctcagattgctgaaaaggatgccattaaatatgaacaaatgaaacgtgatgctgaaatagccaaaaccatgatggaagaacacaagagaataataaaggaagagaatgctgcagaagacaaacgaaacaaagcgaaagcacagtactatcttgacttagagaaacaacttgaagaacaagaaaaaaaaaagcaggaagcttatgagcagctgctaaaagagaaactcatgattgatgaaattgttaggaagatctatgaagaagatcagttggaaaaacaacaaaagttagaaaaaatgaatgcaatgcgaaggcatatagaagagtttcagaaagagcaggctctctggagaaaaaagaaacgtgaggagatggaagaagaaaacagaaaaatcatagagtttgctaacatgcagcagcaaagagaagaagatcggatggcaaaagttcaagaaaatgaggagaaaaggctacagcttcagaatgcgttgacacagaaattagaagaaatgctgcggcaacgtgaagatttggaacaagtgcgacaagaattataccaggaagaacaagctgaaatatataagagcaagctaaaagaagaagcagaaaagaaattgagaaagcaaaaagagatgaagcaagattttgaagaacaaatggccttgaaggaattagtgctacaggctgcaaaagaggaagaggagaactttagaaaaactatgctagctaaatttgctgaggatgatcgaatagaattaatgaatgctcagaaacaaagaatgaagcagctggaacacaggagggctgtggaaaaacttattgaagagcgtcgccaacaattccttgcagacaaacaacgtgaactagaagagtggcagttgcagcaaaggcggcaaggatttattaatgcaattattgaagaagaaaggctaaaacttcttaaagagcatgctacaaacttactaggctatctccctaaaggagtatttaaaaaagaggatgatattgatctgcttggtgaagagttcaggaaagtatatcaacaaaggagtgaaatttgtgaagagaaatgatatcatcaaaattgggtaaagcatagattttttgtatgttaccactagatgtcagcataacttttgttttacagttcagtggcattaggtatcaattgtctgtttggattttgtaaatcatcactgaatttcataacttgtaaacaattatcagatacaaattaattttaatcaagctgttatttttgtactgataatttcaaaatccgatttctacaacactacagagcactgtttgcatccccatcctcaagacagtatatttaccttgactaatacagaactctacctcaaaaaaaaaaaaaaaa

SEQ ID NO: 26759 - DNA, 2594 bp, Homo Sapiens
gggcagtggcgtccgcagctggggcttggcctgcgggcggccagcgaaggtggcgaaggctcccactggatccagagtttgccgtccaagcagcctcgtctcggcgcgcagtgtctgtgtccgtcctctaccggcgccttggctgagcggagtcgtgcggttggtgggggagccctgccctcctggttcggcctccccgcgcactagaacgatcatgaacttctgaagggacccagctttctttgtgtgctccaagtgatttgcacaaataataatatatatatttattgaaggagagaatcagagcaagtgataatcaagttactatgagtctgctaaactgtgaaaacagctgtggattcagccagtctgaaagtgactgctgtgtggccatggccagctcctgtagcgctgtaacaaaagatgatagtgtgggtggaactgccagcacggggaacctctccagctcatttatggaggagatccagggatatgatgtagagtttgacccacccctggaaagcaagtatgaatgccccatctgcttgatggcattacgagaagcagtgcaaacgccatgcggccataggttctgcaaagcctgcatcataaaatcaataagggatgcaggtcacaaatgtccagttgacaatgaaatactgctggaaaatcaactatttccagacaattttgcaaaacgtgagattctttctctgatggtgaaatgtccaaatgaaggttgtttgcacaagatggaactgagacatcttgaggatcatcaagcacattgtgagtttgctcttatggattgtccccaatgccagcgtcccttccaaaaattccatattaatattcacattctgaaggattgtccaaggagacaggtttcttgtgacaactgtgctgcatcaatggcatttgaagataaagagatccatgaccagaactgtcctttggcaaatgtcatctgtgaatactgcaatactatactcatcagagaacagatgcctaatcattatgatctagactgccctacagccccaattccatgcacattcagtacttttggttgccatgaaaagatgcagaggaatcacttggcacgccacctacaagagaacacccagtcacacatgagaatgttggcccaggctgttcatagtttgagcgttatacccgactctgggtatatctcagaggtccggaatttccaggaaactattcaccagttagagggtcgccttgtaagacaagaccatcaaatccgggagctgactgctaaaatggaaactcagagtatgtatgtaagtgagctcaaacgaaccattcgaacccttgaggacaaagttgctgaaatcgaagcacagcagtgcaatggaatttatatttggaagattggcaactttggaatgcatttgaaatgtcaagaagaggagaaacctgttgtgattcatagccctggattctacactggcaaacccgggtacaaactgtgcatgcgcttgcaccttcagttaccgactgctcagcgctgtgcaaactatatatccctttttgtccacacaatgcaaggagaatatgacagccacctcccttggcccttccagggtacaatacgccttacaattcttgatcagtctgaagcacctgtaaggcaaaaccacgaagagataatggatgccaaaccagagctgcttgctttccagcgacccacaatcccacggaacccaaaaggttttggctatgtaacttttatgcatctggaagccctaagacaaagaactttcattaaggatgacacattattagtgcgctgtgaggtctccacccgctttgacatgggtagccttcggagggagggttttcagccacgaagtactgatgcaggggtatagcttgccctcacttgctcaaaaacaactacctggagaaaacagtgcctttccttgccctgttctcaataacatgcaaacaaacaagccacgggaaatatgtaatatctactagtgagtgttgttagagaggtcacttactatttcttcctgttacaaatgatctgaggcagttttttcctgggaatccacacgttccatgctttttcagaaatgttaggcctgaagtgcctgtggcatgttgcagcagctattttgccagttagtatacctctttgttgtactttcttgggcttttgctctggtgtattttattgtcagaaagtccagactcaagagtactaaacttttaataataatggattttccttaaaacttcagtctttttgtagtattatatgtaatatattaaaagtgaaaatcactaccgccttgtgctagtgccctcgagaagagttattgctctagaaagttgagttctcatttttttaacctgttatagatttcagaggatttgaaccataatccttggaaaacttaagttctcattcaccccagtttttcctccaggttgttactaaggatattcagggatgagtttaaaccctaaatataaccttaattatttagtgtaaacatgtctgttgaataatacttgtttaagtgttaaaaaaaaaaaaaaaaagaaaaaaaaaaaaaaaa

SEQ ID NO: 26760 - DNA, 2463 bp, Homo Sapiens
acgtgcttaggagccatattgtcgctagtggccgctggggctgggaggggtgtgctagagaggcgcagcttctctgggcgtggtttttatcctgggggaaggatcggtggaatgtgaggggaggtggaggagatggcggcgacggcccgggaagatggcgccagcggtcaagagcgaggtcagcggggctgcgagcactatgacagaggatgtctcctaaaggcaccttgctgtgacaagctttatacttgccgcttgtgtcatgataacaatgaagatcatcaactagatcgctttaaagtgaaggaagtgcagtgcataaactgtgaaaaaattcaacatgcccaacagacttgtgaagaatgtagcacattgtttggagaatattattgcgatatatgccatttgtttgacaaagataagaagcagtatcactgtgaaaactgtggaatttgtaggattggtccaaaggaagattttttccattgtttgaaatgtaacttatgcctagctatgaatcttcaaggaagacacaagtgtattgaaaatgtgtcccgacagaattgtccaatatgtttggaggacattcacacatcccgtgttgttgctcatgtcttgccatgtggacatcttttacataggtaaagtaacatctttttctcaatgatgtttgaaaatagtggagacagtttttgttttactaaaataatcttatattttctttcagaacgtgttatgaagaaatgttgaaagagtgagtgtttgggattttaaaaataattgtaagatgtttgatttttttgtgtgtgtggtgtggggaggtggacaaacattgttacttatactatattgggcatggcaatatttatattgaaatgggtagggtagatgaatattgttaaaacaggacaaagtgtcttggatatagaactacacttttgccatatgtttctcttaaatcttgtctcctcccacaatttgaggtagttacctcttttttttctggccatatataccaggaagtgcagtttttgccagatgcagttatagtgttgtaaaaatgctgaaaaatattgccaaaaatttgttaggttgttatattggccaagtatagtaaactaaaagaaagtaggtgaagtgatcattaaagctaagactttattaatggaaaagatattaaaattagacgaaaataattgaaaagagaagactgtattttggtcctacatattgatgagcaaaaatgtgaagagctagagagagcattctttttttcaaatttttagaaaggaaataatatctgaataattttaaacaaatacagtctctttacatgagtgtattaagaaattaaggttgtttagataaggagtagcttaattagtttataaaaatatatgaagtgtattctacaaagaatatggactaattcctctccattttagagtactgaggaaaaagacttagttttaaataagtatacaggaattaatttaaaagttttatagtgtgaaagttcccaggttcctaagagattatcttgaaatggaggaaaatgcctgttttgaatggttcatgtggcagttagcttgcatcttcttgtatacctgaattaatatattcttgtttaatatttggaaaataacctttctatctctttcagaggctacagatgtccattatgtatgcactctgctttagatatgaccaggtattggagacagctggatgatgaagtagcacagactcctatgccatcagaatatcagaacatgactgtggatattctctgcaatgactgtaatggacgatccactgttcagtttcatatattaggcatgaaatgtaagatttgtgaatcctataatactgctcaagctggaggacgtagaatttcactggatcagcaatgacgagcctacacagtactggagaacttggcattttctgatatagaaaaaggctttccttggtatcgtgttatcatgtgtcgtcatctatgcattagagttgatgtgttttgtactagtgtcacagcataaaatcatattacaagtacgtaaggattcagggtctcttgatagacttatcatagctctatattgaatgaaagccactgtgcttgtgttttgattggaaattcctttagtgtcagttttttggaagccaatgatgtttgccactgatacattcatagaagtgtattatattttcatgaagctttgctttaagtgacactacgcgtgcagttcatttctagttcttgatagaactgcacttaattttcagtagtagtcttgactttttaagggctgtgttatattaagttctcccttactgttaaaacctaattaaatatgctttagaattttctaagacagtcctctggatcctctaaatgtgaattttgatgtaataactgctaataaaattatattgaaacagcgaaaaaaaaaaaaaaaa

SEQ ID NO: 26761 - DNA, 2128 bp, Homo Sapiens
gggctagcctctgggccggcgcctaggccggccaacgcggacgccgggttgcggtgattcccagcggcgagtcctcaaccactgaagaagaagcttgatgcttggctgtcagaagacatgaattacgcacggttcatcacggcagcgagcgcagccagaaacccttctcccatccggaccatgagtgagaaacgggctgacatattgagcagaggaccaaaatcgatgatctccttggctggtggcttaccaaatccaaacatgtttccttttaagactgccgtaatcactgtagaaaatggaaagaccatccaatttggagaagagatgatgaagagagcacttcagtattctccgagtgctggaattccagagcttttgtcctggctaaaacagttacaaataaaattgcataatcctcctaccatccattaccaacccagtcaaggacaaatggatctatgtgtcacatctggcagccaacaaggtctttgtaaggtgtttgaaatgatcattaatcctggagataatgtcctcctagatgaacctgcttattcaggaactcttcaaagtctgcacccactgggctgcaacattattaatgttgccagtgatgaaagtgggattgttccagattccctaagagacatactttccagatggaaaccagaagatgcaaagaatccccagaaaaacacccccaaatttctttatactgttccaaatggcaacaaccctactggaaactcattaaccagtgaacgcaaaaaggaaatctatgagcttgcaagaaaatatgatttcctcataatagaagatgatccttactattttctccagtttaacaagttcagggtaccaacatttctttccatggatgttgatggacgtgtcatcagagctgactctttttcaaaaatcatttcctctgggttgagaataggatttttaactggtccaaaacccttaatagagagagttattttacacatacaagtttcaacattgcaccccagcacttttaaccagctcatgatatcacagcttctacacgaatggggagaagaaggtttcatggctcatgtagacagggttattgatttctatagtaaccagaaggatgcaatactggcagctgcagacaagtggttaactggtttggcagaatggcatgttcctgctgctggaatgtttttatggattaaagttaaaggcattaatgatgtaaaagaactgattgaagaaaaggccgttaagatgggggtattaatgctccctggaaatgctttctacgtcgatagctcagctcctagcccttacttgagagcatccttctcttcagcttctccagaacagatggatgtggccttccaggtattagcacaacttataaaagaatctttatgaagaaattaaactaggttgggcatggtggctcacacctataatcccagcactttgggaggcagaggagggaggatcacttgaacccaggaattcaaggctgcagtaagctacgatcacaccactgcactctggcctgcatgcactctggcctgcatggcagaacaagaccctgtctctaaaaaaagagaaagaaatcaaactaatcatgctgctcatggatttttccaataaatttcttgttttggcaggaagaaatgaacactggtattagacttaaagattaaatttcctcaaacatgtcctatctgtagtagttcaactagacaccttttaaagtgcctctaaattcatcagatggccaaactgtatttataatccacttaggcattttgaaaaactttcaacctgtaaaaagttacttttatcttggatttattatgaagaactttgtagttgctttgtaatttcccataaattgtctttgaaactaacattttacactgaattattttgagattttaaagaagtaattaagtgcaaaatggtatataatgtgtactttttctacttttaggaaaatttaatgagagcttattgcaaaaattgttataatttggtcattataagtgacttttagtaaaagtaccataaaccttatgttatgccacagaaattcctttaaaataaaattcttaaactaaacataaaaaaaaaaaaaaaa

SEQ ID NO: 26762 - DNA, 2205 bp, Homo Sapiens
atactttgaaaataacagctcttttttgttccctcgtgtgtctcttcccaattgtatccctattgtattttctcatagtatgtttcagcagaaatcaaggtagacgaagtaacctcttgtcctgaattttcatagttgctcattcttaataatggcagcagaagcaacaatgagagcaactacctcctcagctcaaagaaaatgaacggcaccctggaccacccagaccaaccagatcttgatgctatcaagatgtttgtgggccaggttccaaggacctggtctgaaaaggacttgcgggaactcttcgaacagtatggtgctgtgtatgaaatcaacgtcctaagggataggagccaaaacccgcctcagagcaaagggtgctgttttgttacattttacacccgtaaagctgcattagaagctcagaatgctcttcacaacatgaaagtcctcccagggatgcatcaccctatacagatgaaacctgctgacagtgagaagaacaatgcagtggaagacaggaagctgtttattggtatgatttccaagaagtgcactgaaaatgacatccgagtcatgttctcttcgtttggacagattgaagaatgccggatattgcggggacctgatggcctgagccgaggttgtgcatttgtgacttttacaacaagagccatggcacagacggctatcaaggcaatgcaccaagcacagaccatggagggttgctcatcacccatggtggtaaaatttgctgatacacagaaggacaaagaacagaagagaatggcccagcagctccagcagcagatgcagcaaatcagcgcagcatctgtgtggggaaaccttgctggtctaaatactcttggaccccagtatttagcactccttcagcagactgcctcctctgggaacctcaacaccctgagcagcctccacccaatgggagggttgaatgcaatgcagttacagaatttggctgcactagctgctgcagctagtgcagctcagaacacaccaagtggtaccaatgctctcactacatccagcagtcccctcagcgtgctcactagttcagcagggtcctcacctagctctagcagcagtaattctgtcaaccccatagcctcacttggagccctgcagacattagctggagcaacggctggcctcaatgttggctctttggcaggaatggctgctttaaatggtggcctgggcagcagtggcctttccaatggcaccgggagcaccatggaggccctcactcaggcctactcgggtatccagcaatatgctgctgctgcgctccccactctgtacaaccagaatcttctgacacagcagagtattggtgctgctggaagccagaaggaaggtccagagggagccaacctgttcatctaccacctgccccaggagtttggtgatcaggacctgctgcagatgtttatgccctttgggaatgtcgtgtctgccaaggttttcatagacaagcagacaaacctgagcaagtgttttggttttgtaagttacgacaatcctgtttcggcccaagctgccatccagtccatgaacggctttcagattggcatgaagcggcttaaagtgcagctcaaacgttcgaagaatgacagcaagccctactgagcgtgctcccctctgagactggagtgagagggtcttctgattcctgccgtttgttcatcgttgtgcctaaagcatgtcgatgtggcgtcaagtacatcgtccaaatccctgtctcttcagcttctctgatgcttgaactctcacctttgaccttgtgttgacctttgatgctgatgtgtatttttattatgtttgtttctttcttcgtttttttttctttttttctttccttttttttccttttgtgctgccaaattggttttgctagaacgactgctgaaggggaaatatttaaacttgcatttgaatataaaaaaaatctatttttctagaacttcataagataaccacttgattttgtgattccaattctttgtaattgtcttcagagcagccctactagcacataccgcgtggtgtttgtatttctgtgaacacacagccagtccgtttctaggctttgtttctctgtgtgcttagttttaaagacaactttgaagtaaacaatgaaataaaagatgtcactaaaacctctgaaaaaaaaaaaaaaaa

SEQ ID NO: 26763 - DNA, 1883 bp, Homo Sapiens
gaggcgccccgcccctcggcggctccaggtgcggctgtgggacctcggaccgcggcggggccggggccagggccggggccggggccggggcgccatggccgagtcccagctgaactgcctggacgaggcgcacgtgaacgagaaggtgaccgaggcgcaggccgccttctactactgcgagcggcggcgggccgcgctggaggcgctgctgggcggcggcgagcaggcctaccgcgagcggctcaaggaggagcagctgcgggacttcctctccagcccggagcgccaggccctgcgggccgcctggagcccctacgaggacgccgtccccgccgccaacgcccggggcaagagcaaggccaaggccaaggcccccgcgccggcgccggctgagtccggcgagtccctggcctactggcccgaccgttccgacaccgaggtgcctcctctggacctgggctggacggacactggtttctaccgcggcgtgagccgggtcacgctcttcacccacccgcccaaggacgagaaggcgccgcacctcaagcaggtggtcaggcagatgatccaacaggcccagaaggtcattgctgtggtcatggacctcttcactgatggtgatatctttcaagacattgtggatgctgcctgtaagcgccgggtcccagtgtacatcatcctggacgaggcaggagtgaagtatttcctggagatgtgtcaggacctgcagctcactgacttccggattcggaacatccgtgtccgctctgtgacaggcgtcggcttctacatgcccatggggaggatcaaggggaccctgtcatcaaggttcctgatggtggacggtgacaaagtggccactggatcttacaggttcacctggagttcctcccatgtggacagaaacctcctcctgctcctgacaggacagaacgtagagccctttgacacggagttccgggagctgtacgccatctccgaggaggtggacttgtaccggcagctgagcctggcgggcagggttggcctccattactcctccactgtggctcgaaagcttatcaaccccaagtacgccttggtgtcaggctgccgccacccgcctggggagatgatgcgctgggctgcccggcaacagcgggaggcgggcggcaacccggaggggcaggaggagggcgccagcggtggcgagtcggcctggcgcctggagagcttcctgaaagacctggttacggtggagcaggtgctgccccccgtggagcccatccccttgggagagctgagccagaaggatggcaggatggtctctcacatgcacagagacctgaagcccaaatcccgagaggcacccagccgaaacggcatgggagaagcggcccggggggaggccgcccccgccaggcgcttcagcagcaggctcttcagtcgccgagccaagaggcctgcggcgcccaatggcatggccagctctgtctccaccgagacctctgaagtggagtttctgacggggaagaggcccaacgagaattccagtgctgacatctcaggtaaaacaagtcccagttctgccaagcctagcaactgtgtgatttcctgagctgcgggatggtggtgggcaggacgtgtggatgcctgcctgccctgccctgtgctgtggagagcgcaggtcgcacactgcaccagtttgcacatcagacgccaactggccttctgccctgcagcctccgtcctggcctcagggacgctggatcccaaatgagagggtccgaagcatctcagtcacacgcctccaccggactgtcggtggctgggcaggggtcagtgccacggcctccttgtttacatgaagtggaagcttgaaaaaaacaaaaaaaaaaaaaaaa

SEQ ID NO: 26764 - DNA, 2293 bp, Homo Sapiens
ggctgccccggagcctcgccctccgccacgatgagcaaatgagcgcgagcgagggcatgaaatttaaattccactcaggggagaaagtgctgtgcttcgagcctgaccccaccaaggcgcgagtgctgtacgatgccaagattgttgatgttattgttgggaaagacgaaaaaggcagaaagatcccagaatatctgatccattttaatggttggaacagaagctgggatagatgggcagcagaagatcatgtgcttcgtgataccgatgaaaatcgtagattacagcgtaaattggcaagaaaagctgtagctcgcctgaggagcacaggaagaaagaagaagcgctgcaggttgcctggtgtggactctgtcttaaaaggcctccccactgaagaaaaagatgaaaatgatgaaaactcattaagcagttcctctgactgtagtgaaaacaaggatgaagaaataagtgaagaaagtgatattgaagaaaagactgaagtgaaagaagaaccagagcttcaaacaagaagggaaatggaagaaagaacaataactatagaaatccctgaagttctgaagaagcagctggaggatgattgttactacattaacaggaggaaacggttagtgaaacttccatgccagaccaacatcataacgattttggaatcctatgtgaagcattttgctatcaatgcagccttttcagccaatgagaggcctcgtcaccatcacgttatgccacatgccaacatgaacgtgcattatatcccagcagaaaagaatgttgacctttgtaaggagatggtggatggattaagaataacctttgattacactctcccgttggttttactctatccatatgaacaagctcagtataaaaaggtgacttcgtctaaattttttcttccaattaaggaaagtgccacaagcactaacaggagccaggaggaactctctcccagtccgcctttgttgaatccatccacgccacagtccacagagagtcagccgaccaccggtgaaccagccacccccaaaaggcgcaaagctgagccagaagcattgcagtctctgaggcggtccacgcgccacagtgccaactgtgacaggctttctgagagcagcgcttcacctcagcccaagcgccggcagcaggacacatccgccagcatgcccaagctcttcctgcacctggaaaagaagacacctgtgcatagcagatcatcttcacctattcctctgactcctagcaaggaagggagtgctgtgtttgctggctttgaagggagaagaactaatgaaataaacgaggtcctctcctggaagcttgtgcctgacaattaccccccaggtgaccagccgcctccaccctcttacatttatggggcacaacatttgctgcgattgtttgtgaaacttccagaaatccttggaaagatgtccttttctgagaagaatctgaaggctttattgaagcactttgatctctttttgaggtttttagcagaataccacgatgacttcttcccagagtcggcttatgtcgctgcctgtgaggcacattacagcaccaagaacccccgggcaatttattaaaatgttgttggttctgtaagagcaactgctctgtctagtttggcgctctgggttccaggtgaataactaacaaggtggtgggtctttacccacagcgcaaacacaatgcccaccttggggctctgttgtttgagttgcccacatactgcagttattctgttaggaatgattccctgggtgcctgaaagtgctctgacacgacacttgttactttgcaggccatctgtgatggcaaggaaaaagcaactatgttcacagtgaaatattcgtggaataggttaggccatttcagtagacattgcagttagttagcaagaaccacattgtctctttatttgttagcattaaacaaattttttttttgcaaattggttttatttttttgatgaagccgagcaactctgtccaaaaaggtttagtttgtactcggaaaccacaaagtagtctcaaagtattttagagggaatcgatattgatggcaaaagaaaatttgcagctatgcatttgcttctaacggttccctctctgtgaaacattatttttggtgatctaaagaaagcattgcctttcttatttgagattttacagctatactttgttgtgtaatgttatggttccctttctgtaaaatgttatttttggtgatctaaataaagcctgtcttgtttgaaagaaaaaaaaaaaaaaaa

SEQ ID NO: 26765 - DNA, 2546 bp, Homo Sapiens
gtggagtccccgcaggcagagacgcggagtgggggtggcgggtcgccggatcgggtgggaagtaaaagacccccaggagtgggtgcgggctcactgatacggctgtgagcggcattggagtgtgcgtgggtcttctcgctacgctcgggcccgcaagaggggtgtgagagcggctaggtccaagcaggtgatgtttgcagacagaaaaagtaaactgtcaaggaattcagagcattgggtacttgttatttggaccagtttgaagcatctttgatttattggaccaactggcaacagaaaatgaaaagtagtgtggcacagataaaaccttcttctggtcatgacagaagggaaaaccttaattcatatcagaggaactcctctccagaagacagatatgaagaacaagaacgatccccccgggatagagattactttgattacagcagatcagactatgagcattcaagaagaggacgttcttatgatagtagcatggagtcacgaaacagggaccgagaaaaacgcagagaaagagaaagagatacggatcggaaaaggtctcggaaatccccatctcctgggaggagaaacccagaaacatcagtaactcagagttcctctgctcaggatgaacctgctacaaagaaaaagaaagatgagctggatcctcttcttactcgcactggtggagcatatattccccctgcaaagctcaggatgatgcaggaacagattacagataaaaacagcttagcataccagaggatgagttgggaggccctgaagaagtcaattaatggccttatcaacaaagtcaacatttccaacataagtattattattcaagagcttcttcaagaaaatatagttagaggaagaggactgctgtccaggtctgttttgcaagcacagagtgcttctccaatcttcacccatgtttatgcagcattagtggcaattatcaactcaaaatttccacaaattggagaattaatcctcaaaaggttaattcttaattttcgaaaaggctatcgaagaaatgacaagcaactttgcctgactgcttcaaaatttgtggcgcatcttattaaccaaaatgtggcacacgaagttttatgcttagagatgctcactttgctcctggaaagaccaacagatgatagcgttgaagtagctattggttttcttaaggaatgtggcctcaaattaacacaagtgtcaccaagaggaatcaatgctatatttgaacgccttcgaaacattctgcatgagtctgaaattgacaaaagagttcaatatatgattgaagtgatgtttgctgtacggaaagatggattcaaggaccaccccattatcctagaaggtcttgatttggtggaagaagatgatcaattcactcatatgctccctctggaggatgactataatccagaagatgttcttaatgttttcaagatggatcctaattttatggagaatgaagagaagtacaaagctattaagaaagaaattcttgatgagggagatactgactcgaacacagaccaggatgctgggagtagtgaagaggacgaggaagaagaagaggaagagggagaagaagatgaagaaggacaaaaagtaactattcatgacaaaacagaaattaacctggtctcatttcgtcgtacaatttatcttgctattcagtcaagtttagattttgaagaatgtgctcacaaattgctgaaaatggagtttcctgaaagccaaacaaaagaactctgcaacatgatacttgattgctgtgcccaacagaggacatacgaaaaattttttggcttattagctgggcgattttgcatgctaaagaaagagtacatggaatcctttgaaggtatattcaaagaacagtatgataccatccatcgcttggaaacaaacaagttgcgaaatgttgctaagatgtttgctcaccttttatacactgattcacttccatggagtgttcttgaatgtataaaactgagtgaagaaaccactacatcatccagtagaatttttgtcaaaatatttttccaggaactgtgtgaatacatgggtcttcctaaacttaatgcaagattaaaggatgaaactctgcagccattctttggaggattattaccccgagataatccaagaaacactcggtttgccatcaacttctttacttctataggtcttggaggtttaacggatgaactgcgggagcatctcaaaaatacaccaaaggtcattgtggcgcagaaaccagatgttgagcaaaataaatcctccccatcctcttcctcttcagcgtcctcctcttcagagtctgactcatccgactctgattctgacagcagtgatagcagttcagagtcttccagtgaagagggcgactcttcatccatcagtagtcatagctctgcctcagctaatgatgtaagaaagaagggacatgggaagaccagaagtaaagaggtagataaattgatcagaaaccagcaaacaaatgataagaaacaaaaaaaaaaaaaaaa

SEQ ID NO: 26766 - DNA, 2101 bp, Homo Sapiens
gtttaacagcttttgcagagccgcctccatgtggtttcggagtcgaggaagacctgggtgggaacccggctctgccgcttcctagccgcgtgataagaacatatgctgtcggcgactcactttcttctctaaaaattgggaatagtaacatgcacctcccgagctttggactaacgttatgtctggggagcccctggcacagtgcttgattggagggggactctgtgctcagtaattggtggcagctctgttactgtaccggcgctgggaacacaaggagaaagacaatatgggatggtcggaggcagaggtgtttccagtgatcggcttaggaccgctttctaggtggtgaggacaagagtgatggctgttttagtacttcaggtggaattcgtccttttcatcttcagaactggaagcagaaagttaatcagactaagaaagcagaatttgtacgcacagcagaaaaatttaaaaatcaagtaattaacatggaaaaagataaacacagtcatttctacaaccaaaaaagtgacttcagaattgagcatagtatgctagaagaattggaaaataaattgattcacagcaggaaaacagaaagagcaaaaatccagcaacaattggccaaaatacataataatgtaaagaaacttcagcatcaattaaaagatgtgaagcctacacctgattttgttgagaagctcagagaaatgatggaagaaattgaaaatgcaattaacacttttaaagaagagcagaggttgatatatgaagagctaattaaagaagagaagacaactaataatgagttgagtgccatatcaagaaaaattgacacatgggctttgggtaattcagaaacagagaaagctttcagagcaatctcaagcaaagttcctgtagacaaagtaacaccaagtactcttccagaagaggtactagattttgaaaaattccttcagcaaacaggagggcgacaaggtgcctgggatgattatgatcaccagaactttgtaaaggtgagaaacaaacataaagggaagccaacatttatggaagaagttctagaacaccttcctggaaaaacacaagatgaagttcaacagcatgaaaaatggtatcaaaagtttctggctctagaagaaagaaaaaaagagtcaattcagatttggaaaactaaaaagcagcaaaaaagggaggaaattttcaagttaaaggaaaaggcagacaacacacctgtgctttttcataataaacaagaggataatcaaaagcaaaaagaggaacaaagaaagaaacagaaattggcagttgaagcttggaagaaacagaaaagtatagaaatgtcaatgaaatgtgcttcccagttaaaagaagaagaagagaaagagaaaaaacatcagaaagaacgccagcgccagtttaagttaaaattactactagaaagttatacccagcagaagaaagaacaggaagaatttttgaggcttgaaaaggagataagggaaaatgcagaaaaggcagaaaaaaggaaaaatgctgctgatggaatttccagatttcaagaaagagatttacataaacttgaactgaaaattctagatagacaggcaaaggaagatgaaaagtcacaaaaacaaagaagactggcaaaattaaaagaaaaggttgaaaacaatgttagtagagatccctctaggctttacaaacccaccaaaggttgggaagaacgaaccaaaaagataggaccaacaggctctgggccacttctacatatcccacatagggctattccaacctggagacaaggaatacagagaagagtatgagataatcaaattgctactcagttgataagaatgttaacatactaagttataccagggagagagtgactaaccacattctttaaatatcaatagcttagtcagattgattattgtgctatattgtgaattgagaggtattaagtttcatgaggctttgtcattagtattcctgcttctaccaagaaggtatttaatatatgtgttggcctattattgatgtaaaagttatttaaataaaaaaaaaaaaaaaaaagaaaaaaaaaaaaaaa

SEQ ID NO: 26767 - DNA, 1646 bp, Homo Sapiens
aggggaaggggctgtgctgccagcaggcagtgctttgagctctaatggatgaacattgctaaccagcgaaggtggagagagggcacccgtctgagaagatgaagaggcagcaaagcacagctggcctcggggaaccggaagccacagggacatcaggctgtgtgctgctgtctgtcggccaccagctgggggactatcctggacctggaagggcatccctgacactccccaccagatgccaggggcacccccagccccagtatagatctggactccatcctttgcaatgtgtggggttctaggaagaggccagccagccgtggaagtgtcctgggctctgtcccggagacgacgaacttggctccccacgagggcggcctattccccacagtgtcccccgggggccacacctgcacccaccttgctgaagataattcgctttctcatccgtgaaagaataaagtcggactaactcatctccacactcacttccaactctaacaacctgtgttaggaaatcaaaggtaaggactctgaccacaaacccaagaagcaaaacccgagactcacggaacgacgccaccattgcagttcccagcttgactagttgtttttcttttctggtctgttctgctcttttggtttaaataattaaagatccttgttgacaagtaaaaaaaattctttatgaagctaaaaaaagtggttctaattaaacatttaaacattcttccatatacttttaaaaacagttgtaattatagctctacttaatgttaagtatacagactggcaattataaaaaataaggtaacatattcatggcattatgaataattaataagaactcttcgatttcatttagaccagggattctgtgctaatatgctctcagctgtcttgaaataatggtgaaattttaaaattagttttgtacttaaacatgtccccaaagtgaagcacagcggccaacgtccgtcacggtgccgagcagtgccagccgctctaccgtggccgacggcctgattcccaagggctgcgtccaggggccgtgctagtgcagtgaatgttcaggaaacagaccaggtggcaggagggagtcttgtcctcaaggaacctcataagtcttgctaggggacaaacaacgagagaatgaaactggcagccatagaatccgggccttgatgcccaggcctcgccatgcatacctgctggccggcatctccctgagacccgtctggcacaggcaacggcagggcccggcccttggagcacagggatggcagagcagggtcatcgaagcaggtggcgtgcagacagtggcttctccgcaagagctcctggctctcagggagctgagggctcctcaatggggaattctggctgagctccaggggaaagcgggttggaggcctggctcctccgcccccatctcctctgcaccaaccgtggaagggggtcagatatcaatgctaacatttgtgctgactcaattaattcaaacgattcacaaaaacaaacttgcttaaagtattaatttcctaaaaagaactaaaatgagttcaaataattcacataattaaattattttaattgttaatttaattaaaacatctcagttttcaaagcacaaaaaaaaaaaaaaa

SEQ ID NO: 26768 - DNA, 2369 bp, Homo Sapiens
gatccctccctggtgccacagcagctgagtgcgcatcaaatctgaagaaaatctacacagtacagacagtacagatattttggagtgtatacaataatatccctcctgtgactagcctgcctttgagatgtagttatcatttaatgagaggagagaggcgaccactttgggaagaggagagtaatgcaaagggtggcgtatggaagatgaaagtccccaaggacagcacgtccacagtttggaaagagttgctgttagcaaccatcggggaacagttcacagactgtgccgcagcagatgatgaagtaataggagttagtgtcagtgttcgggaccgagaagacgtcgtccaagtctggaatgtaaatgcctctttagtgggtgaagcgactgttttagaaaagatctatgaacttctgccccacataacttttaaagcagtattttataaaccccatgaagagcatcatgcttttgaaggtggacgtggaaaacactaattgcactctgtaaagaattctttgtcctttgctgattggttttggaaacggtcttaacaggagggagagtgaagagaagacttgccgaagccgatgctggtcaatttagagtgggtttctgtccttgcagatgggcaattaggactcaaagtggcaggtggggtggggggagattgtgtgggtttctaccgtcacattacttgctttttaaaaaaaacacacacaaaaaactttttttttggctttctaaattctctgttcttttcactctgattttttttttttttttgccgtttaaaattccttattcagcctaattattgttttctacactcccctttcattgaggcacaagaaatgggtttccctttaagtagctctgctgtacatagttaatgagaatatgcataatcgtgacaatactgcttttgaataccacactgtacaaggaggaacactagcttggagaaatctgtcttctgattatttgttgtgacacattcctatgtactgtgagctgggcattgtttttttctgtcccggggaaaagaaaaaccatacttaatgtgattttgcactgacagcacacaaatctttaattttcctttttaaaacatttttttttagtgataaaaggaaaataatagttggattgcataacatgaaaactataatcacaattcagtatcaggatataaatcaagctataagtctttggaccctctgtggaaacatttctaacccgaattttaatttggccttttcaaccaaaggcttagagtggtagcaagggatttcttccaataggaaacctgatgtttctgatttaaagagaaggtgatattttaattgtttgaattaagctccttgcaaagttcgggtgtgtttacccacttagggctttctttcccagtcaacgctaacacattttgttaaatgatccctttccctgctcacattgtgtgtcatttctcatcatcagtagtcctccagcctgggcagctgtccccaccctttttcatgtaggtgcaggaagttaaatctcatttccaggatgcatgtgaacatttacaaagttgaactttgagtgcattctgctcatatgaattattgggattgttgatatatattgtattatgctaccaaagaaatattggttttattagaaggaaatggtcatcctctggaccatggagactagctcagaatacgctgatttccctctcctgactttgccaagcctttggctgcttttgcctgataaagggcagggccatctgaagacacttcccccagtcggctttggagtcacgggagctagtgcctgctcacacattttccaaaagggcagtgcactcagaacttcactgtacctgggatttttaattcctcttgcagtgttgaccagcagagagacttgaggctactttaagcctccactatgtgtttgtagataaaattctcaattcaaacattttaaaggactttgaacattatctgcttatggaagttgtgcccttcacttggttagtaaccacctcagccataatacttaccatcataggtttcttaaaatgctttttttttttccctaaacttgagtttccttagtgatttcaaaatgaagtataagaatatcagatccagttagcaaaagcctaggacttgtttctccaaacattgtactaacattcaacttgttttaaaattatgactcaagaattttaaaaaattattctggacatgaattaaaacttttttataatataagtatttttctgattgaaaaaaggatataattgacttcactctaattgtcatgtatatttcgataagtaaatggattttgaagtaaaaaaaaaaaaaaaa

SEQ ID NO: 26769 - DNA, 1662 bp, Homo Sapiens
gttaaagccggtcggaactgctccggagggcacgggctccgtaggcaccaactgcaaggacccctccccctgcgggcgctcccatggcacagttcgcgttcgagagtgacctgcactcgctgcttcagctggatgcacccatccccaatgcaccccctgcgcgctggcagcgcaaagccaaggaagccgcaggcccggccccctcacccatgcgggccgccaaccgatcccacagcgccggcaggactccgggccgaactcctggcaaatccagttccaaggttcagaccactcctagcaaacctggcggtgaccgctatatcccccatcgcagtgctgcccagatggaggtggccagcttcctcctgagcaaggagaaccagcctgaaaacagccagacgcccaccaagaaggaacatcagaaagcctgggctttgaacctgaacggttttgatgtagaggaagccaagatccttcggctcagtggaaaaccacaaaatgcgccagagggttatcagaacagactgaaagtactctacagccaaaaggccactcctggctccagccggaagacctgccgttacattccttccctgccagaccgtatcctggatgcgcctgaaatccgaaatgactattacctgaaccttgtggattggagttctgggaatgtactggccgtggcactggacaacagtgtgtacctgtggagtgcaagctctggtgacatcctgcagcttttgcaaatggagcagcctggggaatatatatcctctgtggcctggatcaaagagggcaactacttggctgtgggcaccagcagtgctgaggtgcagctatgggatgtgcagcagcagaaacggcttcgaaatatgaccagtcactctgcccgagtgggctccctaagctggaacagctatatcctgtccagtggttcacgttctggccacatccaccaccatgatgttcgggtagcagaacaccatgtggccacactgagtggccacagccaggaagtgtgtgggctgcgctgggccccagatggacgacatttggccagtggtggtaatgataacttggtcaatgtgtggcctagtgctcctggagagggtggctgggttcctctgcagacattcacccagcatcaaggggctgtcaaggccgtagcatggtgtccctggcagtccaatgtcctggcaacaggagggggcaccagtgatcgacacattcgcatctggaatgtgtgctctggggcctgtctgagtgccgtggatgcccattcccaggtgtgctccatcctctggtctccccattacaaggagctcatctcaggccatggctttgcacagaaccagctagttatttggaagtacccaaccatggccaaggtggctgaactcaaaggtcacacatcccgggtcctgagtctgaccatgagcccagatggggccacagtggcatccgcagcagcagatgagaccctgaggctatggcgctgttttgagttggaccctgcgcggcggcgggagcgggagaaggccagtgcagccaaaagcagcctcatccaccaaggcatccgctgaagaccaacccatcacctcagttgttttttatttttctaataaagtcatgtctcccttcaaaaaaaaaaaaaaaaaaaaa

SEQ ID NO: 26770 - DNA, 1038 bp, Homo Sapiens
catgaggacgcctgggcctctgcccgtgctgctgctgctcctggcgggagcccccgccgcgcggcccactcccccgacctgctactcccgcatgcgggccctgagccaggagatcacccgcgacttcaacctcctgcaggtctcggagccctcggagccatgtgtgagatacctgcccaggctgtacctggacatacacaattactgtgtgctggacaagctgcgggactttgtggcctcgcccccgtgttggaaagtggcccaggtagattccttgaaggacaaagcacggaagctgtacaccatcatgaactcgttctgcaggagagatttggtattcctgttggatgactgcaatgccttggaatacccaatcccagtgactacggtcctgccagatcgtcagcgctaagggaactgagaccagagaaagaacccaagagaactaaagttatgtcagctacccagacttaatgggccagagccatgaccctcacaggtcttgtgttagttgtatctgaaactgttatgtatctctctaccttctggaaaacagggctggtattcctacccaggaacctcctttgagcatagagttagcaaccatgcttctcattcccttgactcatgtcttgccaggatggttagatacacagcatgttgatttggtcactaaaaagaagaaaaggactaacaagcttcacttttatgaacaactattttgagaacatgcacaatagtatgtttttattactggtttaatggagtaatggtacttttattctttcttgatagaaacctgcttacatttaaccaagcttctattatgcctttttctaacacagactttcttcactgtctttcatttaaaaagaaattaatgctcttaatatatatattttacgtagtgctgacaggacccactctttcattgaaaggtgatgaaaatcaaataaagaatctcttcacatgagaaaaaaaaaaaaaaaaaaaaaaaaaaaaaaaaaaaaaaaaaaaaaaaaaaaaaaaaaaaaaaaa

SEQ ID NO: 26771 - DNA, 2660 bp, Homo Sapiens
tggagatcaatgaagccgagtgaatgggggctgaatgtgcgagtccatagctgaagaggagcgccagatggtggaggaatacacttatttatgaaactgtcttgagttcttcttgaattgccagttttcagcctcctcatgcctccgtctcctttagacgacagggtagtagtggcactatctaggcccgtccgacctcaggatctcaacctttgtttagactctagttaccttggctctgccaacccaggcagtaacagccaccctcctgtcatcgccaccaccgttgtgtccctcaaggctgcgaatctgacgtatatgccctcatccagcggctctgcccgctcgctgaattgtggatgcagcagtgccagctgctgcactgtggcaacctacgacaaggacaatcaggcccaaacccaagccattgccgctggcaccaccaccactgccatcggaacctctaccacctgccctgctaaccagatggtcaacaataatgagaatacaggctctctaagtccatcaagtggggtgggcagccctgtgtcagggacccccaagcagctagccagcatcaaaataatctaccccaatgacttggcaaagaagatgaccaaatgcagcaagagtcacctgccgagtcagggccctgtcatcattgactgcaggcccttcatggagtacaacaagagtcacatccaaggagctgtccacattaactgtgccgataagatcagccggcggagactgcagcagggcaagatcactgtcctagacttgatttcctgtagggaaggcaaggactctttcaagaggatcttttccaaagaaattatagtttatgatgagaataccaatgaaccaagccgagtgatgccctcccagccacttcacatagtcctcgagtccctgaagagagaaggcaaagaacctctggtgttgaaaggtggacttagtagttttaagcagaaccatgaaaacctctgtgacaactccctccagctccaagagtgccgggaggtggggggcggcgcatccgcggcctcgagcttgctacctcagcccatccccaccacccctgacatcgagaacgctgagctcacccccatcttgcccttcctgttccttggcaatgagcaggatgctcaggacctggacaccatgcagcggctgaacatcggctacgtcatcaacgtcaccactcatcttcccctctaccactatgagaaaggcctgttcaactacaagcggctgccagccactgacagcaacaagcagaacctgcggcagtactttgaagaggcttttgagttcattgaggaagctcaccagtgtgggaaggggcttctcatccactgccaggctggggtgtcccgctccgccaccatcgtcatcgcttacttgatgaagcacactcggatgaccatgactgatgcttataaatttgtcaaaggcaaacgaccaattatctccccaaaccttaacttcatggggcagttgctagagttcgaggaagacctaaacaacggtgtgacaccgagaatccttacaccaaagctgatgggcgtggagacggttgtgtgacaatggtctggatggaaaggattgctgctctccattaggagacaatgaggaaggaggatggattctggttttttttctttctttttttttttgtagttgggagtaagtttgtgaatggaaacaaacttgtttaaacactttatttttaacaagtgtaagaagactataacttttgatgccattgagattcacctcccacaaactgacaaattaaggaggttaaagaagtaatttttttaagccaacaataaaaatataatacaacttgtttctcccccttttccttttaagctatttgtagagtttatgactaaatagtctgtgcaggttcatagaccgaagatactacacactttaaaccaattaaaaagaaccaaaagtaaatagaaaagacattgaatcaccaaggcctgggatcaacctgggctgtccacacagaaaacaaaaacccaaccaaaccaagccctgttgtgctcactggtgcaaagagaagatcagggcagcttaagtggtctaagaatccttcaggcattctttaaggagaaaaaggatacctttgattttgtgtgtttcatgctctggatttttttttttttttcttctctgggtttaagagattttttttgaaatagtgaggaactgaccattatatgccttcactggcttcttgtgcaataatatgatgttttaagtgtgcaaacaagttagagctggcagctgaatgatagacaaatagtgcaaatttgccagcttggagatagaaaggaattcaacaatatatcaaatactttccttcccacctttttccttttttttttttttttctgatttgattctggttacagtgccataaaccttgttacatatgtatatcagaatgtaagaaaaaaaaatttatttaaaaatatttttcgcaaaaaaaaaaaaaaatcttggtgtgtttctgttgattgtgtaaaaatttattttcattatataaatgaaactggaaaaaaaaaaaaaaaaaaaaaaaaaaaaaaaaaaaaaaaaaaaaaaaaaaaaaaaaaaaaaaaaaaaaaaaaaaaaaaaaaaaa

SEQ ID NO: 26772 - DNA, 1852 bp, Homo Sapiens
agcagctatgcagcttgaaatccaagtagcactaaattttattatttcgtatttgtacaataagcttcccaggagacgtgtcaacatttttggtgaagaacttgaaagacttcttaagaagaaatatgaagggcactggtatcctgaaaagccatacaaaggatcggggtttagatgtatacacataggggagaaagtggacccagtgattgaacaagcatccaaagagagtggtttggacattgatgatgttcgtggcaatctgccacaggatcttagtgtttggatcgacccatttgaggtttcttaccaaattggtgaaaagggaccagtgaaggtgctttacgtggatgataataatgaaaatggatgtgagttggataaggagatcaaaaacagctttaacccagaggcccaggtttttatgcccataagtgacccagcctcatcagtgtccagctctccatcgcctccttttggtcactctgctgctgtaagccctaccttcatgccccggtccactcagcctttaacctttaccactgccacttttgctgccaccaagttcggctctaccaaaatgaagaatagtggccgtagcaacaaggttgcacgtacttctcccatcaacctcggcttgaatgtgaatgacctcttgaagcagaaagccatctcttcctcaatgcactctctgtatgggcttggcttgggtagccagcagcagccacagcaacagcagcagccagcccagccgccaccgccaccaccaccaccacagcagcaacaacagcagaaaacctctgctctttctcctaatgccaaggaatttatttttcctaatatgcagggtcaaggtagtagtaccaatggaatgttcccaggtgacagcccccttaacctcagtcctctccagtacagtaatgcctttgatgtgtttgcagcctatggaggcctcaatgagaagtcttttgtagatggcttgaattttagcttaaataacatgcagtattctaaccagcaattccagcctgttatggctaactaaaaaaaagaaaatgtatcgtacaagttaaaatgcacgggcccaagggggattttttttttcacctccttgagaatttttttttttaagcttatagtaaggatacattcaagcttggttaaaaaaataataataaaacatgcatcatttttcatttgccaaccaagcacaaagttattttatactgactgtatattttaaagtatactctcagatatggcctcttacagtatttaagatatagcaaggacatggctgatttttttttataaaaattggcactaataagtgggtttattggtcttttctaattgtataatttaatttagtacaaagtttgtaaaatatcagaggatatatatatattgtttctacgacatggtattgcatttatatctttttactacagtgatctgtgacagcagcagcttcatgttgtattttttttactgaaattgtaaaatatccatcttaaagacatcaactattctaaaaattgtgtacaggatattcctttagtggtggaattaaaatgtacgaatacttgctttttcaaaaaaatgtattttctgttaaaagtttaaagatttttgctatatattatggaagaaaaatgtaatcgtaaatattaattttgtacctatattgtgcaatacttgaaaaaaacggtataaaagtattttgagtcagtgtcttacatgttaagagggactgaaatagtttatattaagtttgtattaaaattctttaaaattaaaaaaaaaaaaaaaaaaaaaaaaaaaaaaaaaaaaaaaaaaaaaaaaaaaaaaa

SEQ ID NO: 26773 - DNA, 1621 bp, Homo Sapiens
tgaatccaatataactttaggatttttccatctttaacttccattggttcccttcaggggaagttcacttgaaaagcgatttgagctgaaaaccgtattccagatcaatttgcaatgcattgaggtattaaatgcattgcatttgatttatagccttgtttactctgcatcaccaaaccctagtgggattcagagagaagctgaccacagctgaaaatacccagatctggttcacctgaggagagctcctatttgtatggaaaagaataagacatttcaagagttcacaaataaatgcaagcaaataaaaatcacccattccattttaatcccttggtttagaaaatgccttgactaactatttttctcttttcggcttggttaggtgtcagggtatacttttttatacacttggccttagtctccaatgtatcctacaagttgagcagaagtattctacaaatcatacagaagagtgagctttaaagtttagacactagagagggaaaaatattaggaaggtgtattagctcagattgtcataacaaaatgttataggcgagtggcttgaacaacagatttattttcccacagttttggaggctagaagttccacatcagaatttggcagggtcgggttgtgatatgggttctcttcctggcttgcagatggttaccttcttgttatgtctttatatggttgggggagagagagaaatctggtctcttttcctcttaaaggaacacctaatgacctcatttagccttaattgcttcctaaagatcttttctccaaatacagacacattagaggtcagggcttcaacatacgaatttggaggggagggtgaggacatggctcagtccatcacagaacatatttctttctaagatgctccaacagataccatgctattttccaaaaacttgactaaaatctggtacgaacaaagtagatttacattggtctcaagaacatggtattgtataaaaacgaatatattttacatacaatcttttaaaaacaataccataatcttttaaaatgaaggtgttggttatcatttgtctcctctgctatactgtacctggacatttttccttcctcaattttaacttaaaagccctcttgagcaatgtggcagatagcctactaagcatgttcttctaggtttcaataatattcatcctgttccttgccaaaaattcatttgtcctaatatccaaactcgttgtccagaaaatgcagtcttttcctttggctttatttagccactttctgaatccttattatgcttctgaatttatttcacctggaggaaaccacctgtttggcccttcagtttcccctaacttggactcctaagagatttggatttgatcttcagagctcaaggggtggtgatatgacctttaagtttacaagagtaatatgtgaagaagacttactccacttgccaacccagaaataatgaattttttcttacttaacattgtgctagatgcttggaacaaaataaatactctctctgacccctaaaaaaaaaaaaaaaaaaaaaaaaaaaaaaaaaaaaaaaaaaaaaaaaaaaaaaaaaaaaaaaaaaaaaaaaaaaaaaaaaaa

SEQ ID NO: 26774 - DNA, 1738 bp, Homo Sapiens
tgcagagagaaagagaaatgcacagcggtattgatgagtagatccttggattcagaggttggctgaaacgcaccatgcctgcttccatcttttgctctgtaaagttgtgaattgctcatgcctatagggaggaaggatggcacatgggattccttctcaaggcaaagttaccataacggtggatgagtacagctcaaaccccacccaggcattcacgcactacaacatcaaccagagcagattccagcctccacatgtacatatggtcgaccccatcccatatgacactccaaaaccagcgggccacacgcggtttgtctgcatctcagacacacactccagaacagatggtatccagatgccttatggggacatccttctccacacaggcgatttcaccgagctgggactgccctcagaggttaagaagtttaatgactggttaggaaacctgccatatgaatataaaatagtgattgctgggaatcatgaactgacatttgataaggaattcatggcagaccttgttaaacaggactactaccgtttcccctctgtgtccaaattgaaaccagaggactttgacaatgttcagtccctcctgacaaacagtatttacttacaagattcggaggtaacagtgaagggattcaggatatacggtgcaccttggaccccgtggtttaatggatggggctttaacctacccagaggtcagtctctgctggacaagtggaacctcatccctgagggcattgacatactcatgacacatggacctcctctaggttttcgagactgggttccaaaggagcttcaaagagtgggctgtgtggagctgttaaacacggttcagaggcgagtccggcccaagctccatgtgtttggtggaatccatgaaggttatggcatcatgaccgacggttacacaacgtacatcaatgcctcgacgtgtacagtcagctttcaaccgaccaaccctccaattatatttgaccttccaaacccacagggttcctgaagctctaaatgccctattggaatgtgagggaaggtctataaactgccatttttctaattataaacttacattctcttacttatttacaaaccctgtgagttctttttgtaaattgttggaacacaaatgatgctagaggttgtgcttcttattttattttattttaaatggggcatccatttgaaatcagaggaacattgtgaatttgtaaaatgacttctgttttctcaaaggccatgccattgtaaattgttagtgttcgccaaaggacagccaagctttcttttaaaaagtgataaaagtcttattttaatatgctttaagctgaaagaaaaaaaaataagaaacaggcagtgttttaaaaaccaacacagatttgcacaactgtttaagagtattgtttgaaatattttaattttcaatgttttgttgttgttgttttcttggtaatgcttcttttttgcagatgtggtcccaatttatagcaatcttctcaacagaagtaggcatggaaaagacttcttttcatactctcactataaagaaagctgcattgagaagaaaatggctgtcatttaaaggatggtttaactagtgagattcctattgtggttatacaaggtctcattgtttgtttgtttcttttaaattatttcagctttaaaaatacagaaatggaatctgaaaaaaaaaaaaaaaaaaaaaaaaaaaaaaaaa

SEQ ID NO: 26775 - DNA, 2044 bp, Homo Sapiens
tgcgcccgcgcgccccgggagcctacccagcacgcgctccgcgcccactggttccctccagccgccgccgtccagccgagtccccactccggagtcgccgctgccgcggggacatggtcctctgcgttcagggacctcgtcctttgctggctgtggagcggactgggcagcggcccctgtgggccccgtccctggaactgcccaagccagtcatgcagcccttgcctgctggggccttcctcgaggaggtggcagagggtaccccagcccagacagagagtgagccaaaggtgctggacccagaggaggatctgctgtgcatagccaagaccttctcctaccttcgggaatctggctggtattggggttccattacggccagcgaggcccgacaacacctgcagaagatgccagaaggcacgttcttagtacgtgacagcacgcaccccagctacctgttcacgctgtcagtgaaaaccactcgtggccccaccaatgtacgcattgagtatgctgactccagcttccgtctggactccaactgcttgtccaggccacgcatcctggcctttccggatgtggtcagccttgtgcagcactatgtggcctcctgcactgctgatacccgaagcgacagccccgatcctgctcccaccccggccctgcctatgcctaaggaggatgcgcctagtgacccagcactgcctgctcctccaccagccactgctgtacacctaaaactggtgcagccctttgtacgcagaagcagcgcccgcagcctgcaacacctgtgccgccttgtcatcaaccgtctggtggccgacgtggactgcctgccactgccccggcgcatggccgactacctccgacagtaccccttccagctctgactgtacggggcaatctgcccaccctcacccagtcgcaccctggaggggacatcagccccagctggacttgggcccccactgtccctcctccaggcatcctggtgcctgcatacctctggcagctggcccaggaagagccagcaagagcaaggcatgggagaggggaggtgtcacacaacttggaggtaaatgcccccaggccgcatgtggcttcattatactgagccatgtgtcagaggatggggagacaggcaggaccttgtctcacctgtgggctgggcccagacctccactcgcttgcctgccctggccacctgaactgtatgggcactctcagccctggtttttcaatccccagggtcgggtaggacccctactggcagccagcctctgtttctgggaggatgacatgcagaggaactgagatcgacagtgactagtgaccccttgttgaggggtaagccaggctaggggactgcacaattatacactatttatttatttattctccttggggttggtgtcaggggcgagccaaccccacctctatgccctgagccctggtagtccagagaccccaactctgccctggcttctctggttcttccctgtggaaagcccatcctgagacatcttgctggaaccaaggcaatcctggatgtcctggtactgacccacccgtctctgaatgtgtccactctcttctgcccccagccatatttggggaggatggacaactacaataggtaagaaaatgcagccggagcctcagtccccagcagagcctgtgtctcaccccctcacaggacagagctgtatctgcatagagctggtctcactgtggcgcaggccccggggggagtgcctgtgctgtcaggaagagggggtgctggtttgagggccgccactgcagttctgctaggtctgcttcctgcccaggaaggtgcctgcacatgagaggagagaaatacacgtctgataagacttcatgaaataataattatagcaaagaacagtttggtggtcttttctcttccactgatttttctgtaatgacattatacctttattacctctttattttattacctctataataaaatgatacctttcatgtaaaaaaaaaaaaaaaaaaaaaaaaaaaaaaaaaaaaa

SEQ ID NO: 26776 - DNA, 3129 bp, Homo Sapiens
cgactcgtcgccattcccggagcaggtcggcctcggcccaggggcgagtatccgttgctgtgtcggagacactagtccccgacaccgagacagccagccctctcccctgcctcgcggcgggagagcgtgtccggccggccggccggcggggctcgcgcaacctccctcgcctccccttcccccgcagcctccgccccgccaggcccggcccggactcccgagccccggcctcctcgtcctcggtcgccgctgccgccgggcttaacagccccgtccgccgcttctcttcctagtttgagaagccaaggaaggaaacagggaaaaatgtcgccatgaaggccgagaaccgctgccgccgccgacccccgccggccctgaacgccatgagcctgggtccccgccgcgcccgctccgctccgactgccgtcgccgccgaggcccccgttgatgccgctgagctcccccaacgccgccgccaccgcctccgacatggacaagaacagcggctccaacagctcctccgcctcttcgggcagcagcaaagggcaacagccgccccgctccgcctcggcggggccagccggcgagtctaaacccaagagcgatggaaagaactccagtggatccaagcgttataatcgcaaacgtgaactttcctaccccaaaaatgaaagttttaacaaccagtcccgtcgctccagttcacagaaaagcaagacttttaacaagatgcctcctcaaaggggcggcggcagcagcaaactctttagctcttcttttaatggtggaagacgagatgaggtagcagaggctcaacgggcagagtttagccctgcccagttctctggtcctaagaagatcaacctgaaccacttgttgaatttcacttttgaaccccgtggccagacgggtcactttgaaggcagtggacatggtagctggggaaagaggaacaagtggggacataagccttttaacaaggaactctttttacaggccaactgccaatttgtggtgtctgaagaccaagactacacagctcattttgctgatcctgatacattagttaactgggactttgtggaacaagtgcgcatttgtagccatgaagtgccatcttgcccaatatgcctctatccacctactgcagccaagataacccgttgtggacacatcttctgctgggcatgcatcctgcactatctttcactgagtgagaagacgtggagtaaatgtcccatctgttacagttctgtgcataagaaggatctcaagagtgttgttgccacagagtcacatcagtatgttgttggtgataccattacgatgcagctgatgaagagggagaaaggggtgttggtggctttgcccaaatccaaatggatgaatgtagaccatcccattcatctaggagatgaacagcacagccagtactccaagtttctgctggcctctaaggagcaggtgctgcaccgggtagttctggaggagaaagtagcactagagcagcagctggcagaggagaagcacactcccgagtcctgctttattgaggcagctatccaggagctcaagactcgggaagaggctctgtcgggattggccggaagcagaagggaggtcactggtgttgtggctgctctggaacaactggtgctgatggctcccttggcgaaggagtctgtttttcaacccaggaagggtgtgctggagtatctgtctgccttcgatgaagaaaccacggaagtttgttctctggacactccttctagacctcttgctctccctctggtagaagaggaggaagcagtgtctgaaccagagcctgaggggttgccagaggcctgtgatgacttggagttagcagatgacaatcttaaagaggggaccatttgcactgagtccagccagcaggaacccatcaccaagtcaggcttcacacgcctcagcagctctccttgttactacttttaccaagcggaagatggacagcatatgttcctgcaccctgtgaatgtgcgctgcctcgtgcgggagtacggcagcctggagaggagccccgagaagatctcagcaactgtggtggagattgctggctactccatgtctgaggatgttcgacagcgtcacagatatctctctcacttgccactcacctgtgagttcagcatctgtgaactggctttgcaacctcctgtggtctctaaggaaaccctagagatgttctcagatgacattgagaagaggaaacgtcagcgccaaaagaaggctcgggaggaacgccgccgagagcgcaggattgagatagaggagaacaagaaacagggcaagtacccagaagtccacattcccctcgagaatctacagcagtttcctgccttcaattcttatacctgctcctctgattctgctttgggtcccaccagcaccgagggccatggggccctctccatttctcctctcagcagaagtccaggttcccatgcagactttctgctgacccctctgtcacccactgccagtcagggcagtccctcattctgcgttgggagtctggaagaagactctcccttcccttcctttgcccagatgctgagggttggaaaagcaaaagcagatgtgtggcccaaaactgctccaaagaaagatgagaacagcttagttcctcctgcccctgtggacagcgacggggagagtgataattcagaccgtgttcctgtgcccagttttcaaaattccttcagccaagctattgaagcagccttcatgaaactggacacaccagctacttcagatcccctctctgaagagaaaggaggaaagaaaagaaaaaaacagaaacagaagctcctgttcagcacctcagtcgtccacaccaagtgacactactggcccaggctaccttctccatctggtttttgtttttgtttttttttcccccatgcttttgtttggctgctgtaatttttaagtatttgagtttgaacagattagctctggggggagggggtttccacaatgtgagggggaaccaagaaaattttaaatacagtgtattttccagcttcctgtctttacaccaaaataaagtattgacacaagagaaaaaaaaaaaaaaaaaaaaaaaaa

SEQ ID NO: 26777 - DNA, 1792 bp, Homo Sapiens
cccggtagcccgttcgctccgcgccggcggcctgtccccgcggcttggcgggctagggcaggggaaatgttgcaggaggagtcggacctctctctcattattgcccagatagtccaaaagctcaagggctccaatttgtactctcagctggaacggcaggcctgggccagtcttcagagacctgagattaaacttgaatcactgaaagaagatattaaggaattctttaaaatatcaggttgggagaagaaacttcagaatgctgtttatagtgaactgagtgtgtttcctttacctagtcatcctgctgcacctcctgaacatcttaaagaacctttggtatacatgaggaaagcacagggaagttgggaaaaaagaattttgaagagtttaaatagtatgtgcactgaactgagtatcccactggcacgaaagaggccagttggagaacagaaagaacttcttaataaatggaatgaaatgggaactgatgaaccagatttaagccttttcagacctgtttatgcacctaaggattttcttgaggtattaattaatcttcgcaacccaaattatgaaaacggtgattctcttagtttcaggactcatttgggtttaattcaagttccactgaaagtaaaagacatccctgaattgaaagaatgctttgtggaacttggcttaaatataggacaactgggtatagatgattctacacaagtgcctcctgaactttttgaaaatgagcatgtacgtattgggcaaaaagttctagcagaacaagatagtgctgctgctcaacagtacatcagacaaggaagtcccacggcactgagagctgaattgtgggctctcattttgaatatttccagccaacctgaggatgtcttgtattatgagcagcttaagaccaatgtgatacaacatgaccttttggtggacagtctaatctataaagatgtgaagttgacagcaagcaatgatgattattattttgtatttgaagattatttatatcaggtattactttgtttttcccgggatacatctgtgttgagtcactttgcattcaacagtgcctcgccaccaaaatcatacataagaggaaaactaggactggaagaatatgctgtcttttacccaccaaatggtgttatcccttttcatggattttcaatgtatgttgcaccactttgttttctataccatgaaccttccaaattgtatcagatattccgtgagatgtatgtgcgttttttcttcagactccattccatctcttctcatccttctggtattgtgtcactctgtctgctgtttgaaactcttcttcaaacttatcttccccaactcttttatcatctacgagaaattggggctcaaccacttcgcatatcatttaagtggatggttcgagctttctctggatacttagctacagatcagctcttgcttttatgggatagaatcctaggatacaactctctggaaattcttgctgtgctggcagctgccgtgtttgctttccgagcagtgaacctgatggaggtgacatcactggctgcagctgaagcagttcttgctgacctttttactttaaaagttatgcctcttcttcagatttttctgtttgctactgtcacctgatcttcttcacagtcactggcaacacatttagtttttcattagaaacaaatcatgaactatgcaaactctgcataaaaccaaaatgaaactttgcatataagccaataaagatcatgttccctcttcagttaaaaaaaaaaaaaaa

SEQ ID NO: 26778 - DNA, 2434 bp, Homo Sapiens
cgccttcctggacaacgtgggctggttcgtccgcaagctctccgggctgctcatcctgctggtgctcttcgccatcggctatttcctgcagcgcatcatctgccccagtccacgcaggtacccgcgcggccaggcgcgcccgggacagcggcccgggcctccggggggcgccggaccgctggggggcgcggggccgcccgacgacgacgacgactcgcccgctctgctgcgcgacgaggcggcagccggctctcaggactcactgctggacagtggcggcggcggccggggccggggaggcggcgggcgctcggacccctcctgcgcctcagagcacgagatgcgtgtagtgtcgccggtcttcctgcagctgcccagctacgaggaggtcaagtatctgcccacctacgaggagtccatgcggctgcagcagctcagccccggggaggtcgtgctgccagtgtcggtgcttggccgccctcgaggcggggtcgccgcggagcccgacggcggcgagggccgctaccctcttatctgagcgctcggggatcggcggctggtgcagggctgggggctgcgggtggcaagcaacggccggggtgccgccgccaactgcctcagaccttatctggcaccctggcctaactgcccggcaccccgcgactgggttggggtcactcgtctccctcgcgttctcccgggatcttatgtttctctgcgtttcattccgttcaaagaaacgtggggcacgcgcggcgggtgcggctgcagcaggcgaccctccagcgcaccttcgaaggacgtccctgccctctgccttgcctcgtattgtggttcactagtaagtgcctgcttccctagtcaaagagaacacgtgagccctttggtgcgtcgagagaagggcggtcttctttagggctgaggagaaaggaccgcagttccactcctttccctacctgccgcctggacaggtctcccagggtgggcagagggcgaggagccgttgaggaccagccgcgaccagggactgctgcacgtgggtgtgggagagcgccacttggttatgatgaaatcgctgccatgcggcagaccccccaaaatccctcagtgtcttcctgatctagcaaatagtcacagctggtgtttcacaattaggtggagtgcggggagtgggctaggggggacacctgtgatacaaggttagctgctgtacctactcagggaacagcaaccatgtatatccattcggctggacttttgattgttcaataactgaggaggtatttatatttatttgtcttttattctaatatttttaccatgcattgaacgcaacaggagggtatttcagcaaattcacgacaaggtaatcgtcttatcactttttgtaggccattaatggtcaggaaattgcccatactctgtcattattgtttaataaatcattaaattatttcattaaaaaagaaaaacaggtatggtcaaacgaggaagcatatgtgacataaaaaacatgaaggatatcttattttcactatttgagaagaatatattttatttttagtactgtggcataatatataactttttataataataactgtatgcattatgtagtatagcttttaattgtatcattcatcacagttatatgtaaaaataattgacatgtatatgccataccatgaagcatatgatgttgtgcactttctcctccatttttcatttggaatacattccacaacatgatccaaaacataagaacttacgacttgtaactcgtttaaagccattaattgtgcagtaatgtgctacaggattcaatcagcttctcttaagaaacaagtgtcattgtatcagtttcctgttctgtgacacgccctttaaaagtaaaagataatataacatattttaatacattgtgtgtaatgtacatatgcatattgtctatgtactatatacacattgtttataatattgttattacagtttgtcattcacctgaaaggagaaggaaaagtacgaaaggtttctctgcttgggaaaaggtgaatgttgttatatcaagaacgattacacacatggatctcatacatgtttttagaacattgttcttctgattgaagaagtctgatgctcctgaaaaatcttaaaatatctgacttgtattgaagaaaattatttaattaaatttttaaaggctggttgaaaaagtctgacagttctgagaattttttaaatgtctgaattgtaataaaaaaatggtttactttaaacttctaaaaactaatgaccttgtgactaaagaaaaatcatttgaagtgtattaaaaaatagcaaaacattaaaatcttttctctgtgcaaattttaaaaaaaaaaaaaaaaaaaaaaaaaaaaaaaaaaaaaaaaaaaaaaaaaaaaaaaaaaaaaaa

SEQ ID NO: 26779 - DNA, 846 bp, Homo Sapiens
gctgggcgtgctgcttagcaggggaaagatggcggtgacgggctggttggagagtctgcggacagcccagaagactgcgctgctgcaggacgggagaaggaaggttcactatttattcccagacggcaaggaaatggctgaagaatatgacgagaagacgagtgaactacttgtgagaaagtggcgtgtgaaaagtgccctgggagccatgggccagtggcagcttgaagtaggagacccagcgcccctaggagcagggaacctggggcctgaactcatcaaggaaagcaatgccaatcctatcttcatgcgcaaggacaccaagatgagtttccagtggcggattcgaaacctcccctatcctaaggatgtctatagtgtctctgtggaccagaaggagcgctgcatcattgtcagaacaaccaacaagaagtactacaagaagttctccattcctgatctagatagacaccagctacctctggatgacgccttgctgagctttgcccacgccaactgcaccctgatcatctcttaccagaagccaaaggaggttgtggtggccgagtctgagctacagaaggaactaaagaaggtgaagacagcccacagcaacgatggggactgcaagacccagtagttggcccctgagccttatacctccaccacagggggtgccgtgagacttcaaggcttggcccttcttgaccacggcagcctcctgtcttctaggagctatcaagggtctctaagaactgggcatggggcactcctagccagtgagtcatggtcatatttcctgagtaaagtcattctgagttaaaaaaaaaaaaaaaaaaaaaaaaa

SEQ ID NO: 26780 - DNA, 3681 bp, Homo Sapiens
ctcaggtagctaaggaaaccaggtgtgggcggctgggccttgcagctaacccttaaccctctggcaacccgcagatagccccaactggccccaacagttccctggggtcccttttggatggggccaaggtggagctgctagaaagattcctttggggagatggtcagaaatacttcagttatttattattttgttatttttattttttgctgttgcctcctggaaacggacttgaagtttcttcccctatattctttccctcagctcttgggggccagaaatcccaaagggagtccgctgccccggccctccagggccgcctcctctgtttgctttgcagaggagggaactgctccttcgactctgcagctcaggcctgtccccgacacagcccccagggagtcttctagctacccctggcctctaggccgcctgacgctcagtgccttcctccgttccggggcctggcacccgtgccgggcagccttacaccagccatgcccgcggcaccacatgtgtcttctcactcgcgaggtcttgtgcccagcgcccccgggaaggcgggggcgctcaccccacagcccaggccccggggttctgccccacagtcctgcgtgggccacgtaggaagcagcgtgggggctgtgtctgctgggaggtggcttggatggggaggacagcccggcaccctgacccccgcccctccccagccctgcagtcccccactgggccggggagtctctccagcttctctctctctggttattcaggagacacattttcggccttaaaactggcatggagcgcaggccctcccttgcagaaaattatcaaggaagagggagttggcagagtttctctgccccggggctggggacgcggagctccggggaaattgttaaatcagtgttctggcgccccctgttgggggaactctggaattacaggagtgggccttgggggggactgagctccatccctctcccccgccccacccccacccaaagttgcccaccctgtttttccgttgcatcgctggtcttgtgcttcccgcttcagtctgggagccaagagccagccccacctcccttcagaggacgcagtgacttttggactttccagaggtggttctgtgtttctgcccttggctcctctccgtcttgggctggggcacttggagccctctccatgtggcgcccagtgttggggggaggcaggctccagtggaggctgagtgaggcctggtcccttccccgtgccctcctcggagctgccacagaggctaagacggctgtcctgctggtgctggccctgctggatgtggtattgaagtctggggcagctgatagcaggaaggagacccccttggatgctggtctcctgggacctgaacagtctgtcagcaatggctggaaatccttcttcctctggccaccccgggggtgccgggcaacccccttagctctaagatgtggccacaaatctcttcccactcctccccgccaacctgaacagaaagttttgaccttgcaacctgtaagaaagaatccgtccgcatgactgtttacaagcgatagaaacacgtaagactctgtccccttgagctcccacccccgggccggggatgccccacctggggtgactgcactgtagctgcaaggcgtgttcttgcacgaagtgtgatcttatggccctgcgagaggtgctcatcatcatgcccattttctgctgtttctgatgggtcagctacctcacggcggggccagctctgctgtcctggcaagtgtcattgactctctaaacttgaagtccttcaggagccctgagcccaacatccatgagacaccccgagttgtgcttcatgagagttggattctctgcccactctttcagggatgtccaaggtccatgttagggggcaggcccccagctccactcactgcacaagcaccctaaatgttggaagcacaaaatggttgtgatttgagcacaatggcagggtcccgcaggcagacttgacaggcccaggcccgggaggatccccccacgttggctctgtccaaagtgagattgggggtgcctgtgtctgggacagggggctgcccttgctcagaccaggccttggctcatggcttgtcctaattctgggactcgtcatcttacttcttgcccttctgtgcccatcttaagactggaggctgagccttgtcaggcccagccacatctttacgccatgggaccaggagtaaagcgctctctaaaccccgcaccccaaatctctaaacgcctgagttcaggctgagtcctagccctagtgagcctgaagagcttggactgattcccagtctcctgggtcaagccccactttgtgctttcgaagcttatgagcgggttccctggatagaaggagtcttccatccccactgcccttgggcctcttcagcatagtcctgtgccagggccctgtcctcactatcagtcagttcagtatttgctttcacgtgagtggcggactcttctgaagcagccagaactctcaaagacagcgcatggagttgccttgcgagatttccaaggaaggaggaaagattaacaggcggagcctggcacacccaagcctttgaggtggtcagagtgccaccttcagccccttgggaagggacagcggtgggtctgggagtggcctcaccctggattcagcctaggaatctcttcaccctcagctgtccagccctgctgcctgtctggggatgtgtggcctgggcagagggcagtttaaagcacaaaaccacatggggaaaacacaaggttgcggggactttctcatgtgcctgatgtggtggagggagacaccagcaggtggctgcagtgacgttagggaacataacacttctttgccctgctagctctcagctctggggggcatcccccgatgtggtctgggctgggagcaggcatatcccctggttgttgcctgtgcctggtctgttcaccatcgtgtttgtgtgggcagagcctgccctgcaggagcagtgactttcttcccactgtgtgtcccggacctgtggtatgtgtccctttgccatcccaaacaggcaactgcttgctgctctccttgcttggcatagcctcctggtcagtggccaatgccccacaggccttcctgggcctggccctcctctcctgactcccagatccttccctgccctcttgtgtgcaaggacagattttgcagggaaagttctgtttcttctttgatacctttgttctgtcccctgccccatccccagcactcatgatcttgaagcccctatcacactctagttcagtcctgtgaaccatgtcctgagggccttgcagggaagtaggaaatagaaactcctccacaaagagccgaggatcagagaagacccctgagatgaatcagggccctgccctgcccaccaactcttttctagcaatcatgtcctgcccaggctgcaggcttcattaggctcctgctgtcctccatgatgtgactagcacaaggtgtatatatgttttgtacctctgccgatggctgtacatagtgtatgaaagttatttaagccccatgttgtacatttctgttcctagattggatgtgtgtgttctaagaagttgtcataaataaaacctgaatgaccaaaaaaaaaaaaaaaa

SEQ ID NO: 26781 - DNA, 1242 bp, Homo Sapiens
ccaagctaaggttcctgaaagagtccctcagaggagaggccctgggtgtctacaataggctcagtccccaggaccagggagactatgggactgtgaaagaggccctcctgaaggcctttggggtccctggggctgcccccagccacctgcccaaagagatcgtctttgccaacagcatgggtaagggctactatctcaaggggaagattggcaaagtgcccgtgaggttcctggtggactctggggcccaggtctctgtggtccacccaaacttgtgggaggaggtcactgatggcgatctggacaccctgcagccctttgagaatgtggtaaaggtggccaatggtgctgaaatgaagatcctgggtgtctgggatacagcggtgtccctaggcaagctgaagctgaaggcacagttcctagtggccaatgcgagtgccgaggaagccatcattggcactgatgtgctccaggaccacaatgctatcctggactttgagcaccgcacatgcaccctgaaagggaagaagtttcgccttctgcctgtgggagggtccctggaagatgagtttgacctggagctcatagaggaggacccctcctcagaagaagggcggcaggagctatcccactgagaagccaccttttctttaacctcctaaatattggtgggaagacccaccgctgtggggggggttgcatatcctcatgggggtcactgggcttggccagtctgcttatcaactcttgctcttctctcccctttgcctccctctgcaggggccttaatctgcccctggtaggggaggcttccactgaacaggcacaggtgagggagagcaggctggcttagagggacagggtccccatggtcatcaagctgctgttgatgacaaagactcaaaggctggaagagctcccaaggaagctagaaatgcttgtctttgaaagaactgtgggaccccttcagattccctgaggtatggcttggtcactctcaggtcctcaaagcctgtcttagttgggctgggtcctagctgcagggtctttgtgagggtcacagttgctctgggacacctccctgaagagcctttccacctgtacaatcgtattttctttctgtcatttgctttgaagcccattgtgccttatgccaataattcaattgctgcaaacaccaataaagattgattcatggaaaaaaaaaaaaaaaaaaaaaaaaaaaaaaaaaaaaaaaaaaaa

SEQ ID NO: 26782 - DNA, 1637 bp, Homo Sapiens
tgccctctccagggtcaccctagaatcagatctgctccccagcatcttctgtttcctggtgagtgattcctgctactttggatggccatgacgggctggagctgccttgtgacaggagcaggagggtttctgggacagaggatcatccgcctcttggtgaaggagaaggagctgaaggagatcagggtcttggacaaggccttcggaccagaattgagagaggaattttctaaactccagaacaagaccaagctgacagtgctggaaggagacattctggatgagccattcctgaagagagcctgccaggacgtctcggtcatcatccacaccgcctgtatcattgatgtcttcggtgtcactcacagagagtctatcatgaatgtcaatgtgaaaggtacccagctcctgttagaggcctgtgtccaagctagtgtgccagtcttcatctacaccagtagcatagaggtagccgggcccaactcctacaaggaaatcatccagaatggccatgaagaagagcctctggaaaacacatggcccgctccatacccacacagcaaaaagcttgctgagaaggctgtactggcggctaacgggtggaatctgaaaaacggcggcaccctgtacacttgtgccttacgacccatgtatatctatggggaaggaagccgattcctttctgctagtataaacgaggccctgaacaacaatgggatcctgtcaagtgttggaaagttctccactgttaacccagtctatgttggcaatgtggcctgggcccacattctggccttgagggccctgcaggaccccaagaaggccccaagcatccgaggacagttctactatatctcagatgacacgcctcaccaaagctatgataaccttaattacaccctgagcaaagagttcggcctccgccttgattccagatggagctttcctttatccctgatgtattggattggcttcctgctggaaatagtgagcttcctactcaggccaatttacacctatcgaccgcccttcaaccgccacatagtcacattgtcaaatagcgtattcaccttctcttataagaaggctcagcgagatttggcgtataagccactctacagctgggaggaagccaagcagaaaacggtggagtgggttggttcccttgtggaccggcacaaggagaacctgaagtccaagactcagtgatttaaggatgacagagatgtgcatgtgggtattgttaggagatgtcatcaagctccaccctcctggcctcatacagaaagtgacaagggcacaagctcaggtcctgctgcctccctttcatacaatggccaacttattgtattcctcatgtcatcaaaacctgcgcagtcattggcccaacaagaaggtttctgtcctaatcatataccagaggaaagaccatgtggtttgctgttaccaaatctcagtagctgattctgaacaatttagggactcttttaacttgagggtcgttttgactactagagctccatttctactcttaaatgagaaaggatttcctttctttttaatcttccattccttcacatagtttgataaaaagatcaataaatgtttgaatgtttaaaaaaaaaaaaaaaaaaaaa

SEQ ID NO: 26783 - DNA, 5396 bp, Homo Sapiens
gaagattcaaacagctactaaaccccgcccaggtcttcgacctcatgaacggaggcccacacctcggcttacggttattccagaagtttgacacattccggattctggtttgtggcggggatggaagtgttggctgggtcctctccgaaatcgacagcctcaaccttcataaacagtgtcagctgggagtgctgccgctcggcacagggaacgacttggcccgagtactgggctggggctcagcctgcgatgacgacacccagctcccccagatcttggagaagttggagagagccagcaccaagatgctggacaggtggagcgtcatggcatacgaggccaagctcccccggcaggcctcctcctctaccgtcaccgaagacttcagcgaggattccgaggtacagcagattctcttctatgaagactcggttgcagcccacctttctaaaatcctcacctcggaccagcactcggtggtcatctcctcggccaaagtgctctgtgagacggtgaaggacttcgtggcacgggtggggaaggcctatgagaagacgaccgagagcttggaggagtcagaggtcatggccaagaagtgctctgtcctgaaagagaagctggattcccttctcaagaccttggacgatgagtcccaggcctcgtcctctctgcccaacccgccccccaccattgccgaggaggctgaagatggagatgggtcgggcagcatctgcggttccaccggagaccgcttggtggcatcagcttgcccggcccggccgcagatattccggcctcgagaacagctcatgctgagagccaacagcctgaagaaagcaattcgtcagatcatagaacacacagaaaaagctgtcgatgagcagaatgcccagacccaggagcaggagggcttcgtcctgggcctctctgagtcagaggagaagatggaccacagagtgtgcccaccactgtcccacagcgagagcttcggggtccccaaggggaggagccagcgcaaagtgtcgaaatctccgtgtgaaaagctgatcagcaaagggagtctgtccctaggcagttctgcttcccttccgccccagccgggaagccgggacggcctgcctgcgctcaacaccaagatcctgtacccaaatgtccgggctggaatgtctggttccttacccggtggctcagtcatcagtcgcctgttaattaatgctgatcccttcaactctgaaccagaaaccctagaaaggagccagacacagagcccacgaccgcatgatcccattcctgtgaactgcctagaagaggcgcctccgtggaggtggaaagtagacgagaggcgccagggatgagagtattacacggagaaatgtgtcatgaacaactattttggcattggcctggatgcgaagatatccctggactttaacaacaagcgcgatgagcacccagagaagtgcaggagccgaaccaagaacatgatgtggtatggagttcttggaaccaaagagttgctgcacagaacctacaagaacctggagcaaaaggtcttgctggagtgtgacgggcgacccatcccactccccagtcttcagggaattgctgtccttaacattcccagctatgccggaggaaccaacttctgggggggtaccaaggaagatgatactttcgcagctccatcattcgatgacaagattctggaggtggtcgccgtgttcggcagcatgcagatggccgtctctcgagtcatcaggctacagcatcatcggatcgcccagtgtcgcacggtgaagatctccatccttggggatgagggcgtgcctgtgcaggtggacggagaggcctgggtccagccgccagggtacattcggattgtccacaagaaccgggcacagacactgaccagagacagggcatttgagagcaccctgaagtcctgggaagacaagcagaagtgcgagctgccccgccctccatcctgttccctgcacccggagatgctgtccgaggaggaggccacccagatggaccagtttgggcaggcagcaggggtcctcattcacagtatccgagaaatagctcagtctcaccgggacatggagcaggaactggcccacgccgtcaatgccagctccaagtccatggaccgtgtgtatggcaagcccagaaccacagaggggctcaactgcagcttcgtcctggaaatggtgaataacttcagagctctgcgcagtgagacggagctgctgctgtctgggaagatggccctgcagctggatccgcctcagaaggagcagctggggagtgctcttgccgagatggaccgacagctcaggaggctggcagacaccccgtggctctgccagtccgcagagcccggcgacgaagagagtgtgatgctggatcttgccaagcgcagtcgcagtggtaaattccgcctcgtgaccaagtttaaaaaggagaaaaacaacaagaacaaagaagctcacagtagcctgggagccccggttcacctctgggggacagaggaggttgctgcctggctggagcacctcagtctctgtgagtataaggacatcttcacacggcacgacatccggggctctgagctcctgcacctggagcggagggacctcaaggacctgggcgtgaccaaggtgggccacatgaagaggatcctgtgtggcatcaaggagctgagccgcagcgcccccgccgtcgaggcctagcctctgtcctctcagcctgtggcctccacatccccgccgccgaggcctagcctccgccctctcagcctgtggcctctgcgcctcctgccactgaggccctgggcagatgctgcagcccgcccccttctcatggtgctacttcctctgtcagctacagaaagcctccgtgacaccgtccaccagagctctggggtctcgaacataacaacacagctacctttgaaacaacactttctccagctcagagtcacctggggcacatgtgtcacggccactcagctctcgcccgcctgtgctgtgggccagggaatccagcggcgtctggcctcctgggcactgcttgcctggcctcgtgcttggattgtcccgggggctcctctccgtgtgtccttctgtggccgcaccgtgtggctccgcctcctggcccccagccagttctcagaaacgtggctggggcccagcacagcagcctgcaagggcccctgtttgttgatgcagcttttgttgaacaaaaatcgtgctctttcctggtttgaaagtagcatggatgtttccagtcttgttgattgtaatttgacgtgaagagaaaaaaaaattcctcctgcgtgagccaaggcagcgggtgctgtttcccaggcggggagcccctccctgggtgtcacagggcctgtgctcctccctcctccatcctctctcctcccgctcctccctccccccactgtgggctggggacgcctgcccttctgtctccggacgctctaggcgagttcagcttggggtgtgagtgagacagctcgccagctgcatccctgcagacagaggatgtgtgtccacatgagtgtttctgtgtgggaaatgcttcctggctctgggaaactttttctgcccattctgtggttcccagggagcgtggccctggtgggccaggggtggtttgacctcttcagcccgtccggtggcctggaggccggaggctctcctgagtgtctgcccctgcagtggcttcttgtcgcctgctgctgggcgtgatgtcgctggaggtgctggcagggactctgatttggtggtccgcgctgcccctgccctgcctctgtcctggctctgaactagtagatgatggtgccagagggcagggagctcgcctggggagagggctgtgccccgtagggacagtgcccaggtgaaggatgcccctggtcctccagggcactgactttgcccttttttcccgttgatagtcatggctcagaggtgcttgtaaatgtcttgggaagaggtttctgtaacccctgccctggtgtgaggaggaaatggctctggcctggctgcctggccgtggcttctctttggctcccaaagagaaggacagtgttgggagtatctgccgtggcttctctttggctcccaaagagaaggacagtgttgggagtatctgccggcgctgtccaggtcctttagtcagcgtcactccatctgatgtgcagaagctgggctgcacctgcgggggtgggcatagaccgggctgggtctgcagcagcccctggtcctgagcaggcggcagtgaacagcactggcccacctcccactcacagcccctctgtcccctctgcagtgcacccaggtgggcccctctgcgtgcctttgggtgctcccctctcgtggtcgttctggcccgaggcccttagagtatggaggctgagccaggccttgggtttccccagcacagcctcctgtcgctgcatgcgacgtgttgggatttttggatgaaagactctcccacgctctgttggtggacttagctgcctcactggaagtgatgtgggtggaaggtggttgtatgttaccttttccacctctcattgttttccccagaacattgtagatgggggttggcagagggagaaataagccagccacggcagtcgcttggtttcccaggtggaatgggctaacacaggagatgatgggaacctgtcccgcagtccctgcatgaccattggccctgctggcctggcggtgtgggcatcctggggttcttagggtcccagaacaagccccaggcaagctggaacttgggtggggaggggacatgaggaggataaacagctgactgtggcttcaaggacatcagggccaccccaagtcctcagtgtcctactcctggcaaggagttgggtttggatcaaaagtgtttaaaattaatatgttgtcagtgattagaacaacactgtttacataaaaaccatttttctaattctaacaagttagaatgtgaggaaggaatgaacatgagtgtttaggaacctgccctttggtgctgggctggcgtcccgcactggggtgtcctcgctgtctgggggctgctctgctgccccggcccaggtccccttgtggtgttgccagacgggcctcatggtctgctgtgcagagagaggcaggaaggatccctgaagagtcttggagaaaaggttctgtgccctcaggtggggcttaccccctcgtatttataatcttaatttatatagtgaccaccgtggaaacaaacgcctcttgtattgtcatgtacatagtccatacctgagtgctgtacataagttgttctgtgtataaataaaacaagcctgtttttgatcttccatcgccaaaaaaaaaaaaaaaaaa

SEQ ID NO: 26784 - DNA, 1257 bp, Homo Sapiens
cggcttctgcgcgccggggccgcctctccttccgccggtgccgcggcgcctcatggaagccccggagggcggcggaggggggcctgcagcgcggggcccggaggggcagccggcgcccgaagccagggtgcacttccgagtggcgaggttcatcatggaggcaggtgtcaagctagggatgcggtccattcccattgccactgcttgcaccatttaccataagttcttttgcgagaccaacctggacgcctatgacccttacctgattgccatgtcttcaatttacttggccggcaaagtggaagagcagcacctgcggactcgtgacatcatcaatgtgtccaacaggtactttaacccaagcggtgagcccctggaattggactcccgcttctgggaactccgggacagcatcgtgcagtgtgagcttctcatgctgagagttctgcgcttccaggtctccttccagcatccacacaagtacctgctccactacctggtttccctccagaactggctgaaccgccacagctggcagcggacccctgttgccgtcaccgcctgggccctgctgcgggacagctaccatggggcgctgtgcctccgcttccaggcccagcacatcgccgtggcggtgctctacctggccctgcaggtctacggagttgaggtgcccgccgaggtcgaggctgagaagccgtggtggcaggtgtttaatgacgaccttaccaagccaatcattgataatattgtgtctgatctcattcagatttataccatggacacagagatcccctaaggtcctggcccaggcctgcccaaagagaagcccaggatggtcggctgcctggggacattgtcaccacgtcgccatgacggctggtccccacaggaccagctgggaggactggttgtgctgctggagaagggctggagaaggcaatggcatgctgccgctttgccagtccctagaagtcgcggtgcaggtgatggtgggagccgcgcctccagcgggcaggccgggagtgtactgtgtgcagctgacccaaggcagccacatctgcgtttgtcctttgagaggactttgactacaatacaggcatgacatcaatgaaaggaaagtcatgaaatcgatgagactgaatccctacggatttcttaaaagccagatttgtagggagaatgaatgtgcaacgtggctgaaatctattttgtgtaataaaaggtgatacaagtcaaaaaaaaaaaaaaaaaaaa

SEQ ID NO: 26785 - DNA, 4499 bp, Homo Sapiens
ggatctggcactcccaggactcccggccggggtagctcttcactcctcagcgcgacgtcgtgtcgagttcccaaaaagctccgcaggggctgtagggaggcatacaagaattaaattctgaataagtctgcaggtaggatggacagttattttaaagcagctgtcagtgacttggacaaactccttgatgattttgaacagaacccagatgaacaagattatctccaagatgtacaaaatgcatatgattctaaccactgctcagtttcttcagagttggcttcctcacagcgaacttcattgctcccaaaagaccaagagtgcgttaatagttgtgcctcatcagaaacaagctatggaacaaatgagagttccctgaatgaaaaaacactcaagggacttacttctatacaaaatgaaaaaaatgtaacaggacttgatcttctttcttctgtggatggtggtacttcagatgaaatccagccgttatatatgggacgatgtagtaaacctatctgtgatctgataagtgacatgggtaacttagttcatgcaaccaatagtgaagaagatattaaaaaattattgccagatgattttaagtctaatgcagattccttgattggattggatttatcttcagtgtcagatactccctgtgtttcttcaacagaccatgatagtgatactgtcagagaacaacagaatgataccagttctgaattacaaaatagagaaatcggaggaatcaaagaattgggtataaaagtagatacaacactttcagattcctataattacagtggaacagaaaatttaaaagataaaaagatctttaatcagttagaatcaattgttgattttaacatgtcatctgctttgactcgacaaagttccaaaatgtttcatgccaaagacaagctacaacacaagagccagccatgtggattactaaaagatgttggcttagtaaaagaggaagtagatgtggcagtcataactgccgcagaatgtttaaaagaagagggcaagacaagtgctttgacctgcagccttccgaaaaatgaagatttatgcttaaatgattcaaattcaagagatgaaaatttcaaattacctgacttttcctttcaggaagataagactgttataaaacaatctgcacaagaagactcaaaaagtttagaccttaaggataatgatgtaatccaagattcctcttcagctttacatgtttccagtaaagatgtgccgtcctcattgtcctgtcttcctgcgtctgggtctatgtgtggatcattaattgaaagtaaagcacggggtgattttttacctcagcatgaacataaagataatatacaagatgcagtgactatacatgaagaaatacagaacagtgttgttctaggtggggaaccattcaaagagaatgatcttttgaaacaggaaaaatgtaaaagcatactccttcagtcattaattgaagggatggaagacagaaagatagatcctgaccagacagtaatcagagctgagtctttggatggtggtgacaccagttctacagttgtagaatctcaagaggggctttctggcactcatgtcccagagtcttctgattgttgtgaaggttttattaatactttttcaagcaatgatatggatgggcaagacttagattactttaatattgatgaaggcgcaaaaagtggcccactaattagtgatgctgaacttgatgcctttctgacagaacagtatcttcagaccactaacataaagtcttttgaagaaaatgtaaatgactctaaatcgcaaatgaatcagatagatatgaaaggcttagatgatggaaacatcaataatatatatttcaatgcagaagcaggagctattggggaaagtcatggtattaatataatttgtgaaacagttgataaacaaaatacaatagaaaatggcctttctttaggagaaaaaagcactattccagttcaacaagggttacctaccagtaagtctgagattacaaatcaattatcagtctctgatattaacagtcaatctgttggaggggccagacctaagcaattgtttagccttccatcaagaacaaggagttcaaaggacctgaataagccagatgttccagatacaatagaaagtgaacccagcacagcagataccgttgttccaatcacttgtgctatagattctacagctgatccacaggttagcttcaactctaattacattgatatagaaagtaattctgaaggtggatctagtttcgtaactgcaaatgaagattctgtacctgaaaacacttgcaaagaaggcttggttttgggccagaaacagcctacttgggttcctgattcagaagctccaaactgtatgaactgccaagtcaaatttacttttaccaaacggcgacaccattgccgagcatgtgggaaagtattttgtggtgtctgttgtaataggaagtgtaaactgcaatatctagaaaaggaagcaagagtatgtgtagtctgctatgaaactattagtaaagctcaggcatttgaaaggatgatgagtccaactggttctaatcttaagtctaatcattctgatgaatgtactactgtccagcctcctcaggagaaccaaacatccagtataccttcaccagcaactttgccagtctcagcacttaaacaaccaggtgttgaaggactatgttccaaagaacagaagagagtatggtttgcagatggtatattgcccaatggtgaagttgcagatacaacaaaattatcatctggaagtaaaagatgttctgaagactttagtcctctctcacctgatgtgcctatgacagtaaacacagtggatcattcccattctactacagtggaaaagccaaacaatgagacaggagatattacaagaaatgagataattcagagtcctatttctcaggttccatcagtggaaaaattgtctatgaacacaggaaatgaggggttacctacttctggttcatttacactagatgatgatgtttttgcagaaactgaagaaccatctagtcctactggtgtcttagttaacagcaatttacctattgctagtatttcagattataggttactgtgtgatattaacaagtatgtctgcaataagattagtcttctacctaatgatgaggacagtttgcccccacttctggttgcatctggagaaaagggatcagtgcctgtagtagaagaacatccatctcatgagcagatcattttgcttcttgaaggtgaaggctttcatcctgttacatttgtcctaaatgctaatctactcgtgaatgtcaaattcatattttattcctcagacaaatattggtacttttcaaccaatggattgcatggcttgggacaggcagaaattattattctattgttatgtttgccaaatgaagatactattcctaaggacatcttcagactatttatcaccatatataaggatgctctaaaaggaaaatacatagaaaacttggacaatattacctttactgagagttttctcagtagcaaggatcacggaggattcctgtttattacacctacttttcagaaacttgatgatctctcattaccaagtaatccttttctttgtggaattcttatccagaagcttgagattccctgggcaaaggtttttcctatgcgtttaatgttgagattgggtgcagaatataaaggtaagttttagagtaataagttaaattgcatattttcaaatatactgaatgtaaagactttcagggaatcattaaaatcaattttaatggattaatggaactacttttgttttgctatgcttttaaagttctaagacaaccctcttctactaccaggttggtctagataactgtggtatgtcttcaagtttctagatgttcataagttcttttattacctaaaacttttcttcttaaatttcagaacaaaacagaaaactttcacagtgcaggttgagtatgccatatctgaaatgtattggatcagttttttggattttggactttttcagattttggaatattcacagagtacataccagttgagcatcccaaattcaaaatctgaaatgctccagtgagcatttcttttgagcatcacgttggcatttgaaaaagttatagaccgggcatggtggctcacgcctgtactcccggcactttgggaggccaaggcgggcggatcacatgaggtcaggagttcgagaccagcctggccggcatggtggagccctgtctctactaaaaatacaaaaattggctgggtgaggtggcgggcgcctgtgattgcagctactcgggaggctgaggcaggagaatcgcctgaacccgggaggcagatttgcagtgagctaagatcatgcctctgcattccagccagggtgacagagcgagactacgtctcaaaaaaaaaaaaaaaaaaaaaaaaaaaaaa

SEQ ID NO: 26786 - DNA, 2909 bp, Homo Sapiens
gcactgagccggctcaggcagagacgcggcaccatggctagcaagaaagtctgcattgtaggctccgggaactggggctcagccatcgccaagatcgtgggtggcaatgcagcccagctggcacagtttgacccacgggtgaccatgtgggtatttgaggaagacattggaggcaaaaagctgactgagatcatcaacacgcagcatgagaatgtcaaatacctgccagggcacaagttgcccccaaatgtggtggctgtcccagatgtggtccaggctgcagaggatgctgacatcctgatctttgtggtgccccatcagttcatcggcaagatctgtgaccagctcaagggccatctgaaggcaaacgccactggcatatctcttattaagggggtagacgagggccccaatgggctgaagctcatctcggaagtgattggggagcgcctcggcatccccatgagtgtgctgatgggggccaacattgccagcgaggtggctgatgagaagttctgtgagacaaccattggctgcaaggacccggcccagggacaactcctgaaagagctgatgcagacaccaaacttccgtatcacagtggtgcaagaggtggacacagtagagatctgtggagccttaaagaatgtagtggccgtgggggctggcttctgtgatggcctgggctttggcgacaacaccaaggcggcagtgatccggctgggactcatggagatgatagccttcgccaagctcttctgcagtggccctgtgtcctctgccaccttcttggagagctgtggtgttgctgacctgatcactacctgctatggagggcggaaccggaaagtggctgaggcctttgcgcgtacaggaaagtccattgagcagctggagaaagagttgctgaatgggcagaaactgcaggggcccgagacagcccgggagctatacagcatcctccagcacaagggcctggtagacaagtttcccttgttcatggctgtgtacaaggtgtgctacgagggccagccagtgggtgaattcatccactgcctgcagaatcatccagaacatatgtgagtggggccagggcccaggccaggccgcttttttaccccagcggagaccagcagaagcctggggtacctagtcaccaggatctccaggactcccagggagcagagtcttctcatcttttcactggaggacaggaggctatggggcccagctacgcacctggagatcctgaactgtcaagccactggcagcctcatgccaccacatttgccagaaatgcagttgccctgtccctctccagatgtggggctttctccatatcctctgggaggggtggaatcaagccccagtgctgcctgcttggtggcgggggtgatgtatgtggagaagggttgggggagaggccggtagggcaggggctgctagtggctgtctcacatacaccagtaatcctgttaaagggctgaagaagtatcttagccacaggagcgatgaggcaaggattgtcagggaggggtctgggcttctgagctgatgcaggccccaaggacccctttgctgacctctgccaggacccacacagcttcgatggatctcagtgtttgttaacaaaatacaaagatctcaaacaaaccccttttagcttctcctagcaacatctgtgtcctcagaaacctctggttctcccccttccccctcccccaggctgccctggcacccaaattgctgccatgctggcatctgtagctcggtggcttgacattctccccagggacttcccggttcctagttctttgccagctcctccccactctgtgcgacctttccaagccttccctcaccctccccgccagcaccctctttggggagcaggaacttaatctgctgacagagctacacctttcataacaggctcagatcactcagctccctgtgacctttgtattcacccaggcttccttctcagtagctctagctgggggaggtgtcagctgggcccctcctgtgctatctccccagaggacatccctgactccacccctttcttcctcccaaactctgcacctcttcctcagctgctccagaccggccagggtaaccagctaaccatgcctggcatctggaagccagcaggccagagggtggcccaaaggctgatgaacggtagggaagggtgagcagattcctatgttggtgggcaccaatattccaagggcagctctctttgctgaatgagggccttctcgtgaggtactgacaacaccagcaactcgagagctgggaaactcaaggaggaggaagaaaatcaaaaccaccctactccctggggtgaggaaagaacaggaggggaggaggaggagtgtgctctgcacttgccttgctccagcatggggtggcagcagaggaatgtcacaggtcagcagcctaggcctccagctataaatagtccggagggcccgagaggctcccgcccgtccagcagggctgtcagcttcctgtgtggcagcacctggcacactggctctggccagcattatgctaaaaccctgttactctccaatgaaccagggaggcgggctcctctctgcgcctatcccttgagaattctgtcttaccagtgaagggtggggctgcccagatcaggcagcaggagtgaggggcacagtcaccccaggccttgctgagcccaggtctgggtactgagtgtccagagctgcctccccaggaggttaaggtgggggcaaaggggaagcttcaagcactttgcctacttttgttcactccccagtgcactgtgactcaggccttcccatcaggcctatttgtctacccaataaagcgtgttttttccagaaaaaaaaaaaaaaaaaaaaaaaaaaaaaaaaaaa

SEQ ID NO: 26787 - DNA, 3309 bp, Homo Sapiens
ccacgcgtccggtgccggccgggattcgcggcccggagctcgggaccggttgcttcattccagcctcgcagtcacctctgtgccctgctggttgtcttcccagcgctgctgtagttgccttccatggatctataggagagcaagtcctccaggagaagaagtcctcaccagtgaacggagacctctctgaactaaggataccatggccacgtcagccccactacggagcctggaagaggaggtgacctgctccatctgtcttgattacctgcgggaccctgtgaccattgactgtggccacgtcttctgccgcagctgcaccacagacgtccgccccatctcagggagccgccccgtctgcccactctgcaagaagccttttaagaaggagaacatccgacccgtgtggcaactggccagcctggtggagaacattgagcggctgaaggtggacaagggcaggcagccgggagaggtgacccgggagcagcaggatgcaaagttgtgcgagcgacaccgagagaagctgcactactactgtgaggacgacgggaagctgctgtgcgtgatgtgccgggagtcccgggagcacaggccccacacggccgtcctcatggagaaggccgcccagccccacagggaaaaaatcctgaaccacctgagtaccctaaggagggacagagacaaaattcagggcttccaggcaaagggagaagctgatatcctggccgcgctgaagaagctccaggaccagaggcagtacattgtggctgagtttgagcagggtcatcagttcctgagggagcgggaggaacacctgctggaacagctggcgaagctggagcaggagctcacggagggcagggagaagttcaagagccggggcgtcggggagcttgcccggctggccctggtcatctccgaactggagggcaaggcgcagcagccagctgcagagctcatgcaggacacgagagacttcctaaacaggtatccacggaagaagttctgggttgggaaacccattgctcgagtggttaaaaaaaagaccggagaattctcagataaactcctctctctgcaacgaggcctgagggaattccaggggaagctgctgagagacttggaatataagacagtgagcgtcaccctggacccacagtcggccagtgggtacctgcagctgtcagaggactggaagtgcgtgacctacaccagcctgtacaagagtgcctacctgcacccccagcagtttgactgtgagcctggggtgctaggcagcaagggcttcacctggggcaaggtctactgggaagtggaagtggagagggagggctggtctgaggatgaagaagagggggatgaggaggaagagggagaagaggaggaggaggaagaggaggccggctatggggatggatatgacgactgggaaacggacgaagatgaggaatcgttgggcgatgaagaggaagaagaggaggaggaagaggaggaagttctggaaagctgcatggtgggggtggctagagactctgtgaagaggaagggagacctctccctgcggccagaggatggcgtgtgggcgctgcgcctctcctcctccggcatctgggccaacaccagccccgaggctgagcttttcccagcactgcggccccggagagtgggcatcgccctggattatgaagggggcaccgtgactttcaccaacgcagagtcacaggaactcatctacaccttcactgccaccttcacccggcgcctggtccccttcctgtggctcaagtggccaggaacacgcctcctgctaagaccctgagccctgacatctgcccccagccccaaccctcagatgcttcacttctttggaattccaggactctcaatggggggacgggatgcctggcctaagcacctggagcaggggaccccatatccactggtagccacctccccattgctgtggccccctgaaatctcactcagtgctgttgctccatctactgccctaatggggctcttttcccacctcctgctggtttcccgagggaacttctgaccctggagtccatgagggctcctttcctttttgaccacgaccttggccccagctctgcactctctggaataagggcccgatgcagcattttcttgcccagtgtggcaagacctcagaaaaaccagtcaattacgcctaagatcattttgctgtccttaaaccccccaggttccttcttgcacaaatccactctgctgcccaccttccctggcattttaaacagacctaccccaccccaactcagagttaagcatacatggcaatgctgaaaataaacaaaatccactgaggcttcccaggccatttaaagcctggagtaccagcgcatatcatctcatggggtccagagtggagtccaggcttctctgaaaccagggctgagcatatttccatagccaaggaggtgggactccctggagctatctgtggtcttagggaaggatccagacatacacggctttggggtacaagctgtgatcactgatcaataaattatctctagattggtccttgtgaggggagttttaagaatccagaacatcttgctcttgatcagcacatccaaaaacaccaagacaaacatccagtggagcagaacctctcctgcctcgggagttctgaccgggttccccagcagggtgttaagcctctgtctctggccctaccagcatccaggttccactttcctaggagagagtggagatgggaagacagggaaaggaaggcagcaggaggccacaagcccaccaggtcttcatgtcaagagagggagtaacatgtcttctcattgcccacggacccaacctctgtccaggtgcccctcatcatcacagtttaacacaagctcccctgctccagccaaattgatctcccagtcttgtccttacccattccaagtgctctgccagcccctgttcatccaagttttaagtcctccaccctgttctaagagactgttccaacggctctgggcctcagtggtcacttgaccaccattgtctcagagctgcccactttgtgtgtgtcacatgctgcctgagtcacatgtacatcttatttctgcctctagttttgtaagctcctggagggcggataacatcttatactactcttgtattctcatggcacctagtgcagtgctgggcacagagtaggtgctcaataaagacttgttgaatgaaaaaaaaaaaaaaaaaaaaaaaaaaaaaaaaaaaaaaaaaaaaaaaaaaaaaaaaaaaaaaaaaaaa

SEQ ID NO: 26788 - DNA, 1617 bp, Homo Sapiens
ccacgcgtccgggctcgggagaggagtggacgccgctggccaggatggtgctggagagcgtggcccgtatcgtgaaggtgcagctccctgcatatctgaagcggctcccagtccctgaaagcattaccgggttcgctaggctcacagtttcagaatggcttcggttattgcctttccttggtgtactcgcacttcttggctaccttgcagttcgtccattcctcccgaagaagaaacaacagaaggatagcttgattaatcttaaaatacaaaaggaaaatccgaaagtagtgaatgaaataaacattgaagatttgtgtcttactaaagcagcttattgtaggtgttggcgttctaaaacgtttcctgcctgcgatggttcacataataaacacaatgaattgacaggagataatgtgggtccactaatactgaagaagaaagaagtataataataataacaatattttctcattctttgtgtatagaaaattttaaaatggtggtcttaattattactactggttgaacaattatttcttccaatttattttcttcctgcactactgtttgtatttgatcctttgtctattcagtcacttaattagaaattaaattgtcaagcctcttattctgacttcaaagaattaatgtatcttccaacaataaaatcacttctgattttaatctaggaaaacctaaattgtggctatggatccaaagctgtttgtttctttgaatatcaatattttcaacaggatcttgtatttaaaattcccacctacattgttaaatatgttattttttcatatctcttttggttttgataatctgaagtgtttttttctcgttttggccttccaaactgcatttggttaggtgaattaagaaaaatattgccatcaagaattacttgtgttttcacagagatagactctttgctttatagagattgttgtgtatttaatatgaatatcccagctttagaaaagaagtaaactggatacaaaaagttccattgaggaacagttatttacagtataaaagatttgtttactttacaaaaggcttgtgtctgtgtgtgtgtgtgtgtgtgtgtgtgtgtgtattttaaactgactcagtgacagctggggtggaatggcaagaacacttacaaccaaactcatgggctgctgcaatttgaagatcaattggtaataaacataagacattaattcatattaaaatagttcagtgttcaaaattgtgtttatgtggatatttttctctttttaacactataaaccattaaaatacagtcatcccttgtatacgctagggactggttccagggccacacatataccaaaatctgcccatactcaagtcccacagaaagtcttgcagaacccatatgtagaaaagttggccctccagttgaccctccgtacacatgagtttcacatcccatgcacaaatgctgatctgtgtgacctcacctgcatttgattgaaaaaagtatgcgcgtaagtgtacccacccagttcaaacccgtgtgtaagggtcaactgtacaaaaaagtttgtgaaataaacgtactggagaatctttaaaaaaaaaaaaaaaaaaaaaaaa

SEQ ID NO: 26789 - DNA, 3341 bp, Homo Sapiens
gcggtctcagggaaggtggggctatggcagctgctagggaccctccggaagtatcgctgcgagaagccacccagcgaaaattgcggaggttttccgagctaagaggcaaacttgtagcacgtggagaattctgggacatagttgcaataacagcggctgatgaaaaacaggaacttgcttacaaccaacagctgtcagaaaagctgaaaagaaaggagttaccccttggagttcaatatcacgtttttgtagatcctgctggagccaaaattggaaatggaggatcaacactttgtgcccttcaatgtttggaaaagctatatggagataaatggaattcttttaccatcttattaattcactctggtggctacagtcaacgacttccaaatgcaagtgctctgggaaaaattttcactgctttacctcttggtaaccccatttatcagatgctagaattaaaactagccatgtacattgatttccccttaaatatgaatcctggaattctggttacctgtgcagatgatattgaactttatagtattggagaatttgagtttattaggtttgacaaacctggctttactgctttagctcatccttctagtttgacgataggtaccacacatggagtatttgtcttagatccttttgatgatttaaaacatagagaccttgaatacaggtcttgccatcgtttccttcataagcccagcatagaaaagatgtatcagtttaatgctgtgtgtagacctggaaatttttgtcaacaggactttgctgggggtgacattgccgatcttaaattagactctgactatgtctacacagatagcctattttatatggatcataaatcagcaaaaatgttacttgctttttatgaaaaaataggcacactgagctgtgaaatagatgcctatggtgactttctgcaggctttgggacctggagcaactgtggagtacaccagaaacacatcaaatgtcattaaagaagagtcagagttggtagaaatgaggcagagaatatttcatcttcttaaaggaacatcactaaatgttgttgttcttaataactccaaattttatcacattggaacaaccgaagaatatttgttttactttacctcagataacagtttaaagtcagagctcggcttacagtccataacttttagtatctttccagatataccagaatgctctggcaaaacatcctgtatcattcaaagcatactggattcaagatgttctgtggcacctggctcagttgtggagtattccagattggggcctgatgtttcagttggggaaaactgcattattagtggttcttacatcctaacaaaagctgccctccccgcacattcttttgtatgttccttaagcttaaagatgaatagatgcttaaagtatgcaactatggcatttggagtgcaagacaacttgaaaaagagtgtgaaaacattgtcagatataaagttacttcaattctttggagtctgtttcctgtcatgcttagatgtttggaatcttaaagttacagaggaactgttctctggtaacaagacatgtctgagtttgtggactgcacgcattttcccagtttgttcttctttgagtgactcagttataacatccctaaagatgttaaatgctgttaagaacaagtcagcattcagcctgaatagctataagttgctgtccattgaagaaatgcttatctacaaagatgtagaagatatgataacttacagggaacaaatttttctagaaatcagtttaaaaagcagtttgatgtagaggtattttaaatattgtacactttgcctttttgagtaacattccagagataggtattttttgtaggctgtttcactgaactcagttaatgaaaactgtattaacataattgttgtagcataatattaatagtgcaaaagtacatataagtcattttgatgaaaaatattccaagactaagttgagaaaagagatactattttggatgtgtatcagtatttttgtttttaataatgattgatttgtggagcattgttttttcacataattagttttaaaggtaattttctaagcatacctttggaatttttccatcttttttgaggcttttggtccagtgaagttctaagtattcactggcacttctctcctcaactgtaattctatttttaataataaaaatggcatactgtagggtcttcagagtagtgtaggaatactgtagaaatactttttcagaaacgaatccatagctgacaaattcactcagtgcccaatatattgtgattattttcgttgataaagaactagatacaaagacctctgaaattgatgataaaatttgtatctcattaattttatcaaaatgaaactaaaagtacatatgtattatacacttgaacatgtgtttgtatatctttaaaattttcctttatgttccattccataggaaaacacacatatgcacacaaaactcagttatctgtggggaaagtggtagtaataattgagattcatcaataatcatataatttcactatagacattacttgcattatctcctatcagtccttctaacaaaacttaaattaccagatgaactgactttagttttcatcttattttttgtccacatgctggtgatgctgagaaacaataattggcccaaatgcagacatcaagaagcaggcaggaaaatggaaaaactgagataatacacaggtgataaacagtttcaagaaaataaaaattggctagaatctcaagttatgtgtttctatattggtataagcatataagtgaaaagtcttataagtgtaatagagaaaagatttgtcagtgtgtttttttaaatgaaataactagtctgtgctactttatgtcaatataaaaattggtaaacaagaagtaacttgtccacaaccctcagttatgatacttatgtgcgtgtttttttttccaaagtttttcccaaggagaagatacaaatatatggtagctattgtttaaaaatgattgatttacttgcagatttttcagaggatgttatgtctttgtcattcattaaatgttcaaaattgtagttttaccaaatctgaagtgccatcagttataagaatcaccattattttatgttccattaagaaaaacacaataaaacatgacactgctttttttgttacttgaaaaaaaaaaaaaaaaaaaaaaaaaaaaaaaaaaaaaaaaaaaaaaaaaaaaaaaaaaaaaaaaaaaaaaaaaaaaaaaaaaaaaaaaaaaaaaaaaaaaaaaaaaaaaaaaaaaaaaaaaaaaaaa

SEQ ID NO: 26790 - DNA, 1660 bp, Homo Sapiens
gagaccaagaagcgggacgttcaccatgggaagaaaatcgctgtaccttctgattgtggggatcctcatagcatattatatttatacgcctctcccagataacgttgaggagccatggagaatgatgtggataaacgcacatctgaaaactatacaaaatttggctacatttgtggagctcctgggacttcaccattttatggattcctttaaggttgtcgggagctttgatgaagtcccaccaacctcagatgaaaatgtcactgtgactgagacaaaattcaacaacattcttgttcgggtatatgtgccaaagagaaagtctgaagcactaagaagggggttgttttacatccatggtggaggctggtgcgtgggaagtgctgctctaagtggttatgacttgctgtcaagatggacagcagacagacttgatgctgtcgtcgtatcaaccaactacagattagcacctaagtatcatttcccaattcaatttgaagatgtatataatgccttaaggtggttcttacgtaaaaaagttcttgcaaaatatggtgtgaaccctgagagaatcggtatttctggagatagtgcaggagggaatttagctgcagcagtgactcaacagctccttgatgacccagatgtcaagatcaaactcaagatccagtctttaatttatcctgcccttcagcctcttgatgtagatttaccgtcatatcaagaaaattcaaattttctatttctatccaaatcactcatggtcagattctggagtgaatattttaccactgatagatcacttgaaaaagccatgctttccagacaacatgtacctgtggaatcaagtcatctcttcaaatttgttaattggagttccctgctccctgagaggtttataaaaggacatgtttataacaatccaaattatggcagttctgagctggctaaaaaatatccagggttcctagatgtgagggcagcccctttgttggctgatgacaacaaattacgtggcttacccctgacctatgtcatcacctgtcaatatgatctcttaagagatgatggactcatgtatgtcacccgacttcgcaacactggggttcaggtgactcataaccatgttgaggatggattccatggagcattttcatttctgggacttaaaattagtcacagacttataaatcagtatattgagtggctaaaggaaaatctatagtaaaacatgtagctataacatattttaaaaataaaatctgaaaacctcagaaaatttgcattagaaattggtctttcttagaatggtctagttaagttccacatgtagcataattcttaaataggcacttttctgttttttttttcttactgtgggatttcatttcaattttctacattgtctatctgctttttctgagattttccttcttacactgttaatcttattttaaaaaatattacattcttgtatactttatttttgtgagttggctactatttacgatgcaagagaataaatgtgagcaaatattgccaaaaaaaaaaaaaaaaaaaaaaaaaaaaaaaaaaaaaaaaaaaaaaaaaaaaaaaaaaaaaaaaaaaaaaaaaaaaaaaaaaaaaaaaaaaaaaaaaaaaaaaaaaaaaaaaaaaaaaa

SEQ ID NO: 26791 - DNA, 1973 bp, Homo Sapiens
ctttgaaaaagacttcttttgagctaactttcttatactggtacctttctaatctcactacaatatgtaacattggtgttcgatctcaagtatttctgaatatattcccctatccacagaaatatactctggggaaaaaaaaatagaacaaattcttgccgtcctgaccattgaacaagagactaattagacaatggggctagaaaaacctcaaagtaaactggaaggaggcatgcatccccagctgataccttcggttattgctgtagttttcatcttacttctcagtgtctgttttattgcaagttgtttggtgactcatcacaacttttcacgctgtaagagaggcacaggagtgcacaagttagagcaccatgcaaagctcaaatgcatcaaagagaaatcagaactgaaaagtgctgaagggagcacctggaactgttgtcctattgactggagagccttccagtccaactgctattttcctcttactgacaacaagacgtgggctgagagtgaaaggaactgttcagggatgggggcccatctgatgaccatcagcacggaagctgagcagaactttattattcagtttctggatagacggctttcctatttccttggacttagagatgagaatgccaaaggtcagtggcgttgggtggaccagacgccatttaacccacgcagagtattctggcataagaatgaacccgacaactctcagggagaaaactgtgttgttcttgtttataaccaagataaatgggcctggaatgatgttccttgtaactttgaagcaagtaggatttgtaaaatacctggaacaacattgaactagaaactcagaaagtggtccttgtgatggaaagagaaaagaaaaaccaattagaataaggcagaatgtacgtgcgtcattggaacacagaaaacatgctggttcatacagcgtttttagtcataatggtcttttttattttgtttgattcattcgagacaacatgtgtgtatgtgtgtgtgtgtgtgtgtagataatgtggtttttgtatggtgtttgatggaaggaataatctttctttgctttcttagtagtatttcaaggtgtttacttttcaattggtgtgcactgaatgcatgtatggaagaatagcgtgaataatgcaatctctttgtcatttttccccttctcagactcttagctcttaaaattcaaagatgggatattctaactggtagtggtgcatcatttttaacccaaatattgcaagcactttaaagatttgaaaccacatttttattgtttgatgtttcattttcagactttttaatgtcagtcattacaattacattgcatgaggaaaatttttccagaacaacagtgtggaatagttctgaattatgctgttctacagatagaaaaaaagtccaaatgcctttaaaaatttacttcttactccacccaacacgtttttgcaaagcaagaagtctttgtaagacaccttaaacaaagtccttcaattctacagcagaggaaataaaatcccccagaagccaaagggctcaccttcacattgttagttcatgacagacccaggtgtgcttcattagagataacatacattccctttggtatcacaggaagttactggggattactcgacctcattacttagctaacgactggataaaatttcttaattgtttgaagtaacattgtattcgtgtttgcattattaatttgaatagaaaataatcacattttcaacccatttatacaaattgttaatgtttctttagagctgtataactatagtttgaactagcaaggaagttattgttttgacaaccagaaattatgcttttctggtgcatgaaacattaattgcaaagggcagtcacatccaactttaataaaatatggtggtctttcttaaaaaaaaaaaaaaaaaaaaaaaaaaaaaaaaaaaaaaaaa

SEQ ID NO: 26792 - DNA, 1077 bp, Homo Sapiens
cctctgttcccgggtccctcaggcggccacccagtgggcacactcccaggcggcgctccggccccgcgctccctccctctgcctttcattcccagctgtcaacatcctggaagctttgaagctcaggaaagaagagaaatccactgagaacagtctgtaaaggtccgtagtgctatctacatccagacggtggaagggagagaaagagaaagaaggtatcctaggaatacctgcctgcttagaccctctataaaagctctgtgcatcctgccactgaggactccgaagaggtagcagtcttctgaaagacttcaactgtgaggacatgtcgttcagatttggccaacatctcatcaagccctctgtagtgtttctcaaaacagaactgtccttcgctcttgtgaataggaaacctgtggtaccaggacatgtccttgtgtgcccgctgcggccagtggagcgcttccatgacctgcgtcctgatgaagtggccgatttgtttcagacgacccagagagtcgggacagtggtggaaaaacatttccatgggacctctctcaccttttccatgcaggatggccccgaagccggacagactgtgaagcacgttcacgtccatgttcttcccaggaaggctggagactttcacaggaatgacagcatctatgaggagctccagaaacatgacaaggaggactttcctgcctcttggagatcagaggaggaaatggcagcagaagccgcagctctgcgggtctactttcagtgacacagatcctgaattccagcaaaagagctattgccaaccagtttgaagaccgcccccccgcctctccccaagaggaactgaatcagcatgaaaatgcagtttcttcatctcaccatcctgtattcttcaaccagtgatcccccacctcggtcactccaactcccttaaaatacctagacctaaacggctcagacaggcagatttgaggtttccccctgtctccttattcggcagccttatgattaaacttccttctctgctgcaaaaaaaaaaaaaaaaaaaaaaaaaaaaaaaaaaaaaaaaaaaaa

SEQ ID NO: 26793 - DNA, 1656 bp, Homo Sapiens
ttagtgggtctagagataatggaatcaagaaatgggacttaactcaaaaagaccttcttcagcaagttccaaatgcacataaggattgggtctgtgccctgggagtggtgccagaccacccagttttgctcagtggctgcagagggggcattttgaaagtctggaacatggatacttttatgccagtgggagagatgaagggtcatgatagtcctatcaatgccatatgtgttaattccacccacatttttactgcagctgatgatcgaactgtgagaatttggaaggctcgcaatttgcaagatggtcagatctctgacacaggagatctgggggaagatattgccagtaattaaacatgaatgaagataggttgtaaactgaatgctgtgataatactctgtattctttatggaaaatgttgtcctgtacttactaggcaaaacgtatgaatcggattaactggaaaatatatctgaattcaactgctgactataaatggtattctaataaaattgtgtactatcctgtgtgcttagttttaagatcaaccaatagatatatatcctacaattgatatattgctttattcgcacttttattgtggctgaatttttgtgcctatctataaaacacactttcaaattatttgaattaccaagacgtctgcttttgtgacagtcagaaaacacacctggaatacgatgcagcccaccattaactcattcatgtagtttattcaagtgatttatgtatttaaactaaatattgaaaatgttagtcaaattgtggtttgcttgtcaggtatttatatcagtctgtagtgggttcccaaatttcaaagctcttttaatgtaatggacaaaaataagatatgagaatattattgatgaattttcataaggtggaattgatcttaatctactaacagagaagggtagacagtttgtgttaaatgttggcatttacttgtattgaccaaagttttgcagctctactatattctgtgctcaggactaaaatgctgttaattttttttttttttccagtgctgtgcatatattctgtgatgggaaacattgttgatgtcctaacagaaatatattttgatctattttcctatggagttgtttctattatgaccatttaattttgtttttatttaatagtagtatttccttcccttttatctaattttttatatgctgctaaatatattttaaatatactatgtttgcgaaccttggtagctatgatgagagctattatcatctgtggtgggaaaagctatgtaaataggtagattgtatagagagactatcttgtgttgtgcctgtatgaatttttaaaagttgttgactggattttgcaaaaggatgtataatatttctgtctgctcagaatattaatttgtaaattctgcaagtttaatttttatgtagatggtataacatttgaaaatattgtcttatgtgattttttcccctgaaaatatttgcttgtaaatgaaaacttagctagggcttaaataaacatgttgctatgaaattaaaaaaaaaaaaaaaaaaaaaaaaaaaaaaaaaaaaaaaaaaaaaaaaaaaaaaaaaaaaaaaaaaaaaaaaaaaaaaaaaaaaaaaaaaaaaaaaaaaaaaaaaa

SEQ ID NO: 26794 - DNA, 2728 bp, Homo Sapiens
catggcagaaaggctgttctgcccctgcgccctccctggcctctctggggatccctgcagctgatgtattgtgatggagcagtggacttggatgctgctgcggagctccctgggtcctcagcagtgaggctggcctccctgcgtgacctgcccgcccagctcctggagctgtaccagcagggcttctcgctggcggccctgcaccccttcgtgcagcccacccatgagcgggagaagacgcccctggagcacatctttagagccatcctgatcaagaaaaccgacagatctcagaaaactgatcttcacaatgaaggctacatcttggaattagattgctgttcctccttagaccacccgacagaccagaaactcatcccagagttcattaagaagatccaggaggctgcaagccagggcctgaaattcgttggtgttatacctcagtaccattcctctgtgaactcggcaggcagcagtgctccggtgtctactgccaacagcaccgaggatgccagagatgcaaaaaacgcacgtggggatcacgcgtcactggagaatgagaaaccggggactggggatgtgtgcagtgctccggctgggagaaaccaaagcccagagcccagctcaggccccagaggggaggtgcccctcgccaagcagcccagctcaccctccggagagggagatggtggagaactttcaccacagggggtgagcaagacactggatggaccggagagcaaccccttggaggtgcatgaagagccactctcagggaaaatggagatcttcacccttttcaacaaaccgaagagccatcagaagtgccggcaatactaccctgtcaccattcctctccatgtctccaagaatggccagacagtgagcggtttggacgccaactggttagagcacatgagcgaccacttccggaaaggaggcatgctggtgaacgcagtcttctaccttggaatagtgaatgattccttacatggcttgacagatggagtattcatctttgaagctgtttccacagaagatagcaaaaccatacagggctatgatgctattgtggttgaacaatggacagtcctggaaggtgtcgaagtgcagacagactacgtgcccctgctgaactcgctggcggcctatggctggcagctcacctgtgtgctaccaactcccgtcgtcaagactaccagcgaggggagtgtatccaccaagcagattgtctttcttcagagaccgtgtctacctcagaaaatcaagaagaaggaatcgaagtttcagtggcgattctccagagaagaaatgcacaacaggcagatgaggaaatcaaaaggtaaactcagtgccagagacaaacaacaagcagaagaaaatgagaagaacttagaagaccagtcttccaaagctggagacatgggaaactgtgtttcgggacagcagcaggagggtggagtctccgaggagatgaagggccctgtccaagaggacaagggagaacagctgtcccctggtggcctgctgtgtggggtgggtgtggagggtgaggctgtgcagaatggtcctgccagccacagcagggccctggtggggatttgcactgggcactccaatcctggagaggatgccagggacggggatgctgaggaagtcagagagcttggtacggttgaagaaaactgagtcttgggcaatttgtgctaaaactaggtgagttgccaaacccaaggcatcttaccaacagctggtttgggggctggtttccctggtgttgtgtgttacctaccctttggcttggcttgacctctccttgtgagctcacctgagccctcccagggccaggttcctgacagtgttggtttttgcacatccactggaaaggtgtcattaatgacccagtgttagaatgcaagaggtcaggttattctagccctcatggctgaaggcccagtcctggctccaccactcctccagccagagggtctggaccatccagtgcctgtcctcgccacagggcctccagggagcattcgggtcaaatccatggacaccctgggcaacaaaccaaggctgctgttcatcccacatcgtgtggggcagtgtccatcccctgcagctacttggtgacttaacaactccaggagccctgtcagctgccctcctccacctaaaccccttcgactcttctgctttgacaaagaaaatgacattggggaggggaggtgctccgcctcccagcttttctcaaaatagtcctatagatactggtaatctggaaatgaagaagtaattctgtctctgcacctactcttgcagaatgttcaaggaagtattctgtgttagtattaatgccaaaaagttgtttttaaaggttttgtactcagcacatcatacaaaccacattacttctgtcacttcagggcatcgggactggctggcgcccttgttatgtgctattttaatcagtgtaacattggtcaagttgttacccatgtatgctgtgtttatcatgtgtatatcgtccagaaagtattaaggctttaggtagatgcaactggcgaaccttggagagggaatgctgattgtcttgaccaaacccacagcctgtctcttctcttgtttagttacttacggcaataaatcatctatgagttagtgcaccgtgaaaaaaaaaaaaaaaaaaaaaaaaaaaaaaaaaaaaaaaaaaaaaaaaaaaaaa

SEQ ID NO: 26795 - DNA, 2585 bp, Homo Sapiens
tgggcgaatcagggattccggttcacaatggatgctgataaagagaaagatttgcagaaatttcttaaaaatgtggatgaaatctccaatttaattcaggagatgaattctgatgacccagttgtgcaacagaaagctgtcctggagacagaaaagagactactgcttatggaggaagaccaggaggaggatgaatgcaggaccaccttgaacaagactatgatcagtcctccacaaactgctctgaagagtgcagaagaaataaactcagaggccttcttggcatctgtggagaaggatgcaaaggaacgagccaagagaagaagggaaaacaaagtcttggcggatgccctaaaagaaaaagggaatgaagcatttgctgaaggcaattatgaaacagctatcctgcgctacagtgagggtttggagaagctgaaggacatgaaagtgctgtacaccaaccgagcccaggcttatatgaaacttgaggactatgagaaggcactggtggattgtgagtgggctctcaagtgtgatgaaaaatgcacaaaagcatattttcacatgggaaaagccaacctggccctgaagaactacagtgtgtctagagagtgttataagaagatcttagaaataaaccccaagctgcaaacccaggtgaaaggttacctgaatcaagtagatcttcaggaaaaagcagaccttcaagaaaaggaagcccacgaactgctggattcaggaaagaacacagccgtgaccaccaagaacctcctggagaccctttccaagcctgaccagatccccttgttctatgctggggggattgagatcctgactgaaatgataaatgagtgcacagaacaaactttattcagaatgcacaatggatttagtatcatcagtgacaacgaggtcataagaaggtgtttttccacagcaggaaatgatgcagttgaagaaatggtctgtgtgtctgttctcaagctctggcaagcagtgtgcagcaggaacgaggaaaaccagcgtgtgctagtgatacaccatgacagggccaggctgttggccgccctcttgtcctccaaggtcctggccatccggcagcagagctttgccctgctgctgcatctcgcccagactgagagcggacggagcctgatcatcaaccaccttgacctgaccagattattggaagcgctggtgtcatttcttgatttctcggataaggaggccaacactgctatgggactgttcacagacttggctctggaagaaagattccaagtctggttccaggccaaccttccaggtgttctccctgcactcacaggcgttctgaagacagatcccaaggtaagcagctcctcggctctgtgccagtgcattgccatcatgggaaacctcagtgctgagcccactacccgaagacacatggcggcctgtgaggaatttggggatggctgcttgagcctcctggccaggtgtgaggaggatgtggacctgttcagagaggttatctacacactcctgggactcatgatgaacctgtgtcttcaggctccctttgtctctgaggtttgggctgtggaggtgagcagaaggtgcctgtctttactaaacagccaggatggaggaatcctgacaagagctgctggtgttctgagccggaccctttcttcctctctgaaaattgttgaggaggccttgcgagcaggagtggtaaagaaaatgatgaaattcctgaagacaggaggtgagactgcatcacgttatgctataaagatactagctatctgcacgaatagttatcatgaagctcgggaagaagtaataagactggataaaaagttgagcgttatgatgaagctgctcagctcggaggatgaggttctggtgggcaacgctgccctctgccttggtaactgcatggaggtgcccaacgttgcgtcttccctgctaaagacggaccttttgcaggtcttgttaaagcttgcaggcagtgacacacagaagacggccgtgcaggtgaacgcaggcattgctctggggaagctgtgcacagctgagcccagagtgcctgccgagagcagtcatctccaatttggaagagagtctgctgcacctgaagctctgtctcctcgcaggtgggaagagatgtttcacatgctagtattctccctctccagtgtggatccacccccgccaccgccccaaacttgttacccctaacacatgctaccatgcagaccttccaggcagcatggaaaataccagcgccatctttcagaaggcctcatctccacttgccaggagccccgacaccacccttggagacacggcttgttccagatgaggaaactgaggtgcaaagcagttaagcaactggtccaagatctagaccaggtactcaaccaccccactccacatgcaactgtccccaacccatgcgattcatcctttccctgaaggcttgtgtggtgctgccttttaaattcataacataatgacttcattgttatgaaaaaaaaaaaaaaaaaaaaaaaaaaaaaaaaaaaaaaaaaaaaaaaaaaaaaaaaaaaaaaaaaaaa

SEQ ID NO: 26796 - DNA, 4014 bp, Homo Sapiens
cacacctccctccagggcccggggcgctgtcagacggggcagcaaccaggagattccctgggcctgcaggaagcccttccgcggaccgaaagattgttccccattttggagatgaagaaactgagactcaaagcagctgagtgaccttcccaaggacacacactgaactgggcggtgatcaggatctgaatgcacagggcgggtgttcagcgattgtttactacgttgaacgtgacctccaggaaagcagttctggccgagatcccctgacaacgcaaagcaagaagtaacgtggaaggaggctccccaagctggctggccattttgctgctgtgtgtggaggtgctgtcagtggcatgcccaaacccaaagctggaagaggaataaattacaagtggtcaaggttgcatccttttgagcccaggacctgcttgtaagccgagagggttctctggccctaatctagccaagcaccatggagagaatcagtgccttcttcagctctatctgggacaccatcttgaccaaacaccaagaaggcatctacaacaccatctgcctgggagtcctcctgggcctgccactcttggtgatcatcacactcctcttcatctgttgccattgctgctggagcccaccaggcaagaggggccagcagccagagaagaacaagaagaaaaagaagaagaagaagaagaaggatgaagaagacctctggatctctgctcaacccaagcttctccagatggagaagagaccatcactgcctgtttagttaggcaggaagcagaggtgtttcctttctggggctaagcctccttctgaccacacacagacatttcaggaacccctgaaataatgcactatgtccatgtccacagagtaactactcaaccaaggaacaaacctcagactaagtgtcccagtggagggaagtcccagggaccacgtggacaattcttggatactgtcttggcagctatgtgtccaatagcaatgctccttactgcagacccaggcatgcctcccacctgtctctggcataccccacatgcaaagcacaaagaacatttatccatacatctcaatatggttcccaagtgtgtgcacatgcacgtaacacacacacacacaaattcaggtagcaggtacgtgggcaagtatattctgctcatcaaatggtcattggctatgtactttgtgcagggaagtacattatctacagtcacaaaaatgtctcatgggaaagccttgccagattcagacacatatatacaatttcctaaccagcaaggcccccatacaccatctattccataaaccactcaggttacagatgcatgctttcctatttctaactctacacataaacttttactggaagtactcataattggacattccagcaacctgctacagtccccacccttgtgtgtcttgatacagacacaccaagtttctgtgcctctgacccctcacctgtgccaagatgtttaaagtgtgatggttcaaaattcattgaaagctcttttcttgtaactcatgacaaagtccgtcctcattgccactgagaggtgtttaatgtgatccaagacctctctgtgaaacattacccccgcaaaccactcagcaaagtgcctttctccaagcaagaacaaagagctcttggtggtgactgctagaaaattatggaagcccactcatttatgtcagtggactgcaactgtgtacctgtgcaatgtttacagatggaaagggtgaggagatgctacacctgagctaggtatctcctatataaccaaagtttccagcagggaaggaactagacaatcatcagtgcagtctcacagaaggcaacactggaagtgatgtcataaggttgtgatgtgtgcacggtatggcacaggtgggattcagaggtaacagagtttaaatgaaagtaggatgaagctataaagaggtttatttatatttatattgaagctcaggcaagtgccttgcacacagtaggtacttataactaactgtggttactgttggatatgtgatgttgttaagggtaagcttgtaatacctcaccagttctccccgagtgatcttctcttctaagtgagcccactaattgctgcaatggatgaaattgggtgtttaatgctggagagcacatgtaggtgacacatgtgccttgaggtatgtgaggacatgtaaattagatccacagtgagctgaggagggctttccccgccagagtgaggttgggaagcagagttaatccacttataggatgaactgcttggtatttttattgtattgtgactgtattacaaagatggacaattcactccttgggagcaagttatgctctagaagtttatttacaaatatgctgggcagctctcttgaaatattttcccaaggaagctattctacacagtggcaaaattgctatctaattaataatgtagctaaactatgatatttatagtagcaaaaaactaaattctataagattgcattaaaggaaagatatattctatttgctcacttgggctgcttggtactcacctgccctccaggtgtactttaggcctgtggagggtgggcatttagtggtgacccttgcaccagggttttctaacagatgaccctgtgaatcataatttaaacctgcatatattttatagccagtcacatttgccctctcaccctatatggccataaactgcctaagcactcaggcctcccactcatcaacccctttgaccagagaaagaagcactctggttctctatccccttgtcacatagagagtttgtcatggggcctctggctgtgcccttcacataacagaatgacttgccatctgcctgcaccaaacccagggatgtggaagacatctccccacaactgccactgctcaccaggacaagctgcccttcctgtctccacctctcagtccccctagaatggatggctggggagaggtggaggctgacagctgagacgtagtgtcagatatgatctaggagggcggatcaccgggatccgggaccatacaagtaacatggtttccatggcaactgcttgctcctttgaattaagacagcagtcagttgtcattgccatgacaaggcctctatctccaggcacaatgtccctgctgtctcctaatccaatggacttgctctcaccccagggatgaaacacccagaaactcacttctcagtcacttccacagccgatgactcagaagagccaaacccagaatggggcctctcttttccccatcacagactcccctgacaacctttcctggcgtaactagaggagtcccagtgcaggataggccctaaacgttttgttaaataaacaggtgcatgaaaggagcctaaggccattgttgatatccactctcttctttccacttccttctcatctttttctccatgttttatgcttctctgattccctcttctgcctgcaccagaccagccccagccctttattcctctccattttcactccttccagcctctgtccctgaactgccactggcaacccatgggacctcaggaccagagactgcttgactcatctggggagggtaagttcacgggggacaaaaaaatgattcctaaagaagaggcttcctagaccagcacaggctcgagaaagacatcccctaggcctggacttctgagcagctttagccaggctccggacggcagccagaggaggcctttccccattgctcctttccccattgctcaatggattccatgtttctttttcttggggggagcagggagggagaaaggtagaaaaatggcagccacctttccaagaaaaatataaagggtccaagctgtatagtatttgtcagtatttttttctgtaaaattcaaacacacacaaaagaaaaatttatttaaataaaatactttgaaaatgaaaaaaaaaaaaaaaaaaaaaaaaaaaaaaaaaaaaaaaaaaaaaaaaaaaaaaaaaaaaaaa

SEQ ID NO: 26797 - DNA, 1405 bp, Homo Sapiens
ggaggtgcgacagacccgcggggcaaacggactggggccaagagccgggagcgcgggcgcaaaggcaccagggcccgcccagggcgccgcgcagcacggccttgggggttctgcgggccttcgggtgcgcgtctcgcctctagccatggggtccgcagcgttggagatcctgggcctggtgctgtgcctggtgggctgggggggtctgatcctggcgtgcgggctgcccatgtggcaggtgaccgccttcctggaccacaacatcgtgacggcgcagaccacctggaaggggctgtggatgtcgtgcgtggtgcagagcaccgggcacatgcagtgcaaagtgtacgactcggtgctggctctgagcaccgaggtgcaggcggcgcgggcgctcaccgtgagcgccgtgctgctggcgttcgttgcgctcttcgtgaccctggcgggcgcgcagtgcaccacctgcgtggccccgggcccggccaaggcgcgtgtggccctcacgggaggcgtgctctacctgttttgcgggctgctggcgctcgtgccactctgctggttcgccaacattgtcgtccgcgagttttacgacccgtctgtgcccgtgtcgcagaagtacgagctgggcgcagcgctgtacatcggctgggcggccaccgcgctgctcatggtaggcggctgcctcttgtgctgcggcgcctgggtctgcaccggccgtcccgacctcagcttccccgtgaagtactcagcgccgcggcggcccacggccaccggcgactacgacaagaagaactacgtctgagggcgctgggcacggccgggcccctcctgccagccacgcctgcgaggcgttggataagcctggggagccccgcatggaccgcggcttccgccgggtagcgcggcgcgcaggctcctcggaacgtccggctctgcgccccgacgcggctcctggatccgctcctgcctgcgcccgcagctgaccttctcctgccactagcccggccctgcccttaacagacggaatgaagtttccttttctgtgcgcggcgctgtttccataggcagagcgggtgtcagactgaggatttcgcttcccctccaagacgctgggggtcttggctgctgccttacttcccagaggctcctgctgacttcggaggggcggatgcagagcccagggcccccaccggaagatgtgtacagctggtctttactccatcggcagggcccgagcccagggaccagtgacttggcctggacctcccggtctcactccagcatctccccaggcaaggcttgtgggcaccggagcttgagagagggcgggagtgggaaggctaagaatctgcttagtaaatggtttgaactctcaaaaaaaaaaaaaaaaaaaaaaaaaaaaaaa

SEQ ID NO: 26798 - DNA, 3114 bp, Homo Sapiens
ccacgcgtccggccaagatgacagaggggaccaagaagaccagcaaaaagttcaagttcttcaagttcaagggctttgggagtctctccaacctccctcggtccttcactctgagacgatcctcagcttccatcagtaggcagtcccatttggagcctgacacctttgaagccacgcaggatgacatggtgacggtgcccaagagtcccccagcctatgcccgctccagtgacatgtacagccacatgggcaccatgcctcgccccagcatcaagaaagcacagaactcacaggctgcccggcaggcccaggaggcgggtcccaagcccaacttggtacccggaggtgtacccgaccccccaggcttggaggcagccaaagaggtgatggtgaaggccactggccctctagaggacaccccagcaatggaacccaacccttcagcagtggaggtagaccccatcagaaagcctgaggtccccacaggagacgtagaagaggagagacctcccagggacgtgcactcagaaagggctgctggagagccagaggctggcagcgactatgtgaagttctccaaggagaagtacatcctggactcatcgccagagaaactccacaaggaattggaggaggagctcaaactcagcagcacggatctccgcagccatgcctggtaccatggccgcatcccccgagaggtctcggagaccttggtacaacgcaacggcgacttcctcatccgggactcactcaccagcctgggcgactatgtgctcacgtgccgctggcgcaaccaggccttgcacttcaagatcaacaaggtggtggtgaaggcaggcgagagctacacacacatccagtacctgtttgagcaggagagctttgaccacgtgcccgccctcgtgcgctatcatgtgggcagccgcaaggctgtgtcagagcagagtggtgccatcatctactgcccggtgaaccgcaccttcccactgcgctacctcgaggccagctatggcctgggacaggggagtagcaagcctgctagccccgtcagcccctcaggccccaagggcagccacatgaagcggcgcagcgtcaccatgaccgatgggctcactgctgacaaggtcacccgcagcgatggctgccccaccagtacgtcgctgccccgccctcgggactccatccgcagctgtgccctcagcatggaccagatcccagacctgcactcacccatgtcgcccatctccgagagccctagctcccctgcctacagcactgtaacccgtgtccatgccgcccctgcagccccttctgccacagcattgcctgcctcccctgtcgcccgccgttccagtgagccccagctgtgtcccggaagtgccccaaagacccatggggagtcagacaagggcccccacaccagcccctcccacacccttggcaaggcctccccgtcaccatcactcagcagctacagtgacccggactctggccactactgccagctccagcctcccgtgcgtggcagccgagagtgggcagcgactgagacctccagccagcaggccaggagctatggggagaggctaaaggaactgtcagaaaatggggcccctgaaggggactggggcaagaccttcacagtccccatcgtggaagtcacttcttccttcaacccggccaccttccagtcactactgatccccagggataaccggccactggaggtgggccttctgcgcaaggtcaaggagctgctggcagaagtggatgcccggacgctggcccggcatgtcaccaaggtggactgcctggttgctaggatactgggcgttaccaaggagatgcagaccctaatgggagtccgctggggcatggaactgctcaccctcccccatggccggcagctacgcctagacctgctggaaaggttccacaccatgtccatcatgctggccgtggacatcctgggctgcaccggctctgcggaggagcgggcagcgctgctgcacaagaccattcagctggcggccgagctgcgggggactatgggcaacatgttcagcttcgcggcggtcatgggtgccctggacatggctcagatttctcggctggagcagacatgggtgaccctgcggcagcgacacacagagggtgccatcctgtacgagaagaagctcaagccttttctcaagagcctcaacgagggcaaagaaggcccgccgctgagcaacaccacgtttcctcatgtgctgcccctcatcaccctgctggagtgtgactcggccccaccagagggccctgagccctggggcagcacggagcacggcgtggaggtggtgctggctcacctggaggccgcccgcacagtggcacaccacggaggcctgtaccacaccaatgctgaagtcaagctgcaggggttccaggcccggccggagctcctggaggtgttcagcacggagttccagatgcgccttctctggggcagtcagggtgccagcagcagccaggcccggcgctatgagaagttcgacaaggtcctcactgccctgtcccacaagctggaacctgctgtccgctccagcgagctgtgaccccagggacatttcccctctgcagctgcggacagcgtcaggggcagaggggcacacaactttccccagagcaccccaaggacactgtgatcaacccgagaatgttctgggttcaactcaagcatctcccttgcacctccagggtcctgcgtggactctgggttccatcccacctgctacatgctcaccaggtctccattgaggaagaacaggaacgccggttcccccaccagcttttgctgctccccttcctgctggggttccctgttttcgagccatgggaggcaggctgctcacgcctcctcactctctgtctgtccctcaccaacaccaaggcctccatctcactgtaaataagtctctgttctgtaaatagatgtacagaagccatgttatttctttcatataataaacttttatgactcttaaaaaaaaaaaaaaaaaaaaaaaaaaaaaaaaaaaaaaaaaaaaaaaaaaaaaaaaaaaaaaaaaaaaaaaaaaaaaaaaaaaaaaa

SEQ ID NO: 26799 - DNA, 1261 bp, Homo Sapiens
ggctgggccggcgggccgggcccgaggctggctctgaggccggggcggcggccggctgcgggcccgcgccctacgagcgccgggtgcggtggctccgcgagatccagtccacgctccgcgagcggcggccggagcgcgcccggcagctgctgcgcctcctgcgccaggacctgggccttgagaggaccctccttcctgatatcctctacagagatgtggccttcctcaacccggtcgaccccatctcccatgacctgcttgtgaacctggcccgggacctgcagtgccccaagaaggactatgagctctggaagtcctcggacaagatctgccgacagctcatctaccacctcacccctcactcgaagcagcagcaagggtccagcctgcgccagaggaagacccagagctgcctcaagagcagcctccagaagactctgctggcaggggagactgtggacctctcaggcatcccgctgtcgacacaggacgtgcaacacatcacacgctacctgagcagccatggtgctgtgctggcggtgctggacctgagcttcacggggctgagtgatgagctgctgcacctcctgctgcccagcctgtgggcgctgccccgcctcacccagctcctgctcaacggcaaccgactgacgcgggccactgcccgcaagctcactgatgccatcaaggacaccaccaagttccctgctttggcttgggtggacctgggcaacaacgtggatgtggcttccctgccccagcccctgctggtcggcctgcgccggcggctgagccagcgcacctcactccccaccatctacgagggcctggaccttgagcctgagggcagtgcggccggggccaccacccctgcctccacctgggactccacagctgctgggctgggacccgagccccaggcctgctgtgccaggtgacccaccacccacctggctcattgctactgacttgtgatgctctcaagcacatgatagtgggcgatgaaggtcaaggaggactcacaggcccccagaaatccagtgtaaatgctcagcctgagattaaggggacagaagaatggactcataggtggccaggtggccagccctggctagaggctcagccttccctcagtgggaggggccccagcacccacagtgtggaccccgcaataaagagtgacacccgcaaaaaaaaaaaaaaaaaaaaaaaaaaaaaaaaaaaaaaaaaaaaaaaaaaaaaaaaaaaaaaaaaaaaaaaa

SEQ ID NO: 26800 - DNA, 1818 bp, Homo Sapiens
ggaagttcatcagtagagtggacatcatggcggtttgatctagcagcacaggagtcattaaagaaccagtttctctttctctgttttgccatctgtagttttgggtatatcctgaggttgataggttcagtgagagggagagattgacttcccatggctgcctcttaaatcaaatgatctacaatcctagagattccagtagatatctgattgcagcttaggtgttagaaaattataattatctgcagatgcctagatcctttgaacaagtaataatacttaaaaaatggtttctgaaaccttataagggacaaactctgcctgggcgagtccttttcctgcgttatgtcgttcagaccctagaagatgactttcagcagaccctgaggaggcaacggcagcacctgcagcaatccattgcaaacatggtgctttcctgtgacaagcagccccacaatgtcagggatgttatcaagtggctggtcaaagcagtaactgaagatggattgactcagcccccaaatggaaatcaaacgtcttcaggaacaggaatcttgaaagccagcagtagccacccttcttcccagcccaacctgacaaagaacaccaatcagctgattgtgtgccagcttcagaggatgctctccatagccgtagaggtggacaggacccccacctgcagctccaataaaattgccgagatgatgtttgggtttgtgctggacattcctgagaggagccagagagaaatgttctttactaccatggaaagccaccttctgcgctgcaaagtgttagaaatcatattcctccacagctgtgagacacccacccgcctgcctctgtctctggcccaggccctctactttctgaataattctacgtcactgctcaagtgtcagtcagataaaagccagtggcagacttgggacgaattggttgagcatctgcagtttctgctgtccagttatcaacatgttttaagagaacacttaaggagttccgtgatcgaccgaaaggacttaataatcaaaaggattaagcccaaaccccagcaaggagatgacatcacagtggtagacgtagagaagcagattgaggccttccgcagccgcctgatccagatgctgggggagcctcttgtcccccaactccaagacaaagtgcacttgttgaagctcctgctcttctatgctgcggacttgaaccctgatgcagagccctttcaaaagggctggagcggctcctgagggcctgccaagcactgaatgccaagaatacctcctgaactctctctccaactgctcagaagctctaaaagcatgaaaagtggttaaaatcttacaggaccaaacctgcattatttaatcagtaggttgtaatttctaactctagtaaatatctttttttaaataatcctatcctagcctgttctcaaatatggcttaaatatacaaggtatatatattttttaataaattatttatctatacttttttgaaacaggttaatactctgtgcatcacatgtttaacattttcattcaagatgtggaaaaaatccctctgctgaacctagtctatacaccaatattatgtcattcaaggtaccgacaacctgtttcaggagagagacgttcatttttccctaatgaaatgcaagcattctgttagacctattatattgcctgttaatttgactgtaatgaatagggggtagaaacaaaaggatcaagtgtgttataaaacatttgatgttaaaaggagacaataaaaaggcaatggtttttcaaaaaaaaaaaaaaaaaaaaaaaaaaaa

SEQ ID NO: 26801 - DNA, 1642 bp, Homo Sapiens
gaaacattttagtaatttaataaaaggataatgtttatttaaaaaacctgacttttccagagtaattttgttttgcacattcatgtttattgaagtggactaatttctataatgcaaatcagagttaaatattaaaaattgtgtaaatacaattgacataggaattacattaaaatattaggaagaaacaaggacaaatttagaccttgaatccgaagagataaagcttacttgactttcaaatggagagatgatgaaaacccactcattcagtctttcagaacaaaaagacagtcatctgataagagtatgacatggatgaaatgccctacaggggccttggacatctttaatttctgcgattatgtgaaagaggtggactttacagataatggagcagaagccaacattagtaaaaggaatcccaacttcttcccatagaattagaaacatgtgaaagtacaataaacttcttgttcaaattaccagcatcagagagcttcccatttgcatctagaccttgaatttatatttattgatcaagttctaatttgtatgtatattttgtgcatattcaccaataacagttaaaattaattatgtgttatagttaatatatgcacctaccttcttccgttagtgcatcagtaaatgtgttattttgtcatttttccaaagagagtgttgtaggttttccctgtagttcttcctttatagcttttcttctgataaccatgacttcaggagctttaaaactatctatcttgcatttgtgtctggcggagaactagccatcagcctcctgaagcctgccatcattgttaatttgaggactgggctgtcttggggctcagaaggtaaagaactatttgagcagatgtgtgtgggtggcactggattccacccaactgccaagttagtattgttagagatttcattttacaacacaaaaataagcctgtgtcaaagattttaaaatcatggaaagttaaaatctagaaagaccttagagaaccagccaaccaactctctcattttaaaagtgaaggattcatagcacagattacttgcctaagatcatccaggaacgaagacaagaatccaaattcagtgttcttcctagtattaaacattgcccctttcgacaaattttggatttcattcttgttatatttcagtactcttgctgatttattttaggtttaactggtaaagaatgaacatttcagaagtgttaggattagtcagtgtcatcgcttatgtatatgaatcacttgccaaagacactggctctcctcagctgtaaccagcatgtcaaatgtgaagattattgtgtgggatcctttggtttcattgttatgatgtattttataaatgtactagttatatccttgtttatgtatttttgctgatctttcataaagcagaatggtatgtatcggattgttttaatgttatatattggattgtattcgatgttacaaaaccaatattctatggagaatgaaaaaaataaaggactaaattaactggaaaaaaaaaaaaaaaaaaaaaaaaaaaaaaaaaaaaaaaaaaaaaaaaaaaaaaaaaaaaaaaaaaaaaaaaaaaaaaaaaaaaaaaaaaaaaaaaaaaaaaaaaaaaa

SEQ ID NO: 26802 - DNA, 3848 bp, Homo Sapiens
ggcagcttctcaggtcagcctcctccgggcctctccccactctcctctgcccagttctctgtccttatccacaggcccctcagtgggcactggccatacccatgtccaggtgggcacaggcctggtgatatcctggtgagcaagctggggacccaccctccttccctttctggttggcagctccacatctggggcaatgtagagatctgtgcttttggaaggaggggcaatttaaattaagaagtggttaggcatgggtctcgaatcttagcttccccgcgaggtctgggacaagtgaagagaggtttcttttctggacctcagtttctcatctgtaaaatggggtgagtctgggaacctgcaccttggatggctgtcaggggctcagtagaggacctggcacacagtttgtgcttggcaatctggagcaggtgcagctcctttcagagtgacctggattggatcctggggacagcatgtctcagggccggagccagttcttggaggagactctgcgcagggcatggatcactgtggtgcccttttcctgtgcctgtgccttctgactttgcagaatgcaacaacagagacatgggaagaactcctgagctacatggagaatatgcaggtgtccaggggccggagctcagttttttcctctcgtcaactccaccagctggagcagatgctactgaacaccagcttcccaggctacaacctgaccttgcagacacccaccatccagtctctggccttcaagctgagctgtgacttctctggcctctcgctgaccagtgccactctgaagcgggtgccccaggcaggaggtcagcatgcccggggtcagcacgccatgcagttccccgccgagctgacccgggacgcctgcaagacccgccccagggagctgcggctcatctgtatctacttctccaacacccactttttcaaggatgaaaacaactcatctctgctgaataactacgtcctgggggcccagctgagtcatgggcacgtgaacaacctcagggatcctgtgaacatcagcttctggcacaaccaaagcctggaaggctacaccctgacctgtgtcttctggaaggagggagccaggaaacagccctgggggggctggagccctgagggctgtcgtacagagcagccctcccactctcaggtgctctgccgctgcaaccacctcacctactttgctgttctcatgcaactctccccagccctggtccctgcagagttgctggcacctcttacgtacatctccctcgtgggctgcagcatctccatcgtggcctcgctgatcacagtcctgctgcacttccatttcaggaagcagagtgactccttaacacgcatccacatgaacctgcatgcctccgtgctgctcctgaacatcgccttcctgctgagccccgcattcgcaatgtctcctgtgcccgggtcagcatgcacggctctggccgctgccctgcactacgcgctgctcagctgcctcacctggatggccatcgagggcttcaacctctacctcctcctcgggcgtgtctacaacatctacatccgcagatatgtgttcaagcttggtgtgctaggctggggggccccagccctcctggtgctgctttccctctctgtcaagagctcggtatacggaccctgcacaatccccgtcttcgacagctgggagaatggcacaggcttccagaacatgtccatatgctgggtgcggagccccgtggtgcacagtgtcctggtcatgggctacggcggcctcacgtccctcttcaacctggtggtgctggcctgggcgctgtggaccctgcgcaggctgcgggagcgggcggatgcaccaagtgtcagggcctgccatgacactgtcactgtgctgggcctcaccgtgctgctgggaaccacctgggccttggccttcttttcttttggcgtcttcctgctgccccagctgttcctcttcaccatcttaaactcgctctacggtttcttccttttcctgtggttctgctcccagcggtgccgctcagaagcagaggccaaggcacagatagaggccttcagctcctcccaaacaacacagtagtccgggcctcctggcctggaatcctcagcctctctggccgccagtagcctgaggctacggctcctgctagagagggtggcaggcctgctgctggaccccagaggccactgtgaccgccaaggggccttttccacttccacggcctctccaggcactgaggggaaggcattgctctacctctccctgacattttgctccggggcagatccaaccttacctggggcagcaaactttgtcctggtacctgggcccagctcgccagggatgtgggcagagcaccagcctgggcatcaggaagccaagtttcaaggactgtctttgagtctgtctgtatgaccttgggcctgccacttctcacagaccctaggtatccacagctgtgacatgggggcaagcggctttgtttcagcctaacccaggagcttagtaaaaattgcataagaccagggggaagagtgtcagcgtggggtgggaattcccgcggcctccacctgcttgctaggggcaggatctcattcaggctgccctggaagcacctgcttggccctgccaccttcctccaggggagggccagatggcatcctggcttggggcgggtgggacctacccaggctctgagactttactggcctatgcctgaggcctcttttcctttaactccctaaattatgatgactccaagtccaagcccacccttcccaaagattgggaggttccgccgttcccagaggctcctcctgcggtgctcccaagacttccatagaccatctggaccagtagcccatcccgcagttttcttgggggcagaggaaaacgcttctttctcctccagctgaatcagctggatcccagtgtcctggctgtttggtgattgggcaagattgaatttgcccaggtaggcgtgagagtgtgggttttaaattcgaagctcaggccatagtttcagagaatcacccttaccccagaccttcatgagacagtgctcatgaagccagtgcgtttcccagaacgaacactaggcggcaccgttggtccacactcagaggcccttggcgccaagactgcatctagaatcgctcaaacacctgtttgcagaccccatgcaccagctggaggggccgtaactgcaggactgcgcctactgagtgacccatttcctccaggaggaaaggcaagacacgcttacacggccatttgtctcttttcccaatgcggcggtgcactttcgctcttgggggctgcaccccagacatagctggcaccagagcagggtgctcaggtggtgggtgctcagggccctgccccaggccactgggccgttttgatgacctcgaaggtcacaggcagaaaataggagcaggatttcccctggggaaaagttctcctgggacatcttctgctcttctgtacatttctagatgcaaataactccttcaccaggcagtgagtggcgtaggctctggagccaggctgcctgggctccaatgccagctctgccacttgctagctgtgagactgtggacaaaccactcagcctctgtgtgcctcagttttcctatttgtaaaatagaggccatagtggtacctattttgaagactaagtaaaagaattcaaataaagagacttggcacagagtaagtgctcagtaaaaaaaaaaaaaaaaaaaaaaaaaaaaaaaaaaaaaaaaaaaaaaaaaaaaaaaaaaaaaaaaaaaaaaaaaaaaaaaaaaaaaaaaaa

SEQ ID NO: 26803 - DNA, 2251 bp, Homo Sapiens
cacctctgtctgctgccggcagaaagccacaagccatgaaaactgattgagatgagaagaattcatctgggactggcttttgctttaggatggtgttggaagttgctcgttgtcgctaggagcctgctccactgtaagggtgtcgggatctgaagagctatggtgaaacaccactgaagcattgccaaggatggggctggtaagtagcaaaaagccggacaaggaaaagccgatcaaagagaaggacaagggccaatggagccccctgaaggtcagcgcccaagacaaggacgccccgccactgccgcccctggttgtcttcaaccaccttactcctccaccgcccgatgaacacctggatgaagacaagcatttcgtggtggctctgtatgactacaccgctatgaatgatcgggacctgcagatgctgaagggggagaagctacaggtcctgaagggaactggagactggtggctggccaggtcactcgtcacaggaagagaaggctatgtgcccagtaactttgtggcccgagtggagagcctggaaatggaaaggtggttctttagatcacagggtcggaaggaggctgagaggcagcttcttgctccaatcaacaaggccggctcctttcttatcagagagagtgaaaccaacaaaggtgccttctccctgtctgtgaaggatgtcaccacccagggggagctgatcaagcactataagatccgctgcctggatgaagggggctactacatctccccccggatcaccttcccctcgctccaggccctggtgcagcactattctaagaagggggatggtctatgccagaggctgaccctgccctgtgtgcgcccggccccgcagaatccctgggcccaggatgaatgggagatcccccggcagtctctcaggctggtcaggaaactcgggtctggacaattcggcgaagtctggatgggttactacaaaaacaacatgaaggtggccattaagacgctgaaggagggaaccatgtctccagaagccttcctgggtgaggccaacgtgatgaaggctctgcagcacgagcggctggtccgactctacgcagtggtcaccaaggagcccatctacattgtcaccgagtacatggccagaggatgcctgctggatttcctgaagacagatgaagggagcagattgtcactcccaaggctgattgacatgtcggcgcagattgctgaagggatggcatacattgagcgcatgaattccatccaccgcgacctgcgggcggccaacatcctggtgtctgaggccttgtgctgcaaaattgctgattttggcttggctcgaatcatcgacagtgaatacacggcccaagagggggccaagttccccatcaagtggacagccccggaagccatccacttcggggtcttcaccatcaaagcagacgtgtggtcgtttggagtcctcctgatggaagttgtcacttatgggcgggtgccatacccagggatgagcaaccccgaggtcatccgcaacctggagcgcggctaccgcatgccgcgccccgacacctgcccgcccgagctgtaccgcggcgtcatcgccgagtgctggcgcagccggcccgaggagcggcccaccttcgagttcctgcagtcggtgctggaggacttctacacggccaccgagcggcagtacgagctgcagccctagccggccgcgcccgcctgcgccccgtgcccacctctgcgcggacgaccccgacttccgtgccatcccagacgggccgcgaaggcggggtgtcgcctgtgcccttttctcagacccggaatccagtgggcagaggcagcttcgcagggggtccccggacggactccttcaccgactgcacccccgggcgagttacgcggcctctctgtgccgcttcatttgtagagggctgtaacagtgacctcgcacggtcatccggagtactaagccccagtaaggtgttcaggactggtaagcgactgtcatcaagtaaggcccccgtgctgggcaccccccgtgctggccgcgtccccgcctctgcgccctgcgtggaccccgccctgccccgctacagaagccagactgggtcccgcggacgccagcaggggcaaccccagcctaggctgcgctccagcactgcggggcttttctgcaataaagtcacgagcgttcgaaaaaaaaaaaaaaaaaaaaaaaaaaaaaaaaaaaaaaaaaaaaaaaaaaaaa

SEQ ID NO: 26804 - DNA, 1554 bp, Homo Sapiens
attttccagatacggcagacggctttcagagtacaataaacagggaatgagaactatttacatggaagtttctttctcatgatgcggtggagaagcctcggccacttggttctgccagatgttcctggggttactgtaaatgggaaggacaggcagagctaaacaaggtttatcatttaaaagtgcctgtgtgaagtcacttttgctggaaaactgcagcttgggagctttctttgtattcacatcccactcttctgtcaagtacactttaccctgaccttatgagtggatgaagatacctcagttgtctgactttgccaattgcttaatttcagaatttaaaaaggggaaagaaaaacatcctgctaaaatatgaacatctgagtgtcttattttccaacatcgtcaatagctgtgagcgtcagcattaaatattctcccaaggagtgccatgatattgaagtcactttattaataacagctgtatctgcaaaacagtcaagagactcggacgttgaaagccagagatgacactgagcatgcttttattgcggcctaccatctttaagtgggacatattgattgatgagtgattgcctgtccatacactctctcatcatcctgttccttggattggacttcactaagcaatttatcactcaccttcagacttacatgtgggagttttcacaacagtagttttggaatcattagaacttggattgatttcatcatttaacagaaacaaacagcccaaattactttatcaccatggctttgaacgttgccccagtcagagatacaaaatggctgacattagaagtctgcagacagtttcaaagaggaacatgctcacgctctgatgaagaatgcaaatttgctcatccccccaaaagttgtcaggttgaaaatggaagagtaattgcctgctttgattccctaaagggccgttgttcgagagagaactgcaagtatcttcaccctccgacacacttaaaaactcaactagaaattaatggaaggaacaatttgattcagcaaaaaactgcagcagcaatgcttgcccagcagatgcaatttatgtttccaggaacaccacttcatccagtgcccactttccctgtaggtcccgcgatagggacaaatacggctattagctttgctccttacctagcacctgtaacccctggagttgggttggtcccaacggaaattctgcccaccacgcctgttattgttcccggaagtccaccggtcactgtcccgggctcaactgcaactcagaaacttctcaggactgacaaactggaggtatgcagggagttccagcgaggaaactgtgcccggggagagaccgactgccgctttgcacaccccgcagacagcaccatgatcgacacaagtgacaacaccgtaaccgtttgtatggattacataaaggggcgttgcatgagggagaaatgcaaatattttcaccctcctgcacacttgcaggccaaaatcaaagctgcgcagcaccaagccaaccaagctgcggtggccgcccaggcagcc

SEQ ID NO: 26805 - DNA, 3224 bp, Homo Sapiens
ctgtgagcgacctccccggggctcctctggaagcggctccggcaagtatcgagtttgcctgtgcggagctgggggagcctccggctttcctgtttgctttgttaattattttcgtccccagaggaaggcgtacctcctaaatggctctactttgaacctgctgggcaaggaagagattttcaaggaaaccatctaccgtgtgcaagctcctgccggccaaccccagaccccagcacggagccaggcgcctgtgcccgccgaccctcagcatcctcctcagaaaggctggtggcatcaggaagcccctggccagcctccacctgagcccagtgagctcagctttaaggatggagtcaggcagggggtcctcaacccctccaggacccattgctgccctagggatgccagacactgggcctggcagttcctccctagggaagcttcaggcgctccctgttgggcccagagcccactgtggggaccctgtcagcctggctgcagcaggggacggctctccagacataggccccacgggagagctgagtggtagcttaaagatccccaaccgggacagcgggatcgacagtccctcctccagtgtggctggagagaactttccctgcgaggagggcttggaggctggcccaagccccactgtactgggggcgcacgcagagatggccctggacagccaggtcccgaaggtcaccccccaggaggaggcggacagcgacgtgggtgaggaacctgactctgagaacaccccccagaaggctgacaaggatgccggcctggcccagcactctggcccccagaagcttctccacattgcccaggagctcctgcacaccgaggagacctatgtgaagcggctgcacctgctggaccaggttttctgcaccaggctgacggatgcggggatccctccagaagtcatcatgggcatattctctaacatctcctccatccaccgcttccacgggcagttcctgctgccggagctgaagacgcggatcacggaggagtgggacacaaacccacggctcggggacatcctgcagaagctggccccattcctgaagatgtacggcgagtatgtcaagaactttgaccgagccgtagggctggtgagcacgtggacccagcgctccccactgtttaaagacgtcatccacagcatccagaagcaggaggtatgcgggaacctgacgctgcagcaccacatgctggagcccgtgcagagggtcccccggtacgagctgctgctcaaggactatctgaagaggctcccgcaggacgccccagaccggaaggatgcggagaggtccttggagctcatctccacagccgccaaccactccaatgctgccattcggaaagtggagaaaatgcacaagctcttggaggtgtacgagcagctgggtggggaagaagacattgtcaacccggccaatgaactgatcaaggagggccaaatccagaaactgtcagccaagaacggcaccccccaggaccgccacctcttcctgttcaacagcatgatcctttactgtgtgcccaagctgcggctcatgggccagaagttcagcgtccgggagaagatggacatctcaggcctccaggtgcaggatatcgtcaagccaaacacagcacatacattcatcataacgggaagaaaaaggtccctggagctgcagacgcggacagaggaagagaagaaagaatggattcagatcatccaggccaccatcgagaagcacaaacagaacagcgaaaccttcaaggcttttggtggcgccttcagccaggatgaggaccccagcctctctccagacatgcctatcacgagcaccagccctgtggagcctgtggtgaccaccgaaggcagttcgggtgcagcagggctcgagcccagaaaactatcctctaagaccagacgtgacaaggagaagcagagctgtaagagctgtggtgagaccttcaactccatcaccaagaggaggcatcactgcaagctgtgtggggcggtcatctgtgggaagtgctccgagttcaaggccgagaacagccggcagagccgtgtctgcagagattgtttcctgacacagccagtggcccctgagagcacagagaagacacccactgcagacccccagcccagcctgctctgcggccccctgcggctgtcagagagcggtgagacctggagcgaggtgtgggccgccatccccatgtcagatccccaggtgctgcacctgcagggaggcagccaggacggccggctgccccgcaccatccctctccccagctgcaaactgagtgtgccggaccctgaggagaggctggactcggggcatgtgtggaagctgcagtgggccaagcagtcctggtacctgagcgcctcctccgcagagctgcagcagcagtggctggaaaccctaagcactgctgcccatggggacacggcccaggacagcccgggggccctgcagcttcaggtccctatgggcgcagctgctccgtgagctgagtctcccactgccctgcacaccaccacattggacctgtgctgtcctgggaggtggtgttggaggccccatgaagagcgccctggactgctgagggtgggccaacagcccagagctcaggacacttggctttggggggaaggaaactgaggcccagagaggggcaaccactggccaagggtcacccagcaagttttggctaagagcctggcctccagccccagcagtgtggcccagagcaggggccgactgccaaagtaaccatcatccatatgggccgtgtggtgatgctggcccggaaggcagaaagaggcagcatgggcactgccagggacagccacatcctgctggtctgcagcgtggtccaccccgcctctgcccagcctgtctacaccgtgtgagctgaatcgtgacttgcttcccacctcctttctctgtcctctcctgaggttctgcctgcagcccccaggaggtgggcctgccccatcctagctggactcatggttcctaaataaccacgctcagaagctctgctaggacttaccccagccactgagtggcaggcgcatgagatttgtggctgttcctgatgctagtggcacacagtgcttatctgcataaataaacactggccaccaaaaaaaaaaaaaaaaaaaaaaaaaaaaaaaaaaaaaaaaaaaaaaaaaaaaaaaaaaa

SEQ ID NO: 26806 - DNA, 2857 bp, Homo Sapiens
gtgcctgaggttgcagccgagagtgtgcgccagcccgcggcccagccgaagctctttcccgccgcctctccgcgcctcgcccaggttcagctccgcctgaccctccgcttggcacggtcccctgaccctcagtccggcctggtccggccttccagccgccccggggacgatgaacggaggataaatggtgcccaaggcagacagcggcgccttcctgctgctcttcctgctcgtgctcactgtcaccgagccgctgcggccagagctgcggtgcaaccctgggcagtttgcgtgtcgcagcggcaccatccagtgcatccccctcccctggcagtgtgacggctgggcgacttgcgaggatgagagcgacgaagccaactgtccagaagtgaccggggaggtgcgtcctcatcatgggaaggaggctgtggatccgcggcaggggcgggccagaggaggcgacccttcgcacttccacgcggtgaacgtggcgcagcccgttcgcttcagcagtttcctagggaagtgcccgacagggtggcaccactacgaaggcacggccagctgctaccgggtctacctgagcggggagaactactgggatgccgcgcagacctgccagcgcctgaatggctctctcgccaccttctccactgaccaggagctgcgctttgtcctggcccaggaatgggaccagcccgagcggagctttggttggaaggaccagcgcaagttgtgggttggctatcagtatgttatcactggccggaaccgctccttggaaggtcgctgggaggtggcattcaaaggctcttcagaggtgttcctgcccccagaccccatctttgcctcggccatgtctgagaacgacaacgtgttctgtgcccagcttcagtgcttccatttccccaccctgcggcaccacgacctccacagctggcacgccgagagctgctacgagaagtcttcatttctgtgtaaaagaagtcaaacatgtgttgacatcaaggacaacgtggtggatgaagggttctacttcacccctaagggggacgacccatgcctgagctgcacctgccatggaggggagcctgagatgtgtgtggctgctctctgtgagaggccccagggctgccaacagtaccgcaaggaccccaaagagtgctgcaagttcatgtgtctggacccagatggcaacagtctgtttgactccatggccagcgggatgcgcctggtcgtcagctgcatctcctccttcctcatcctgtcactgctgctcttcatggtccaccggctgcgccagcggcgccgggagcgcatcgagtccctgattggagcaaacttgcaccacttcaacctcggccgcaggatccctggctttgattacggcccagacgggtttggcacgggcctcacgccgctgcatctttctgacgacggagagggtgggactttccatttccacgaccctccacctccctacacggcatacaagtacccggacatcggccagcccgacgaccctccgccgccctacgaggcctccatccacccggacagtgtgttctatgaccctgcagacgatgatgcttttgagcctgtggaggtcagcctgccagcccctggggatggtgggagtgaaggtgcattactccggcgcctggagcagcctctgcccactgcgggggcctctctggcagacctggaagactctgccgacagcagcagcgccctgctcgtgccccctgaccctgcccagagcgggagcaccccagctgcagaggcactgccagggggtggccgccacagccgcagctccctcaatactgtggtgtagacggcctggcctgtaccccaacggtctgggagcacctgtctgttgtagaaaacaccggtccctggggagacttgaaaggcccctgtcccagcctggacgccacgcactgccgcacgtcactggcgggctcgcgtgtgtacatagagaccacagcccgccttctgccaaaagaagtgatggcctgcaccgagcttccttgagggcttcagaaacatgcatagctttggatcactgtcttctcctttataaatggcagaagagtgacaaaattcattcagaccgcacatgttagaggcagggaatgaagaaggtactgtgggccatggccacacctgatgcgtttttggtgggcttacttggtgcagtgtgctgtccagagagacctgctgacccagtctgggacaggcacagtgggagctgccacagtgccccttgctggccgccctcaggagggggcctctggaccgtcagtgtggcgtaggcagtgggtctgcttcagggaggcagcctcttgactttgtcacaacggttgcactgaagatggcccccacaagcccagttgtgaatatcaaggtgaccctgcccctggctgggagctcccctggggctctggaacctgaagccctgagaaggagagcttggaaggaggttgagctcttcactgtgtctttccatctgggctctgcagcccagctctgtggcaggaggcctgaccccaccccatcggtccctctcccagcattgctgtgcatggctccctcaggaagaagctctggagtggggccgaggccccagatgctctgctggggtctggggactgagctgcctcctgtctctccactctggagccctgggctcttgcctcctgttgaattgcccctgggcctgcccccggccccatttgtgccataaagggttgcttcattgcaggaggggtggctgaaaccaccatcctgggctgcatctatctccttaaagtccactccttacatcaccgccactactgcagctcagtgccca

SEQ ID NO: 26807 - DNA, 838 bp, Homo Sapiens
ccacgcgtccgatccgttccgccaaggggggaaaggaggagctggagacagattgtaggaccgagcgcgggcaggcgggaggcaacggagctaccagccgctcctctctgctatatgaaatatgggagacgacagaccgtttgtgtgcaatgccccgggctgtggacagagatttacaaatgaggaccacctggcagttcataaacacaagcatgagatgacatgaaatttggcccagcccgaactgactcagtcatcattgcagatcaaacgcctactccaactagattcctgaagaactgtgaggaggtgggactcttcaatgaactagctagctcctttgaacatgaattcaagaaagctgcagatgaggatgagaaaaaggcaagaagcaggactgttgccaaaaaactggtggtattcagacctaggctatttttattgtgctttgggataattttcttaattggttaaaacacaaaatcatgggcttagtagagtaaaaccagtaaaaccagatagtagtcactaatcccagtcagccattcaggtctttaggagttccagatgatggatcagcacaagtctgtcgtcaccgaaaattagtcctcttgttcttacaggggagtattagtttaataatcggttttttaaaaaatatttatattataaatatgttgaagatgttaaaaggtgataaattactcagattttgttggataacatatttgttgccaaattccactcttttctgagctgatcagacttctcagctacactgtttttttgaatcagcaagtcaataaacatttatcaaatttccaaaaaaaaaaaaaaa
